United States Patent Application Publication US 2018/0126003 A1 - sequence listing, part 133

SEQ ID NO: 232710 - DNA, 4872 bp, Artificial Sequence
  derived and/or modified sequence
tgagcccctcctgtggatgtgctgcgggccctgcgcttccccagcctgcctgatggagtgagaagagccaagggcatctgcccagcagatgtggcctacagagtggcccggcctgcccagctgagcgcccccacccggcagctgtttcctgggggcttccccaaggacttcagcctgctgactgtggtgaggaccaggcctggcctgcaggcccccctgctgaccctgtacagcgcccagggcgtgcggcagctgggcctggagctgggccggcctgtgcgcttcctgtatgaggaccagacaggccggccccagccccccagccagcccgtcttccggggcctgagcctggctgatggcaagtggcaccgggtggccgtggccgtgaagggccagagcgtgaccctgattgtggactgcaagaagagggtgacccggcccctgcccaggtctgcccggcctgtgctggacacccatggagtcatcatctttggagcccgcatcctggatgaggaggtgtttgaaggagatgtgcaggagctggccatcgtgcctggggtgcaggccgcctatgagagctgtgagcagaaggagctggagtgtgagggcggccagcgggagcggccccagaaccagcagccccaccgggcccagaggagcccccagcagcagcccagccggctgcaccggccccagaaccaggagccccagagccaggaccccaccccaggagaggaggaggagatcctggagagcagcctgctgccccccctggaggaggccgcccacggcccccggggcctgaagggggagaagggggagcctgctgtgctggagcccggcatgctggtggagggccccccaggccctgagggccctgctggcctgattggccccccaggcatccagggcaaccctggccctgtgggggaccccggggagcggggccccccaggccgggccggcctgcccggcagtgatggagcccctggccccccaggcaccagcctgatgctgcccttccgctttggaagtggcggcggggacaagggccctgtggtggccgcccaggaggcccaggcccaggccatcctgcagcaggcccggctggccctgcggggccccccaggccccatgggctacacaggccggcccggccccctgggccagcccggcagccctggcctgaagggggagagcggggacctgggcccccagggcccccggggcccccagggcctgactggacctcctgggaaggccggcagaagaggccgggccggggctgatggagcccggggcatgcctggggaccccggggtgaagggggaccggggctttgatggcctgcccggcctgcccggggagaagggccacagaggagacacaggagcccagggcctgcccggccccccaggagaagatggagagagaggagatgatggagagatcggcccccggggcctgcccggggagagcggcccccggggcctgctgggccccaagggccccccaggcatccctggccccccaggagtgcggggcatggatggcccccagggccccaagggcagcctgggcccccagggcgagcccggccccccaggccagcagggcaccccaggcacccagggcctgcccggcccccagggcgccatcggcccccacggggagaagggcccccagggcaagccaggcctgcccggcatgcctggcagtgatggccccccaggccaccctgggaaggagggccccccaggcaccaagggcaaccagggccccagcggcccccagggccccctgggctacccaggcccccggggcgtgaagggcgtggatggcatccggggcctgaagggccacaagggggagaagggagaagatggcttccctggcttcaagggggacattggagtgaagggggacagaggagaggtgggcgtgcccggcagcagaggagaagatggccctgagggccccaagggccgcacaggccccactggagaccccggccccccaggcctgatgggagagaagggcaagctgggcgtgcccggcctgcccggctacccaggccggcagggccccaagggcagcctgggcttccctggcttccctggggccagcggggagaagggggcccggggcctgagcggcaagagcggccccagaggagagcggggccccaccggcccccggggccagaggggccccaggggggccaccgggaagagcggggccaagggcaccagcggaggagatggcccccacggccccccaggagagcggggcctgcccggcccccagggccccaacggcttccctggccccaagggccccccaggccccccaggcaaggatggcctgcccggccaccctggccagagaggagaggtgggcttccagggcaagacaggccccccaggccccccaggagtggtgggcccccagggcgccgccggggagaccggccccatgggagagcggggccaccctggccccccaggccccccaggagagcagggcctgcccggcacagctgggaaggagggcaccaagggggaccccggccccccaggggcccctgggaaggatggccctgctggcctgcggggcttccctggagagcggggcctgcccggcacagctgggggccctggcctgaagggaaatgaaggccccagcggccccccaggccctgctggcagccctggagagagaggagctgctggcagcggcggccccatcggccccccaggccggcccggcccccagggccccccaggagctgctggggagaagggcgtgcctggagagaagggccccatcggccccaccggcagagatggagtgcagggccctgtgggcctgcccggccctgctggccccccaggagtggccggagaagatggagacaagggggaggtgggggaccccggccagaagggcaccaagggcaacaagggggagcacggccccccaggccccccaggccccatcggccctgtgggccagcccggggctgctggagcagatggagagcccggggcccggggcccccagggccactttggagccaagggagatgagggcacccggggcttcaacggccccccaggccccatcggcctgcagggcctgcccggccccagcggggagaagggggagactggagatgtgggccccatgggccccccaggccccccaggcccccggggccctgctggccccaacggggctgatggcccccagggccccccaggaggagtgggcaacctgggccccccaggagagaagggggagcccggggagagcggcagccctggcatccagggcgagcccggggtgaagggccccagaggagagcggggggagaagggggagagcggccagcccggggagcccggccccccaggccccaagggccccactggagatgatggccccaagggcaaccctggccctgtgggcttccctggggaccccggccccccaggagagggcggcccccggggccaggatggagccaagggggacagaggagaagatggagagcccggccagcccggcagccctggccccactggagaaaatggccccccaggccccctgggcaagaggggccctgctggcagccctggcagcgagggccggcagggcggcaagggggccaagggggaccccggggccatcggggcccctgggaagacaggccctgtgggccctgctggccctgctgggaagccaggcccagatggcctgcggggcctgcccggctctgtgggccagcagggccggcctggggccaccggccaggccggccccccaggccctgtgggccccccaggcctgcccggcctgcggggagatgctggggccaagggggagaagggccaccctggcctgattggcctcatcggccccccaggagagcagggcgagaagggggaccggggcctgcccggcccccagggcagccctggccagaagggggagatgggcatccctggggccagcggccccatcggccctgggggccccccaggcctgcccggccctgctggccccaagggggccaagggggccactggacctgggggccccaagggggagaagggcgtgcagggccccccaggccaccctggccccccaggagaggtgatccagcccctgcccatccagatgcccaagaagacccggcgctctgtggatggcagccggctgatgcaggaggatgaggccatccccactggaggagcccctggcagccctgggggcctggaggagatcttcggcagcctggacagcctgcgggaggagattgagcagatgagaagacccaccggcacccaggacagccctgcccggacctgccaggacctgaagctgtgccaccctgagctgcctgatggagagtactgggtggaccccaaccagggctgtgccagagatgccttccgggtcttctgcaacttcaccgctggaggagagacctgtgtgaccccaagagatgatgtgacccagttctcctatgtggacagcgagggcagccctgtgggcgtggtgcagctgaccttcctgcggctgctgtctgtgtctgcccaccaggatgtgtcctacccctgcagcggggccgccagagatggccccctgcggctgcggggggccaatgaagatgagctgagccctgagaccagcccctacgtgaaggagttcagagatggctgccagacccagcagggccgcacagtgctggaggtgaggacccctgtgctggagcagctgcctgtgctggatgccagcttcagtgacctgggcgccccaccccggcggggcggcgtgctgctgggccctgtgtgcttcatgggctag

SEQ ID NO: 232711 - DNA, 4968 bp, Artificial Sequence
  derived and/or modified sequence
atggagcgctgcagccgctgccaccggctgctgctgctgctgcccctggtgctgggcctgtctgctgcccctggctgggccggggcccctcctgtggatgtgctgcgggccctgcgcttccccagcctgcctgatggagtgcggcgggccaagggcatctgcccagcagatgtggcctacagagtggcccggcctgcccagctgagcgcccccacccggcagctgtttcctgggggcttccccaaggacttcagcctgctgactgtggtgaggacccggcccggcctgcaggcccccctgctgaccctgtacagcgcccagggcgtgcggcagctgggcctggagctgggccggcctgtgcgcttcctgtatgaggaccagacaggccggccccagccccccagccagcctgtgttccggggcctgagcctggctgatggcaagtggcaccgggtggccgtggccgtgaagggccagagcgtgaccctcatcgtggactgcaagaagagggtgacccggcccctgcccaggtctgcccggcctgtgctggacacccacggcgtcatcatctttggagcccgcatcctggatgaggaggtgtttgaaggagatgtgcaggagctggccatcgtgcctggggtgcaggccgcctatgagagctgtgagcagaaggagctggagtgtgagggcggccagcgggagcggccccagaaccagcagccccaccgggcccagaggagcccccagcagcagcccagccggctgcaccggccccagaaccaggagccccagagccagcccacagagagcctgtactatgactatgagcccccctactatgatgtgatgaccaccggcaccaccccagactaccaggccgcccacggcccccggggcctgaagggggagaagggggagcctgctgtgctggagcccggcatgctggtggagggccccccaggccctgagggccctgctggcctgattggccccccaggcatccagggcaaccctggccctgtgggggaccccggggagcggggccccccaggccgggccggcctgcccggcagtgatggagcccctggccccccaggcaccagcctgatgctgcccttccgctttggaagtggcggcggggacaagggccctgtggtggccgcccaggaggcccaggcccaggccatcctgcagcaggcccggctggccctgcggggccccccaggccccatgggctacacaggccggcccggccccctgggccagcccggcagccctggcctgaagggggagagcggggacctgggcccccagggcccccggggcccccagggcctgactggacctcctgggaaggccggcagaagaggccgggccggggctgatggagcccggggcatgcctggggaccccggggtgaagggggaccggggctttgatggcctgcccggcctgcccggggagaagggccacagaggagacacaggagcccagggcctgcccggccccccaggagaagatggagagagaggagatgatggagagatcggcccccggggcctgcccggggagagcggcccccggggcctgctgggccccaagggccccccaggcatccctggccccccaggagtgcggggcatggatggcccccagggccccaagggcagcctgggcccccagggcgagcccggccccccaggccagcagggcaccccaggcacccagggcctgcccggcccccagggcgccatcggcccccacggggagaagggcccccagggcaagccaggcctgcccggcatgcctggcagtgatggccccccaggccaccctgggaaggagggccccccaggcaccaagggcaaccagggccccagcggcccccagggccccctgggctacccaggcccccggggcgtgaagggcgtggatggcatccggggcctgaagggccacaagggggagaagggagaagatggcttccctggcttcaagggggacattggagtgaagggggacagaggagaggtgggcgtgcccggcagcagaggagaagatggccctgagggccccaagggccgcacaggccccactggagaccccggccccccaggcctgatgggagagaagggcaagctgggcgtgcccggcctgcccggctacccaggccggcagggccccaagggcagcctgggcttccctggcttccctggggccagcggggagaagggggcccggggcctgagcggcaagagcggccccagaggagagcggggccccaccggcccccggggccagaggggccccaggggggccaccgggaagagcggggccaagggcaccagcggaggagatggcccccacggccccccaggagagcggggcctgcccggcccccagggccccaacggcttccctggccccaagggccccctgggccccccaggcaaggatggcctgcccggccaccctggccagagaggagaggtgggcttccagggcaagacaggccccccaggccccccaggagtggtgggcccccagggcgccgccggggagaccggccccatgggagagcggggccaccctggccccccaggccccccaggagagcagggcctgcccggcacagctgggaaggagggcaccaagggggaccccggccccccaggggcccctgggaaggatggccctgctggcctgcggggcttccctggagagcggggcctgcccggcacagctgggggccctggcctgaagggaaatgaaggccccagcggccccccaggccctgctggcagccctggagagagaggagctgctggcagcggcggccccatcggccccccaggccggcccggcccccagggccccccaggagctgctggggagaagggcgtgcctggagagaagggccccatcggccccaccggcagagatggagtgcagggccctgtgggcctgcccggccctgctggccccccaggagtggccggagaagatggagacaagggggaggtgggggaccccggccagaagggcaccaagggcaacaagggggagcacggccccccaggccccccaggccccatcggccctgtgggccagcccggggctgctggagcagatggagagcccggggcccggggcccccagggccactttggagccaagggagatgagggcacccggggcttcaacggccccccaggccccatcggcctgcagggcctgcccggccccagcggggagaagggggagactggagatgtgggccccatgggccccccaggccccccaggcccccggggccctgctggccccaacggggctgatggcccccagggccccccaggaggagtgggcaacctgggccccccaggagagaagggggagcccggggagagcggcagccctggcatccagggcgagcccggggtgaagggccccagaggagagcggggggagaagggggagagcggccagcccggggagcccggccccccaggccccaagggccccactggagatgatggccccaagggcaaccctggccctgtgggcttccctggggaccccggccccccaggagagggcggcccccggggccaggatggagccaagggggacagaggagaagatggagagcccggccagcccggcagccctggccccactggagaaaatggccccccaggccccctgggcaagaggggccctgctggcagccctggcagcgagggccggcagggcggcaagggggccaagggggaccccggggccatcggggcccctgggaagacaggccctgtgggccctgctggccctgctgggaagccaggcccagatggcctgcggggcctgcccggctctgtgggccagcagggccggcctggggccaccggccaggccggccccccaggccctgtgggccccccaggcctgcccggcctgcggggagatgctggggccaagggggagaagggccaccctggcctgattggcctcatcggccccccaggagagcagggcgagaagggggaccggggcctgcccggcccccagggcagccctggccagaagggggagatgggcatccctggggccagcggccccatcggccctgggggccccccaggcctgcccggccctgctggccccaagggggccaagggggccactggacctgggggccccaagggggagaagggcgtgcagggccccccaggccaccctggccccccaggagaggtgatccagcccctgcccatccagatgcccaagaagacccggcgctctgtggatggcagccggctgatgcaggaggatgaggccatccccactggaggagcccctggcagccctgggggcctggaggagatcttcggcagcctggacagcctgcgggaggagattgagcagatgagaagacccaccggcacccaggacagccctgcccggacctgccaggacctgaagctgtgccaccctgagctgcctgatggagagtactgggtggaccccaaccagggctgtgccagagatgccttccgggtcttctgcaacttcaccgctggaggagagacctgtgtgaccccaagagatgatgtgacccagttctcctatgtggacagcgagggcagccctgtgggcgtggtgcagctgaccttcctgcggctgctgtctgtgtctgcccaccaggatgtgtcctacccctgcagcggggccgccagagatggccccctgcggctgcggggggccaatgaagatgagctgagccctgagaccagcccctacgtgaaggagttcagagatggctgccagacccagcagggccgcacagtgctggaggtgaggacccctgtgctggagcagctgcctgtgctggatgccagcttcagtgacctgggcgccccaccccggcggggcggcgtgctgctgggccctgtgtgcttcatgggctag

SEQ ID NO: 232712 - DNA, 4968 bp, Artificial Sequence
  derived and/or modified sequence
atggagcgctgcagccgctgccaccggctgctgctgctgctgcccctggtgctgggcctgtctgctgcccctggctgggccggggcccctcctgtggatgtgctgcgggccctgcgcttccccagcctgcctgatggagtgcggcgggccaagggcatctgcccagcagatgtggcctacagagtggcccggcctgcccagctgagcgcccccacccggcagctgtttcctgggggcttccccaaggacttcagcctgctgactgtggtgaggacccggcccggcctgcaggcccccctgctgaccctgtacagcgcccagggcgtgcggcagctgggcctggagctgggccggcctgtgcgcttcctgtatgaggaccagacaggccggccccagccccccagccagcctgtgttccggggcctgagcctggctgatggcaagtggcaccgggtggccgtggccgtgaagggccagagcgtgaccctcatcgtggactgcaagaagagggtgacccggcccctgcccaggtctgcccggcctgtgctggacacccacggcgtcatcatctttggagcccgcatcctggatgaggaggtgtttgaaggagatgtgcaggagctggccatcgtgcctggggtgcaggccgcctatgagagctgtgagcagaaggagctggagtgtgagggcggccagcgggagcggccccagaaccagcagccccaccgggcccagaggagcccccagcagcagcccagccggctgcaccggccccagaaccaggagccccagagccagcccacagagagcctgtactatgactacaagccaccctactatgatgtgatgaccaccggcaccaccccagactaccaggccgcccacggcccccggggcctgaagggggagaagggggagcctgctgtgctggagcccggcatgctggtggagggccccccaggccctgagggccctgctggcctgattggccccccaggcatccagggcaaccctggccctgtgggggaccccggggagcggggccccccaggccgggccggcctgcccggcagtgatggagcccctggccccccaggcaccagcctgatgctgcccttccgctttggaagtggcggcggggacaagggccctgtggtggccgcccaggaggcccaggcccaggccatcctgcagcaggcccggctggccctgcggggccccccaggccccatgggctacacaggccggcccggccccctgggccagcccggcagccctggcctgaagggggagagcggggacctgggcccccagggcccccggggcccccagggcctgactggacctcctgggaaggccggcagaagaggccgggccggggctgatggagcccggggcatgcctggggaccccggggtgaagggggaccggggctttgatggcctgcccggcctgcccggggagaagggccacagaggagacacaggagcccagggcctgcccggccccccaggagaagatggagagagaggagatgatggagagatcggcccccggggcctgcccggggagagcggcccccggggcctgctgggccccaagggccccccaggcatccctggccccccaggagtgcggggcatggatggcccccagggccccaagggcagcctgggcccccagggcgagcccggccccccaggccagcagggcaccccaggcacccagggcctgcccggcccccagggcgccatcggcccccacggggagaagggcccccagggcaagccaggcctgcccggcatgcctggcagtgatggccccccaggccaccctgggaaggagggccccccaggcaccaagggcaaccagggccccagcggcccccagggccccctgggctacccaggcccccggggcgtgaagggcgtggatggcatccggggcctgaagggccacaagggggagaagggagaagatggcttccctggcttcaagggggacattggagtgaagggggacagaggagaggtgggcgtgcccggcagcagaggagaagatggccctgagggccccaagggccgcacaggccccactggagaccccggccccccaggcctgatgggagagaagggcaagctgggcgtgcccggcctgcccggctacccaggccggcagggccccaagggcagcctgggcttccctggcttccctggggccagcggggagaagggggcccggggcctgagcggcaagagcggccccagaggagagcggggccccaccggcccccggggccagaggggccccaggggggccaccgggaagagcggggccaagggcaccagcggaggagatggcccccacggccccccaggagagcggggcctgcccggcccccagggccccaacggcttccctggccccaagggccccccaggccccccaggcaaggatggcctgcccggccaccctggccagagaggagaggtgggcttccagggcaagacaggccccccaggccccccaggagtggtgggcccccagggcgccgccggggagaccggccccatgggagagcggggccaccctggccccccaggccccccaggagagcagggcctgcccggcacagctgggaaggagggcaccaagggggaccccggccccccaggggcccctgggaaggatggccctgctggcctgcggggcttccctggagagcggggcctgcccggcacagctgggggccctggcctgaagggaaatgaaggccccagcggccccccaggccctgctggcagccctggagagagaggagctgctggcagcggcggccccatcggccccccaggccggcccggcccccagggccccccaggagctgctggggagaagggcgtgcctggagagaagggccccatcggccccaccggcagagatggagtgcagggccctgtgggcctgcccggccctgctggccccccaggagtggccggagaagatggagacaagggggaggtgggggaccccggccagaagggcaccaagggcaacaagggggagcacggccccccaggccccccaggccccatcggccctgtgggccagcccggggctgctggagcagatggagagcccggggcccggggcccccagggccactttggagccaagggagatgagggcacccggggcttcaacggccccccaggccccatcggcctgcagggcctgcccggccccagcggggagaagggggagactggagatgtgggccccatgggccccccaggccccccaggcccccggggccctgctggccccaacggggctgatggcccccagggccccccaggaggagtgggcaacctgggccccccaggagagaagggggagcccggggagagcggcagccctggcatccagggcgagcccggggtgaagggccccagaggagagcggggggagaagggggagagcggccagcccggggagcccggccccccaggccccaagggccccactggagatgatggccccaagggcaaccctggccctgtgggcttccctggggaccccggccccccaggagagggcggcccccggggccaggatggagccaagggggacagaggagaagatggagagcccggccagcccggcagccctggccccactggagaaaatggccccccaggccccctgggcaagaggggccctgctggcagccctggcagcgagggccggcagggcggcaagggggccaagggggaccccggggccatcggggcccctgggaagacaggccctgtgggccctgctggccctgctgggaagccaggcccagatggcctgcggggcctgcccggctctgtgggccagcagggccggcctggggccaccggccaggccggccccccaggccctgtgggccccccaggcctgcccggcctgcggggagatgctggggccaagggggagaagggccaccctggcctgattggcctcatcggccccccaggagagcagggcgagaagggggaccggggcctgcccggcccccagggcagccctggccagaagggggagatgggcatccctggggccagcggccccatcggccctgggggccccccaggcctgcccggccctgctggccccaagggggccaagggggccactggacctgggggccccaagggggagaagggcgtgcagggccccccaggccaccctggccccccaggagaggtgatccagcccctgcccatccagatgcccaagaagacccggcgctctgtggatggcagccggctgatgcaggaggatgaggccatccccactggaggagcccctggcagccctgggggcctggaggagatcttcggcagcctggacagcctgcgggaggagattgagcagatgagaagacccaccggcacccaggacagccctgcccggacctgccaggacctgaagctgtgccaccctgagctgcctgatggagagtactgggtggaccccaaccagggctgtgccagagatgccttccgggtcttctgcaacttcaccgctggaggagagacctgtgtgaccccaagagatgatgtgacccagttctcctatgtggacagcgagggcagccctgtgggcgtggtgcagctgaccttcctgcggctgctgtctgtgtctgcccaccaggatgtgtcctacccctgcagcggggccgccagagatggccccctgcggctgcggggggccaatgaagatgagctgagccctgagaccagcccctacgtgaaggagttcagagatggctgccagacccagcagggccgcacagtgctggaggtgaggacccctgtgctggagcagctgcctgtgctggatgccagcttcagtgacctgggcgccccaccccggcggggcggcgtgctgctgggccctgtgtgcttcatgggctag

SEQ ID NO: 232713 - DNA, 5031 bp, Artificial Sequence
  derived and/or modified sequence
atggagcgctgcagccgctgccaccggctgctgctgctgctgcccctggtgctgggcctgtctgctgcccctggctgggccggggcccctcctgtggatgtgctgcgggccctgcgcttccccagcctgcctgatggagtgcggcgggccaagggcatctgcccagcagatgtggcctacagagtggcccggcctgcccagctgagcgcccccacccggcagctgtttcctgggggcttccccaaggacttcagcctgctgactgtggtgaggacccggcccggcctgcaggcccccctgctgaccctgtacagcgcccagggcgtgcggcagctgggcctggagctgggcccccctgtgcgcttcctgtatgaggaccagacaggccggccccagccccccagccagcctgtgttccggggcctgagcctggctgatggcaagtggcaccgggtggccgtggccgtgaagggccagagcgtgaccctcatcgtggactgcaagaagagggtgacccggcccctgcccaggtctgcccggcctgtgctggacacccacggcgtcatcatctttggagcccgcatcctggatgaggaggtgtttgaaggagatgtgcaggagctggccatcgtgcctggggtgcaggccgcctatgagagctgtgagcagaaggagctggagtgtgagggcggccagcgggagcggccccagaaccagcagccccaccgggcccagaggagcccccagcagcagcccagccggctgcaccggccccagaaccaggagccccagagccagcccacagagagcctgtactatgactacaagccaccctactatgatgtgatgaccaccggcaccaccccagactaccaggaccccaccccaggagaggaggaggagatcctggagagcagcctgctgccccccctggaggaggccgcccacggcccccggggcctgaagggggagaagggggagcctgctgtgctggagcccggcatgctggtggagggccccccaggccctgagggccctgctggcctcatcggccccccaggcatccagggcaaccctggccctgtgggggaccctggagagcggggccccccaggccgggccggcctgcccggcagtgatggagcccctggccccccaggcaccagcctgatgctgcccttccgcttcggcagcggcggcggggacaagggccctgtggtggccgcccaggaggcccaggcccaggccatcctgcagcaggcccggctggccctgcggggccccccaggccccatgggctacacaggccggcccggccccctgggccagcccggcagccctggcctgaagggggagagcggggacctgggcccccagggcccccggggcccccagggcctgaccggccccccaggcaaggccggccggcggggccgggccggggctgatggagcccggggcatgcctggggaccccggggtgaagggggaccggggctttgatggcctgcccggcctgcctggagagaagggccacagaggagacaccggggcccagggcctgcccggccccccaggagaagatggagagagaggagatgatggagaaattggcccccggggcctgcctggagagagcggcccccggggcctgctgggccccaagggccccccaggcatccctggccccccaggagtgcggggcatggatggcccccagggccccaagggcagcctgggcccccagggcgagcccggccccccaggccagcagggcaccccaggcacccagggcctgcccggcccccagggcgccatcggcccccatggagagaagggcccccagggcaagccaggcctgcccggcatgcctggcagtgatggccccccaggccaccctgggaaggagggccccccaggcaccaagggcaaccagggccccagcggcccccagggccccctgggctacccaggcccccggggcgtgaagggcgtggatggcatccggggcctgaagggccacaagggggagaagggggaggatggcttccctggcttcaagggggacatcggcgtgaagggggacagaggagaggtgggcgtgcccggcagcagaggagaagatggccctgagggccccaagggccgcacaggccccaccggggaccccggccccccaggcctgatgggagagaagggcaagctgggcgtgcccggcctgcccggctacccaggccggcagggccccaagggcagcctgggcttccctggcttccctggggccagcggggagaagggggcccggggcctgagcggcaagagcggccccagaggagagcggggccccaccggcccccggggccagaggggccccaggggggccaccgggaagagcggggccaagggcaccagcggaggagatggcccccacggccccccaggagagcggggcctgcccggcccccagggccccaacggcttccctggccccaagggccccccaggccccccaggcaaggatggcctgcccggccaccctggccagagaggagaggtgggcttccagggcaagacaggccccccaggccccccaggagtggtgggcccccagggcgctgctggggagaccggccccatgggagagcggggccaccctggccccccaggccccccaggagagcagggcctgcctggaacagctgggaaggagggcaccaagggggaccccggccccccaggggcccctgggaaggatggccctgctggcctgcggggcttccctggagagcggggcctgcctggaacagctgggggccctggcctgaagggaaatgaaggccccagcggccccccaggccctgctggcagccctggagagagaggagctgctggcagcggcggccccatcggccccccaggccggcccggcccccagggccccccaggagctgctggggagaagggcgtgcctggagagaagggccccatcggccccaccggcagagatggagtgcagggccctgtgggcctgcccggccctgctggccccccaggagtggccggggaggatggagacaagggggaggtgggggaccccggccagaagggcaccaagggcaacaagggggagcacggccccccaggccccccaggccccatcggccctgtgggccagcctggagctgctggagcagatggagagcccggggcccggggcccccagggccactttggagccaagggagatgagggcacccggggcttcaatggacctcctggccccatcggcctgcagggcctgcccggccccagcggggagaagggggagactggagatgtgggccccatgggccccccaggccccccaggcccccggggccctgctggccccaatggagcagatggcccccagggccccccaggcggcgtgggcaacctgggccccccaggagagaagggggagcctggagagagcggcagccctggcatccagggcgagcccggggtgaagggccccagaggagagcggggggagaagggggagagcggccagcctggagagcccggccccccaggccccaagggccccactggagatgatggccccaagggcaaccctggccctgtgggcttccctggggaccccggccccccaggagagggcggcccccggggccaggatggagccaagggggacagaggagaagatggagagcccggccagcccggcagccctggccccaccggggagaatggacctcctggccccctgggcaagaggggccctgctggcagccctggcagcgagggccggcagggcggcaaaggagccaagggggaccccggggccatcggggcccctgggaagacaggccctgtgggccctgctggccctgctgggaagccaggcccagatggcctgcggggcctgcccggctctgtgggccagcagggccggcctggggccaccggccaggccggccccccaggccctgtgggccccccaggcctgcccggcctgcggggagatgctggggccaagggggagaagggccaccctggcctcatcggcctgattggccccccaggagagcagggcgagaagggggaccggggcctgcccggcccccagggcagccctggccagaagggggagatgggcatccctggggccagcggccccatcggccctgggggccccccaggcctgcccggccctgctggccccaagggggccaagggggccaccggccctgggggccccaagggggagaagggcgtgcagggccccccaggccaccctggccccccaggagaggtgatccagcccctgcccatccagatgcccaagaagaccaggagatctgtggatggcagccggctgatgcaggaggatgaggccatccccaccggcggggcccctggcagccctgggggcctggaggagatcttcggcagcctggacagcctgcgggaggagattgagcagatgaggcggcccaccggcacccaggacagccctgcccggacctgccaggacctgaagctgtgccaccctgagctgcctgatggagagtactgggtggaccccaaccagggctgtgccagagatgccttccgggtcttctgcaacttcaccgctggaggagagacctgtgtgaccccaagagatgatgtgacccagttctcctatgtggacagcgagggcagccctgtgggcgtggtgcagctgaccttcctgcggctgctgtctgtgtctgcccaccaggatgtgtcctacccctgcagcggggccgccagagatggccccctgcggctgcggggggccaatgaagatgagctgagccctgagaccagcccctacgtgaaggagttcagagatggctgccagacccagcagggccgcacagtgctggaggtgaggacccctgtgctggagcagctgcctgtgctggatgccagcttcagtgacctgggcgcccccccaagaagaggaggagtgctgctgggccctgtgtgcttcatgggctag

SEQ ID NO: 232714 - DNA, 5031 bp, Artificial Sequence
  derived and/or modified sequence
atggagcgctgcagccgctgccaccggctgctgctgctgctgcccctggtgctgggcctgtctgctgcccctggctgggccggggcccctcctgtggatgtgctgcgggccctgcgcttccccagcctgcctgatggagtgcggcgggccaagggcatctgcccagcagatgtggcctacagagtggcccggcctgcccagctgagcgcccccacccggcagctgtttcctgggggcttccccaaggacttcagcctgctgactgtggtgaggacccggcccggcctgcaggcccccctgctgaccctgtacagcgcccagggcgtgcggcagctgggcctggagctgggccggcctgtgcgcttcctgtatgaggaccagacaggccggccccagccccccagccagcctgtgttccggggcctgagcctggctgatggcaagtggcaccgggtggccgtggccgtgaagggccagagcgtgaccctcatcgtggactgcaagaagagggtgacccggcccctgcccaggtctgcccggcctgtgctggacacccacggcgtcatcatctttggagcccgcatcctggatgaggaggtgtttgaaggagatgtgcaggagctggccatcgtgcctggggtgcaggccgcctatgagagctgtgagcagaaggagctggagtgtgagggcggccagcgggagcggccccagaaccagcagccccaccgggcccagaggagcccccagcagcagcccagccggctgcaccggccccagaaccaggagccccagagccagcccacagagagcctgtactatgactacaagccaccctactatgatgtgatgaccaccggcaccaccccagactaccaggaccccaccccaggagaggaggaggagatcctggagagcagcctgctgccccccctggaggaggccgcccacggcccccggggcctgaagggggagaagggggagcctgctgtgctggagcccggcatgctggtggagggccccccaggccctgagggccctgctggcctcatcggccccccaggcatccagggcaaccctggccctgtgggggaccctggagagcggggccccccaggccgggccggcctgcccggcagtgatggagcccctggccccccaggcaccagcctgatgctgcccttccgcttcggcagcggcggcggggacaagggccctgtggtggccgcccaggaggcccaggcccaggccatcctgcagcaggcccggctggccctgcggggccccccaggccccatgggctacacaggccggcccggccccctgggccagcccggcagccctggcctgaagggggagagcggggacctgggcccccagggcccccggggcccccagggcctgaccggccccccaggcaaggccggccggcggggccgggccggggctgatggagcccggggcatgcctggggaccccggggtgaagggggaccggggctttgatggcctgcccggcctgcctggagagaagggccacagaggagacaccggggcccagggcctgcccggccccccaggagaagatggagagagaggagatgatggagaaattggcccccggggcctgcctggagagagcggcccccggggcctgctgggccccaagggccccccaggcatccctggccccccaggagtgcggggcatggatggcccccagggccccaagggcagcctgggcccccagggcgagcccggccccccaggccagcagggcaccccaggcacccagggcctgcccggcccccagggcgccatcggcccccatggagagaagggcccccagggcaagccaggcctgcccggcatgcctggcagtgatggccccccaggccaccctgggaaggagggccccccaggcaccaagggcaaccagggccccagcggcccccagggccccctgggctacccaggcccccggggcgtgaagggcgtggatggcatccggggcctgaagggccacaagggggagaagggggaggatggcttccctggcttcaagggggacatcggcgtgaagggggacagaggagaggtgggcgtgcccggcagcagaggagaagatggccctgagggccccaagggccgcacaggccccaccggggaccccggccccccaggcctgatgggagagaagggcaagctgggcgtgcccggcctgcccggctacccaggccggcagggccccaagggcagcctgggcttccctggcttccctggggccagcggggagaagggggcccggggcctgagcggcaagagcggccccagaggagagcggggccccaccggcccccggggccagaggggccccaggggggccaccgggaagagcggggccaagggcaccagcggaggagatggcccccacggccccccaggagagcggggcctgcccggcccccagggccccaacggcttccctggccccaagggccccccaggccccccaggcaaggatggcctgcccggccaccctggccagagaggagaggtgggcttccagggcaagacaggccccccaggccccccaggagtggtgggcccccagggcgctgctggggagaccggccccatgggagagcggggccaccctggccccccaggccccccaggagagcagggcctgcctggaacagctgggaaggagggcaccaagggggaccccggccccccaggggcccctgggaaggatggccctgctggcctgcggggcttccctggagagcggggcctgcctggaacagctgggggccctggcctgaagggaaatgaaggccccagcggccccccaggccctgctggcagccctggagagagaggagctgctggcagcggcggccccatcggccccccaggccggcccggcccccagggccccccaggagctgctggggagaagggcgtgcctggagagaagggccccatcggccccaccggcagagatggagtgcagggccctgtgggcctgcccggccctgctggccccccaggagtggccggggaggatggagacaagggggaggtgggggaccccggccagaagggcaccaagggcaacaagggggagcacggccccccaggccccccaggccccatcggccctgtgggccagcctggagctgctggagcagatggagagcccggggcccggggcccccagggccactttggagccaagggagatgagggcacccggggcttcaatggacctcctggccccatcggcctgcagggcctgcccggccccagcggggagaagggggagactggagatgtgggccccatgggccccccaggccccccaggcccccggggccctgctggccccaatggagcagatggcccccagggccccccaggcggcgtgggcaacctgggccccccaggagagaagggggagcctggagagagcggcagccctggcatccagggcgagcccggggtgaagggccccagaggagagcggggggagaagggggagagcggccagcctggagagcccggccccccaggccccaagggccccactggagatgatggccccaagggcaaccctggccctgtgggcttccctggggaccccggccccccaggagagggcggcccccggggccaggatggagccaagggggacagaggagaagatggagagcccggccagcccggcagccctggccccaccggggagaatggacctcctggccccctgggcaagaggggccctgctggcagccctggcagcgagggccggcagggcggcaaaggagccaagggggaccccggggccatcggggcccctgggaagacaggccctgtgggccctgctggccctgctgggaagccaggcccagatggcctgcggggcctgcccggctctgtgggccagcagggccggcctggggccaccggccaggccggccccccaggccctgtgggccccccaggcctgcccggcctgcggggagatgctggggccaagggggagaagggccaccctggcctcatcggcctgattggccccccaggagagcagggcgagaagggggaccggggcctgcccggcccccagggcagccctggccagaagggggagatgggcatccctggggccagcggccccatcggccctgggggccccccaggcctgcccggccctgctggccccaagggggccaagggggccaccggccctgggggccccaagggggagaagggcgtgcagggccccccaggccaccctggccccccaggagaggtgatccagcccctgcccatccagatgcccaagaagaccaggagatctgtggatggcagccggctgatgcaggaggatgaggccatccccaccggcggggcccctggcagccctgggggcctggaggagatcttcggcagcctggacagcctgcgggaggagattgagcagatgaggcggcccaccggcacccaggacagccctgcccggacctgccaggacctgaagctgtgccaccctgagctgcctgatggagagtactgggtggaccccaaccagggctgtgccagagatgccttccgggtcttctgcaacttcaccgctggaggagagacctgtgtgaccccaagagatgatgtgacccagttctcctatgtggacagcgagggcagccctgtgggcgtggtgcagctgaccttcctgcggctgctgtctgtgtctgcccaccaggatgtgtcctacccctgcagcggggccgccagagatggccccctgcggctgcggggggccaatgaagatgagctgagccctgagaccagcccctacgtgaaggagttcagagatggctgccagacccagcagggccgcacagtgctggaggtgaggacccctgtgctggagcagctgcctgtgctggatgccagcttcagtgacctgggcgcccccccaagaagaggaggagtgctgctgggccctgtgtgcttcatgggctag

SEQ ID NO: 232715 - DNA, 5031 bp, Artificial Sequence
  derived and/or modified sequence
atggagcgctgcagccgctgccaccggctgctgctgctgctgcccctggtgctgggcctgtctgctgcccctggctgggccggggcccctcctgtggatgtgctgcgggccctgcgcttccccagcctgcctgatggagtgcggcgggccaagggcatctgcccagcagatgtggcctacagagtggcccggcctgcccagctgagcgcccccacccggcagctgtttcctgggggcttccccaaggacttcagcctgctgactgtggtgaggacccggcccggcctgcaggcccccctgctgaccctgtacagcgcccagggcgtgcggcagctgggcctggagctgggccggcctgtgcgcttcctgtatgaggaccagacaggccggccccagccccccagccagcctgtgttccggggcctgagcctggctgatggcaagtggcaccgggtggccgtggccgtgaagggccagagcgtgaccctcatcgtggactgcaagaagagggtgacccggcccctgcccaggtctgcccggcctgtgctggacacccacggcgtcatcatctttggagcccgcatcctggatgaggaggtgtttgaaggagatgtgcaggagctggccatcgtgcctggggtgcaggccgcctatgagagctgtgagcagaaggagctggagtgtgagggcggccagcgggagcggccccagaaccagcagccccaccgggcccagaggagcccccagcagcagcccagccggctgcaccggccccagaaccaggagccccagagccagcccacagagagcctgtactatgactatgagcccccctactatgatgtgatgaccaccggcaccaccccagactaccaggaccccaccccaggagaggaggaggagatcctggagagcagcctgctgccccccctggaggaggccgcccacggcccccggggcctgaagggggagaagggggagcctgctgtgctggagcccggcatgctggtggagggccccccaggccctgagggccctgctggcctcatcggccccccaggcatccagggcaaccctggccctgtgggggaccctggagagcggggccccccaggccgggccggcctgcccggcagtgatggagcccctggccccccaggcaccagcctgatgctgcccttccgcttcggcagcggcggcggggacaagggccctgtggtggccgcccaggaggcccaggcccaggccatcctgcagcaggcccggctggccctgcggggccccccaggccccatgggctacacaggccggcccggccccctgggccagcccggcagccctggcctgaagggggagagcggggacctgggcccccagggcccccggggcccccagggcctgaccggccccccaggcaaggccggccggcggggccgggccggggctgatggagcccggggcatgcctggggaccccggggtgaagggggaccggggctttgatggcctgcccggcctgcctggagagaagggccacagaggagacaccggggcccagggcctgcccggccccccaggagaagatggagagagaggagatgatggagaaattggcccccggggcctgcctggagagagcggcccccggggcctgctgggccccaagggccccccaggcatccctggccccccaggagtgcggggcatggatggcccccagggccccaagggcagcctgggcccccagggcgagcccggccccccaggccagcagggcaccccaggcacccagggcctgcccggcccccagggcgccatcggcccccatggagagaagggcccccagggcaagccaggcctgcccggcatgcctggcagtgatggccccccaggccaccctgggaaggagggccccccaggcaccaagggcaaccagggccccagcggcccccagggccccctgggctacccaggcccccggggcgtgaagggcgtggatggcatccggggcctgaagggccacaagggggagaagggggaggatggcttccctggcttcaagggggacatcggcgtgaagggggacagaggagaggtgggcgtgcccggcagcagaggagaagatggccctgagggccccaagggccgcacaggccccaccggggaccccggccccccaggcctgatgggagagaagggcaagctgggcgtgcccggcctgcccggctacccaggccggcagggccccaagggcagcctgggcttccctggcttccctggggccagcggggagaagggggcccggggcctgagcggcaagagcggccccagaggagagcggggccccaccggcccccggggccagaggggccccaggggggccaccgggaagagcggggccaagggcaccagcggaggagatggcccccacggccccccaggagagcggggcctgcccggcccccagggccccaacggcttccctggccccaagggccccctgggccccccaggcaaggatggcctgcccggccaccctggccagagaggagaggtgggcttccagggcaagacaggccccccaggccccccaggagtggtgggcccccagggcgctgctggggagaccggccccatgggagagcggggccaccctggccccccaggccccccaggagagcagggcctgcctggaacagctgggaaggagggcaccaagggggaccccggccccccaggggcccctgggaaggatggccctgctggcctgcggggcttccctggagagcggggcctgcctggaacagctgggggccctggcctgaagggaaatgaaggccccagcggccccccaggccctgctggcagccctggagagagaggagctgctggcagcggcggccccatcggccccccaggccggcccggcccccagggccccccaggagctgctggggagaagggcgtgcctggagagaagggccccatcggccccaccggcagagatggagtgcagggccctgtgggcctgcccggccctgctggccccccaggagtggccggggaggatggagacaagggggaggtgggggaccccggccagaagggcaccaagggcaacaagggggagcacggccccccaggccccccaggccccatcggccctgtgggccagcctggagctgctggagcagatggagagcccggggcccggggcccccagggccactttggagccaagggagatgagggcacccggggcttcaatggacctcctggccccatcggcctgcagggcctgcccggccccagcggggagaagggggagactggagatgtgggccccatgggccccccaggccccccaggcccccggggccctgctggccccaatggagcagatggcccccagggccccccaggcggcgtgggcaacctgggccccccaggagagaagggggagcctggagagagcggcagccctggcatccagggcgagcccggggtgaagggccccagaggagagcggggggagaagggggagagcggccagcctggagagcccggccccccaggccccaagggccccactggagatgatggccccaagggcaaccctggccctgtgggcttccctggggaccccggccccccaggagagggcggcccccggggccaggatggagccaagggggacagaggagaagatggagagcccggccagcccggcagccctggccccaccggggagaatggacctcctggccccctgggcaagaggggccctgctggcagccctggcagcgagggccggcagggcggcaaaggagccaagggggaccccggggccatcggggcccctgggaagacaggccctgtgggccctgctggccctgctgggaagccaggcccagatggcctgcggggcctgcccggctctgtgggccagcagggccggcctggggccaccggccaggccggccccccaggccctgtgggccccccaggcctgcccggcctgcggggagatgctggggccaagggggagaagggccaccctggcctcatcggcctgattggccccccaggagagcagggcgagaagggggaccggggcctgcccggcccccagggcagccctggccagaagggggagatgggcatccctggggccagcggccccatcggccctgggggccccccaggcctgcccggccctgctggccccaagggggccaagggggccaccggccctgggggccccaagggggagaagggcgtgcagggccccccaggccaccctggccccccaggagaggtgatccagcccctgcccatccagatgcccaagaagaccaggagatctgtggatggcagccggctgatgcaggaggatgaggccatccccaccggcggggcccctggcagccctgggggcctggaggagatcttcggcagcctggacagcctgcgggaggagattgagcagatgaggcggcccaccggcacccaggacagccctgcccggacctgccaggacctgaagctgtgccaccctgagctgcctgatggagagtactgggtggaccccaaccagggctgtgccagagatgccttccgggtcttctgcaacttcaccgctggaggagagacctgtgtgaccccaagagatgatgtgacccagttctcctatgtggacagcgagggcagccctgtgggcgtggtgcagctgaccttcctgcggctgctgtctgtgtctgcccaccaggatgtgtcctacccctgcagcggggccgccagagatggccccctgcggctgcggggggccaatgaagatgagctgagccctgagaccagcccctacgtgaaggagttcagagatggctgccagacccagcagggccgcacagtgctggaggtgaggacccctgtgctggagcagctgcctgtgctggatgccagcttcagtgacctgggcgcccccccaagaagaggaggagtgctgctgggccctgtgtgcttcatgggctag

SEQ ID NO: 232716 - DNA, 4968 bp, Artificial Sequence
  derived and/or modified sequence
atggagcgctgcagccgctgccaccggctgctgctgctgctgcccctggtgctgggcctgtctgctgcccctggctgggccggggcccctcctgtggatgtgctgcgggccctgcgcttccccagcctgcctgatggagtgcggcgggccaagggcatctgcccagcagatgtggcctacagagtggcccggcctgcccagctgagcgcccccacccggcagctgtttcctgggggcttccccaaggacttcagcctgctgactgtggtgaggacccggcccggcctgcaggcccccctgctgaccctgtacagcgcccagggcgtgcggcagctgggcctggagctgggcccccctgtgcgcttcctgtatgaggaccagacaggccggccccagccccccagccagcctgtgttccggggcctgagcctggctgatggcaagtggcaccgggtggccgtggccgtgaagggccagagcgtgaccctcatcgtggactgcaagaagagggtgacccggcccctgcccaggtctgcccggcctgtgctggacacccacggcgtcatcatctttggagcccgcatcctggatgaggaggtgtttgaaggagatgtgcaggagctggccatcgtgcctggggtgcaggccgcctatgagagctgtgagcagaaggagctggagtgtgagggcggccagcgggagcggccccagaaccagcagccccaccgggcccagaggagcccccagcagcagcccagccggctgcaccggccccagaaccaggagccccagagccagcccacagagagcctgtactatgactacaagccaccctactatgatgtgatgaccaccggcaccaccccagactaccaggccgcccacggcccccggggcctgaagggggagaagggggagcctgctgtgctggagcccggcatgctggtggagggccccccaggccctgagggccctgctggcctgattggccccccaggcatccagggcaaccctggccctgtgggggaccccggggagcggggccccccaggccgggccggcctgcccggcagtgatggagcccctggccccccaggcaccagcctgatgctgcccttccgctttggaagtggcggcggggacaagggccctgtggtggccgcccaggaggcccaggcccaggccatcctgcagcaggcccggctggccctgcggggccccccaggccccatgggctacacaggccggcccggccccctgggccagcccggcagccctggcctgaagggggagagcggggacctgggcccccagggcccccggggcccccagggcctgactggacctcctgggaaggccggcagaagaggccgggccggggctgatggagcccggggcatgcctggggaccccggggtgaagggggaccggggctttgatggcctgcccggcctgcccggggagaagggccacagaggagacacaggagcccagggcctgcccggccccccaggagaagatggagagagaggagatgatggagagatcggcccccggggcctgcccggggagagcggcccccggggcctgctgggccccaagggccccccaggcatccctggccccccaggagtgcggggcatggatggcccccagggccccaagggcagcctgggcccccagggcgagcccggccccccaggccagcagggcaccccaggcacccagggcctgcccggcccccagggcgccatcggcccccacggggagaagggcccccagggcaagccaggcctgcccggcatgcctggcagtgatggccccccaggccaccctgggaaggagggccccccaggcaccaagggcaaccagggccccagcggcccccagggccccctgggctacccaggcccccggggcgtgaagggcgtggatggcatccggggcctgaagggccacaagggggagaagggagaagatggcttccctggcttcaagggggacattggagtgaagggggacagaggagaggtgggcgtgcccggcagcagaggagaagatggccctgagggccccaagggccgcacaggccccactggagaccccggccccccaggcctgatgggagagaagggcaagctgggcgtgcccggcctgcccggctacccaggccggcagggccccaagggcagcctgggcttccctggcttccctggggccagcggggagaagggggcccggggcctgagcggcaagagcggccccagaggagagcggggccccaccggcccccggggccagaggggccccaggggggccaccgggaagagcggggccaagggcaccagcggaggagatggcccccacggccccccaggagagcggggcctgcccggcccccagggccccaacggcttccctggccccaagggccccccaggccccccaggcaaggatggcctgcccggccaccctggccagagaggagaggtgggcttccagggcaagacaggccccccaggccccccaggagtggtgggcccccagggcgccgccggggagaccggccccatgggagagcggggccaccctggccccccaggccccccaggagagcagggcctgcccggcacagctgggaaggagggcaccaagggggaccccggccccccaggggcccctgggaaggatggccctgctggcctgcggggcttccctggagagcggggcctgcccggcacagctgggggccctggcctgaagggaaatgaaggccccagcggccccccaggccctgctggcagccctggagagagaggagctgctggcagcggcggccccatcggccccccaggccggcccggcccccagggccccccaggagctgctggggagaagggcgtgcctggagagaagggccccatcggccccaccggcagagatggagtgcagggccctgtgggcctgcccggccctgctggccccccaggagtggccggagaagatggagacaagggggaggtgggggaccccggccagaagggcaccaagggcaacaagggggagcacggccccccaggccccccaggccccatcggccctgtgggccagcccggggctgctggagcagatggagagcccggggcccggggcccccagggccactttggagccaagggagatgagggcacccggggcttcaacggccccccaggccccatcggcctgcagggcctgcccggccccagcggggagaagggggagactggagatgtgggccccatgggccccccaggccccccaggcccccggggccctgctggccccaacggggctgatggcccccagggccccccaggaggagtgggcaacctgggccccccaggagagaagggggagcccggggagagcggcagccctggcatccagggcgagcccggggtgaagggccccagaggagagcggggggagaagggggagagcggccagcccggggagcccggccccccaggccccaagggccccactggagatgatggccccaagggcaaccctggccctgtgggcttccctggggaccccggccccccaggagagggcggcccccggggccaggatggagccaagggggacagaggagaagatggagagcccggccagcccggcagccctggccccactggagaaaatggccccccaggccccctgggcaagaggggccctgctggcagccctggcagcgagggccggcagggcggcaagggggccaagggggaccccggggccatcggggcccctgggaagacaggccctgtgggccctgctggccctgctgggaagccaggcccagatggcctgcggggcctgcccggctctgtgggccagcagggccggcctggggccaccggccaggccggccccccaggccctgtgggccccccaggcctgcccggcctgcggggagatgctggggccaagggggagaagggccaccctggcctgattggcctcatcggccccccaggagagcagggcgagaagggggaccggggcctgcccggcccccagggcagccctggccagaagggggagatgggcatccctggggccagcggccccatcggccctgggggccccccaggcctgcccggccctgctggccccaagggggccaagggggccactggacctgggggccccaagggggagaagggcgtgcagggccccccaggccaccctggccccccaggagaggtgatccagcccctgcccatccagatgcccaagaagacccggcgctctgtggatggcagccggctgatgcaggaggatgaggccatccccactggaggagcccctggcagccctgggggcctggaggagatcttcggcagcctggacagcctgcgggaggagattgagcagatgagaagacccaccggcacccaggacagccctgcccggacctgccaggacctgaagctgtgccaccctgagctgcctgatggagagtactgggtggaccccaaccagggctgtgccagagatgccttccgggtcttctgcaacttcaccgctggaggagagacctgtgtgaccccaagagatgatgtgacccagttctcctatgtggacagcgagggcagccctgtgggcgtggtgcagctgaccttcctgcggctgctgtctgtgtctgcccaccaggatgtgtcctacccctgcagcggggccgccagagatggccccctgcggctgcggggggccaatgaagatgagctgagccctgagaccagcccctacgtgaaggagttcagagatggctgccagacccagcagggccgcacagtgctggaggtgaggacccctgtgctggagcagctgcctgtgctggatgccagcttcagtgacctgggcgccccaccccggcggggcggcgtgctgctgggccctgtgtgcttcatgggctag

SEQ ID NO: 232717 - DNA, 6209 bp, Artificial Sequence
  derived and/or modified sequence
tgggggctctgggcgccagggtggccggggacacacagaagcggcagccaccgaggagggagcagtgccgggagccccgacggcgccttgctgcatggagctgggccgctgacagctgtcgctgcccgcagcctctgacctccctgggaccccggcgtctgaggctcatagtctgctccctgtcttctgtcagcctcagggcatccagcgtctcaggccgacctgggtccctgggacccggcgtttcggcttctcagccatggagcggtgcagccgctgccatcgcctcctcctcctcctacctctggtgctggggctgagcgcggccccaggctgggcaggtgcaccccctgtggatgtgctccgggccctgaggttcccctccctccctgatggtgtccggagagcgaaaggcatctgtccagctgatgtggcctaccgagtggcacgacctgcccagctcagtgcacccactcgccagcttttcccaggaggatttcccaaagatttctctctgctgactgttgtccggacccgccctggtctccaagctcccctcctgactctctacagtgcccagggtgtccgacagctgggcctggagctgggccgacctgtccgcttcctgtatgaagaccagactgggcggcctcaacctccctctcagccagtcttccgaggcctcagcctagcagatggcaagtggcaccgtgtggctgtggctgtgaagggccagtctgtcaccctcattgttgactgcaagaagcgagtcacccggcctctcccccgaagtgctcgtccagtattggacacccatggagtgatcatctttggtgcccgtattctggatgaagaagtctttgagggtgatgtccaggagctggccattgtcccaggggtccaggcagcctatgaatcatgtgaacagaaggagctggaatgcgaggggggccagagggaaagaccccaaaaccaacagcctcacagagcccagagatctccacagcagcaaccatcaagacttcacaggccacaaaatcaggaaccccagagccaggaccccaccccaggtgaagaggaagaaatcctggagtcgagcctcttgccaccccttgaggaggctgcccatggaccccgagggctgaagggagagaaaggagagcctgcagtgttggaacctggtatgctcgtggaggggccccctggcccagaaggccctgcgggattgattggtccccctggcatccaggggaacccaggcccagttggagaccctggagagaggggcccccctggccgagcagggctccctggatcagatggggctcctggtcctcctggcacatctctcatgctcccattccggtttggcagtggtgggggtgacaagggccctgtggtggcggcccaggaggctcaggcccaggcgatcctgcagcaggcgaggctggcgctccgtggaccccctggccccatgggatacacagggcgccctggacccttgggccaacctgggagccctggcctgaaaggagagtctggagacttaggacctcagggccccagaggacctcagggcctcacaggccctcctggcaaggctgggcgaaggggccgggcaggtgctgatggagcccgagggatgcctggagatcctggagtgaagggtgaccgaggttttgatggactcccagggctccctggagagaagggccataggggtgatactggtgcccagggccttcctggtccccctggtgaggatggagagaggggagatgacggggagattgggcctcgagggctgcctggagagtcgggacctcgaggtctccttggccccaaaggcccacctggtattcctggaccccctggcgtccgaggcatggatggtccccagggccccaaagggagcttgggaccccagggagagccaggacctcctggacaacagggcacccctgggacccagggtcttcccgggccccagggtgccatcggccctcatggagagaagggtcctcaagggaagccagggctccccggcatgcctggctcagacggacccccgggtcacccagggaaggaaggtccccctggaaccaaaggaaaccagggtccctctggacctcagggacctctaggatacccaggacctcgaggggtcaagggtgtggacggaattcggggtctgaagggtcataagggtgagaagggtgaggatggctttcctgggttcaaaggtgacataggcgtgaaaggtgacaggggcgaagttggagtccctggttccaggggagaggatggtcctgaggggccaaagggacgcactggaccgactggagaccctgggcccccagggctcatgggcgagaagggcaagctgggtgttcctggtctgcctggctatcctggacgtcagggacccaaggggtccctaggatttcctggctttcctggtgccagtggagagaagggagcccggggcctgtcggggaagtcagggcctcggggagaacggggccccacgggtccacggggtcagcggggaccccgaggtgccactgggaagtctggagctaagggaacatctggtggtgatggcccccatgggccccctggagagaggggcctccctggacctcagggtcccaacgggtttcctggaccgaaaggacccccgggcccccctgggaaggatgggctgccgggacacccaggccaaagaggagaagtgggtttccaagggaagaccggcccccctggtcctccaggagtggtgggacctcagggagcagcaggagaaaccggccctatgggggagagaggtcacccaggccccccggggccccctggagagcagggactacctgggacagctggaaaagaaggaacaaagggtgaccctggtccccctggggccccagggaaggatggtcctgctggtctgaggggattcccaggagagagaggcctcccaggcactgctggtggacctggtttgaaggggaatgaaggtccgtctggcccccctggccctgcaggctcccctggggaacgaggtgcagcaggatcagggggacccattggtccgccagggcgcccaggcccgcagggtccccctggagcagcaggagagaaaggtgtcccaggtgagaagggccccattggcccgactggccgagatggagtgcagggtcctgtggggcttcctggtcctgctgggcctccaggtgtggctggagaggatggagacaagggtgaggtgggggaccccggacagaagggcaccaaagggaacaagggtgaacatggccctcctggaccccctggacccattggtcctgtggggcagcctggagcagcgggagcagatggggagcccggagctcggggaccccagggacactttggagccaaaggtgatgaaggaacaagaggattcaatgggcccccaggacccattggcctacagggtttgccaggcccctctggggagaagggagaaacaggagatgtgggtcctatgggaccacctggccccccaggacctcgaggtccagctggacccaatggcgctgatggcccacaaggtcccccaggaggtgttgggaacctgggtccccctggagagaagggggaaccaggagagtcaggatctccagggatccagggcgagccaggtgtcaagggtccacgcggggaacgtggagagaaaggagagtcggggcagccaggagagccagggccaccagggcctaaaggccccacaggcgatgatggccccaaagggaaccctggtcctgttggttttcctggtgaccctggcccccctggagaaggtggccctcggggccaggatggtgctaagggtgaccgaggcgaggatggtgagccaggacagcctggatcccctggtcccaccggggagaatggacccccagggccacttggaaagcgaggtcctgctggctcgcctggttccgaggggcgacaaggagggaagggagccaagggagatcctggcgctataggtgccccggggaagacaggcccggtgggtcctgcaggcccagcagggaaacctggccctgatggtctgagggggctcccaggctcagtgggtcagcaaggccgacctggagctacaggccaggctgggcccccaggtcctgtgggacccccagggctgcctggtctccggggcgatgctggagccaagggagagaagggccacccaggtctcattggactgattgggcccccgggtgagcagggagagaagggagatcggggacttcctgggcctcagggctcccctgggcagaagggtgagatgggtatcccaggagcatccggccccattggtcctggaggtccccccggcctccccggacctgctggccccaaaggagccaaaggagccacaggcccaggcggacccaagggagagaagggtgtgcagggccctccaggacacccgggtcccccaggcgaggtgatccagccactgcccattcagatgcccaagaagactcggcgctcggtggatggaagccgtctgatgcaggaagatgaggccataccgaccgggggagcccccggcagtcctggggggctggaggagatctttggctcactcgactccctgcgggaggagatcgagcagatgaggcggccaacagggacccaggacagccctgctcgcacctgccaggacctgaagctgtgccacccagagcttcccgatggagagtactgggtcgaccccaaccagggctgtgctcgggatgccttccgagttttctgcaacttcacagcagggggtgagacctgtgtgacgcctagggatgacgtcacgcagttctcttacgtggactcagagggctccccagtgggtgtggtccagctcaccttcctgcggctgctcagcgtctcagcccaccaggacgtctcctacccctgctctggagcagcccgtgacggtcccctgagactccgtggggccaatgaggatgagctgagcccggagactagcccctatgtcaaagaattcagagatggctgccagacacagcaaggccggacggtgctggaggtgcgaacgcctgtgctggagcagctgccagtgctggatgcctccttctcagacctgggagccccaccgaggcggggaggggtgctgctggggcctgtctgcttcatgggataggaccgtctctgtctgatcctgtccattcggaaccaggcccacctggaatcccacaacatcagctctgtgccacctcccaagagggctcctcactatctagggagccctgggccagggcgtggagagccctcagtcggggcaggccaggggaggggtgaagtggttgcctggacaccccacgggaggagtggcatctggggctcttggccctcccacctggagcctgttacccgttagagagctgagacccttatttaaaactcacctcccaatcaccccaaacaaatggaagagaagagaaaggacatggcgtattttgtatttaaaagtaattgtattaattatttaaagtgtggaaagcaaaataacaaaaaagagaaacgccaacaaaaatcagcagatgttgaagacaggggtctcgggggtgggctccggcacccacatcctggagtcaggactttcctcagtgactgtgtgtaggggggtttcagggctgaaccccacctccctcccaccttcctcccacctcacctgtcgcacccactgtgaaagttggaatatgtggtctccctggcctcagggctctgactctgccagggtggggctctctaacccacaggtgttggctgcctggcccatgtgcccactgtctcttccacttggtctgggtttggcaggcactgcctgctacttgagggccaggatgctcccccagggaagaaacggaatagtgtggggtgtgtgcagggctgcatcccgcagatggctggaatattaaaattcttctatattggctggtaaattgccatggccctgagccactgagtatgttcattgccacccctgtccctcccctgggcacccctcactttccctgatcctgcaattaaagggttaatgtgtggcatatggaagggactcccaggaccctgtgcccagcttccatgctgactgatggttaaataatgtgattgtctcctcccaggtgtctgtgtca

SEQ ID NO: 232718 - DNA, 6182 bp, Artificial Sequence
  derived and/or modified sequence
cacacagaagcggcagccaccgaggagggagcagtgccgggagccccgacggcgccttgctgcatggagctgggccgctgacagctgtcgctgcccgcagcctctgacctccctgggaccccggcgtctgaggctcatagtctgctccctgtcttctgtcagcctcagggcatccagcgtctcaggccgacctgggtccctgggacccggcgtttcggcttctcagccatggagcggtgcagccgctgccatcgcctcctcctcctcctacctctggtgctggggctgagcgcggccccaggctgggcaggtgcaccccctgtggatgtgctccgggccctgaggttcccctccctccctgatggtgtccggagagcgaaaggcatctgtccagctgatgtggcctaccgagtggcacgacctgcccagctcagtgcacccactcgccagcttttcccaggaggatttcccaaagatttctctctgctgactgttgtccggacccgccctggtctccaagctcccctcctgactctctacagtgcccagggtgtccgacagctgggcctggagctgggccgacctgtccgcttcctgtatgaagaccagactgggcggcctcaacctccctctcagccagtcttccgaggcctcagcctagcagatggcaagtggcaccgtgtggctgtggctgtgaagggccagtctgtcaccctcattgttgactgcaagaagcgagtcacccggcctctcccccgaagtgctcgtccagtattggacacccatggagtgatcatctttggtgcccgtattctggatgaagaagtctttgagggtgatgtccaggagctggccattgtcccaggggtccaggcagcctatgaatcatgtgaacagaaggagctggaatgcgaggggggccagagggaaagaccccaaaaccaacagcctcacagagcccagagatctccacagcagcaaccatcaagacttcacaggccacaaaatcaggaaccccagagccagcccactgagtctctctactatgactacgagcccccctattatgatgtgatgactacggggacaacccctgattatcaggctgcccatggaccccgagggctgaagggagagaaaggagagcctgcagtgttggaacctggtatgctcgtggaggggccccctggcccagaaggccctgcgggattgattggtccccctggcatccaggggaacccaggcccagttggagaccctggagagaggggcccccctggccgagcagggctccctggatcagatggggctcctggtcctcctggcacatctctcatgctcccattccggtttggcagtggtgggggtgacaagggccctgtggtggcggcccaggaggctcaggcccaggcgatcctgcagcaggcgaggctggcgctccgtggaccccctggccccatgggatacacagggcgccctggacccttgggccaacctgggagccctggcctgaaaggagagtctggagacttaggacctcagggccccagaggacctcagggcctcacaggccctcctggcaaggctgggcgaaggggccgggcaggtgctgatggagcccgagggatgcctggagatcctggagtgaagggtgaccgaggttttgatggactcccagggctccctggagagaagggccataggggtgatactggtgcccagggccttcctggtccccctggtgaggatggagagaggggagatgacggggagattgggcctcgagggctgcctggagagtcgggacctcgaggtctccttggccccaaaggcccacctggtattcctggaccccctggcgtccgaggcatggatggtccccagggccccaaagggagcttgggaccccagggagagccaggacctcctggacaacagggcacccctgggacccagggtcttcccgggccccagggtgccatcggccctcatggagagaagggtcctcaagggaagccagggctccccggcatgcctggctcagacggacccccgggtcacccagggaaggaaggtccccctggaaccaaaggaaaccagggtccctctggacctcagggacctctaggatacccaggacctcgaggggtcaagggtgtggacggaattcggggtctgaagggtcataagggtgagaagggtgaggatggctttcctgggttcaaaggtgacataggcgtgaaaggtgacaggggcgaagttggagtccctggttccaggggagaggatggtcctgaggggccaaagggacgcactggaccgactggagaccctgggcccccagggctcatgggcgagaagggcaagctgggtgttcctggtctgcctggctatcctggacgtcagggacccaaggggtccctaggatttcctggctttcctggtgccagtggagagaagggagcccggggcctgtcggggaagtcagggcctcggggagaacggggccccacgggtccacggggtcagcggggaccccgaggtgccactgggaagtctggagctaagggaacatctggtggtgatggcccccatgggccccctggagagaggggcctccctggacctcagggtcccaacgggtttcctggaccgaaaggacccccgggcccccctgggaaggatgggctgccgggacacccaggccaaagaggagaagtgggtttccaagggaagaccggcccccctggtcctccaggagtggtgggacctcagggagcagcaggagaaaccggccctatgggggagagaggtcacccaggccccccggggccccctggagagcagggactacctgggacagctggaaaagaaggaacaaagggtgaccctggtccccctggggccccagggaaggatggtcctgctggtctgaggggattcccaggagagagaggcctcccaggcactgctggtggacctggtttgaaggggaatgaaggtccgtctggcccccctggccctgcaggctcccctggggaacgaggtgcagcaggatcagggggacccattggtccgccagggcgcccaggcccgcagggtccccctggagcagcaggagagaaaggtgtcccaggtgagaagggccccattggcccgactggccgagatggagtgcagggtcctgtggggcttcctggtcctgctgggcctccaggtgtggctggagaggatggagacaagggtgaggtgggggaccccggacagaagggcaccaaagggaacaagggtgaacatggccctcctggaccccctggacccattggtcctgtggggcagcctggagcagcgggagcagatggggagcccggagctcggggaccccagggacactttggagccaaaggtgatgaaggaacaagaggattcaatgggcccccaggacccattggcctacagggtttgccaggcccctctggggagaagggagaaacaggagatgtgggtcctatgggaccacctggccccccaggacctcgaggtccagctggacccaatggcgctgatggcccacaaggtcccccaggaggtgttgggaacctgggtccccctggagagaagggggaaccaggagagtcaggatctccagggatccagggcgagccaggtgtcaagggtccacgcggggaacgtggagagaaaggagagtcggggcagccaggagagccagggccaccagggcctaaaggccccacaggcgatgatggccccaaagggaaccctggtcctgttggttttcctggtgaccctggcccccctggagaaggtggccctcggggccaggatggtgctaagggtgaccgaggcgaggatggtgagccaggacagcctggatcccctggtcccaccggggagaatggacccccagggccacttggaaagcgaggtcctgctggctcgcctggttccgaggggcgacaaggagggaagggagccaagggagatcctggcgctataggtgccccggggaagacaggcccggtgggtcctgcaggcccagcagggaaacctggccctgatggtctgagggggctcccaggctcagtgggtcagcaaggccgacctggagctacaggccaggctgggcccccaggtcctgtgggacccccagggctgcctggtctccggggcgatgctggagccaagggagagaagggccacccaggtctcattggactgattgggcccccgggtgagcagggagagaagggagatcggggacttcctgggcctcagggctcccctgggcagaagggtgagatgggtatcccaggagcatccggccccattggtcctggaggtccccccggcctccccggacctgctggccccaaaggagccaaaggagccacaggcccaggcggacccaagggagagaagggtgtgcagggccctccaggacacccgggtcccccaggcgaggtgatccagccactgcccattcagatgcccaagaagactcggcgctcggtggatggaagccgtctgatgcaggaagatgaggccataccgaccgggggagcccccggcagtcctggggggctggaggagatctttggctcactcgactccctgcgggaggagatcgagcagatgaggcggccaacagggacccaggacagccctgctcgcacctgccaggacctgaagctgtgccacccagagcttcccgatggagagtactgggtcgaccccaaccagggctgtgctcgggatgccttccgagttttctgcaacttcacagcagggggtgagacctgtgtgacgcctagggatgacgtcacgcagttctcttacgtggactcagagggctccccagtgggtgtggtccagctcaccttcctgcggctgctcagcgtctcagcccaccaggacgtctcctacccctgctctggagcagcccgtgacggtcccctgagactccgtggggccaatgaggatgagctgagcccggagactagcccctatgtcaaagaattcagagatggctgccagacacagcaaggccggacggtgctggaggtgcgaacgcctgtgctggagcagctgccagtgctggatgcctccttctcagacctgggagccccaccgaggcggggaggggtgctgctggggcctgtctgcttcatgggataggaccgtctctgtctgatcctgtccattcggaaccaggcccacctggaatcccacaacatcagctctgtgccacctcccaagagggctcctcactatctagggagccctgggccagggcgtggagagccctcagtcggggcaggccaggggaggggtgaagtggttgcctggacaccccacgggaggagtggcatctggggctcttggccctcccacctggagcctgttacccgttagagagctgagacccttatttaaaactcacctcccaatcaccccaaacaaatggaagagaagagaaaggacatggcgtattttgtatttaaaagtaattgtattaattatttaaagtgtggaaagcaaaataacaaaaaagagaaacgccaacaaaaatcagcagatgttgaagacaggggtctcgggggtgggctccggcacccacatcctggagtcaggactttcctcagtgactgtgtgtaggggggtttcagggctgaaccccacctccctcccaccttcctcccacctcacctgtcgcacccactgtgaaagttggaatatgtggtctccctggcctcagggctctgactctgccagggtggggctctctaacccacaggtgttggctgcctggcccatgtgcccactgtctcttccacttggtctgggtttggcaggcactgcctgctacttgagggccaggatgctcccccagggaagaaacggaatagtgtggggtgtgtgcagggctgcatcccgcagatggctggaatattaaaattcttctatattggctggtaaattgccatggccctgagccactgagtatgttcattgccacccctgtccctcccctgggcacccctcactttccctgatcctgcaattaaagggttaatgtgtggcatatggaagggactcccaggaccctgtgcccagcttccatgctgactgatggttaaataatgtgattgtctcctcccagg

SEQ ID NO: 232719 - DNA, 6209 bp, Artificial Sequence
  derived and/or modified sequence
tgggggctctgggcgccagggtggccggggacacacagaagcggcagccaccgaggagggagcagtgccgggagccccgacggcgccttgctgcatggagctgggccgctgacagctgtcgctgcccgcagcctctgacctccctgggaccccggcgtctgaggctcatagtctgctccctgtcttctgtcagcctcagggcatccagcgtctcaggccgacctgggtccctgggacccggcgtttcggcttctcagccatggagcggtgcagccgctgccatcgcctcctcctcctcctacctctggtgctggggctgagcgcggccccaggctgggcaggtgcaccccctgtggatgtgctccgggccctgaggttcccctccctccctgatggtgtccggagagcgaaaggcatctgtccagctgatgtggcctaccgagtggcacgacctgcccagctcagtgcacccactcgccagcttttcccaggaggatttcccaaagatttctctctgctgactgttgtccggacccgccctggtctccaagctcccctcctgactctctacagtgcccagggtgtccgacagctgggcctggagctgggccgacctgtccgcttcctgtatgaagaccagactgggcggcctcaacctccctctcagccagtcttccgaggcctcagcctagcagatggcaagtggcaccgtgtggctgtggctgtgaagggccagtctgtcaccctcattgttgactgcaagaagcgagtcacccggcctctcccccgaagtgctcgtccagtattggacacccatggagtgatcatctttggtgcccgtattctggatgaagaagtctttgagggtgatgtccaggagctggccattgtcccaggggtccaggcagcctatgaatcatgtgaacagaaggagctggaatgcgaggggggccagagggaaagaccccaaaaccaacagcctcacagagcccagagatctccacagcagcaaccatcaagacttcacaggccacaaaatcaggaaccccagagccaggaccccaccccaggtgaagaggaagaaatcctggagtcgagcctcttgccaccccttgaggaggctgcccatggaccccgagggctgaagggagagaaaggagagcctgcagtgttggaacctggtatgctcgtggaggggccccctggcccagaaggccctgcgggattgattggtccccctggcatccaggggaacccaggcccagttggagaccctggagagaggggcccccctggccgagcagggctccctggatcagatggggctcctggtcctcctggcacatctctcatgctcccattccggtttggcagtggtgggggtgacaagggccctgtggtggcggcccaggaggctcaggcccaggcgatcctgcagcaggcgaggctggcgctccgtggaccccctggccccatgggatacacagggcgccctggacccttgggccaacctgggagccctggcctgaaaggagagtctggagacttaggacctcagggccccagaggacctcagggcctcacaggccctcctggcaaggctgggcgaaggggccgggcaggtgctgatggagcccgagggatgcctggagatcctggagtgaagggtgaccgaggttttgatggactcccagggctccctggagagaagggccataggggtgatactggtgcccagggccttcctggtccccctggtgaggatggagagaggggagatgacggggagattgggcctcgagggctgcctggagagtcgggacctcgaggtctccttggccccaaaggcccacctggtattcctggaccccctggcgtccgaggcatggatggtccccagggccccaaagggagcttgggaccccagggagagccaggacctcctggacaacagggcacccctgggacccagggtcttcccgggccccagggtgccatcggccctcatggagagaagggtcctcaagggaagccagggctccccggcatgcctggctcagacggacccccgggtcacccagggaaggaaggtccccctggaaccaaaggaaaccagggtccctctggacctcagggtcctctaggatacccaggacctcgaggggtcaagggtgtggacggaattcggggtctgaagggtcataagggtgagaagggtgaggatggctttcctgggttcaaaggtgacataggcgtgaaaggtgacaggggcgaagttggagtccctggttccaggggagaggatggtcctgaggggccaaagggacgcactggaccgactggagaccctgggcccccagggctcatgggcgagaagggcaagctgggtgttcctggtctgcctggctatcctggacgtcagggacccaaggggtccctaggatttcctggctttcctggtgccagtggagagaagggagcccggggcctgtcggggaagtcagggcctcggggagaacggggccccacgggtccacggggtcagcggggaccccgaggtgccactgggaagtctggagctaagggaacatctggtggtgatggcccccatgggccccctggagagaggggcctccctggacctcagggtcccaacgggtttcctggaccgaaaggacccctgggcccccctgggaaggacgggctgccgggacacccaggccaaagaggagaagtgggtttccaagggaagaccggcccccctggtcctccaggagtggtgggacctcagggagcagcaggagaaaccggccctatgggggagagaggtcacccaggccccccggggccccctggagagcagggactacctgggacagctggaaaagaaggaacaaagggtgaccctggtccccctggggccccagggaaggatggtcctgctggtctgaggggattcccaggagagagaggcctcccaggcactgctggtggacctggtttgaaggggaatgaaggtccgtctggcccccctggccctgcaggctcccctggggaacgaggtgcagcaggatcagggggacccattggtccgccagggcgcccaggcccgcagggtccccctggagcagcaggagagaaaggtgtcccaggtgagaagggccccattggcccaactggccgagatggagtgcagggtcctgtggggcttcctggtcctgctgggcctccaggtgtggctggagaggatggagacaagggtgaggtgggggaccccggacagaagggcaccaaagggaacaagggtgaacatggccctcctggaccccctggacccattggtcctgtggggcagcctggagcagcgggagcagatggggagcccggagctcggggaccccagggacactttggagccaaaggtgatgaaggaacaagaggattcaatgggcccccaggacccattggcctacagggtttgccaggcccctctggggagaagggagaaacaggagatgtgggtcctatgggaccacctggccccccaggacctcgaggtccagctggacccaatggcgctgatggcccacaaggtcccccaggaggtgttgggaacctgggtccccctggagagaagggggaaccaggagagtcaggatctccagggatccagggcgagccaggtgtcaagggtccacgcggggaacgtggagagaaaggagagtcggggcagccaggagagccagggccaccagggcctaaaggccccacaggcgatgatggccccaaagggaaccctggtcctgttggttttcctggtgaccctggcccccctggagaaggtggccctcggggccaggatggtgctaagggtgaccgaggcgaggatggtgagccaggacagcctggatcccctggtcccaccggggagaatggacccccagggccacttggaaagcgaggtcctgctggctcgcctggttccgaggggcgacaaggagggaagggagccaagggagatcctggcgctataggtgccccggggaagacaggcccggtgggtcctgcaggcccagcagggaaacctggccctgatggtctgagggggctcccaggctcagtgggtcagcaaggccgacctggagctacaggccaggctgggcccccaggtcctgtgggacccccagggctgcctggtctccggggcgatgctggagccaagggagagaagggccacccaggtctcattggactgattgggcccccgggtgagcagggagagaagggagatcggggacttcctgggcctcagggctcccctgggcagaagggtgagatgggtatcccaggagcatccggccccattggtcctggaggtccccccggcctccccggacctgctggccccaaaggagccaaaggagccacaggcccaggcggacccaagggagagaagggtgtgcagggccctccaggacacccgggtcccccaggcgaggtgatccagccactgcccattcagatgcccaagaagactcggcgctcggtggatggaagccgtctgatgcaggaagatgaggccataccgaccgggggagcccccggcagtcctggggggctggaggagatctttggctcactcgactccctgcgggaggagatcgagcagatgaggcggccaacagggacccaggacagccctgctcgcacctgccaggacctgaagctgtgccacccagagcttcccgatggagagtactgggtcgaccccaaccagggctgtgctcgggatgccttccgagttttctgcaacttcacagcagggggtgagacctgtgtgacgcctagggatgacgtcacgcagttctcttacgtggactcagagggctccccagtgggtgtggtccagctcaccttcctgcggctgctcagcgtctcagcccaccaggacgtctcctacccctgctctggagcagcccgtgacggtcccctgagactccgtggggccaatgaggatgagctgagcccggagactagcccctatgtcaaagaattcagagatggctgccagacacagcaaggccggacggtgctggaggtgcgaacgcctgtgctggagcagctgccagtgctggatgcctccttctcagacctgggagccccaccgaggcggggaggggtgctgctggggcctgtctgcttcatgggataggaccgtctctgtctgatcctgtccattcggaaccaggcccacctggaatcccacaacatcagctctgtgccacctcccaagagggctcctcactatctagggagccctgggccagggcgtggagagccctcagtcggggcaggccaggggaggggtgaagtggttgcctggacaccccacgggaggagtggcatctggggctcttggccctcccacctggagcctgttacccgttagagagctgagacccttatttaaaactcacctcccaatcaccccaaacaaatggaagagaagagaaaggacatggcgtattttgtatttaaaagtaattgtattaattatttaaagtgtggaaagcaaaataacaaaaaagagaaacgccaacaaaaatcagcagatgttgaagacaggggtctcgggggtgggctccggcacccacatcctggagtcaggactttcctcagtgactgtgtgtaggggggtttcagggctgaaccccacctccctcccaccttcctcccacctcacctgtcgcacccactgtgaaagttggaatatgtggtctccctggcctcagggctctgactctgccagggtggggctctctaacccacaggtgttggctgcctggcccatgtgcccactgtctcttccacttggtctgggtttggcaggcactgcctgctacttgagggccaggatgctcccccagggaagaaacggaatagtgtggggtgtgtgcagggctgcatcccgcagatggctggaatattaaaattcttctatattggctggtaaattgccatggccctgagccactgagtatgttcattgccacccctgtccctcccctgggcacccctcactttccctgatcctgcaattaaagggttaatgtgtggcatatggaagggactcccaggaccctgtgcccagcttccatgctgactgatggttaaataatgtgattgtctcctcccaggtgtctgtgtca

SEQ ID NO: 232720 - DNA, 6209 bp, Artificial Sequence
  derived and/or modified sequence
tgggggctctgggcgccagggtggccggggacacacagaagcggcagccaccgaggagggagcagtgccgggagccccgacggcgccttgctgcatggagctgggccgctgacagctgtcgctgcccgcagcctctgacctccctgggaccccggcgtctgaggctcatagtctgctccctgtcttctgtcagcctcagggcatccagcgtctcaggccgacctgggtccctgggacccggcgtttcggcttctcagccatggagcggtgcagccgctgccatcgcctcctcctcctcctacctctggtgctggggctgagcgcggccccaggctgggcaggtgcaccccctgtggatgtgctccgggccctgaggttcccctccctccctgatggtgtccggagagcgaaaggcatctgtccagctgatgtggcctaccgagtggcacgacctgcccagctcagtgcacccactcgccagcttttcccaggaggatttcccaaagatttctctctgctgactgttgtccggacccgccctggtctccaagctcccctcctgactctctacagtgcccagggtgtccgacagctgggcctggagctgggccgacctgtccgcttcctgtatgaagaccagactgggcggcctcaacctccctctcagccagtcttccgaggcctcagcctagcagatggcaagtggcaccgtgtggctgtggctgtgaagggccagtctgtcaccctcattgttgactgcaagaagcgagtcacccggcctctcccccgaagtgctcgtccagtattggacacccatggagtgatcatctttggtgcccgtattctggatgaagaagtctttgagggtgatgtccaggagctggccattgtcccaggggtccaggcagcctatgaatcatgtgaacagaaggagctggaatgcgaggggggccagagggaaagaccccaaaaccaacagcctcacagagcccagagatctccacagcagcaaccatcaagacttcacaggccacaaaatcaggaaccccagagccaggaccccaccccaggtgaagaggaagaaatcctggagtcgagcctcttgccaccccttgaggaggctgcccatggaccccgagggctgaagggagagaaaggagagcctgcagtgttggaacctggtatgctcgtggaggggccccctggcccagaaggccctgcgggattgattggtccccctggcatccaggggaacccaggcccagttggagaccctggagagaggggcccccctggccgagcagggctccctggatcagatggggctcctggtcctcctggcacatctctcatgctcccattccggtttggcagtggtgggggtgacaagggccctgtggtggcggcccaggaggctcaggcccaggcgatcctgcagcaggcgaggctggcgctccgtggaccccctggccccatgggatacacagggcgccctggacccttgggccaacctgggagccctggcctgaaaggagagtctggagacttaggacctcagggccccagaggacctcagggcctcacaggccctcctggcaaggctgggcgaaggggccgggcaggtgctgatggagcccgagggatgcctggagatcctggagtgaagggtgaccgaggttttgatggactcccagggctccctggagagaagggccataggggtgatactggtgcccagggccttcctggtccccctggtgaggatggagagaggggagatgacggggagattgggcctcgagggctgcctggagagtcgggacctcgaggtctccttggccccaaaggcccacctggtattcctggaccccctggcgtccgaggcatggatggtccccagggccccaaagggagcttgggaccccagggagagccaggacctcctggacaacagggcacccctgggacccagggtcttcccgggccccagggtgccatcggccctcatggagagaagggtcctcaagggaagccagggctccccggcatgcctggctcagacggacccccgggtcacccagggaaggaaggtccccctggaaccaaaggaaaccagggtccctctggacctcagggacctctaggatacccaggacctcgaggggtcaagggtgtggacggaattcggggtctgaagggtcataagggtgagaagggtgaggatggctttcctgggttcaaaggtgacataggcgtgaaaggtgacaggggcgaagttggagtccctggttccaggggagaggatggtcctgaggggccaaagggacgcactggaccgactggagaccctgggcccccagggctcatgggcgagaagggcaagctgggtgttcctggtctgcctggctatcctggacgtcagggacccaaggggtccctaggatttcctggctttcctggtgccagtggagagaagggagcccggggcctgtcggggaagtcagggcctcggggagaacggggccccacgggtccacggggtcagcggggaccccgaggtgccactgggaagtctggagctaagggaacatctggtggtgatggcccccatgggccccctggagagaggggcctccctggacctcagggtcccaacgggtttcctggaccgaaaggacccccgggcccccctgggaaggacgggctgccgggacacccaggccaaagaggagaagtgggtttccaagggaagaccggcccccctggtcctccaggagtggtgggacctcagggagcagcaggagaaaccggccctatgggggagagaggtcacccaggccccccggggccccctggagagcagggactacctgggacagctggaaaagaaggaacaaagggtgaccctggtccccctggggccccagggaaggatggtcctgctggtctgaggggattcccaggagagagaggcctcccaggcactgctggtggacctggtttgaaggggaatgaaggtccgtctggcccccctggccctgcaggctcccctggggaacgaggtgcagcaggatcagggggacccattggtccgccagggcgcccaggcccgcagggtccccctggagcagcaggagagaaaggtgtcccaggtgagaagggccccattggcccaactggccgagatggagtgcagggtcctgtggggcttcctggtcctgctgggcctccaggtgtggctggagaggatggagacaagggtgaggtgggggaccccggacagaagggcaccaaagggaacaagggtgaacatggccctcctggaccccctggacccattggtcctgtggggcagcctggagcagcgggagcagatggggagcctggagctcggggaccccagggacactttggagccaaaggtgatgaaggaacaagaggattcaatgggcccccaggacccattggcctacagggtttgccaggcccctctggggagaagggagaaacaggagatgtgggtcctatgggaccacctggccccccaggacctcgaggtccagctggacccaatggcgctgatggcccacaaggtcccccaggaggtgttgggaacctgggtccccctggagagaagggggaaccaggagagtcaggatctccagggatccagggcgagccaggtgtcaagggtccacgcggggaacgtggagagaaaggagagtcggggcagccaggagagccagggccaccagggcctaaaggccccacaggcgatgatggccccaaagggaaccctggtcctgttggttttcctggtgaccctggcccccctggagaaggtggccctcggggccaggatggtgctaagggtgaccgaggcgaggatggtgagccaggacagcctggatcccctggtcccaccggggagaatggacccccagggccacttggaaagcgaggtcctgctggctcgcctggttccgaggggcgacaaggagggaagggagccaagggagatcctggcgctataggtgccccggggaagacaggcccggtgggtcctgcaggcccagcagggaaacctggccctgatggtctgagggggctcccaggctcagtgggtcagcaaggccgacctggagctacaggccaggctgggcccccaggtcctgtgggacccccagggctgcctggtctccggggcgatgctggagccaagggagagaagggccacccaggtctcattggactgattgggcccccgggtgagcagggagagaagggagatcggggacttcctgggcctcagggctcccctgggcagaagggtgagatgggtatcccaggagcatccggccccattggtcctggaggtccccccggcctccccggacctgctggccccaaaggagccaaaggagccacaggcccaggcggacccaagggagagaagggtgtgcagggccctccaggacacccgggtcccccaggcgaggtgatccagccactgcccattcagatgcccaagaagactcggcgctcggtggatggaagccgtctgatgcaggaagatgaggccataccgaccgggggagcccccggcagtcctggggggctggaggagatctttggctcactcgactccctgcgggaggagatcgagcagatgaggcggccaacagggacccaggacagccctgctcgcacctgccaggacctgaagctgtgccacccagagcttcccgatggagagtactgggtcgaccccaaccagggctgtgctcgggatgccttccgagttttctgcaacttcacagcagggggtgagacctgtgtgacgcctagggatgacgtcacgcagttctcttacgtggactcagagggctccccagtgggtgtggtccagctcaccttcctgcggctgctcagcgtctcagcccaccaggacgtctcctacccctgctctggagcagcccgtgacggtcccctgagactccgtggggccaatgaggatgagctgagcccggagactagcccctatgtcaaagaattcagagatggctgccagacacagcaaggccggacggtgctggaggtgcgaacgcctgtgctggagcagctgccagtgctggatgcctccttctcagacctgggagccccaccgaggcggggaggggtgctgctggggcctgtctgcttcatgggataggaccgtctctgtctgatcctgtccattcggaaccaggcccacctggaatcccacaacatcagctctgtgccacctcccaagagggctcctcactatctagggagccctgggccagggcgtggagagccctcagtcggggcaggccaggggaggggtgaagtggttgcctggacaccccacgggaggagtggcatctggggctcttggccctcccacctggagcctgttacccgttagagagctgagacccttatttaaaactcacctcccaatcaccccaaacaaatggaagagaagagaaaggacatggcgtattttgtatttaaaagtaattgtattaattatttaaagtgtggaaagcaaaataacaaaaaagagaaacgccaacaaaaatcagcagatgttgaagacaggggtctcgggggtgggctccggcacccacatcctggagtcaggactttcctcagtgactgtgtgtaggggggtttcagggctgaaccccacctccctcccaccttcctcccacctcacctgtcgcacccactgtgaaagttggaatatgtggtctccctggcctcagggctctgactctgccagggtggggctctctaacccacaggtgttggctgcctggcccatgtgcccactgtctcttccacttggtctgggtttggcaggcactgcctgctacttgagggccaggatgctcccccagggaagaaacggaatagtgtggggtgtgtgcagggctgcatcccgcagatggctggaatattaaaattcttctatattggctggtaaattgccatggccctgagccactgagtatgttcattgccacccctgtccctcccctgggcacccctcactttccctgatcctgcaattaaagggttaatgtgtggcatatggaagggactcccaggaccctgtgcccagcttccatgctgactgatggttaaataatgtgattgtctcctcccaggtgtctgtgtca

SEQ ID NO: 232721 - DNA, 6245 bp, Artificial Sequence
  derived and/or modified sequence
cacacagaagcggcagccaccgaggagggagcagtgccgggagccccgacggcgccttgctgcatggagctgggccgctgacagctgtcgctgcccgcagcctctgacctccctgggaccccggcgtctgaggctcatagtctgctccctgtcttctgtcagcctcagggcatccagcgtctcaggccgacctgggtccctgggacccggcgtttcggcttctcagccatggagcggtgcagccgctgccatcgcctcctcctcctcctacctctggtgctggggctgagcgcggccccaggctgggcaggtgcaccccctgtggatgtgctccgggccctgaggttcccctccctccctgatggtgtccggagagcgaaaggcatctgtccagctgatgtggcctaccgagtggcacgacctgcccagctcagtgcacccactcgccagcttttcccaggaggatttcccaaagatttctctctgctgactgttgtccggacccgccctggtctccaagctcccctcctgactctctacagtgcccagggtgtccgacagctgggcctggagctgggccgacctgtccgcttcctgtatgaagaccagactgggcggcctcaacctccctctcagccagtcttccgaggcctcagcctagcagatggcaagtggcaccgtgtggctgtggctgtgaagggccagtctgtcaccctcattgttgactgcaagaagcgagtcacccggcctctcccccgaagtgctcgtccagtattggacacccatggagtgatcatctttggtgcccgtattctggatgaagaagtctttgagggtgatgtccaggagctggccattgtcccaggggtccaggcagcctatgaatcatgtgaacagaaggagctggaatgcgaggggggccagagggaaagaccccaaaaccaacagcctcacagagcccagagatctccacagcagcaaccatcaagacttcacaggccacaaaatcaggaaccccagagccagcccactgagtctctctactatgactacgagcccccctattatgatgtgatgactacggggacaacccctgattatcaggaccccaccccaggtgaagaggaagaaatcctggagtcgagcctcttgccaccccttgaggaggctgcccatggaccccgagggctgaagggagagaaaggagagcctgcagtgttggaacctggtatgctcgtggaggggccccctggcccagaaggccctgcgggattgattggtccccctggcatccaggggaacccaggcccagttggagaccctggagagaggggcccccctggccgagcagggctccctggatcagatggggctcctggtcctcctggcacatctctcatgctcccattccggtttggcagtggtgggggtgacaagggccctgtggtggcggcccaggaggctcaggcccaggcgatcctgcagcaggcgaggctggcgctccgtggaccccctggccccatgggatacacagggcgccctggacccttgggccaacctgggagccctggcctgaaaggagagtctggagacttaggacctcagggccccagaggacctcagggcctcacaggccctcctggcaaggctgggcgaaggggccgggcaggtgctgatggagcccgagggatgcctggagatcctggagtgaagggtgaccgaggttttgatggactcccagggctccctggagagaagggccataggggtgatactggtgcccagggccttcctggtccccctggtgaggatggagagaggggagatgacggggagattgggcctcgagggctgcctggagagtcgggacctcgaggtctccttggccccaaaggcccacctggtattcctggaccccctggcgtccgaggcatggatggtccccagggccccaaagggagcttgggaccccagggagagccaggacctcctggacaacagggcacccctgggacccagggtcttcccgggccccagggtgccatcggccctcatggagagaagggtcctcaagggaagccagggctccccggcatgcctggctcagacggacccccgggtcacccagggaaggaaggtccccctggaaccaaaggaaaccagggtccctctggacctcagggacctctaggatacccaggacctcgaggggtcaagggtgtggacggaattcggggtctgaagggtcataagggtgagaagggtgaggatggctttcctgggttcaaaggtgacataggcgtgaaaggtgacaggggcgaagttggagtccctggttccaggggagaggatggtcctgaggggccaaagggacgcactggaccgactggagaccctgggcccccagggctcatgggcgagaagggcaagctgggtgttcctggtctgcctggctatcctggacgtcagggacccaaggggtccctaggatttcctggctttcctggtgccagtggagagaagggagcccggggcctgtcggggaagtcagggcctcggggagaacggggccccacgggtccacggggtcagcggggaccccgaggtgccactgggaagtctggagctaagggaacatctggtggtgatggcccccatgggccccctggagagaggggcctccctggacctcagggtcccaacgggtttcctggaccgaaaggacccccgggcccccctgggaaggatgggctgccgggacacccaggccaaagaggagaagtgggtttccaagggaagaccggcccccctggtcctccaggagtggtgggacctcagggagcagcaggagaaaccggccctatgggggagagaggtcacccaggccccccggggccccctggagagcagggactacctgggacagctggaaaagaaggaacaaagggtgaccctggtccccctggggccccagggaaggatggtcctgctggtctgaggggattcccaggagagagaggcctcccaggcactgctggtggacctggtttgaaggggaatgaaggtccgtctggcccccctggccctgcaggctcccctggggaacgaggtgcagcaggatcagggggacccattggtccgccagggcgcccaggcccgcagggtccccctggagcagcaggagagaaaggtgtcccaggtgagaagggccccattggcccgactggccgagatggagtgcagggtcctgtggggcttcctggtcctgctgggcctccaggtgtggctggagaggatggagacaagggtgaggtgggggaccccggacagaagggcaccaaagggaacaagggtgaacatggccctcctggaccccctggacccattggtcctgtggggcagcctggagcagcgggagcagatggggagcccggagctcggggaccccagggacactttggagccaaaggtgatgaaggaacaagaggattcaatgggcccccaggacccattggcctacagggtttgccaggcccctctggggagaagggagaaacaggagatgtgggtcctatgggaccacctggccccccaggacctcgaggtccagctggacccaatggcgctgatggcccacaaggtcccccaggaggtgttgggaacctgggtccccctggagagaagggggaaccaggagagtcaggatctccagggatccagggcgagccaggtgtcaagggtccacgcggggaacgtggagagaaaggagagtcggggcagccaggagagccagggccaccagggcctaaaggccccacaggcgatgatggccccaaagggaaccctggtcctgttggttttcctggtgaccctggcccccctggagaaggtggccctcggggccaggatggtgctaagggtgaccgaggcgaggatggtgagccaggacagcctggatcccctggtcccaccggggagaatggacccccagggccacttggaaagcgaggtcctgctggctcgcctggttccgaggggcgacaaggagggaagggagccaagggagatcctggcgctataggtgccccggggaagacaggcccggtgggtcctgcaggcccagcagggaaacctggccctgatggtctgagggggctcccaggctcagtgggtcagcaaggccgacctggagctacaggccaggctgggcccccaggtcctgtgggacccccagggctgcctggtctccggggcgatgctggagccaagggagagaagggccacccaggtctcattggactgattgggcccccgggtgagcagggagagaagggagatcggggacttcctgggcctcagggctcccctgggcagaagggtgagatgggtatcccaggagcatccggccccattggtcctggaggtccccccggcctccccggacctgctggccccaaaggagccaaaggagccacaggcccaggcggacccaagggagagaagggtgtgcagggccctccaggacacccgggtcccccaggcgaggtgatccagccactgcccattcagatgcccaagaagactcggcgctcggtggatggaagccgtctgatgcaggaagatgaggccataccgaccgggggagcccccggcagtcctggggggctggaggagatctttggctcactcgactccctgcgggaggagatcgagcagatgaggcggccaacagggacccaggacagccctgctcgcacctgccaggacctgaagctgtgccacccagagcttcccgatggagagtactgggtcgaccccaaccagggctgtgctcgggatgccttccgagttttctgcaacttcacagcagggggtgagacctgtgtgacgcctagggatgacgtcacgcagttctcttacgtggactcagagggctccccagtgggtgtggtccagctcaccttcctgcggctgctcagcgtctcagcccaccaggacgtctcctacccctgctctggagcagcccgtgacggtcccctgagactccgtggggccaatgaggatgagctgagcccggagactagcccctatgtcaaagaattcagagatggctgccagacacagcaaggccggacggtgctggaggtgcgaacgcctgtgctggagcagctgccagtgctggatgcctccttctcagacctgggagccccaccgaggcggggaggggtgctgctggggcctgtctgcttcatgggataggaccgtctctgtctgatcctgtccattcggaaccaggcccacctggaatcccacaacatcagctctgtgccacctcccaagagggctcctcactatctagggagccctgggccagggcgtggagagccctcagtcggggcaggccaggggaggggtgaagtggttgcctggacaccccacgggaggagtggcatctggggctcttggccctcccacctggagcctgttacccgttagagagctgagacccttatttaaaactcacctcccaatcaccccaaacaaatggaagagaagagaaaggacatggcgtattttgtatttaaaagtaattgtattaattatttaaagtgtggaaagcaaaataacaaaaaagagaaacgccaacaaaaatcagcagatgttgaagacaggggtctcgggggtgggctccggcacccacatcctggagtcaggactttcctcagtgactgtgtgtaggggggtttcagggctgaaccccacctccctcccaccttcctcccacctcacctgtcgcacccactgtgaaagttggaatatgtggtctccctggcctcagggctctgactctgccagggtggggctctctaacccacaggtgttggctgcctggcccatgtgcccactgtctcttccacttggtctgggtttggcaggcactgcctgctacttgagggccaggatgctcccccagggaagaaacggaatagtgtggggtgtgtgcagggctgcatcccgcagatggctggaatattaaaattcttctatattggctggtaaattgccatggccctgagccactgagtatgttcattgccacccctgtccctcccctgggcacccctcactttccctgatcctgcaattaaagggttaatgtgtggcatatggaagggactcccaggaccctgtgcccagcttccatgctgactgatggttaaataatgtgattgtctcctcccagg

SEQ ID NO: 232722 - DNA, 6209 bp, Artificial Sequence
  derived and/or modified sequence
tgggggctctgggcgccagggtggccggggacacacagaagcggcagccaccgaggagggagcagtgccgggagccccgacggcgccttgctgcatggagctgggccgctgacagctgtcgctgcccgcagcctctgacctccctgggaccccggcgtctgaggctcatagtctgctccctgtcttctgtcagcctcagggcatccagcgtctcaggccgacctgggtccctgggacccggcgtttcggcttctcagccatggagcggtgcagccgctgccatcgcctcctcctcctcctacctctggtgctggggctgagcgcggccccaggctgggcaggtgcaccccctgtggatgtgctccgggccctgaggttcccctccctccctgatggtgtccggagagcgaaaggcatctgtccagctgatgtggcctaccgagtggcacgacctgcccagctcagtgcacccactcgccagcttttcccaggaggatttcccaaagatttctctctgctgactgttgtccggacccgccctggtctccaagctcccctcctgactctctacagtgcccagggtgtccgacagctgggcctggagctgggcccacctgtccgcttcctgtatgaagaccagactgggcggcctcaacctccctctcagccagtcttccgaggcctcagcctagcagatggcaagtggcaccgtgtggctgtggctgtgaagggccagtctgtcaccctcattgttgactgcaagaagcgagtcacccggcctctcccccgaagtgctcgtccagtattggacacccatggagtgatcatctttggtgcccgtattctggatgaagaagtctttgagggtgatgtccaggagctggccattgtcccaggggtccaggcagcctatgaatcatgtgaacagaaggagctggaatgcgaggggggccagagggaaagaccccaaaaccaacagcctcacagagcccagagatctccacagcagcaaccatcaagacttcacaggccacaaaatcaggaaccccagagccaggaccccaccccaggtgaagaggaagaaatcctggagtcgagcctcttgccaccccttgaggaggctgcccatggaccccgagggctgaagggagagaaaggagagcctgcagtgttggaacctggtatgctcgtggaggggccccctggcccagaaggccctgcgggattgattggtccccctggcatccaggggaacccaggcccagttggagaccctggagagaggggcccccctggccgagcagggctccctggatcagatggggctcctggtcctcctggcacatctctcatgctcccattccggtttggcagtggtgggggtgacaagggccctgtggtggcggcccaggaggctcaggcccaggcgatcctgcagcaggcgaggctggcgctccgtggaccccctggccccatgggatacacagggcgccctggacccttgggccaacctgggagccctggcctgaaaggagagtctggagacttaggacctcagggccccagaggacctcagggcctcacaggccctcctggcaaggctgggcgaaggggccgggcaggtgctgatggagcccgagggatgcctggagatcctggagtgaagggtgaccgaggttttgatggactcccagggctccctggagagaagggccataggggtgatactggtgcccagggccttcctggtccccctggtgaggatggagagaggggagatgacggggagattgggcctcgagggctgcctggagagtcgggacctcgaggtctccttggccccaaaggcccacctggtattcctggaccccctggcgtccgaggcatggatggtccccagggccccaaagggagcttgggaccccagggagagccaggacctcctggacaacagggcacccctgggacccagggtcttcccgggccccagggtgccatcggccctcatggagagaagggtcctcaagggaagccagggctccccggcatgcctggctcagacggacccccgggtcacccagggaaggaaggtccccctggaaccaaaggaaaccagggtccctctggacctcagggacctctaggatacccaggacctcgaggggtcaagggtgtggacggaattcggggtctgaagggtcataagggtgagaagggtgaggatggctttcctgggttcaaaggtgacataggcgtgaaaggtgacaggggcgaagttggagtccctggttccaggggagaggatggtcctgaggggccaaagggacgcactggaccgactggagaccctgggcccccagggctcatgggcgagaagggcaagctgggtgttcctggtctgcctggctatcctggacgtcagggacccaaggggtccctaggatttcctggctttcctggtgccagtggagagaagggagcccggggcctgtcggggaagtcagggcctcggggagaacggggccccacgggtccacggggtcagcggggaccccgaggtgccactgggaagtctggagctaagggaacatctggtggtgatggcccccatgggccccctggagagaggggcctccctggacctcagggtcccaacgggtttcctggaccgaaaggacccccgggcccccctgggaaggacgggctgccgggacacccaggccaaagaggagaagtgggtttccaagggaagaccggcccccctggtcctccaggagtggtgggacctcagggagcagcaggagaaaccggccctatgggggagagaggtcacccaggccccccggggccccctggagagcagggactacctgggacagctggaaaagaaggaacaaagggtgaccctggtccccctggggccccagggaaggatggtcctgctggtctgaggggattcccaggagagagaggcctcccaggcactgctggtggacctggtttgaaggggaatgaaggtccgtctggcccccctggccctgcaggctcccctggggaacgaggtgcagcaggatcagggggacccattggtccgccagggcgcccaggcccgcagggtccccctggagcagcaggagagaaaggtgtcccaggtgagaagggccccattggcccaactggccgagatggagtgcagggtcctgtggggcttcctggtcctgctgggcctccaggtgtggctggagaggatggagacaagggtgaggtgggggaccccggacagaagggcaccaaagggaacaagggtgaacatggccctcctggaccccctggacccattggtcctgtggggcagcctggagcagcgggagcagatggggagcctggagctcggggaccccagggacactttggagccaaaggtgatgaaggaacaagaggattcaatgggcccccaggacccattggcctacagggtttgccaggcccctctggggagaagggagaaacaggagatgtgggtcctatgggaccacctggccccccaggacctcgaggtccagctggacccaatggcgctgatggcccacaaggtcccccaggaggtgttgggaacctgggtccccctggagagaagggggaaccaggagagtcaggatctccagggatccagggcgagccaggtgtcaagggtccacgcggggaacgtggagagaaaggagagtcggggcagccaggagagccagggccaccagggcctaaaggccccacaggcgatgatggccccaaagggaaccctggtcctgttggttttcctggtgaccctggcccccctggagaaggtggccctcggggccaggatggtgctaagggtgaccgaggcgaggatggtgagccaggacagcctggatcccctggtcccaccggggagaatggacccccagggccacttggaaagcgaggtcctgctggctcgcctggttccgaggggcgacaaggagggaagggagccaagggagatcctggcgctataggtgccccggggaagacaggcccggtgggtcctgcaggcccagcagggaaacctggccctgatggtctgagggggctcccaggctcagtgggtcagcaaggccgacctggagctacaggccaggctgggcccccaggtcctgtgggacccccagggctgcctggtctccggggcgatgctggagccaagggagagaagggccacccaggtctcattggactgattgggcccccgggtgagcagggagagaagggagatcggggacttcctgggcctcagggctcccctgggcagaagggtgagatgggtatcccaggagcatccggccccattggtcctggaggtccccccggcctccccggacctgctggccccaaaggagccaaaggagccacaggcccaggcggacccaagggagagaagggtgtgcagggccctccaggacacccgggtcccccaggcgaggtgatccagccactgcccattcagatgcccaagaagactcggcgctcggtggatggaagccgtctgatgcaggaagatgaggccataccgaccgggggagcccccggcagtcctggggggctggaggagatctttggctcactcgactccctgcgggaggagatcgagcagatgaggcggccaacagggacccaggacagccctgctcgcacctgccaggacctgaagctgtgccacccagagcttcccgatggagagtactgggtcgaccccaaccagggctgtgctcgggatgccttccgagttttctgcaacttcacagcagggggtgagacctgtgtgacgcctagggatgacgtcacgcagttctcttacgtggactcagagggctccccagtgggtgtggtccagctcaccttcctgcggctgctcagcgtctcagcccaccaggacgtctcctacccctgctctggagcagcccgtgacggtcccctgagactccgtggggccaatgaggatgagctgagcccggagactagcccctatgtcaaagaattcagagatggctgccagacacagcaaggccggacggtgctggaggtgcgaacgcctgtgctggagcagctgccagtgctggatgcctccttctcagacctgggagccccaccgaggcggggaggggtgctgctggggcctgtctgcttcatgggataggaccgtctctgtctgatcctgtccattcggaaccaggcccacctggaatcccacaacatcagctctgtgccacctcccaagagggctcctcactatctagggagccctgggccagggcgtggagagccctcagtcggggcaggccaggggaggggtgaagtggttgcctggacaccccacgggaggagtggcatctggggctcttggccctcccacctggagcctgttacccgttagagagctgagacccttatttaaaactcacctcccaatcaccccaaacaaatggaagagaagagaaaggacatggcgtattttgtatttaaaagtaattgtattaattatttaaagtgtggaaagcaaaataacaaaaaagagaaacgccaacaaaaatcagcagatgttgaagacaggggtctcgggggtgggctccggcacccacatcctggagtcaggactttcctcagtgactgtgtgtaggggggtttcagggctgaaccccacctccctcccaccttcctcccacctcacctgtcgcacccactgtgaaagttggaatatgtggtctccctggcctcagggctctgactctgccagggtggggctctctaacccacaggtgttggctgcctggcccatgtgcccactgtctcttccacttggtctgggtttggcaggcactgcctgctacttgagggccaggatgctcccccagggaagaaacggaatagtgtggggtgtgtgcagggctgcatcccgcagatggctggaatattaaaattcttctatattggctggtaaattgccatggccctgagccactgagtatgttcattgccacccctgtccctcccctgggcacccctcactttccctgatcctgcaattaaagggttaatgtgtggcatatggaagggactcccaggaccctgtgcccagcttccatgctgactgatggttaaataatgtgattgtctcctcccaggtgtctgtgtca

SEQ ID NO: 232723 - DNA, 5868 bp, Artificial Sequence
  derived and/or modified sequence
gtgcaccccctgtggatgtgctccgggccctgaggttcccctccctccctgatggtgtccggagagcgaaaggcatctgtccagctgatgtggcctaccgagtggcacgacctgcccagctcagtgcacccactcgccagcttttcccaggaggatttcccaaagatttctctctgctgactgttgtccggacccgccctggtctccaagctcccctcctgactctctacagtgcccagggtgtccgacagctgggcctggagctgggccgacctgtccgcttcctgtatgaagaccagactgggcggcctcaacctccctctcagccagtcttccgaggcctcagcctagcagatggcaagtggcaccgtgtggctgtggctgtgaagggccagtctgtcaccctcattgttgactgcaagaagcgagtcacccggcctctcccccgaagtgctcgtccagtattggacacccatggagtgatcatctttggtgcccgtattctggatgaagaagtctttgagggtgatgtccaggagctggccattgtcccaggggtccaggcagcctatgaatcatgtgaacagaaggagctggaatgcgaggggggccagagggaaagaccccaaaaccaacagcctcacagagcccagagatctccacagcagcaaccatcaagacttcacaggccacaaaatcaggaaccccagagccaggaccccaccccaggtgaagaggaagaaatcctggagtcgagcctcttgccaccccttgaggaggctgcccatggaccccgagggctgaagggagagaaaggagagcctgcagtgttggaacctggtatgctcgtggaggggccccctggcccagaaggccctgcgggattgattggtccccctggcatccaggggaacccaggcccagttggagaccctggagagaggggcccccctggccgagcagggctccctggatcagatggggctcctggtcctcctggcacatctctcatgctcccattccggtttggcagtggtgggggtgacaagggccctgtggtggcggcccaggaggctcaggcccaggcgatcctgcagcaggcgaggctggcgctccgtggaccccctggccccatgggatacacagggcgccctggacccttgggccaacctgggagccctggcctgaaaggagagtctggagacttaggacctcagggccccagaggacctcagggcctcacaggccctcctggcaaggctgggcgaaggggccgggcaggtgctgatggagcccgagggatgcctggagatcctggagtgaagggtgaccgaggttttgatggactcccagggctccctggagagaagggccataggggtgatactggtgcccagggccttcctggtccccctggtgaggatggagagaggggagatgacggggagattgggcctcgagggctgcctggagagtcgggacctcgaggtctccttggccccaaaggcccacctggtattcctggaccccctggcgtccgaggcatggatggtccccagggccccaaagggagcttgggaccccagggagagccaggacctcctggacaacagggcacccctgggacccagggtcttcccgggccccagggtgccatcggccctcatggagagaagggtcctcaagggaagccagggctccccggcatgcctggctcagacggacccccgggtcacccagggaaggaaggtccccctggaaccaaaggaaaccagggtccctctggacctcagggacctctaggatacccaggacctcgaggggtcaagggtgtggacggaattcggggtctgaagggtcataagggtgagaagggtgaggatggctttcctgggttcaaaggtgacataggcgtgaaaggtgacaggggcgaagttggagtccctggttccaggggagaggatggtcctgaggggccaaagggacgcactggaccgactggagaccctgggcccccagggctcatgggcgagaagggcaagctgggtgttcctggtctgcctggctatcctggacgtcagggacccaaggggtccctaggatttcctggctttcctggtgccagtggagagaagggagcccggggcctgtcggggaagtcagggcctcggggagaacggggccccacgggtccacggggtcagcggggaccccgaggtgccactgggaagtctggagctaagggaacatctggtggtgatggcccccatgggccccctggagagaggggcctccctggacctcagggtcccaacgggtttcctggaccgaaaggacccccgggcccccctgggaaggacgggctgccgggacacccaggccaaagaggagaagtgggtttccaagggaagaccggcccccctggtcctccaggagtggtgggacctcagggagcagcaggagaaaccggccctatgggggagagaggtcacccaggccccccggggccccctggagagcagggactacctgggacagctggaaaagaaggaacaaagggtgaccctggtccccctggggccccagggaaggatggtcctgctggtctgaggggattcccaggagagagaggcctcccaggcactgctggtggacctggtttgaaggggaatgaaggtccgtctggcccccctggccctgcaggctcccctggggaacgaggtgcagcaggatcagggggacccattggtccgccagggcgcccaggcccgcagggtccccctggagcagcaggagagaaaggtgtcccaggtgagaagggccccattggcccaactggccgagatggagtgcagggtcctgtggggcttcctggtcctgctgggcctccaggtgtggctggagaggatggagacaagggtgaggtgggggaccccggacagaagggcaccaaagggaacaagggtgaacatggccctcctggaccccctggacccattggtcctgtggggcagcctggagcagcgggagcagatggggagcctggagctcggggaccccagggacactttggagccaaaggtgatgaaggaacaagaggattcaatgggcccccaggacccattggcctacagggtttgccaggcccctctggggagaagggagaaacaggagatgtgggtcctatgggaccacctggccccccaggacctcgaggtccagctggacccaatggcgctgatggcccacaaggtcccccaggaggtgttgggaacctgggtccccctggagagaagggggaaccaggagagtcaggatctccagggatccagggcgagccaggtgtcaagggtccacgcggggaacgtggagagaaaggagagtcggggcagccaggagagccagggccaccagggcctaaaggccccacaggcgatgatggccccaaagggaaccctggtcctgttggttttcctggtgaccctggcccccctggagaaggtggccctcggggccaggatggtgctaagggtgaccgaggcgaggatggtgagccaggacagcctggatcccctggtcccaccggggagaatggacccccagggccacttggaaagcgaggtcctgctggctcgcctggttccgaggggcgacaaggagggaagggagccaagggagatcctggcgctataggtgccccggggaagacaggcccggtgggtcctgcaggcccagcagggaaacctggccctgatggtctgagggggctcccaggctcagtgggtcagcaaggccgacctggagctacaggccaggctgggcccccaggtcctgtgggacccccagggctgcctggtctccggggcgatgctggagccaagggagagaagggccacccaggtctcattggactgattgggcccccgggtgagcagggagagaagggagatcggggacttcctgggcctcagggctcccctgggcagaagggtgagatgggtatcccaggagcatccggccccattggtcctggaggtccccccggcctccccggacctgctggccccaaaggagccaaaggagccacaggcccaggcggacccaagggagagaagggtgtgcagggccctccaggacacccgggtcccccaggcgaggtgatccagccactgcccattcagatgcccaagaagactcggcgctcggtggatggaagccgtctgatgcaggaagatgaggccataccgaccgggggagcccccggcagtcctggggggctggaggagatctttggctcactcgactccctgcgggaggagatcgagcagatgaggcggccaacagggacccaggacagccctgctcgcacctgccaggacctgaagctgtgccacccagagcttcccgatggagagtactgggtcgaccccaaccagggctgtgctcgggatgccttccgagttttctgcaacttcacagcagggggtgagacctgtgtgacgcctagggatgacgtcacgcagttctcttacgtggactcagagggctccccagtgggtgtggtccagctcaccttcctgcggctgctcagcgtctcagcccaccaggacgtctcctacccctgctctggagcagcccgtgacggtcccctgagactccgtggggccaatgaggatgagctgagcccggagactagcccctatgtcaaagaattcagagatggctgccagacacagcaaggccggacggtgctggaggtgcgaacgcctgtgctggagcagctgccagtgctggatgcctccttctcagacctgggagccccaccgaggcggggaggggtgctgctggggcctgtctgcttcatgggataggaccgtctctgtctgatcctgtccattcggaaccaggcccacctggaatcccacaacatcagctctgtgccacctcccaagagggctcctcactatctagggagccctgggccagggcgtggagagccctcagtcggggcaggccaggggaggggtgaagtggttgcctggacaccccacgggaggagtggcatctggggctcttggccctcccacctggagcctgttacccgttagagagctgagacccttatttaaaactcacctcccaatcaccccaaacaaatggaagagaagagaaaggacatggcgtattttgtatttaaaagtaattgtattaattatttaaagtgtggaaagcaaaataacaaaaaagagaaacgccaacaaaaatcagcagatgttgaagacaggggtctcgggggtgggctccggcacccacatcctggagtcaggactttcctcagtgactgtgtgtaggggggtttcagggctgaaccccacctccctcccaccttcctcccacctcacctgtcgcacccactgtgaaagttggaatatgtggtctccctggcctcagggctctgactctgccagggtggggctctctaacccacaggtgttggctgcctggcccatgtgcccactgtctcttccacttggtctgggtttggcaggcactgcctgctacttgagggccaggatgctcccccagggaagaaacggaatagtgtggggtgtgtgcagggctgcatcccgcagatggctggaatattaaaattcttctatattggctggtaaattgccatggccctgagccactgagtatgttcattgccacccctgtccctcccctgggcacccctcactttccctgatcctgcaattaaagggttaatgtgtggcatatggaagggactcccaggaccctgtgcccagcttccatgctgactgatggttaaataatgtgattgtctcctcccaggtgtctgtgtca

SEQ ID NO: 232724 - DNA, 6209 bp, Artificial Sequence
  derived and/or modified sequence
tgggggctctgggcgccagggtggccggggacacacagaagcggcagccaccgaggagggagcagtgccgggagccccgacggcgccttgctgcatggagctgggccgctgacagctgtcgctgcccgcagcctctgacctccctgggaccccggcgtctgaggctcatagtctgctccctgtcttctgtcagcctcagggcatccagcgtctcaggccgacctgggtccctgggacccggcgtttcggcttctcagccatggagcggtgcagccgctgccatcgcctcctcctcctcctacctctggtgctggggctgagcgcggccccaggctgggcaggtgcaccccctgtggatgtgctccgggccctgaggttcccctccctccctgatggtgtccggagagcgaaaggcatctgtccagctgatgtggcctaccgagtggcacgacctgcccagctcagtgcacccactcgccagcttttcccaggaggatttcccaaagatttctctctgctgactgttgtccggacccgccctggtctccaagctcccctcctgactctctacagtgcccagggtgtccgacagctgggcctggagctgggccgacctgtccgcttcctgtatgaagaccagactgggcggcctcaacctccctctcagccagtcttccgaggcctcagcctagcagatggcaagtggcaccgtgtggctgtggctgtgaagggccagtctgtcaccctcattgttgactgcaagaagcgagtcacccggcctctcccccgaagtgctcgtccagtattggacacccatggagtgatcatctttggtgcccgtattctggatgaagaagtctttgagggtgatgtccaggagctggccattgtcccaggggtccaggcagcctatgaatcatgtgaacagaaggagctggaatgcgaggggggccagagggaaagaccccaaaaccaacagcctcacagagcccagagatctccacagcagcaaccatcaagacttcacaggccacaaaatcaggaaccccagagccaggaccccaccccaggtgaagaggaagaaatcctggagtcgagcctcttgccaccccttgaggaggctgcccatggaccccgagggctgaagggagagaaaggagagcctgcagtgttggaacctggtatgctcgtggaggggccccctggcccagaaggccctgcgggattgattggtccccctggcatccaggggaacccaggcccagttggagaccctggagagaggggcccccctggccgagcagggctccctggatcagatggggctcctggtcctcctggcacatctctcatgctcccattccggtttggcagtggtgggggtgacaagggccctgtggtggcggcccaggaggctcaggcccaggcgatcctgcagcaggcgaggctggcgctccgtggaccccctggccccatgggatacacagggcgccctggacccttgggccaacctgggagccctggcctgaaaggagagtctggagacttaggacctcagggccccagaggacctcagggcctcacaggccctcctggcaaggctgggcgaaggggccgggcaggtgctgatggagcccgagggatgcctggagatcctggagtgaagggtgaccgaggttttgatggactcccagggctccctggagagaagggccataggggtgatactggtgcccagggccttcctggtccccctggtgaggatggagagaggggagatgacggggagattgggcctcgagggctgcctggagagtcgggacctcgaggtctccttggccccaaaggcccacctggtattcctggaccccctggcgtccgaggcatggatggtccccagggccccaaagggagcttgggaccccagggagagccaggacctcctggacaacagggcacccctgggacccagggtcttcccgggccccagggtgccatcggccctcatggagagaagggtcctcaagggaagccagggctccccggcatgcctggctcagacggacccccgggtcacccagggaaggaaggtccccctggaaccaaaggaaaccagggtccctctggacctcagggacctctaggatacccaggacctcgaggggtcaagggtgtggacggaattcggggtctgaagggtcataagggtgagaagggtgaggatggctttcctgggttcaaaggtgacataggcgtgaaaggtgacaggggcgaagttggagtccctggttccaggggagaggatggtcctgaggggccaaagggacgcactggaccgactggagaccctgggcccccagggctcatgggcgagaagggcaagctgggtgttcctggtctgcctggctatcctggacgtcagggacccaaggggtccctaggatttcctggctttcctggtgccagtggagagaagggagcccggggcctgtcggggaagtcagggcctcggggagaacggggccccacgggtccacggggtcagcggggaccccgaggtgccactgggaagtctggagctaagggaacatctggtggtgatggcccccatgggccccctggagagaggggcctccctggacctcagggtcccaacgggtttcctggaccgaaaggacccccgggcccccctgggaaggacgggctgccgggacacccaggccaaagaggagaagtgggtttccaagggaagaccggcccccctggtcctccaggagtggtgggacctcagggagcagcaggagaaaccggccctatgggggagagaggtcacccaggccccccggggccccctggagagcagggactacctgggacagctggaaaagaaggaacaaagggtgaccctggtccccctggggccccagggaaggatggtcctgctggtctgaggggattcccaggagagagaggcctcccaggcactgctggtggacctggtttgaaggggaatgaaggtccgtctggcccccctggccctgcaggctcccctggggaacgaggtgcagcaggatcagggggacccattggtccgccagggcgcccaggcccgcagggtccccctggagcagcaggagagaaaggtgtcccaggtgagaagggccccattggcccaactggccgagatggagtgcagggtcctgtggggcttcctggtcctgctgggcctccaggtgtggctggagaggatggagacaagggtgaggtgggggaccccggacagaagggcaccaaagggaacaagggtgaacatggccctcctggaccccctggacccattggtcctgtggggcagcctggagcagcgggagcagatggggagcccggagctcggggaccccagggacactttggagccaaaggtgatgaaggaacaagaggattcaatgggcccccaggacccattggcctacagggtttgccaggcccctctggggagaagggagaaacaggagatgtgggtcctatgggaccacctggccccccaggacctcgaggtccagctggacccaatggcgctgatggcccacaaggtcccccaggaggtgttgggaacctgggtccccctggagagaagggggaaccaggagagtcaggatctccagggatccagggcgagccaggtgtcaagggtccacgcggggaacgtggagagaaaggagagtcggggcagccaggagagccagggccaccagggcctaaaggccccacaggcgatgatggccccaaagggaaccctggtcctgttggttttcctggtgaccctggcccccctggagaaggtggccctcggggccaggatggtgctaagggtgaccgaggcgaggatggtgagccaggacagcctggatcccctggtcccaccggggagaatggacccccagggccacttggaaagcgaggtcctgctggctcgcctggttccgaggggcgacaaggagggaagggagccaagggagatcctggcgctataggtgccccggggaagacaggcccggtgggtcctgcaggcccagcagggaaacctggccctgatggtctgagggggctcccaggctcagtgggtcagcaaggccgacctggagctacaggccaggctgggcccccaggtcctgtgggacccccagggctgcctggtctccggggcgatgctggagccaagggagagaagggccacccaggtctcattggactgattgggcccccgggtgagcagggagagaagggagatcggggacttcctgggcctcagggctcccctgggcagaagggtgagatgggtatcccaggagcatccggccccattggtcctggaggtccccccggcctccccggacctgctggccccaaaggagccaaaggagccacaggcccaggcggacccaagggagagaagggtgtgcagggccctccaggacacccgggtcccccaggcgaggtgatccagccactgcccattcagatgcccaagaagactcggcgctcggtggatggaagccgtctgatgcaggaagatgaggccataccgaccgggggagcccccggcagtcctggggggctggaggagatctttggctcactcgactccctgcgggaggagatcgagcagatgaggcggccaacagggacccaggacagccctgctcgcacctgccaggacctgaagctgtgccacccagagcttcccgatggagagtactgggtcgaccccaaccagggctgtgctcgggatgccttccgagttttctgcaacttcacagcagggggtgagacctgtgtgacgcctagggatgacgtcacgcagttctcttacgtggactcagagggctccccagtgggtgtggtccagctcaccttcctgcggctgctcagcgtctcagcccaccaggacgtctcctacccctgctctggagcagcccgtgacggtcccctgagactccgtggggccaatgaggatgagctgagcccggagactagcccctatgtcaaagaattcagagatggctgccagacacagcaaggccggacggtgctggaggtgcgaacgcctgtgctggagcagctgccagtgctggatgcctccttctcagacctgggagccccaccgaggcggggaggggtgctgctggggcctgtctgcttcatgggataggaccgtctctgtctgatcctgtccattcggaaccaggcccacctggaatcccacaacatcagctctgtgccacctcccaagagggctcctcactatctagggagccctgggccagggcgtggagagccctcagtcggggcaggccaggggaggggtgaagtggttgcctggacaccccacgggaggagtggcatctggggctcttggccctcccacctggagcctgttacccgttagagagctgagacccttatttaaaactcacctcccaatcaccccaaacaaatggaagagaagagaaaggacatggcgtattttgtatttaaaagtaattgtattaattatttaaagtgtggaaagcaaaataacaaaaaagagaaacgccaacaaaaatcagcagatgttgaagacaggggtctcgggggtgggctccggcacccacatcctggagtcaggactttcctcagtgactgtgtgtaggggggtttcagggctgaaccccacctccctcccaccttcctcccacctcacctgtcgcacccactgtgaaagttggaatatgtggtctccctggcctcagggctctgactctgccagggtggggctctctaacccacaggtgttggctgcctggcccatgtgcccactgtctcttccacttggtctgggtttggcaggcactgcctgctacttgagggccaggatgctcccccagggaagaaacggaatagtgtggggtgtgtgcagggctgcatcccgcagatggctggaatattaaaattcttctatattggctggtaaattgccatggccctgagccactgagtatgttcattgccacccctgtccctcccctgggcacccctcactttccctgatcctgcaattaaagggttaatgtgtggcatatggaagggactcccaggaccctgtgcccagcttccatgctgactgatggttaaataatgtgattgtctcctcccaggtgtctgtgtca

SEQ ID NO: 232725 - DNA, 6182 bp, Artificial Sequence
  derived and/or modified sequence
cacacagaagcggcagccaccgaggagggagcagtgccgggagccccgacggcgccttgctgcatggagctgggccgctgacagctgtcgctgcccgcagcctctgacctccctgggaccccggcgtctgaggctcatagtctgctccctgtcttctgtcagcctcagggcatccagcgtctcaggccgacctgggtccctgggacccggcgtttcggcttctcagccatggagcggtgcagccgctgccatcgcctcctcctcctcctacctctggtgctggggctgagcgcggccccaggctgggcaggtgcaccccctgtggatgtgctccgggccctgaggttcccctccctccctgatggtgtccggagagcgaaaggcatctgtccagctgatgtggcctaccgagtggcacgacctgcccagctcagtgcacccactcgccagcttttcccaggaggatttcccaaagatttctctctgctgactgttgtccggacccgccctggtctccaagctcccctcctgactctctacagtgcccagggtgtccgacagctgggcctggagctgggccgacctgtccgcttcctgtatgaagaccagactgggcggcctcaacctccctctcagccagtcttccgaggcctcagcctagcagatggcaagtggcaccgtgtggctgtggctgtgaagggccagtctgtcaccctcattgttgactgcaagaagcgagtcacccggcctctcccccgaagtgctcgtccagtattggacacccatggagtgatcatctttggtgcccgtattctggatgaagaagtctttgagggtgatgtccaggagctggccattgtcccaggggtccaggcagcctatgaatcatgtgaacagaaggagctggaatgcgaggggggccagagggaaagaccccaaaaccaacagcctcacagagcccagagatctccacagcagcaaccatcaagacttcacaggccacaaaatcaggaaccccagagccagcccactgagtctctctactatgactacgagcccccctattatgatgtgatgactacggggacaacccctgattatcaggctgcccatggaccccgagggctgaagggagagaaaggagagcctgcagtgttggaacctggtatgctcgtggaggggccccctggcccagaaggccctgcgggattgattggtccccctggcatccaggggaacccaggcccagttggagaccctggagagaggggcccccctggccgagcagggctccctggatcagatggggctcctggtcctcctggcacatctctcatgctcccattccggtttggcagtggtgggggtgacaagggccctgtggtggcggcccaggaggctcaggcccaggcgatcctgcagcaggcgaggctggcgctccgtggaccccctggccccatgggatacacagggcgccctggacccttgggccaacctgggagccctggcctgaaaggagagtctggagacttaggacctcagggccccagaggacctcagggcctcacaggccctcctggcaaggctgggcgaaggggccgggcaggtgctgatggagcccgagggatgcctggagatcctggagtgaagggtgaccgaggttttgatggactcccagggctccctggagagaagggccataggggtgatactggtgcccagggccttcctggtccccctggtgaggatggagagaggggagatgacggggagattgggcctcgagggctgcctggagagtcgggacctcgaggtctccttggccccaaaggcccacctggtattcctggaccccctggcgtccgaggcatggatggtccccagggccccaaagggagcttgggaccccagggagagccaggacctcctggacaacagggcacccctgggacccagggtcttcccgggccccagggtgccatcggccctcatggagagaagggtcctcaagggaagccagggctccccggcatgcctggctcagacggacccccgggtcacccagggaaggaaggtccccctggaaccaaaggaaaccagggtccctctggacctcagggtcctctaggatacccaggacctcgaggggtcaagggtgtggacggaattcggggtctgaagggtcataagggtgagaagggtgaggatggctttcctgggttcaaaggtgacataggcgtgaaaggtgacaggggcgaagttggagtccctggttccaggggagaggatggtcctgaggggccaaagggacgcactggaccgactggagaccctgggcccccagggctcatgggcgagaagggcaagctgggtgttcctggtctgcctggctatcctggacgtcagggacccaaggggtccctaggatttcctggctttcctggtgccagtggagagaagggagcccggggcctgtcggggaagtcagggcctcggggagaacggggccccacgggtccacggggtcagcggggaccccgaggtgccactgggaagtctggagctaagggaacatctggtggtgatggcccccatgggccccctggagagaggggcctccctggacctcagggtcccaacgggtttcctggaccgaaaggacccctgggcccccctgggaaggacgggctgccgggacacccaggccaaagaggagaagtgggtttccaagggaagaccggcccccctggtcctccaggagtggtgggacctcagggagcagcaggagaaaccggccctatgggggagagaggtcacccaggccccccggggccccctggagagcagggactacctgggacagctggaaaagaaggaacaaagggtgaccctggtccccctggggccccagggaaggatggtcctgctggtctgaggggattcccaggagagagaggcctcccaggcactgctggtggacctggtttgaaggggaatgaaggtccgtctggcccccctggccctgcaggctcccctggggaacgaggtgcagcaggatcagggggacccattggtccgccagggcgcccaggcccgcagggtccccctggagcagcaggagagaaaggtgtcccaggtgagaagggccccattggcccaactggccgagatggagtgcagggtcctgtggggcttcctggtcctgctgggcctccaggtgtggctggagaggatggagacaagggtgaggtgggggaccccggacagaagggcaccaaagggaacaagggtgaacatggccctcctggaccccctggacccattggtcctgtggggcagcctggagcagcgggagcagatggggagcccggagctcggggaccccagggacactttggagccaaaggtgatgaaggaacaagaggattcaatgggcccccaggacccattggcctacagggtttgccaggcccctctggggagaagggagaaacaggagatgtgggtcctatgggaccacctggccccccaggacctcgaggtccagctggacccaatggcgctgatggcccacaaggtcccccaggaggtgttgggaacctgggtccccctggagagaagggggaaccaggagagtcaggatctccagggatccagggcgagccaggtgtcaagggtccacgcggggaacgtggagagaaaggagagtcggggcagccaggagagccagggccaccagggcctaaaggccccacaggcgatgatggccccaaagggaaccctggtcctgttggttttcctggtgaccctggcccccctggagaaggtggccctcggggccaggatggtgctaagggtgaccgaggcgaggatggtgagccaggacagcctggatcccctggtcccaccggggagaatggacccccagggccacttggaaagcgaggtcctgctggctcgcctggttccgaggggcgacaaggagggaagggagccaagggagatcctggcgctataggtgccccggggaagacaggcccggtgggtcctgcaggcccagcagggaaacctggccctgatggtctgagggggctcccaggctcagtgggtcagcaaggccgacctggagctacaggccaggctgggcccccaggtcctgtgggacccccagggctgcctggtctccggggcgatgctggagccaagggagagaagggccacccaggtctcattggactgattgggcccccgggtgagcagggagagaagggagatcggggacttcctgggcctcagggctcccctgggcagaagggtgagatgggtatcccaggagcatccggccccattggtcctggaggtccccccggcctccccggacctgctggccccaaaggagccaaaggagccacaggcccaggcggacccaagggagagaagggtgtgcagggccctccaggacacccgggtcccccaggcgaggtgatccagccactgcccattcagatgcccaagaagactcggcgctcggtggatggaagccgtctgatgcaggaagatgaggccataccgaccgggggagcccccggcagtcctggggggctggaggagatctttggctcactcgactccctgcgggaggagatcgagcagatgaggcggccaacagggacccaggacagccctgctcgcacctgccaggacctgaagctgtgccacccagagcttcccgatggagagtactgggtcgaccccaaccagggctgtgctcgggatgccttccgagttttctgcaacttcacagcagggggtgagacctgtgtgacgcctagggatgacgtcacgcagttctcttacgtggactcagagggctccccagtgggtgtggtccagctcaccttcctgcggctgctcagcgtctcagcccaccaggacgtctcctacccctgctctggagcagcccgtgacggtcccctgagactccgtggggccaatgaggatgagctgagcccggagactagcccctatgtcaaagaattcagagatggctgccagacacagcaaggccggacggtgctggaggtgcgaacgcctgtgctggagcagctgccagtgctggatgcctccttctcagacctgggagccccaccgaggcggggaggggtgctgctggggcctgtctgcttcatgggataggaccgtctctgtctgatcctgtccattcggaaccaggcccacctggaatcccacaacatcagctctgtgccacctcccaagagggctcctcactatctagggagccctgggccagggcgtggagagccctcagtcggggcaggccaggggaggggtgaagtggttgcctggacaccccacgggaggagtggcatctggggctcttggccctcccacctggagcctgttacccgttagagagctgagacccttatttaaaactcacctcccaatcaccccaaacaaatggaagagaagagaaaggacatggcgtattttgtatttaaaagtaattgtattaattatttaaagtgtggaaagcaaaataacaaaaaagagaaacgccaacaaaaatcagcagatgttgaagacaggggtctcgggggtgggctccggcacccacatcctggagtcaggactttcctcagtgactgtgtgtaggggggtttcagggctgaaccccacctccctcccaccttcctcccacctcacctgtcgcacccactgtgaaagttggaatatgtggtctccctggcctcagggctctgactctgccagggtggggctctctaacccacaggtgttggctgcctggcccatgtgcccactgtctcttccacttggtctgggtttggcaggcactgcctgctacttgagggccaggatgctcccccagggaagaaacggaatagtgtggggtgtgtgcagggctgcatcccgcagatggctggaatattaaaattcttctatattggctggtaaattgccatggccctgagccactgagtatgttcattgccacccctgtccctcccctgggcacccctcactttccctgatcctgcaattaaagggttaatgtgtggcatatggaagggactcccaggaccctgtgcccagcttccatgctgactgatggttaaataatgtgattgtctcctcccagg

SEQ ID NO: 232726 - DNA, 6182 bp, Artificial Sequence
  derived and/or modified sequence
cacacagaagcggcagccaccgaggagggagcagtgccgggagccccgacggcgccttgctgcatggagctgggccgctgacagctgtcgctgcccgcagcctctgacctccctgggaccccggcgtctgaggctcatagtctgctccctgtcttctgtcagcctcagggcatccagcgtctcaggccgacctgggtccctgggacccggcgtttcggcttctcagccatggagcggtgcagccgctgccatcgcctcctcctcctcctacctctggtgctggggctgagcgcggccccaggctgggcaggtgcaccccctgtggatgtgctccgggccctgaggttcccctccctccctgatggtgtccggagagcgaaaggcatctgtccagctgatgtggcctaccgagtggcacgacctgcccagctcagtgcacccactcgccagcttttcccaggaggatttcccaaagatttctctctgctgactgttgtccggacccgccctggtctccaagctcccctcctgactctctacagtgcccagggtgtccgacagctgggcctggagctgggccgacctgtccgcttcctgtatgaagaccagactgggcggcctcaacctccctctcagccagtcttccgaggcctcagcctagcagatggcaagtggcaccgtgtggctgtggctgtgaagggccagtctgtcaccctcattgttgactgcaagaagcgagtcacccggcctctcccccgaagtgctcgtccagtattggacacccatggagtgatcatctttggtgcccgtattctggatgaagaagtctttgagggtgatgtccaggagctggccattgtcccaggggtccaggcagcctatgaatcatgtgaacagaaggagctggaatgcgaggggggccagagggaaagaccccaaaaccaacagcctcacagagcccagagatctccacagcagcaaccatcaagacttcacaggccacaaaatcaggaaccccagagccagcccactgagtctctctactatgactacaagcccccctattatgatgtgatgactacggggacaacccctgattatcaggctgcccatggaccccgagggctgaagggagagaaaggagagcctgcagtgttggaacctggtatgctcgtggaggggccccctggcccagaaggccctgcgggattgattggtccccctggcatccaggggaacccaggcccagttggagaccctggagagaggggcccccctggccgagcagggctccctggatcagatggggctcctggtcctcctggcacatctctcatgctcccattccggtttggcagtggtgggggtgacaagggccctgtggtggcggcccaggaggctcaggcccaggcgatcctgcagcaggcgaggctggcgctccgtggaccccctggccccatgggatacacagggcgccctggacccttgggccaacctgggagccctggcctgaaaggagagtctggagacttaggacctcagggccccagaggacctcagggcctcacaggccctcctggcaaggctgggcgaaggggccgggcaggtgctgatggagcccgagggatgcctggagatcctggagtgaagggtgaccgaggttttgatggactcccagggctccctggagagaagggccataggggtgatactggtgcccagggccttcctggtccccctggtgaggatggagagaggggagatgacggggagattgggcctcgagggctgcctggagagtcgggacctcgaggtctccttggccccaaaggcccacctggtattcctggaccccctggcgtccgaggcatggatggtccccagggccccaaagggagcttgggaccccagggagagccaggacctcctggacaacagggcacccctgggacccagggtcttcccgggccccagggtgccatcggccctcatggagagaagggtcctcaagggaagccagggctccccggcatgcctggctcagacggacccccgggtcacccagggaaggaaggtccccctggaaccaaaggaaaccagggtccctctggacctcagggacctctaggatacccaggacctcgaggggtcaagggtgtggacggaattcggggtctgaagggtcataagggtgagaagggtgaggatggctttcctgggttcaaaggtgacataggcgtgaaaggtgacaggggcgaagttggagtccctggttccaggggagaggatggtcctgaggggccaaagggacgcactggaccgactggagaccctgggcccccagggctcatgggcgagaagggcaagctgggtgttcctggtctgcctggctatcctggacgtcagggacccaaggggtccctaggatttcctggctttcctggtgccagtggagagaagggagcccggggcctgtcggggaagtcagggcctcggggagaacggggccccacgggtccacggggtcagcggggaccccgaggtgccactgggaagtctggagctaagggaacatctggtggtgatggcccccatgggccccctggagagaggggcctccctggacctcagggtcccaacgggtttcctggaccgaaaggacccccgggcccccctgggaaggacgggctgccgggacacccaggccaaagaggagaagtgggtttccaagggaagaccggcccccctggtcctccaggagtggtgggacctcagggagcagcaggagaaaccggccctatgggggagagaggtcacccaggccccccggggccccctggagagcagggactacctgggacagctggaaaagaaggaacaaagggtgaccctggtccccctggggccccagggaaggatggtcctgctggtctgaggggattcccaggagagagaggcctcccaggcactgctggtggacctggtttgaaggggaatgaaggtccgtctggcccccctggccctgcaggctcccctggggaacgaggtgcagcaggatcagggggacccattggtccgccagggcgcccaggcccgcagggtccccctggagcagcaggagagaaaggtgtcccaggtgagaagggccccattggcccaactggccgagatggagtgcagggtcctgtggggcttcctggtcctgctgggcctccaggtgtggctggagaggatggagacaagggtgaggtgggggaccccggacagaagggcaccaaagggaacaagggtgaacatggccctcctggaccccctggacccattggtcctgtggggcagcctggagcagcgggagcagatggggagcctggagctcggggaccccagggacactttggagccaaaggtgatgaaggaacaagaggattcaatgggcccccaggacccattggcctacagggtttgccaggcccctctggggagaagggagaaacaggagatgtgggtcctatgggaccacctggccccccaggacctcgaggtccagctggacccaatggcgctgatggcccacaaggtcccccaggaggtgttgggaacctgggtccccctggagagaagggggaaccaggagagtcaggatctccagggatccagggcgagccaggtgtcaagggtccacgcggggaacgtggagagaaaggagagtcggggcagccaggagagccagggccaccagggcctaaaggccccacaggcgatgatggccccaaagggaaccctggtcctgttggttttcctggtgaccctggcccccctggagaaggtggccctcggggccaggatggtgctaagggtgaccgaggcgaggatggtgagccaggacagcctggatcccctggtcccaccggggagaatggacccccagggccacttggaaagcgaggtcctgctggctcgcctggttccgaggggcgacaaggagggaagggagccaagggagatcctggcgctataggtgccccggggaagacaggcccggtgggtcctgcaggcccagcagggaaacctggccctgatggtctgagggggctcccaggctcagtgggtcagcaaggccgacctggagctacaggccaggctgggcccccaggtcctgtgggacccccagggctgcctggtctccggggcgatgctggagccaagggagagaagggccacccaggtctcattggactgattgggcccccgggtgagcagggagagaagggagatcggggacttcctgggcctcagggctcccctgggcagaagggtgagatgggtatcccaggagcatccggccccattggtcctggaggtccccccggcctccccggacctgctggccccaaaggagccaaaggagccacaggcccaggcggacccaagggagagaagggtgtgcagggccctccaggacacccgggtcccccaggcgaggtgatccagccactgcccattcagatgcccaagaagactcggcgctcggtggatggaagccgtctgatgcaggaagatgaggccataccgaccgggggagcccccggcagtcctggggggctggaggagatctttggctcactcgactccctgcgggaggagatcgagcagatgaggcggccaacagggacccaggacagccctgctcgcacctgccaggacctgaagctgtgccacccagagcttcccgatggagagtactgggtcgaccccaaccagggctgtgctcgggatgccttccgagttttctgcaacttcacagcagggggtgagacctgtgtgacgcctagggatgacgtcacgcagttctcttacgtggactcagagggctccccagtgggtgtggtccagctcaccttcctgcggctgctcagcgtctcagcccaccaggacgtctcctacccctgctctggagcagcccgtgacggtcccctgagactccgtggggccaatgaggatgagctgagcccggagactagcccctatgtcaaagaattcagagatggctgccagacacagcaaggccggacggtgctggaggtgcgaacgcctgtgctggagcagctgccagtgctggatgcctccttctcagacctgggagccccaccgaggcggggaggggtgctgctggggcctgtctgcttcatgggataggaccgtctctgtctgatcctgtccattcggaaccaggcccacctggaatcccacaacatcagctctgtgccacctcccaagagggctcctcactatctagggagccctgggccagggcgtggagagccctcagtcggggcaggccaggggaggggtgaagtggttgcctggacaccccacgggaggagtggcatctggggctcttggccctcccacctggagcctgttacccgttagagagctgagacccttatttaaaactcacctcccaatcaccccaaacaaatggaagagaagagaaaggacatggcgtattttgtatttaaaagtaattgtattaattatttaaagtgtggaaagcaaaataacaaaaaagagaaacgccaacaaaaatcagcagatgttgaagacaggggtctcgggggtgggctccggcacccacatcctggagtcaggactttcctcagtgactgtgtgtaggggggtttcagggctgaaccccacctccctcccaccttcctcccacctcacctgtcgcacccactgtgaaagttggaatatgtggtctccctggcctcagggctctgactctgccagggtggggctctctaacccacaggtgttggctgcctggcccatgtgcccactgtctcttccacttggtctgggtttggcaggcactgcctgctacttgagggccaggatgctcccccagggaagaaacggaatagtgtggggtgtgtgcagggctgcatcccgcagatggctggaatattaaaattcttctatattggctggtaaattgccatggccctgagccactgagtatgttcattgccacccctgtccctcccctgggcacccctcactttccctgatcctgcaattaaagggttaatgtgtggcatatggaagggactcccaggaccctgtgcccagcttccatgctgactgatggttaaataatgtgattgtctcctcccagg

SEQ ID NO: 232727 - DNA, 6245 bp, Artificial Sequence
  derived and/or modified sequence
cacacagaagcggcagccaccgaggagggagcagtgccgggagccccgacggcgccttgctgcatggagctgggccgctgacagctgtcgctgcccgcagcctctgacctccctgggaccccggcgtctgaggctcatagtctgctccctgtcttctgtcagcctcagggcatccagcgtctcaggccgacctgggtccctgggacccggcgtttcggcttctcagccatggagcggtgcagccgctgccatcgcctcctcctcctcctacctctggtgctggggctgagcgcggccccaggctgggcaggtgcaccccctgtggatgtgctccgggccctgaggttcccctccctccctgatggtgtccggagagcgaaaggcatctgtccagctgatgtggcctaccgagtggcacgacctgcccagctcagtgcacccactcgccagcttttcccaggaggatttcccaaagatttctctctgctgactgttgtccggacccgccctggtctccaagctcccctcctgactctctacagtgcccagggtgtccgacagctgggcctggagctgggcccacctgtccgcttcctgtatgaagaccagactgggcggcctcaacctccctctcagccagtcttccgaggcctcagcctagcagatggcaagtggcaccgtgtggctgtggctgtgaagggccagtctgtcaccctcattgttgactgcaagaagcgagtcacccggcctctcccccgaagtgctcgtccagtattggacacccatggagtgatcatctttggtgcccgtattctggatgaagaagtctttgagggtgatgtccaggagctggccattgtcccaggggtccaggcagcctatgaatcatgtgaacagaaggagctggaatgcgaggggggccagagggaaagaccccaaaaccaacagcctcacagagcccagagatctccacagcagcaaccatcaagacttcacaggccacaaaatcaggaaccccagagccagcccactgagtctctctactatgactacaagcccccctattatgatgtgatgactacggggacaacccctgattatcaggaccccaccccaggtgaagaggaagaaatcctggagtcgagcctcttgccaccccttgaggaggctgcccatggaccccgagggctgaagggagagaaaggagagcctgcagtgttggaacctggtatgctcgtggaggggccccctggcccagaaggccctgcgggattgattggtccccctggcatccaggggaacccaggcccagttggagaccctggagagaggggcccccctggccgagcagggctccctggatcagatggggctcctggtcctcctggcacatctctcatgctcccattccggtttggcagtggtgggggtgacaagggccctgtggtggcggcccaggaggctcaggcccaggcgatcctgcagcaggcgaggctggcgctccgtggaccccctggccccatgggatacacagggcgccctggacccttgggccaacctgggagccctggcctgaaaggagagtctggagacttaggacctcagggccccagaggacctcagggcctcacaggccctcctggcaaggctgggcgaaggggccgggcaggtgctgatggagcccgagggatgcctggagatcctggagtgaagggtgaccgaggttttgatggactcccagggctccctggagagaagggccataggggtgatactggtgcccagggccttcctggtccccctggtgaggatggagagaggggagatgacggggagattgggcctcgagggctgcctggagagtcgggacctcgaggtctccttggccccaaaggcccacctggtattcctggaccccctggcgtccgaggcatggatggtccccagggccccaaagggagcttgggaccccagggagagccaggacctcctggacaacagggcacccctgggacccagggtcttcccgggccccagggtgccatcggccctcatggagagaagggtcctcaagggaagccagggctccccggcatgcctggctcagacggacccccgggtcacccagggaaggaaggtccccctggaaccaaaggaaaccagggtccctctggacctcagggacctctaggatacccaggacctcgaggggtcaagggtgtggacggaattcggggtctgaagggtcataagggtgagaagggtgaggatggctttcctgggttcaaaggtgacataggcgtgaaaggtgacaggggcgaagttggagtccctggttccaggggagaggatggtcctgaggggccaaagggacgcactggaccgactggagaccctgggcccccagggctcatgggcgagaagggcaagctgggtgttcctggtctgcctggctatcctggacgtcagggacccaaggggtccctaggatttcctggctttcctggtgccagtggagagaagggagcccggggcctgtcggggaagtcagggcctcggggagaacggggccccacgggtccacggggtcagcggggaccccgaggtgccactgggaagtctggagctaagggaacatctggtggtgatggcccccatgggccccctggagagaggggcctccctggacctcagggtcccaacgggtttcctggaccgaaaggacccccgggcccccctgggaaggacgggctgccgggacacccaggccaaagaggagaagtgggtttccaagggaagaccggcccccctggtcctccaggagtggtgggacctcagggagcagcaggagaaaccggccctatgggggagagaggtcacccaggccccccggggccccctggagagcagggactacctgggacagctggaaaagaaggaacaaagggtgaccctggtccccctggggccccagggaaggatggtcctgctggtctgaggggattcccaggagagagaggcctcccaggcactgctggtggacctggtttgaaggggaatgaaggtccgtctggcccccctggccctgcaggctcccctggggaacgaggtgcagcaggatcagggggacccattggtccgccagggcgcccaggcccgcagggtccccctggagcagcaggagagaaaggtgtcccaggtgagaagggccccattggcccaactggccgagatggagtgcagggtcctgtggggcttcctggtcctgctgggcctccaggtgtggctggagaggatggagacaagggtgaggtgggggaccccggacagaagggcaccaaagggaacaagggtgaacatggccctcctggaccccctggacccattggtcctgtggggcagcctggagcagcgggagcagatggggagcctggagctcggggaccccagggacactttggagccaaaggtgatgaaggaacaagaggattcaatgggcccccaggacccattggcctacagggtttgccaggcccctctggggagaagggagaaacaggagatgtgggtcctatgggaccacctggccccccaggacctcgaggtccagctggacccaatggcgctgatggcccacaaggtcccccaggaggtgttgggaacctgggtccccctggagagaagggggaaccaggagagtcaggatctccagggatccagggcgagccaggtgtcaagggtccacgcggggaacgtggagagaaaggagagtcggggcagccaggagagccagggccaccagggcctaaaggccccacaggcgatgatggccccaaagggaaccctggtcctgttggttttcctggtgaccctggcccccctggagaaggtggccctcggggccaggatggtgctaagggtgaccgaggcgaggatggtgagccaggacagcctggatcccctggtcccaccggggagaatggacccccagggccacttggaaagcgaggtcctgctggctcgcctggttccgaggggcgacaaggagggaagggagccaagggagatcctggcgctataggtgccccggggaagacaggcccggtgggtcctgcaggcccagcagggaaacctggccctgatggtctgagggggctcccaggctcagtgggtcagcaaggccgacctggagctacaggccaggctgggcccccaggtcctgtgggacccccagggctgcctggtctccggggcgatgctggagccaagggagagaagggccacccaggtctcattggactgattgggcccccgggtgagcagggagagaagggagatcggggacttcctgggcctcagggctcccctgggcagaagggtgagatgggtatcccaggagcatccggccccattggtcctggaggtccccccggcctccccggacctgctggccccaaaggagccaaaggagccacaggcccaggcggacccaagggagagaagggtgtgcagggccctccaggacacccgggtcccccaggcgaggtgatccagccactgcccattcagatgcccaagaagactcggcgctcggtggatggaagccgtctgatgcaggaagatgaggccataccgaccgggggagcccccggcagtcctggggggctggaggagatctttggctcactcgactccctgcgggaggagatcgagcagatgaggcggccaacagggacccaggacagccctgctcgcacctgccaggacctgaagctgtgccacccagagcttcccgatggagagtactgggtcgaccccaaccagggctgtgctcgggatgccttccgagttttctgcaacttcacagcagggggtgagacctgtgtgacgcctagggatgacgtcacgcagttctcttacgtggactcagagggctccccagtgggtgtggtccagctcaccttcctgcggctgctcagcgtctcagcccaccaggacgtctcctacccctgctctggagcagcccgtgacggtcccctgagactccgtggggccaatgaggatgagctgagcccggagactagcccctatgtcaaagaattcagagatggctgccagacacagcaaggccggacggtgctggaggtgcgaacgcctgtgctggagcagctgccagtgctggatgcctccttctcagacctgggagccccaccgaggcggggaggggtgctgctggggcctgtctgcttcatgggataggaccgtctctgtctgatcctgtccattcggaaccaggcccacctggaatcccacaacatcagctctgtgccacctcccaagagggctcctcactatctagggagccctgggccagggcgtggagagccctcagtcggggcaggccaggggaggggtgaagtggttgcctggacaccccacgggaggagtggcatctggggctcttggccctcccacctggagcctgttacccgttagagagctgagacccttatttaaaactcacctcccaatcaccccaaacaaatggaagagaagagaaaggacatggcgtattttgtatttaaaagtaattgtattaattatttaaagtgtggaaagcaaaataacaaaaaagagaaacgccaacaaaaatcagcagatgttgaagacaggggtctcgggggtgggctccggcacccacatcctggagtcaggactttcctcagtgactgtgtgtaggggggtttcagggctgaaccccacctccctcccaccttcctcccacctcacctgtcgcacccactgtgaaagttggaatatgtggtctccctggcctcagggctctgactctgccagggtggggctctctaacccacaggtgttggctgcctggcccatgtgcccactgtctcttccacttggtctgggtttggcaggcactgcctgctacttgagggccaggatgctcccccagggaagaaacggaatagtgtggggtgtgtgcagggctgcatcccgcagatggctggaatattaaaattcttctatattggctggtaaattgccatggccctgagccactgagtatgttcattgccacccctgtccctcccctgggcacccctcactttccctgatcctgcaattaaagggttaatgtgtggcatatggaagggactcccaggaccctgtgcccagcttccatgctgactgatggttaaataatgtgattgtctcctcccagg

SEQ ID NO: 232728 - DNA, 6245 bp, Artificial Sequence
  derived and/or modified sequence
cacacagaagcggcagccaccgaggagggagcagtgccgggagccccgacggcgccttgctgcatggagctgggccgctgacagctgtcgctgcccgcagcctctgacctccctgggaccccggcgtctgaggctcatagtctgctccctgtcttctgtcagcctcagggcatccagcgtctcaggccgacctgggtccctgggacccggcgtttcggcttctcagccatggagcggtgcagccgctgccatcgcctcctcctcctcctacctctggtgctggggctgagcgcggccccaggctgggcaggtgcaccccctgtggatgtgctccgggccctgaggttcccctccctccctgatggtgtccggagagcgaaaggcatctgtccagctgatgtggcctaccgagtggcacgacctgcccagctcagtgcacccactcgccagcttttcccaggaggatttcccaaagatttctctctgctgactgttgtccggacccgccctggtctccaagctcccctcctgactctctacagtgcccagggtgtccgacagctgggcctggagctgggccgacctgtccgcttcctgtatgaagaccagactgggcggcctcaacctccctctcagccagtcttccgaggcctcagcctagcagatggcaagtggcaccgtgtggctgtggctgtgaagggccagtctgtcaccctcattgttgactgcaagaagcgagtcacccggcctctcccccgaagtgctcgtccagtattggacacccatggagtgatcatctttggtgcccgtattctggatgaagaagtctttgagggtgatgtccaggagctggccattgtcccaggggtccaggcagcctatgaatcatgtgaacagaaggagctggaatgcgaggggggccagagggaaagaccccaaaaccaacagcctcacagagcccagagatctccacagcagcaaccatcaagacttcacaggccacaaaatcaggaaccccagagccagcccactgagtctctctactatgactacaagcccccctattatgatgtgatgactacggggacaacccctgattatcaggaccccaccccaggtgaagaggaagaaatcctggagtcgagcctcttgccaccccttgaggaggctgcccatggaccccgagggctgaagggagagaaaggagagcctgcagtgttggaacctggtatgctcgtggaggggccccctggcccagaaggccctgcgggattgattggtccccctggcatccaggggaacccaggcccagttggagaccctggagagaggggcccccctggccgagcagggctccctggatcagatggggctcctggtcctcctggcacatctctcatgctcccattccggtttggcagtggtgggggtgacaagggccctgtggtggcggcccaggaggctcaggcccaggcgatcctgcagcaggcgaggctggcgctccgtggaccccctggccccatgggatacacagggcgccctggacccttgggccaacctgggagccctggcctgaaaggagagtctggagacttaggacctcagggccccagaggacctcagggcctcacaggccctcctggcaaggctgggcgaaggggccgggcaggtgctgatggagcccgagggatgcctggagatcctggagtgaagggtgaccgaggttttgatggactcccagggctccctggagagaagggccataggggtgatactggtgcccagggccttcctggtccccctggtgaggatggagagaggggagatgacggggagattgggcctcgagggctgcctggagagtcgggacctcgaggtctccttggccccaaaggcccacctggtattcctggaccccctggcgtccgaggcatggatggtccccagggccccaaagggagcttgggaccccagggagagccaggacctcctggacaacagggcacccctgggacccagggtcttcccgggccccagggtgccatcggccctcatggagagaagggtcctcaagggaagccagggctccccggcatgcctggctcagacggacccccgggtcacccagggaaggaaggtccccctggaaccaaaggaaaccagggtccctctggacctcagggacctctaggatacccaggacctcgaggggtcaagggtgtggacggaattcggggtctgaagggtcataagggtgagaagggtgaggatggctttcctgggttcaaaggtgacataggcgtgaaaggtgacaggggcgaagttggagtccctggttccaggggagaggatggtcctgaggggccaaagggacgcactggaccgactggagaccctgggcccccagggctcatgggcgagaagggcaagctgggtgttcctggtctgcctggctatcctggacgtcagggacccaaggggtccctaggatttcctggctttcctggtgccagtggagagaagggagcccggggcctgtcggggaagtcagggcctcggggagaacggggccccacgggtccacggggtcagcggggaccccgaggtgccactgggaagtctggagctaagggaacatctggtggtgatggcccccatgggccccctggagagaggggcctccctggacctcagggtcccaacgggtttcctggaccgaaaggacccccgggcccccctgggaaggacgggctgccgggacacccaggccaaagaggagaagtgggtttccaagggaagaccggcccccctggtcctccaggagtggtgggacctcagggagcagcaggagaaaccggccctatgggggagagaggtcacccaggccccccggggccccctggagagcagggactacctgggacagctggaaaagaaggaacaaagggtgaccctggtccccctggggccccagggaaggatggtcctgctggtctgaggggattcccaggagagagaggcctcccaggcactgctggtggacctggtttgaaggggaatgaaggtccgtctggcccccctggccctgcaggctcccctggggaacgaggtgcagcaggatcagggggacccattggtccgccagggcgcccaggcccgcagggtccccctggagcagcaggagagaaaggtgtcccaggtgagaagggccccattggcccaactggccgagatggagtgcagggtcctgtggggcttcctggtcctgctgggcctccaggtgtggctggagaggatggagacaagggtgaggtgggggaccccggacagaagggcaccaaagggaacaagggtgaacatggccctcctggaccccctggacccattggtcctgtggggcagcctggagcagcgggagcagatggggagcccggagctcggggaccccagggacactttggagccaaaggtgatgaaggaacaagaggattcaatgggcccccaggacccattggcctacagggtttgccaggcccctctggggagaagggagaaacaggagatgtgggtcctatgggaccacctggccccccaggacctcgaggtccagctggacccaatggcgctgatggcccacaaggtcccccaggaggtgttgggaacctgggtccccctggagagaagggggaaccaggagagtcaggatctccagggatccagggcgagccaggtgtcaagggtccacgcggggaacgtggagagaaaggagagtcggggcagccaggagagccagggccaccagggcctaaaggccccacaggcgatgatggccccaaagggaaccctggtcctgttggttttcctggtgaccctggcccccctggagaaggtggccctcggggccaggatggtgctaagggtgaccgaggcgaggatggtgagccaggacagcctggatcccctggtcccaccggggagaatggacccccagggccacttggaaagcgaggtcctgctggctcgcctggttccgaggggcgacaaggagggaagggagccaagggagatcctggcgctataggtgccccggggaagacaggcccggtgggtcctgcaggcccagcagggaaacctggccctgatggtctgagggggctcccaggctcagtgggtcagcaaggccgacctggagctacaggccaggctgggcccccaggtcctgtgggacccccagggctgcctggtctccggggcgatgctggagccaagggagagaagggccacccaggtctcattggactgattgggcccccgggtgagcagggagagaagggagatcggggacttcctgggcctcagggctcccctgggcagaagggtgagatgggtatcccaggagcatccggccccattggtcctggaggtccccccggcctccccggacctgctggccccaaaggagccaaaggagccacaggcccaggcggacccaagggagagaagggtgtgcagggccctccaggacacccgggtcccccaggcgaggtgatccagccactgcccattcagatgcccaagaagactcggcgctcggtggatggaagccgtctgatgcaggaagatgaggccataccgaccgggggagcccccggcagtcctggggggctggaggagatctttggctcactcgactccctgcgggaggagatcgagcagatgaggcggccaacagggacccaggacagccctgctcgcacctgccaggacctgaagctgtgccacccagagcttcccgatggagagtactgggtcgaccccaaccagggctgtgctcgggatgccttccgagttttctgcaacttcacagcagggggtgagacctgtgtgacgcctagggatgacgtcacgcagttctcttacgtggactcagagggctccccagtgggtgtggtccagctcaccttcctgcggctgctcagcgtctcagcccaccaggacgtctcctacccctgctctggagcagcccgtgacggtcccctgagactccgtggggccaatgaggatgagctgagcccggagactagcccctatgtcaaagaattcagagatggctgccagacacagcaaggccggacggtgctggaggtgcgaacgcctgtgctggagcagctgccagtgctggatgcctccttctcagacctgggagccccaccgaggcggggaggggtgctgctggggcctgtctgcttcatgggataggaccgtctctgtctgatcctgtccattcggaaccaggcccacctggaatcccacaacatcagctctgtgccacctcccaagagggctcctcactatctagggagccctgggccagggcgtggagagccctcagtcggggcaggccaggggaggggtgaagtggttgcctggacaccccacgggaggagtggcatctggggctcttggccctcccacctggagcctgttacccgttagagagctgagacccttatttaaaactcacctcccaatcaccccaaacaaatggaagagaagagaaaggacatggcgtattttgtatttaaaagtaattgtattaattatttaaagtgtggaaagcaaaataacaaaaaagagaaacgccaacaaaaatcagcagatgttgaagacaggggtctcgggggtgggctccggcacccacatcctggagtcaggactttcctcagtgactgtgtgtaggggggtttcagggctgaaccccacctccctcccaccttcctcccacctcacctgtcgcacccactgtgaaagttggaatatgtggtctccctggcctcagggctctgactctgccagggtggggctctctaacccacaggtgttggctgcctggcccatgtgcccactgtctcttccacttggtctgggtttggcaggcactgcctgctacttgagggccaggatgctcccccagggaagaaacggaatagtgtggggtgtgtgcagggctgcatcccgcagatggctggaatattaaaattcttctatattggctggtaaattgccatggccctgagccactgagtatgttcattgccacccctgtccctcccctgggcacccctcactttccctgatcctgcaattaaagggttaatgtgtggcatatggaagggactcccaggaccctgtgcccagcttccatgctgactgatggttaaataatgtgattgtctcctcccagg

SEQ ID NO: 232729 - DNA, 4953 bp, Artificial Sequence
  derived and/or modified sequence
atggagcggtgcagccggtgccaccggctgctgctgctgctgcccctggtcttagggctttctgctgcacctgggtgggccggagcgccacctgtcgacgtccttcgcgcccttagattcccttccctgcccgacggtgtccgcagggctaaagggatctgtccagctgacgtggcttatcgcgttgctcgccccgcacagctatcagcaccaacgaggcaactgttccctggaggctttccaaaagacttctccttgttgacagttgtccggacaagaccaggtctgcaagctcctctcttgacactttacagtgctcagggagtcagacagttgggactggagctgggtcgcccggtgcgattcctgtatgaagatcaaactgggcggccccagcccccctctcagccagtctttaggggcctctcattagcagacggcaagtggcatcgggtcgcggtcgccgtcaaagggcagagcgtcacgcttatagtagactgtaagaaaagggtcacccgacctctcccacggagcgctcgccctgtccttgatacccacggagtaattatcttcggggccaggatccttgacgaggaagtttttgagggcgatgtgcaggagctcgctatcgtcccaggcgtgcaggccgcttacgagtcttgcgagcaaaaggagttagaatgtgagggagggcagcgtgaacgcccacaaaaccagcagcctcatcgcgcacagcgatcgccccagcagcagccttccaggctgcacagaccccagaaccaagaacctcagtcacaagacccaaccccaggtgaggaagaagagattctggaatcaagcctgctgccgcctctggaggaggccgcccacggtcctaggggactgaaaggggagaagggggaacctgctgtcctcgaaccgggaatgttggtggagggccctcctggtcccgagggaccagcagggcttattgggccaccaggcatccaggggaaccctgggccagtgggagacccgggcgagaggggacctccaggacgggctggcctccccggcagcgatggtgcccccggaccccctggaacaagcttaatgctgccattcaggtttggttccggtggcggcgataaggggcctgttgtcgcagcccaggaggcccaggctcaggccatccttcagcaagctcgcctggccctgcgcgggcctcctggacccatgggttacaccgggcgacctggaccgctgggccagcctggctctcccggccttaagggagagtccggggatttgggtcctcaagggcctaggggccctcaggggctgacaggaccacctggaaaagccggaagacgaggcagggccggggcggatggggctcgaggcatgcccggagatcccggggtgaagggagacaggggctttgacggattgcccgggctgcccggagagaagggccacagaggtgacacaggtgcccaaggcctgcccgggcctcctggcgaagacggcgaacggggggatgatggtgagatcgggcctcgggggctacctggagaatctgggccccgggggcttttagggccaaaaggtcctcccggaatccctggaccgccaggtgttagaggaatggatggccctcagggaccaaaaggatctcttggtccacagggtgaacctggtccccccgggcagcaggggacaccaggaacccaaggactcccgggaccccaaggggcgatcggcccacacggtgagaaagggccccagggcaaaccgggattacccggtatgccagggagcgatgggccgcccggacaccccggcaaggaagggccacctgggacaaagggcaaccaggggcccagtggccctcaaggacctctcggttatcccggcccacggggagtgaagggagtagacggcatccggggactcaagggacataaaggtgagaagggagaagatgggtttccagggttcaagggggatatcggcgttaagggcgatcggggcgaggtaggagtgcccggatctagaggagaagatgggcctgaaggcccaaagggaaggactggaccaacgggggaccctggtccgcccggccttatgggagaaaaaggaaaacttggtgttcctggcctccctggttacccagggcgacaaggccccaagggcagcctgggcttcccaggcttccccggcgcaagcggagagaaaggcgcccggggactttctggcaagtctgggccaagaggagagagggggcctaccgggcccagaggtcaacggggaccccgcggcgcaacgggaaaaagcggggccaaaggtacttccgggggcgatggcccccatggcccacctggggaacgcggtcttcccgggcctcaaggaccgaatggctttcccggccccaaggggccccccgggcctccagggaaggatggtctgcctggccacccggggcagagaggggaagtgggcttccaggggaagacaggccctcctgggcctcccggtgtcgttggcccccaaggcgctgctggggaaaccggaccaatgggcgaaaggggccatccaggcccgcctggacccccaggagagcagggacttccaggcaccgctggcaaggaagggaccaaaggcgacccaggcccgccaggcgcacctggcaaagacgggcctgccggccttcgcggattccccggcgagaggggactcccgggtacagccggcgggcccggactgaagggtaatgaaggaccctccggcccgccaggacccgccggcagccctggcgagcgcggagcagctgggagtgggggcccaatcggcccacctggtcggcccggtccccaagggcctcccggcgccgcaggcgagaaaggcgtacccggagagaagggtccaatcgggccaacgggtcgggacggagtgcaggggcctgtgggtctccctggtcctgccggacccccaggagttgcaggagaagatggcgataaaggggaagtcggagaccctggtcagaaaggtactaaaggcaataaaggagagcacggacctccgggcccacctgggccaatcggacctgtcggtcagccaggcgctgcaggcgctgatggagagcccggggcgagagggcctcagggccacttcggcgccaagggtgatgaaggcacccgtggcttcaacggcccccctggtcccatcggcttgcaggggctccccggacctagtggagaaaagggcgagaccggagatgtgggtcctatgggaccacctggcccacctgggcctcgcggacccgcagggccgaatggggccgatggacctcaaggtcctcccgggggggttgggaacctgggcccacctggagagaagggggagccgggagagtctggctcacctgggattcagggagagcctggcgtgaagggcccacggggggaaaggggagaaaagggcgagtccggacagccaggcgagccagggccacccggaccaaaaggcccaactggcgatgatgggcctaagggcaacccagggccagtgggctttccgggcgaccccggtcctccaggtgaaggtggtccgagagggcaggatggagcaaaaggcgacaggggggaggatggggagcctggacagcctggatctcctggccccacaggagagaatggaccacccggcccgctggggaaaagggggcccgccgggagccctggttcagagggacggcaaggaggtaaaggagctaaaggggacccaggtgccatcggcgcgcctggcaaaacaggacccgtgggacctgccggcccagctggcaagccaggcccggatgggctgcgcggtctgcctggcagcgttgggcagcagggcagacccggcgctactggacaggcaggcccccccggacccgtcggccctcccgggttgcccgggctccgaggggatgccggagccaagggggagaaaggccaccccgggttgattggccttatcgggccccctggggagcagggtgaaaagggcgaccggggcctcccgggcccacagggctctcctggacaaaagggagaaatgggtatcccgggggcttcaggacccatcggcccagggggaccaccaggacttcctggcccggctggccctaaaggagcgaagggagcgacgggcccaggaggccctaaaggcgagaaaggtgtacaagggccacctgggcatccaggcccgcctggcgaagttatccaaccgctgccaattcagatgccaaagaaaacacggagaagcgttgacggctcacggctcatgcaagaggatgaggcaattcctactggcggggcaccaggaagccccggcggcctggaagaaatattcggctctctcgattcactgagggaggagatagaacagatgagaagacccaccggaacacaggattctcccgcccggacatgtcaggacctgaaactgtgtcaccccgagcttcccgacggggagtactgggtcgacccaaaccaaggatgtgccagagacgcgtttcgcgtcttttgcaactttacagctggaggcgaaacctgcgtcacacctagggacgatgttacacagttctcctatgtagattctgaaggcagcccagtgggcgtggttcagcttactttcctgcgactgctgtcagtgtctgcacatcaagatgttagttacccttgctccggggccgccagagatgggcctttgcggcttaggggcgccaacgaggatgagttaagtccggaaacgtcaccatacgttaaggaattccgggatggatgtcagacacaacaggggcgtaccgtgctcgaggtcaggacacccgtgctcgaacagctaccagtcctggatgcctccttctccgacttgggcgctccccctcgccgaggtggagtgttgctgggacccgtgtgctttatggggtag

SEQ ID NO: 232730 - DNA, 4968 bp, Artificial Sequence
  derived and/or modified sequence
atggagcggtgcagccggtgccaccggctgctgctgctgctgccccttgttctcgggctcagcgcggcacccggctgggccggtgcccctcctgtcgatgtgttgcgcgcacttcgtttccccagtttaccagacggtgtcaggagagccaagggtatctgccctgccgatgtggcttatcgggtggcccgccctgcccaactgagcgccccgaccaggcagctcttccccggcgggtttccaaaggatttcagcctcctgacagttgtgagaacccgacccggccttcaagcccccttgttgaccttatactccgctcagggtgttcgccagcttggtctcgaactgggacggcctgtgcgctttctgtatgaggatcagaccggtcggccacaacccccttcgcagcccgtgttccgtggtctcagtttagccgacggtaaatggcatcgggtggccgtggctgtgaaagggcagtcggtgacactcattgtggactgtaaaaagcgggtcacacgcccgctgcctcggagcgcccgccctgtgctggatacccatggggtgattatcttcggagcccgcatccttgacgaggaagtgttcgagggagacgtgcaggaactggccatcgtacccggagtgcaggctgcttatgagagctgcgagcaaaaagagttggagtgtgaaggaggccaaagggagcgaccacagaatcagcagccccatagagcgcagaggagtcctcagcagcagccatctcgtcttcataggccacaaaatcaggagccacagtcgcagcccaccgaaagtctctattatgactatgagcccccctattatgacgtcatgactaccgggactactccggattaccaggcagcccacggtcctagaggcctgaagggagaaaagggggaaccagctgtgctcgagcctggaatgctggtcgaagggccccctggcccagaaggacctgccggcctgatcggaccacctggtatccagggcaacccgggtcccgtaggcgatcctggagagcgcggcccaccgggtcgggccggactaccaggatccgacggtgcccccggcccccctgggacgtcactgatgctgcctttcagattcggcagcggaggtggcgacaaaggcccagtagtggcagcacaggaggctcaagcccaggcaatcctgcagcaggctagattggcactgaggggtccaccagggccgatgggctataccgggcggcccggtcctctgggccagccaggcagcccaggcctgaagggcgaatccggcgatctaggaccgcagggcccaagaggcccacagggtctgactggcccccccggtaaggctggaaggagaggccgagccggggccgacggcgcaagagggatgcctggcgaccccggcgtgaagggcgatcggggatttgatggccttcccggcctcccaggagagaaagggcatcgtggcgataccggagctcaggggctgcccgggccccccggagaggatggcgaaaggggggacgacggcgagatcggaccacgcgggctgcccggtgaaagcgggcctcggggccttctgggccccaaaggaccacccgggattcctggacctccgggagtgcgtggaatggacggccctcaggggcccaagggctctttgggcccgcaaggcgaacctggccccccggggcagcaaggaacacctggcacacaaggactgcctggaccacagggagcgattggtcctcacggtgaaaagggaccacagggcaaacccgggctccctggcatgcctggctccgatgggccacctggtcatcccgggaaagagggccctccgggtacgaaagggaatcaaggccctagcggcccccagggccccctaggatatccaggccccagaggtgtgaaaggtgtggatgggattcgcggcctgaaagggcacaagggagagaagggagaggacggattccctggattcaagggcgacattggggtaaaaggcgatcgtggggaggtgggcgtgcccggatcccggggtgaagatggaccggagggacctaaaggaaggaccggtcccacgggggaccctggaccaccaggactgatgggcgagaagggcaaactgggagtccccggcttgcccggctatcccggtcgccagggacccaagggatctttgggatttccaggctttccaggcgcttcgggcgaaaagggcgctcggggactttcaggcaagtccggccccagaggggagcggggacccaccgggccacgcggacaacgcggccccagaggtgccaccgggaaatccggggcgaaagggacttcaggtggcgatggccctcacgggcctcctggagagcgcggccttcccgggccacagggccctaacggttttccaggccctaaaggcccccctggtccacctggaaaggatggtctgcctgggcatccaggccagaggggggaggtggggttccagggcaagaccggccctcctggtccccccggcgtcgtagggccgcagggggccgcgggagagactggaccgatgggcgaaagaggacatcccggaccccccggacctcccggcgagcaggggctgccaggcaccgctgggaaagagggtactaagggcgacccaggtccccctggcgcacctggaaaggacggcccagcgggcttgaggggctttcccggcgagagagggctgccaggtaccgctggggggccaggcctgaaagggaacgagggcccttctggccccccaggcccagccgggtctccaggggagagaggggccgcaggaagtggcggcccaatcggtcccccgggacggcccggcccccaggggccacctggcgcggccggtgagaaaggagtgcccggcgaaaagggacctatcggtcctacaggcagagatggggtccaggggccggtcgggctgcccgggccagctggacctccaggggttgctggcgaagacggagacaagggtgaggtcggagacccgggacagaaaggcacaaagggcaacaagggagagcacggcccccccggaccaccaggacctatcggacccgtgggacagccgggcgcagcgggagccgatggggaaccgggggctcgcgggcctcaaggacatttcggcgccaagggcgatgaggggacaagaggattcaacggtccaccgggacccataggcttgcagggtttgcccggcccatccggagagaagggagaaaccggagatgtcgggcctatgggccctccaggcccccctgggccccgtggtccagccggacctaacggagcagatggcccccaagggccgccagggggcgtggggaacctcggcccacccggggaaaagggcgaacccggtgagtctggtagccccggtattcagggagagccaggcgttaagggacctaggggagaaagaggggagaaaggagagtctgggcagccaggtgagccggggccaccaggccctaaaggcccgactggtgacgacgggccaaaaggaaaccccggcccggtgggtttccccggcgatcctggcccgcccggtgaaggcggccccaggggccaggatggcgccaagggcgatcgaggtgaagatggagaacctggtcagcccggtagtcctggaccaacaggcgaaaacggtccgcccggacctctcggaaagaggggcccagctggaagtccaggcagtgaaggccgtcagggcgggaagggagccaagggggatcccggggctatcggtgcccctggcaagactggcccagtggggcccgcaggcccggcaggtaaaccaggtccagatgggttgcgaggcctgcctggctccgtcggtcaacagggccgcccaggcgccacaggacaggccgggcctcccgggcctgtaggccctcctggccttcctggcctccgaggtgatgctggcgccaaaggggagaagggccatcctgggcttattggcctgattggaccaccaggagagcagggcgagaagggtgacaggggtttgccgggtccccagggttctccaggacagaagggcgagatgggaatacctggcgctagtggccctatagggcccggcggtccccctgggttaccaggaccagcggggcccaaaggcgccaaaggagccaccggacctggcggtccgaaaggcgaaaagggggtgcagggacctcctggacatccaggccctcctggggaggtgattcagccactaccaatccaaatgccaaagaaaacgcgccgctccgtggatgggtcccggctgatgcaagaagatgaggcgattcctaccggcggcgcccctggcagtcctgggggcctcgaagagatatttggcagcctggactccttgagggaagaaatcgagcagatgaggcgcccaaccggaacccaggatagtcccgcaagaacttgccaagatcttaagctctgccatcctgaactacctgacggcgaatattgggtggaccccaatcaaggctgcgcccgcgatgccttccgtgtcttttgtaattttacggccgggggagaaacctgcgtaacacccagagatgacgtaacccagttctcatatgtggatagcgaggggtctccggtgggggtggtgcaactgacgtttctgcgattgttaagcgtctctgctcatcaggacgtgtcgtatccatgttctggcgctgcccgggatggcccccttcgactgagaggcgccaacgaggatgagctgagtccagaaacatccccatatgttaaagagttcagggatgggtgccaaacccagcagggccgcacagtcttggaagtgagaactccagttctcgagcagctgcccgttctcgatgccagcttctctgacttaggcgctcctccccggagaggcggcgttctgctgggaccagtttgcttcatgggctag

SEQ ID NO: 232731 - DNA, 4953 bp, Artificial Sequence
  derived and/or modified sequence
atggagcggtgcagccggtgccaccggctgctgctgctgctgccccttgtgctcgggctctcagccgcccctggctgggctggcgccccacccgtagatgtgctaagggcactgcgcttcccctccctgccggacggcgtcagacgggctaagggcatatgcccagcagacgtggcttatcgggtcgcacgacctgcgcaattgagtgcaccaactcgacagctcttccccgggggatttccaaaagacttcagcctgttgactgttgtgcgtacccgcccagggctgcaagcgccgctcctcaccctttatagcgcccagggagttaggcaactcgggctcgaattaggtaggcctgtgaggtttctctacgaagatcagacagggaggcctcagcccccctcccagcctgtgttccgcggcctctcactcgctgacggcaaatggcatcgagtggccgtggctgttaaaggtcaaagtgtgacgctgatagtcgattgcaagaagagggtgactcgaccccttccccggtcagccagacccgtgctcgacacgcacggcgtgattattttcggggccaggatcctagacgaagaggtgttcgagggcgacgtgcaggagcttgccatcgttccaggtgttcaggcggcgtacgaaagctgtgaacagaaggagctggagtgcgaagggggccaacgggagagacctcagaatcagcagccacaccgggcccaaaggagcccacagcagcagcccagccgtttgcataggccacagaaccaggagccacagagtcaggatccaactcctggcgaagaagaggaaattcttgaaagctctctgctgcctcctcttgaagaagcagcacatggacccagaggactgaagggggaaaaaggtgagcctgccgtgttagagccagggatgttggtcgaaggaccacctggtccagaaggaccagcgggcctgattggtccaccggggattcagggtaaccccggccccgttggcgatccaggcgaacgggggcctccgggccgagcaggactgccaggatcagatggcgcccccggcccccccggtacctccctgatgttacccttcaggtttggcagcggtggcggtgacaaagggccagtcgtggccgcccaagaggctcaggcccaggcgatcctgcaacaagcccgcttggcacttcgggggccacccggcccaatgggttataccggacgcccgggtccactgggccaaccagggagccctgggctcaagggagagagtggtgatttggggcctcagggtcccagaggtccccagggcttgaccggccccccaggaaaagcaggaaggagaggccgcgctggggcagatggagcccgcggcatgcccggggacccaggtgtgaaaggagataggggctttgacggcctgccaggcctgcctggtgagaagggtcacaggggagatactggcgcccaaggattgcccggtcctcctggagaagatggagaacggggggacgatggagagattggccctcgcggactgcccggtgagtcaggacctcgaggacttctcggtcctaaaggaccacctgggatccccggaccgccgggcgttcgaggcatggatgggcctcaggggcccaaaggatcactgggacctcagggggagccagggccaccaggccaacagggcactcctggcacacagggtctgccgggaccacagggcgccatagggcctcatggggaaaaaggaccgcaaggaaaaccaggcctcccaggcatgccagggagcgatggcccacccggtcaccccggtaaggaaggcccccctggaacaaagggtaatcaaggtccctccggcccacagggcccgctcggttacccaggtccacgcggcgtcaagggtgtggacggaattcgaggactgaaaggccacaaaggcgaaaagggggaagacggcttccctggattcaaaggcgacataggggtgaagggcgaccgaggagaagttggcgtccctggcagtcgcggtgaagatgggcccgaagggcctaaaggcagaacagggccaacaggggaccctggaccaccgggcttgatgggcgagaaagggaaactcggagtaccaggcctgcctggttaccccggtaggcagggaccgaaagggagcctaggctttcctggcttcccaggggcctctggcgaaaagggcgccaggggattgtccgggaaaagcggcccacggggagagagggggcctaccggcccacgcgggcagagagggccacggggagccaccggaaagagtggtgccaagggcacgtcagggggagacgggccccacggcccgccaggagagagaggcttgccaggaccacaaggacctaacggttttcccggccccaagggaccactcgggcctccaggaaaagacgggctccccggccaccccgggcagcgaggggaggtcggcttccagggaaagacaggaccaccaggtcctcccggtgtggtcggaccacagggcgcagccggagagaccggccccatgggcgaacggggccatccgggacctccaggccccccaggtgagcagggactgcccggaaccgctggcaaagagggcacaaagggtgaccccggcccacccggcgcgccaggaaaggatggcccagctggtttacggggatttcccggtgagaggggtctgccaggtacagcagggggtcccggcctgaaggggaacgagggacctagcggcccccctgggcctgctgggtccccaggggaacggggcgccgcaggctcaggcggacccatcgggccacctggaagacccggtccacaaggaccccctggcgcggctggcgagaagggcgtgccaggagagaaagggccaatcggaccaacggggcgtgacggggtgcaaggacccgttgggttgccaggtccagctgggccccctggagtggctggcgaagatggcgataaaggggaggtgggggatcctgggcagaaagggaccaaggggaataaaggcgaacatgggccccccgggcctcccggtcccattggtccggtaggacagcctggagctgcaggcgccgatggcgaacccggagcccgtggcccccagggtcattttggcgccaagggcgacgaggggacgcgcggctttaacggtccgcccggacctattggactgcagggactgccaggcccctcgggcgagaaaggggaaacaggagatgtgggaccaatgggaccaccaggaccccctggaccaagggggcccgcggggccaaacggtgctgacggaccccagggtcccccaggcggtgtcgggaacctgggaccccctggcgagaagggtgaaccgggggagtcaggatctccaggtattcagggcgaacctggagttaaggggccacgcggggagagaggcgagaagggcgagagtgggcagcccggcgagcccggtcccccaggccctaagggccccaccggcgacgacggtcccaaagggaatccagggcccgtgggtttccccggcgatcccgggccccctggagagggtggaccacggggacaggatggagcgaagggtgataggggggaggacggagaacccggccagcctggatcccccggacccactggcgagaatggacctcctggcccactgggaaaacggggccccgctggttcaccgggatcggagggcagacagggcggcaagggagcgaagggggaccccggagcaataggcgccccaggaaaaaccgggcccgtaggcccagccggcccggcaggtaaacccgggccagacggactacgagggctcccagggagtgtgggccagcaggggcgtccaggagcaacaggtcaggcggggccacccggtcctgtgggcccccccgggttgcccggcctcaggggcgatgcaggggccaaaggcgagaagggtcaccctggcctcattggcctgatcgggccccctggcgaacaaggtgaaaagggtgacagaggactgccgggtcctcagggttcacctggccagaaaggggagatgggcattccaggcgctagcggtcccattggcccaggcggaccccccggcctgcccggccccgcagggccaaaaggtgctaagggcgctaccggccccgggggacctaaaggcgaaaagggagtgcagggcccacccggtcatccaggccctccgggcgaagtgattcagcctctcccaatccagatgcctaaaaaaaccaggcgctctgtcgacgggagtaggctcatgcaggaagacgaggctattcctaccggaggcgcgcccggttctccaggcgggctggaagagatctttggtagtctggattctttgcgggaagagattgagcagatgaggcggcctacagggacacaggacagtcccgcccggacttgccaggacctcaaattgtgccaccccgagctgcctgatggggaatactgggtggaccccaaccaaggatgtgcacgtgatgccttccgtgtattctgtaacttcactgctggaggtgagacctgcgttacaccccgggatgacgtcacccagtttagctacgtggatagcgaggggtcgcccgtaggagtcgtgcagctgacatttctgaggttactcagtgtgtctgcccatcaggacgtctcatacccgtgtagcggcgcagcccgcgacgggcctctgagactccggggcgcgaacgaggacgaactatcacccgagacaagcccatacgtcaaggagtttcgcgacgggtgccagacacagcagggaaggacggtcctggaggtgagaacccctgtgcttgaacagttgccagtactggacgcttctttctctgaccttggagctccccctcgcagggggggagtgttgctcggtccagtgtgcttcatgggatag

SEQ ID NO: 232732 - DNA, 4953 bp, Artificial Sequence
  derived and/or modified sequence
atggagcggtgcagccggtgccaccggctgctgctgctgctgcccctggtcctgggactgagcgccgcaccgggatgggccggcgctcctcctgtagatgtactccgcgctctgaggtttcccagtctccccgatggggtgcgcagggcaaaggggatatgtccagccgacgtggcctatcgtgtggcccgccccgcccagctttccgccccgactcgacagctgtttccaggcggttttcccaaagatttcagtcttctcaccgttgtgaggaccagacctggactgcaggcacctctgctcactctgtattctgcccaaggagttcgccagctgggcttggagctcgggcggccagtgagatttctctatgaggatcaaactggtagacctcagccaccctcgcaacccgttttccgaggcctgagtctggcagatggcaagtggcatcgggtggcagtggccgtgaaagggcagtcggtgactctgatagttgactgcaagaagcgcgtgactcggcctctcccccggtccgcccggcctgtactggacacgcatggagtcatcatttttggtgcccgcatcctggacgaagaagtattcgaaggtgacgtgcaggaattagccattgtgcctggcgtgcaggcagcatacgaaagctgcgagcagaaggagctcgagtgcgagggtggacagcgcgaaaggccccaaaaccaacagccacacagggctcaacgatcccctcagcagcagccctccaggcttcataggccccagaatcaggagcctcagtcccaagatcctactccaggggaggaggaggagatccttgaaagctccctcctgcctcctctcgaggaggccgcacacgggccaagagggctgaagggtgagaaaggggagccagctgtactagagccgggaatgcttgtcgaggggcctcccggccctgaaggacccgccggcctgatcggcccacccggtatccaaggcaatcccgggcctgtgggagacccaggggaacgtgggccacctggccgggctggtctgccaggctcagacggcgctcccgggcccccggggacctcactaatgctgcctttccgcttcggctcaggtgggggtgataagggacccgtggtcgccgctcaggaggcacaggcccaggctattctgcagcaagctcgtctcgcccttcgggggccccctggaccaatgggctatactggacggcctggccctctcgggcagcctgggagtcccgggctcaaaggtgagtcgggagatttaggacctcaagggcctagaggtccgcaagggctgactgggccacccgggaaagcaggacggcgcggccgagccggagctgatggcgctagggggatgccaggtgatcccggagtcaaaggtgatagaggtttcgatgggttaccaggcctgcctggcgagaagggccacaggggcgacacaggagcccagggattgcccggcccacctggggaggatggagagaggggcgatgatggtgaaatcggcccacggggactcccgggggagtctgggccacgtgggctgttgggacctaaaggccctccaggcatccccggaccaccaggggtcaggggtatggatggtcctcagggtccaaagggctccctgggtccccagggagaaccgggccctcccggccagcagggtactcccggaacgcaaggccttcccgggccacagggagccatcggaccacacggagaaaagggaccccaaggaaagccaggactgcccggtatgcctgggtccgatggccctcccggccatcccggcaaagaaggcccgccgggaacaaagggcaatcagggaccgtccggtccccaaggtccactcggataccctggaccacgtggcgtgaagggcgtggacggaatcagaggacttaaaggtcacaagggcgaaaaaggagaagacggctttcccggttttaaaggggacattggcgtgaagggtgacagaggcgaagtgggcgtgccaggatcccgaggagaggatgggccagaaggccctaagggccggacgggtcccacaggggaccccggacctccaggattaatgggagaaaaagggaagctcggggtgcccgggctgccaggttacccaggacgtcagggacctaagggcagccttggttttccagggtttcccggcgcctcaggcgagaagggcgccagaggtttgtcaggtaaaagtggtccacggggcgagcgagggcctaccggtccccgagggcagcggggaccccgaggtgcgacaggcaaatccggagctaagggtactagcgggggcgatggtccccacggtcctccaggcgagaggggccttcctggacctcaggggcccaatgggttccctggccccaaaggacccccgggcccacccggaaaggacggtctgccgggccacccaggtcagagaggggaagtcggattccaggggaagacaggtcctcctgggccccccggggtagtgggaccgcagggtgccgccggagaaacaggacctatgggagagagagggcatccgggccccccgggacccccaggggaacagggcctgccaggcaccgccggcaaggagggaacaaagggagaccctggcccccccggagctcccgggaaggacggccccgccggcctccgaggatttcctggggagagggggcttcccggtactgcaggaggtcccgggctgaaaggcaacgaggggccatcaggcccacctggccccgccgggtcacctggggagcgtggcgccgctggttccggcggacccattggaccacctgggcggcctggaccccagggacccccgggcgctgccggggaaaagggtgttcctggggagaagggcccgatcggccctactgggagagacggagttcaaggcccggtaggcctcccagggccggctggcccccctggagtagctggcgaggatggcgataagggcgaggttggcgatcccggtcagaaaggtactaaaggaaataagggagaacatggacccccaggacccccaggccctatcggcccagtgggccaacccggggccgccggggctgatggtgagcccggtgcccgaggcccgcagggtcacttcggcgctaaaggagatgagggaactcgcgggttcaacggccccccgggaccaatcggcctccaggggctgcctggaccttccggtgagaaaggggagacaggcgatgtagggcctatgggacccccaggccctccaggaccccggggtcctgccggccctaatggagcagatggtccacagggccctccagggggtgtgggcaacctgggcccgcctggagaaaagggggagccaggagagagtggctcccccggtattcagggtgagccgggggtaaaaggaccccggggcgagcgcggcgaaaagggagagtcaggccagcctggagaacctggcccaccaggcccaaagggcccaaccggggatgatggtccgaaaggaaatccagggcccgtcggctttcccggcgacccaggcccacccggggaaggaggtcccagaggacaggatggggccaaaggtgacagaggagaggatggagaacctggccaacctggatcgccaggtcctacaggagaaaatggtccccccgggcctcttggcaaaagaggacctgccggctctcctggcagtgaggggcgtcagggggggaaaggggcgaaaggggatcccggtgcaattggggctccggggaaaaccgggccagtaggtcctgctgggcctgccggtaaacctggaccagacggtctacgaggcctacccggttccgtcgggcagcagggacgcccaggggccaccggtcaggctggccctcccgggcccgtgggtcccccaggtttacctggcctgagaggcgacgccggtgccaaaggcgaaaaaggccatccaggcctgatcggactgattggcccccccggagagcagggtgagaaaggcgaccggggcctgcctggcccccagggatccccaggccagaagggcgagatgggaattcccggtgcctccggtcctattggccctggtgggcctcccgggttgcccggccctgcgggccctaaaggggctaaaggagcaacaggccctggcgggcctaaaggcgagaaaggggtccagggtccacctggccatccaggtccgcctggcgaggtgatccagcccctgcctattcagatgcccaagaaaacccggaggagcgtcgatgggtcacggcttatgcaggaggacgaggctattcctaccgggggcgcgccgggctcccccggcggtttggaagaaatcttcggctctctggattctttgagagaagagatcgagcagatgaggaggccaaccgggacccaagattctccggctagaacttgccaggacctcaaattgtgccatcccgaactgcccgatggagaatactgggtggatccaaaccagggctgcgcccgggatgccttccgtgtattctgcaatttcacggctggcggcgaaacatgcgtgactcctagagatgacgtgacacagttttcatatgtcgacagcgaaggaagtcctgtaggtgtggtccagctgaccttccttaggctcctgagcgtatctgcacatcaggacgtatcatatccttgctctggcgccgcacgcgacgggcccctcaggctgcggggcgcgaacgaggatgagctcagtcctgaaaccagcccatacgtgaaagaatttagggacggctgtcagacacaacaggggcggaccgtgctggaagtgcgcaccccagtacttgagcagttaccagtgcttgatgcaagttttagtgacctgggagctcccccccggcgaggaggcgtgcttcttggccccgtgtgctttatgggatag

SEQ ID NO: 232733 - DNA, 5031 bp, Artificial Sequence
  derived and/or modified sequence
atggagcggtgcagccggtgccaccggctgctgctgctgctgcccttggtgcttggcctcagcgctgcccccgggtgggccggcgcgccgcctgtggacgtgctgcgcgctctgcgtttcccctccctgcccgatggggttcgcagggcaaagggaatttgccccgccgatgtcgcatatagagtcgcgcgaccagcacagttgtccgcgcccacccgtcaacttttcccgggcggcttccctaaggacttttcccttctgaccgtggtgagaaccaggccaggtttacaggctcctctgctcaccctctattcagctcaaggcgtgcgccaactggggctggagctagggcgaccagttcgattcctgtatgaggatcagaccgggagaccccagccaccaagccaacctgtgttccgtggactctccctggctgatggaaaatggcaccgcgtcgcagtcgccgttaaagggcagtccgtgactctgatcgtggattgcaaaaaacgcgtgactcggccgctcccaagatctgcgaggcctgtgctggacacgcatggcgtgatcattttcggcgctcgtattcttgatgaggaggtgttcgaaggggatgttcaagaactggctattgtgccaggagtgcaggccgcatatgaatcatgtgagcagaaagaactggagtgtgaggggggtcagagggagcgaccacagaatcaacagccgcacagagcacagcgttcgcctcagcaacagccttcgcgcctgcataggccacagaaccaagagccacagtcgcagccaaccgagtctctatactacgattacgagcccccatactatgatgtgatgacaactgggaccacccccgattaccaagacccaaccccaggagaagaggaggaaattctcgaaagctccctgttaccgcccttagaggaggcggcacacgggccccgcggtctcaaaggagagaagggagagccggcagtacttgagccagggatgctggtggagggaccacctgggcccgaaggccccgcaggacttatcggccctcccggaatccagggaaatcccggtcctgtcggtgatcctggagagcggggccccccagggcgcgccgggctccctggttcagacggcgcccccggcccaccaggcaccagtcttatgcttcccttccgtttcggttctggaggcggcgacaagggaccagttgttgctgcccaggaggcccaggcccaggcgattcttcaacaagcaagacttgcccttcgaggaccccctgggcccatgggatatacgggcagacctggccccctggggcagcctggctcaccgggactgaagggggagtcaggggatttggggcctcagggacctagaggcccccagggtctgaccggccctccagggaaggccgggcgccgggggagggcaggtgctgacggagcccggggcatgcctggagatcctggtgtgaaaggggacagaggcttcgacgggctccccgggctgcccggcgaaaaagggcaccgtggggacactggagcccaggggcttcctggccccccaggcgaggacggagagaggggggatgatggcgaaattgggcccaggggacttcctggcgagagtggcccccgtggactactgggtcccaaggggcctcctggtatccccggtccacctggtgttagaggcatggacgggcctcaggggcctaagggcagcctcgggccgcaaggggaacctgggccccccggtcaacaggggacccctggcacacagggacttcctggcccccagggcgcaatcggcccccacggtgagaaaggcccccagggcaaacctggcttgcccggcatgccagggtccgacggccctcccggccatcctggtaaggaaggaccccccggaaccaaggggaatcagggtcctagcgggccccagggccctctgggctatcccggtcctcggggcgtcaagggtgtggatggaatccgaggcctaaaaggacacaagggtgagaagggtgaagacgggtttccaggctttaaaggggatataggtgtgaagggtgaccggggagaagtgggagttcccggcagccggggcgaggacggaccagaaggcccaaaaggccggaccgggcccaccggggaccccggtccgcccgggctgatgggagagaaaggaaagcttggcgttcctggcctcccaggctaccccggacggcagggaccgaaggggagcctgggctttcctggcttcccgggcgccagtggcgaaaagggcgcaagagggctgagtggcaagtccggtcctagaggtgaaaggggaccaacgggacccaggggacagcggggacctagaggagcgaccggaaagtccggcgccaaggggaccagtggaggggacggcccacatggcccacctggagagcgggggctgcctggtccccaaggtccaaacggatttcctggccccaaggggcctcccggcccaccaggcaaagacgggctccctggtcatcccgggcagaggggagaggttggttttcaagggaagacggggccgcctggaccacccggcgttgtgggcccccaaggagctgccggcgagaccggccctatgggcgaacgagggcaccccggcccgcctggtcccccaggggagcagggactgccaggaacggcaggaaaggagggtacaaaaggggaccccggaccccccggggcgccgggaaaggatgggccagctggactgagagggtttccaggtgagaggggcctccctgggacggcaggcggccccggactgaaggggaacgagggtccaagcggtcctcctggcccagccggctccccgggtgagcggggggcggccggttctggagggccaattgggccacctggaaggccgggaccacagggaccacccggtgccgccggagagaaaggagtgcctggcgaaaaggggcccattggtcctactggccgagacggggtgcaggggcctgttggactccccggtccggcgggtccaccaggcgtggccggggaggacggggataaaggggaagtgggcgacccaggtcagaagggtaccaagggaaacaagggagagcacgggccacctgggcctcctgggcctatcgggcccgttgggcaaccaggggccgcaggggccgatggtgaaccaggagcgcggggcccccagggccattttggagccaaaggagacgagggcacccgagggtttaacggcccgccgggtccaatcggactgcagggactgcctggcccgagcggcgagaaaggagaaaccggggacgtcgggccaatgggcccacctggacctcctggacccagggggccagccggtcccaatggggcagacgggcctcaggggccaccaggtggagtggggaacttaggccctccaggggagaagggcgaaccaggtgagagcggaagccccggcatccagggtgagcccggcgtcaagggcccacgcggggaaaggggagaaaaaggggaaagtggacagcctggcgagccagggccacccggtccaaagggtccaaccggggacgacggacctaagggcaaccctgggcctgtcggcttccctggcgatccaggccccccaggggagggaggtccgcgcggtcaggacggggcaaaaggggacaggggagaggatggagaacctggtcagcctggaagcccgggccctaccggcgaaaacgggccaccgggtccccttgggaaacggggcccagcgggcagtccaggatcggaaggtcgccagggtggtaaaggagccaaaggagaccccggcgctatcggcgccccggggaaaacaggaccagtgggtcccgccggccccgccgggaagcctgggccagatggtctgagaggcttgcctgggtccgtggggcagcaagggcgtcctggtgcaacaggacaggccggccctcccggccctgtggggccccctggtcttcccggcttgcggggggacgccggggccaagggcgaaaagggccatcctggcctgatcgggcttatcgggcctcccggcgagcaaggcgagaagggggaccgaggcctaccgggcccccaaggaagcccagggcagaagggagagatgggcatccccggcgcttctgggccgattgggcctggcggaccgcccggtctgcccgggccagccgggccaaaaggcgctaagggggccaccggacctggagggcctaagggtgaaaagggcgtacaagggccccctggccaccccgggcctcccggcgaagtcattcagcctctgcctatccagatgcccaagaaaacacgaaggtcagtggacggctccaggctaatgcaggaggacgaagccatcccgacaggcggtgctcctggtagtccaggaggcttagaagaaatattcggttctctcgatagcctcagagaggaaattgaacagatgagaagaccaacaggtacccaagattctcctgcgagaacatgtcaggatctgaaactctgccatccggagctgcccgacggggaatattgggtggatcccaaccaaggatgcgctcgggatgcttttagagtgttttgcaacttcacagctggtggggaaacatgcgtaacaccgcgagatgacgtcacccagttttcatatgttgactccgaaggctccccagtgggggtcgttcagctgactttcctgcgtcttctgtcagtgtctgcccaccaggacgtgtcttatccttgtagtggcgccgcccgggacggccccctgagactcagaggggctaacgaggacgaactgtctcctgaaaccagcccatatgtgaaagagttccgcgacggctgtcagactcagcagggacgcaccgtgttagaagtacgcactcctgtgctcgagcagctgcctgtgctcgatgcatcattttccgaccttggcgctcccccgcgcaggggaggggtgcttttaggacccgtgtgttttatgggctag

SEQ ID NO: 232734 - DNA, 4953 bp, Artificial Sequence
  derived and/or modified sequence
atggagcggtgcagccggtgccaccggctgctgctgctgctgccccttgtactcgggctgtccgcagcgcccggttgggctggagcccccccagtcgacgtcctgcgggcgttacggttccccagcttgcccgatggtgtgcgccgcgccaagggtatttgtccagcagacgtcgcttaccgcgtcgccaggcctgcacagctgagtgccccaacaaggcagctgtttccgggcgggtttccaaaagacttctcattacttacagtggtgcgaacgcgcccaggtctgcaggcaccactgctaactctgtatagcgcgcaaggcgtaagacaactgggcctggagctgggccctcccgtgcgcttcctctacgaggatcagactggccggccccagcccccttcacagccagtgttccggggattgagtctagccgatgggaaatggcacagggttgccgtggccgtaaaggggcagagcgtgacattaattgtggattgcaagaagagagtcacgcggcctttaccgcgatcggctcgccccgttctggatacccacggcgtcatcatctttggagcacggattctcgacgaggaggtcttcgaaggcgacgtgcaggaactcgccatcgtgccaggcgttcaggccgcctatgaatcttgcgaacagaaggagctggaatgtgagggtggccagcgcgaaagaccccaaaatcagcagccgcatagggcccagcgcagcccacagcagcaaccctctcggctgcatagacctcagaatcaggagccgcaatcccaggatccaaccccaggagaagaggaggaaattctagagagcagtctgctgcctcctctcgaagaggcggcccatggacctcgcggtttgaagggcgaaaaaggagagcccgcagtcctggagcccgggatgctggtcgaaggcccgccggggccggaaggaccagctggtctgattgggccccccggtatacagggcaatcctggcccagttggcgaccctggggagagggggcctcccgggcgcgccggacttccggggtcagacggcgcaccaggtccacctggaacctctctcatgctgcccttccgctttggatcggggggaggcgataagggacccgtggtggcagcacaagaggctcaggcccaggccatattgcagcaggcccggcttgctctgcggggacctccaggtccaatgggctatacaggacggcctgggcctttagggcagcctggctctcctggcctgaagggcgagagcggtgacctgggacctcaggggccaagaggccctcaggggctgacagggccaccgggcaaagccgggcgacgtgggcgcgctggagctgacggggcccgcggaatgcctggagatcccggcgtcaagggggatcgaggcttcgacggcctgcctggattgcctggggaaaaggggcaccggggcgataccggagcccaggggcttccaggcccgcctggggaagacggcgagaggggcgatgacggtgaaatcgggcctagaggcctcccaggtgaatctgggccaagaggtctgttaggcccaaaagggccacccggaatcccgggtcctccaggcgtgcgggggatggacggcccccaggggcccaagggcagcctgggaccacagggcgagcccgggccccccggacaacaggggacacccgggacacaagggctgcccggtcctcagggtgcaatcgggcctcacggtgaaaaaggaccccaaggcaagcccggcctgcccggaatgccaggtagtgacggaccccctggtcatccaggcaaagaggggcctccagggacgaaaggaaatcaggggccaagcggcccccagggacccctgggttatcccggacctaggggtgtgaaaggcgttgacggcattaggggactgaagggacacaagggagaaaaaggagaggatgggttccctggatttaaaggcgacatcggcgtcaaaggcgacaggggggaggtgggggtcccaggcagtcggggagaggatggtccggaggggcccaaaggcaggacaggacccacaggagatccggggcctcccggcctgatgggcgagaaaggaaagctcggggtgcccgggctccccgggtaccccggcaggcagggccccaagggctccctggggttccccggctttcccggcgcgtcaggagagaaaggagcacggggcctctcagggaagtctggtcccagaggagagcgcgggccaaccggcccacggggacaacggggacctcgcggtgccacaggcaagagcggagcaaaagggacaagcggcggagatggcccacatggtcccccaggtgaacgcgggctgcccggaccccagggcccaaacggtttccctgggccaaagggccccccgggcccccccggcaaggatggactcccaggccatcccggccagcgaggagaagtaggcttccagggtaagactgggcccccgggacctcccggtgtggtcggccctcagggggccgcaggagagactggcccaatgggagagagagggcacccaggccctcctggcccgccaggggagcaaggcctgcccggcacagcaggcaaggagggcaccaagggcgaccccggcccccccggcgcacctggtaaggacgggccagccggactccgagggttccccggtgagcggggtctcccaggcaccgcaggcggtcccgggttgaaaggaaacgaaggaccgtctggaccaccaggaccagccggttctcctggcgagcggggcgcggcagggtccggggggcctatagggcccccagggcgaccggggccacagggaccaccaggagccgcgggagaaaagggagttcctggcgagaaaggacccatcggtcctaccggacgcgacggcgtgcagggtccagtcgggctgccaggccccgctggcccacccggtgtcgctggcgaagatggtgacaagggagaggtgggcgaccccgggcagaagggaactaagggaaacaagggagagcatggcccccctggcccaccggggcccatcggtcccgtcggacagcccggagccgctggagccgacggcgaaccgggggctaggggcccccagggacactttggcgctaaaggcgacgaggggactagggggtttaatggccccccaggcccaattggattacagggcctcccggggccctctggagagaaaggtgaaacaggagatgtcgggcctatgggcccaccaggaccccccggtccgaggggacccgcaggtcctaacggagcagacggcccccaggggcctccgggcggggtgggcaacctggggccccccggcgagaagggtgagcctggtgaatcaggttctccgggcatccagggtgaacccggagttaagggaccgcggggagagcgcggggagaagggcgaaagcgggcaacctggagaacctggcccccctgggccaaagggtcccacgggcgacgacggacccaaaggaaaccccggacccgtgggctttccaggcgacccaggaccacctggggagggcggcccacgagggcaagatggagccaagggcgacagaggcgaggacggcgaaccaggccagccgggctctccaggccctacgggcgaaaacggtccacctggtccacttgggaagcgggggcccgccggttctccagggtcggagggacggcagggcggcaaaggagcgaagggcgaccccggcgccattggggcaccgggtaagactgggccggtgggaccggctggacctgctggaaagccagggcccgacggcttgagggggctcccagggagtgtgggccagcagggaagaccaggtgctaccggccaggccgggcctccaggaccggtggggccccccggcctacccgggctgagaggggacgcgggagccaagggcgagaaaggacatccaggactgattggcctcattggcccccccggcgagcagggggaaaaaggagatagagggctgccgggcccgcagggctcccccggccagaaaggtgagatgggcattcctggagccagcggcccaatcgggcctggcgggccaccgggattgcccgggcccgcaggacccaagggggctaaaggggctactgggcccgggggtcctaagggggaaaagggcgtgcaggggccccctggacatccaggtcccccaggagaagtgatccaaccgctcccaattcagatgcctaagaagacaagaagatcagtcgatggaagccgcctgatgcaagaggacgaagccattccaacaggaggtgctccaggttctcccggagggttggaagagatttttgggagcctggatagcttaagagaagaaattgaacaaatgcgcaggccaacaggcactcaggacagccccgcccgaacctgccaagatctcaaactttgccacccagaactgcccgatggagagtattgggtggatcccaatcaagggtgcgcaagggatgctttccgagtgttctgtaatttcaccgcaggcggagaaacctgtgtcactccacgggatgacgtcacccagttttcttacgtcgattctgagggatcaccggtaggcgtggtccagctgactttcctcagattgctgtccgtatccgctcatcaagatgttagctacccatgctcaggagctgccagagacgggcccctacggctgcgtggagcaaatgaagacgagctgtcccccgagacttcaccgtatgtaaaagaatttagggacggttgccagacacaacagggtagaactgtcttagaggtgaggacccccgtgctggagcagctgccagtgctagacgctagtttctctgaccttggggctccacccagacgggggggtgtccttctagggcccgtctgctttatggggtag

SEQ ID NO: 232735 - DNA, 4872 bp, Artificial Sequence
  derived and/or modified sequence
tgagccccccccgtggacgtgctgcgggccctgcggttccccagcctgcccgatggcgtgcggcgtgccaagggtatctgtccagctgacgtcgcataccgggttgccagacctgctcaattatctgcaccaacacggcaactgttccccggagggttccctaaggacttttcactgcttacggtggtccggactcgaccagggctccaggcaccactgctgactttgtacagtgctcagggagtccgccagctcggtttggagttaggccgccctgttcggtttctatacgaagatcagactggccggcctcagccaccctcccagccagtgtttagaggactcagcctggcagacggcaaatggcaccgtgtagctgtagccgtcaagggccagtccgtcaccttaatcgttgattgtaaaaaacgtgtcaccaggccactgcccaggtccgcacgcccagttctcgacacacatggcgtcatcatttttggcgccagaatcctcgacgaggaggtgttcgaaggagacgtacaggaattagctattgtgcccggcgtgcaggccgcatatgagagctgcgaacaaaaagaacttgagtgcgaaggcgggcaaagggaaagacctcaaaaccaacagcctcatcgcgcacagcgttcacctcagcagcagccttcacggcttcaccgaccccagaatcaggagccccagtctcaggatcctaccccaggcgaggaggaggagatactggagagctcgttattgcctcccttggaagaggcagcccatggccctcgaggtctcaaaggcgaaaaaggcgagccggcggtactcgaacctggaatgttagtagagggtccgcctgggcctgaaggtcccgcggggctcatcggcccccccggtattcagggtaatccgggacctgtgggcgaccccggagaacgcgggccacctggcagggccggattacccggctccgacggcgctcctggtccgcccggcacatcactaatgttaccttttcgcttcggctccggtgggggagacaaaggccccgtggtggcagctcaggaagctcaggcgcaggctatcctacagcaggcgagactggcactccgtggtccccctgggcctatgggttacaccggccgtcccggaccgttgggtcagccaggaagtccgggtttgaaaggggaatccggcgatctgggaccccaggggcccagggggcctcagggtctgacagggcctcctgggaaagctggacgcaggggccgcgctggagccgacggtgctcggggcatgccaggcgaccctggcgtgaagggcgacagggggttcgatggccttcctgggctcccaggagaaaaggggcatcggggggacactggggcgcagggactcccagggccgcctggagaagatggcgagaggggagacgacggagaaatcggcccaaggggactacccggtgagtcaggcccccgcggcctcctcggacctaagggcccacctggcatccctgggcctcctggagtaagggggatggacgggcctcaaggtcctaagggcagcctgggcccacagggggaaccggggcccccgggccaacagggcaccccaggtactcaaggcttgcccgggccccagggagccatcggaccccacggggaaaaggggccccagggcaagccgggtctgcctggaatgcccgggagcgacggcccaccgggacacccggggaaggagggtccgcctggcaccaaagggaaccaagggcccagcggaccccagggccccctgggttatcccggccccagaggtgttaagggcgttgatggcattaggggcctgaagggtcacaagggcgagaaaggagaggacggttttcctggatttaagggagacatcggtgtaaagggagatagaggggaggtcggggtgcccggaagtcgcggggaggatgggcccgaggggcccaagggacgaactgggcctaccggggatcccggcccacccggtttgatgggagagaaggggaagctcggagttccagggctgcccgggtatcctggcaggcaaggcccaaagggatcgctgggctttccagggtttcccggggctagcggggaaaagggtgctcgaggtctttcggggaaatctgggccccgaggggagcgaggtccaaccggccccaggggtcagagaggacctcggggtgcaaccggtaaatctggggccaaaggaacaagtgggggcgacggaccacacgggccaccgggcgagcgtggactccctgggcctcagggtccaaacggatttccaggacccaagggtcctccgggcccccctggaaaggacggactgccaggccatcccggacagcgcggggaggtgggctttcaagggaagaccggaccccccggacccccaggtgtggtaggccctcagggcgctgctggcgaaacagggcctatgggagaacgaggtcatcccggaccgcctgggccccctggcgagcagggtctgcctggtacagctggcaaggaaggcacaaaaggggatcccggaccaccaggcgcccccggtaaggatggacctgccggactcagaggattccccggtgagagaggccttcccggcacagccggcggcccaggcctgaagggaaatgaggggccatccggacctccagggcccgccggctcacccggggagcgtggcgcagctgggtcaggagggcctatcggacctcccggcaggccagggcctcagggacctcccggagctgccggcgaaaaaggcgtacccggtgagaaaggcccaatcgggccaactggaagagatggcgtgcagggaccggtcggactcccagggccagccggcccgccaggagtagctggcgaggacggcgataagggtgaggtgggcgatccaggacagaaaggtacaaaaggaaacaagggcgagcacgggccgcccggaccccccgggcctattggacccgtgggccagccgggggccgccggcgctgatggcgagcccggtgctagggggccacagggccatttcggggccaaaggagatgaaggaacacgcggtttcaacggacctcctggacccattggactccagggattacccggcccatccggcgaaaagggcgaaaccggggatgttggtcctatgggtcctcctggccctcccgggccacgggggcctgccggcccaaatggtgctgacgggcctcagggccctccgggaggcgtgggtaatctgggaccaccaggggagaagggggagccaggggaaagcggctcccctggcattcagggggagccaggggtcaaagggcctcgcggggagcgcggcgagaagggcgagagcgggcagccaggcgagcctggtcctcctggacccaaaggccctaccggcgacgatggacccaagggtaatcctggacctgttggcttcccaggggaccctggaccaccgggcgaaggcggcccacgtggacaagatggggctaaaggagaccgcggagaggacggggagcctggacagcctgggtccccggggccaaccggcgaaaatgggccaccaggcccgctgggcaagcgcggaccagccgggtctccagggtctgaaggcaggcagggagggaagggagcaaagggggaccctggcgctataggcgccccaggaaagacaggaccagtaggccctgcaggcccagcgggtaaacccggtcctgacggcctgaggggcctccctgggtctgttggacaacagggacgccccggcgcgactggacaggcagggccacccgggccagtcggacctcccggactgcccggccttagaggtgacgccggggccaaaggcgaaaaggggcatcccggactcattggcttaataggtccccctggggagcagggagaaaaaggtgaccgaggacttcctgggccgcaggggagccccggccagaaaggtgaaatgggaatacccggagctagcggcccaattggacccggaggtcctcctggcttaccagggccagcgggtccaaagggcgccaaaggcgctactggtcctggcggacccaagggcgagaagggagtgcagggccctccaggtcacccggggccgcccggagaagtcatccagcccttgccaatccagatgcctaaaaagaccagaagatccgtggacgggagtagactcatgcaggaagatgaagcgatccccacaggcggcgcacccggctctccaggcgggctggaggagatttttggatcactcgacagtctccgagaagaaatcgagcaaatgcgacgaccaacgggtacccaagacagccctgccagaacgtgtcaggatctcaagctgtgtcaccccgagttgccggacggtgaatattgggtcgatccgaatcagggctgcgcacgggatgcatttagagtgttttgtaattttacagccggaggcgaaacatgcgttacccctcgagatgacgttactcagttctcatatgttgactctgagggctctcccgtgggcgtggtgcaattaacattcctgcgactccttagcgtgagtgcccaccaggacgtaagctacccttgttccggcgcggcgcgagacggtcctctgcgtctgcgcggcgcaaatgaagacgaactgagccccgagacaagtccgtatgtcaaggaattcagagatggatgtcagacacaacagggtcggactgttctagaggtaaggacccctgtcctagagcagctccccgtccttgatgcgtccttctccgacctgggggccccgccgcgcaggggtggggtcctgcttggccctgtgtgctttatgggatag

SEQ ID NO: 232736 - DNA, 4953 bp, Artificial Sequence
  derived and/or modified sequence
atggagcggtgcagccggtgccaccggctgctgctgctgctgcccctggtactggggctgtcagcagcccctggatgggccggcgccccacctgtggatgtgctgagagccttgcggtttccatctctgccagacggggtgcggcgggccaaaggaatctgccctgcagacgtggcatatcgcgtcgcacgcccagcccagctgagtgcgccgacgcgccagctgttccctggcggcttccccaaggatttcagtcttcttaccgttgtgaggaccaggccaggtttacaggctccacttcttacattatactccgcccagggagtcagacagctcgggctagagcttggtcgaccggtgcggttcctgtatgaggatcagactgggcgtccacagcctccaagtcagccggtgtttcggggtctgagcctcgctgatggcaagtggcatcgggtggccgtggcagtcaaaggacaatccgtgacgctgatcgtggattgcaagaagcgtgtaacccgccccctgcctagatcagcccggccagtcctggacacccatggggtgataattttcggtgcacggatcctggatgaagaagtgttcgaaggggatgtccaggaactggccatcgtgccaggggtgcaggcggcctacgaatcctgcgaacagaaggaactggagtgtgagggggggcagcgcgaacgcccccagaatcagcagccacacagggctcagaggtcccctcagcagcagccctcccgactccatagaccccaaaaccaggagccgcagtcacaggatcctacgcctggcgaagaggaggaaatcctggaatccagcctgctgcctccccttgaggaggccgctcatggccctcggggtctgaaaggcgagaagggagaacctgccgtgcttgagcctggtatgcttgttgaggggccaccaggccccgaaggaccagccggccttatcgggccacctggcatccagggtaatcctggccctgtcggtgatccaggggaacgggggccacccggtcgggcgggcctcccaggatccgatggcgcccctggtccccccgggaccagccttatgcttcctttccgctttggtagcggggggggcgataaaggaccagtggtggccgcacaggaggcccaggcccaggctattctgcaacaggcccggctggctctcagagggccgcccgggcctatggggtacactggaaggccgggacctttgggacagcctggaagtcctggtcttaaaggcgaatctggggatctgggaccgcagggcccacgtggaccacagggcctgacaggccccccaggtaaggccggaaggagggggagagccggcgctgacggggctcgcgggatgcccggcgacccgggcgttaagggagatcgcggcttcgatgggctacccggactcccaggcgagaaggggcataggggtgatactggcgctcagggactccctggccctccaggcgaggatggggagcggggagacgacggcgagatcggtccccggggactgcccggggaatccggacccagaggtcttctaggtccaaagggacctcccggaatccccggaccccctggagtgcggggcatggatgggcctcagggcccaaagggctccttaggaccccagggcgaacccggaccacccggccagcagggcactcctgggacccagggcctccctggaccccagggagcgatcgggccccacggcgaaaagggtcctcaggggaagccaggtttgcccggaatgcctggcagcgacggaccccctggacaccctgggaaggaaggccccccaggaaccaaaggaaaccaaggccccagtggtccgcaaggccccctcggatacccaggccctcgaggtgtgaaaggcgttgacgggatacgcggactcaagggacataagggagaaaagggcgaggacgggtttcctggttttaaaggggacattggggttaagggcgataggggtgaggtaggagtgcctggaagtcgcggggaggatgggccagagggtccaaaaggtcgcacaggaccgacaggagacccaggaccaccaggcctcatgggggaaaaggggaagctcggcgtgccaggcctgcccgggtatcctggacggcagggaccaaaagggtcactcggcttcccgggattcccaggagcatcgggcgagaagggtgctcgcggtctgagtggaaagtcagggccgagaggagaaagaggcccaactggcccccgaggccagcgtggaccacgaggcgctaccggcaaaagtggcgctaagggcaccagcggaggcgacggccctcatggacccccgggcgagcggggtttgcctggccctcagggcccaaacgggttcccaggaccaaaaggccctcccggacctcccgggaaggatggattacctggacatccaggtcagcggggagaagtaggctttcagggaaagactggaccaccaggaccaccaggcgtcgtgggtccccagggggctgccggagagacagggcccatgggagaacgtggacacccaggcccccccgggccgcctggtgaacagggacttcctggtactgcagggaaagaaggcactaaaggagaccctggcccccccggcgcgcccggaaaggatggccccgccgggctgcggggcttcccaggagaaagaggactgcccggtaccgccggcggacctggtttgaagggcaacgagggtccaagcgggccacctgggcccgcaggcagccctggagagcggggtgccgccggctctgggggccccattgggcctccagggcggccagggccccaagggccacccggggctgccggagagaagggggtccctggcgaaaaaggtccaatcgggcctaccggccgagacggcgtccagggacccgtagggttgcctggacccgcaggtcccccaggagtggccggcgaggatggagacaaaggagaggttggtgacccgggccagaaagggaccaagggcaataagggggagcacgggccgccaggaccaccaggtcctatcggccctgtagggcaaccgggcgccgccggcgcagacggcgagcctggcgctcggggacctcaaggccactttggggcgaaaggtgacgagggtacaagggggtttaacggcccacccgggcctattgggttacaaggattgcccggccccagtggagagaaaggcgaaaccggcgatgttggaccgatgggccctccgggccctccaggccccagaggccctgccgggccgaacggggccgacgggcctcaggggcctcctgggggggttggcaacctcgggcctccaggggagaagggcgaaccaggcgagtcgggaagcccaggtattcagggggaacccggggtgaagggacctaggggggaaaggggagaaaagggcgagtcaggacagcccggagaacccgggcctcctggcccgaaggggccaaccggggatgacggaccaaagggtaacccgggccccgtgggtttcccgggggatccaggccctccaggcgaagggggaccacgaggccaggacggcgcaaagggagataggggcgaggatggcgagccagggcaacctggatctccaggcccaaccggcgagaacggtccacctgggcctcttggaaaaagagggcctgcaggcagtcccggcagtgaaggaaggcagggcgggaaaggggcaaaaggcgaccccggggcaattggtgcacccggcaagactggtcctgtcggccctgctgggcccgcagggaagccagggcctgacggcctgaggggactccccggctccgtaggccagcagggacggcctggcgctacaggccaggccggcccaccggggccggtgggacccccaggcctgcctgggctgaggggggatgctggtgctaaaggggaaaaaggccatccaggactgatagggttgatcgggccaccaggcgagcagggggaaaagggggacagaggactgcctggcccccaggggtcgccaggccagaaaggcgagatgggcatacctggggcgtccggcccaatcggtcctggtgggccacccggactcccagggcccgcaggcccaaaaggagccaagggggcgacgggacccggtgggcccaagggagagaaaggtgtgcagggaccgccggggcacccgggacctcccggggaagttatacagccgttgccaatccaaatgccgaaaaagacacgcaggagcgtggatgggtcgagattgatgcaggaagacgaagctatccccactggaggggcaccaggcagccccggcggcctggaggaaatcttcggatccctggactcactccgggaggaaatcgaacagatgcggagaccaaccggcacacaggactcgcccgccaggacgtgccaggacctaaaactttgccacccagagttgcctgacggcgaatactgggtagatccaaatcaaggttgcgctagagacgccttccgagtcttttgtaactttacggccggcggcgagacctgtgtgacgccacgcgatgacgtgacccagttctcgtacgtcgacagcgaaggatctcctgtcggggttgtgcaacttaccttcttgagacttctctcagtcagcgcgcaccaggacgtttcttacccttgtagcggcgccgccagggatggaccattgcgcttgcgcggagccaatgaggacgagctatccccggagaccagtccctacgtgaaggagttccgcgacggatgccagactcagcaagggaggactgttctggaagttcgcacacccgtgttggaacaactgcccgtactggacgcttcattttcagacctcggtgctcctccaagaagaggtggagtgctccttggcccagtctgcttcatggggtag

SEQ ID NO: 232737 - DNA, 4953 bp, Artificial Sequence
  derived and/or modified sequence
atggagcggtgcagccggtgccaccggctgctgctgctgctgcccttagtccttgggctttctgctgcccccggttgggccggagccccgccagtggatgtcctccgggccctgaggtttcctagtcttcctgatggggtaaggcgagccaaaggaatctgtcccgcagatgtggcctaccgcgtcgcgcgccccgcacaactgtctgcccccacccgacagctgttcccaggtggctttcctaaggacttttccctactcaccgtcgtcagaacccggcccggcctgcaggcaccgctgctaacactgtactcagcccaaggagtccggcagctgggtctggaacttggacggcccgttagatttctgtacgaagaccagacaggacgacctcagccgcccagccagccagtctttcgcggcctgtcacttgctgatggcaaatggcaccgggtcgccgtggccgtaaaaggccagtcagtaacattaattgttgactgtaaaaaacgcgtgacgagacctttgccccgaagcgctcgccctgttctcgacacacacggtgtcatcattttcggggcgcggatcctggacgaggaggtgtttgagggcgacgtccaggagctagccattgttcccggcgtacaagcagcatatgagtcatgcgaacagaaggaactggagtgtgaaggggggcagcgtgaaagaccccagaaccagcagccacatcgagcacaaagaagcccccaacagcagccatcgcgtctacataggcctcagaatcaggaaccccagtctcaggacccgactcctggcgaagaggaggaaattctggagtcatccttactgcctccactcgaagaggccgcacatggcccacgagggttgaaaggcgagaaaggcgagcctgcagttctggaacccgggatgctcgtcgagggtccacctggtcccgagggaccggccggattgatcgggccccccgggattcagggcaatccagggcccgtgggggaccccggcgagcgaggacccccgggtcgggccggattgcctggctccgatggtgctcccgggccaccaggtactagcctcatgctgccttttcggtttggttccggagggggtgacaaggggccggtagttgctgcccaagaggcccaagcacaggcaatcctgcaacaggcacggctcgccctgagagggcctcctgggcctatgggatatacgggtagaccaggacccctgggacagcctgggtctcctgggttgaagggagaaagcggggatctgggacctcagggcccccgcgggcctcaaggccttacaggacctccggggaaggctgggcggagggggagagcaggcgccgacggcgccagaggaatgccaggagatcccggcgtcaaaggtgacaggggtttcgacggacttcctgggcttccgggagaaaaaggccataggggggacactggggctcagggtctccccggacctccaggagaggatggagagcgtggggatgacggcgagatcggcccccgaggactccccggagagagcggtcccaggggcctcctggggcctaaaggccctccaggaattccagggccaccgggcgtgcgggggatggatggacctcagggaccgaagggcagcctaggcccccagggagagcctggcccgcccggtcaacagggtacacctgggacacaggggctcccaggcccccagggagcaatcggcccacatggcgagaaaggtcctcagggcaaaccagggcttcccggaatgccaggctccgacggtccaccaggccatcctggcaaggagggtcctcccggaactaaagggaaccaggggccctcaggcccacagggcccgctcggatatcccgggccccgcggcgttaaaggggtggacggcataagaggcctgaaagggcacaagggtgagaagggcgaagacggtttccccggctttaagggcgacatcggagttaaaggtgatagaggcgaggttggagtcccaggctccagaggagaggatggtcccgagggtcctaaggggcgaacaggccccacaggggatccaggtccccctggcctgatgggtgaaaagggcaagctcggcgtcccgggactgcccggctatcccggtagacaggggcccaaaggatccctgggttttccaggcttccccggtgcatccggagagaaaggggccagaggcctgagtgggaagtccggtcctcgcggggagcgtggacccacaggacctcggggccagagaggacccagaggcgccactggaaaatccggcgctaagggcacgtctggtggcgacgggccacacggacccccgggtgagcgaggactgcccggtcctcaagggccgaacggctttccgggccctaaaggaccccctggcccccccggaaaggatgggttgcctggacacccggggcagagaggggaagtgggcttccagggaaagaccggaccccctggccctcctggcgtcgtggggccccagggagctgcaggggaaacaggtcccatgggggagcgcggccatccaggacctcctgggccccctggggagcaggggttgccagggaccgctggaaaagagggcaccaaaggagatcctggtccgccaggggcaccagggaaagatggtcccgcgggcctgcgcggattcccgggggagagaggtcttcccggcaccgcaggggggccgggtctcaagggcaacgaaggaccgtccggtccgccaggccccgctggctctcctggggagagaggagctgccggctccggcggccctatcggcccccccggaagacctggcccccagggccctcccggtgccgcaggagaaaagggcgtgccaggtgaaaaaggtccgatcgggcccacgggaagagacggtgtgcagggccccgtgggtctcccgggtcccgcaggaccgcccggggtagcaggtgaggacggcgacaaaggggaggtaggcgatccaggccaaaaggggacgaagggcaacaaaggtgagcacggccctcccggtcctcccggcccaattggccccgtcggacaaccaggcgctgccggcgccgacggtgagccaggggcccgtgggccccaagggcacttcggcgctaaaggagacgaaggaactcgggggttcaacggcccccctggcccgattggactccagggtttgccgggcccgtctggcgaaaagggggaaaccggcgatgtgggccccatggggccccccggccccccaggcccacgggggcctgcaggccctaacggcgccgatggccctcaagggccccccggtggtgttggtaacctcgggccccccggggagaaaggggaacctggggagtccggcagtcctggcatccaaggtgagccaggggtgaagggcccgcggggggaacgcggcgagaagggcgaatccggccaacccggtgaaccgggtccccctgggccaaaaggacctacaggagacgatggacctaagggcaatccaggccctgttggttttcccggcgatcccggacccccaggagagggcgggcctcgggggcaggacggagcaaaaggggaccgcggtgaggacggcgaaccaggccagcctggctccccaggccctaccggcgaaaatggtcctcccggaccactgggcaaaaggggccccgccggctccccaggaagtgaaggtagacaggggggcaagggagccaagggggacccaggcgcgattggagcccctggcaaaacaggtccagtggggccagctggacccgcaggcaagcccggccccgatggactgcgcggactccctgggtccgtgggtcaacaggggcgaccaggcgctactgggcaggcaggaccgcctggacccgtcggcccacccggtttgcctggactacggggagatgccggcgcaaaaggtgaaaagggtcatccggggttaatcggtctcatcggaccccccggcgaacagggggagaagggggataggggcctaccgggcccacaggggtccccgggccagaagggcgaaatgggaattcctggcgcaagcgggccgattggcccaggcggcccccctggtctgcctggcccggctggcccaaagggagcaaagggcgcgaccggcccagggggacctaagggagaaaagggtgtccaggggccccctggccacccaggtcctcccggggaagtgatccagcctcttccgattcagatgcctaaaaaaacccgccgttccgttgatggatcccgccttatgcaggaggatgaggcaatacccacagggggggcccctggaagcccaggcggactggaggagatcttcggcagtttggactctttacgggaggaaatcgagcaaatgagaaggcccacagggacccaagatagccctgcacgcacatgccaggacttgaaattatgccatcccgagctgcctgatggcgaatattgggtcgatccaaatcaggggtgtgcgagagacgctttccgcgtcttttgcaatttcaccgccggtggcgagacctgtgtgacaccaagagatgacgtcacacagttctcttatgtagactctgaaggcagtccagtcggcgtggttcagctcacattcttaaggctcctgagtgtgtcagcacatcaggacgtgtcttatccctgctccggtgcggccagggacgggcctctccgcctaagaggggccaatgaagacgagctctcccccgaaactagtccttatgtgaaggagtttagggacggctgccagacccaacagggacgtactgtcctcgaggtgcgtactcccgtgctggagcagctgccggttctggacgccagctttagcgatctgggcgctcccccaagaaggggcggcgtgctgctgggacccgtctgtttcatgggctag

SEQ ID NO: 232738 - DNA, 4968 bp, Artificial Sequence
  derived and/or modified sequence
atggagcggtgcagccggtgccaccggctgctgctgctgctgcccctcgtgctaggactgagcgccgcacccggctgggctggcgccccccccgttgatgtactccgtgccctgaggttccccagtctcccggacggcgttcgccgggcaaaggggatttgcccggctgacgtcgcttaccgggtcgcaagaccagcccagctgtctgccccgactagacagttatttcccggcggcttccccaaggatttctcccttctgactgtcgttaggaccagacccgggttgcaggcacccctgctgacattatatagtgcccaaggggttagacagctcggcctggaactgggccgccctgtgaggtttctgtatgaagaccaaactgggagacctcagcccccaagccagcccgtctttcgcggcttatcattggccgatgggaaatggcaccgggtcgccgtggcagttaaaggacagtctgttacattgatcgtcgactgcaagaagcgcgtgactcgacctctgcccagaagcgccaggccagtgttagatacccatggggtcataatctttggcgcaaggattctggacgaagaagtttttgagggagatgtacaggaattggctattgtgcccggtgttcaagccgcttatgaatcttgcgagcaaaaggagctggaatgcgagggaggacagagagaaagaccgcaaaaccaacaaccccaccgggcccagcgttccccccaacagcagcctagtcggctgcaccgaccacagaatcaggaaccccagagccagcccaccgagtccttgtactatgattacgagcccccttattacgacgtgatgaccaccggcaccaccccggattatcaggctgcccatgggccacgcggcctaaaaggagagaagggcgagccagcagtgctggaacctggcatgctagttgaaggtccgcccggaccagaaggacctgctggacttatcggccctcctggcattcagggtaatccaggcccggtcggcgatccgggggagagaggccccccaggcagggctggtctgcccgggagcgacggagcacctggaccccccggaacgtctctgatgctcccgttccgctttgggtccggagggggggacaagggtccagtggtggccgcccaggaggctcaggcacaggctattctgcagcaagcaagactagcgctgaggggccctcccggccctatgggctacactggaagacccggtccccttggtcagcctggtagtccagggctcaaaggagaatcgggggatcttggaccgcagggacccagagggccccagggtctaaccggtccccctggtaaggctggcagaagaggacgcgctggcgctgatggcgcccgggggatgcccggggaccctggcgtgaagggcgatcgggggttcgacggcctgccaggactgcccggcgaaaagggtcataggggggatacaggagctcagggcttacccggtcctccaggggaagatggggaaagaggtgatgatggtgaaatcgggccccgtgggttacccggcgagtcgggtccccggggcctcctgggcccaaagggtccgccggggatccctggaccacccggcgttcgcgggatggacggcccacagggcccaaaaggctccctgggcccccagggcgaaccagggccaccaggccagcagggcacccctggaacccagggactccctgggccacagggcgcaattggtccccacggcgaaaaaggacctcagggaaagcccgggctcccaggtatgccaggtagcgacgggcctcctggccaccccggtaaagaaggacccccaggcacgaagggtaaccaaggaccatccggccctcaagggcccctagggtaccccggccctcgtggagtcaagggagtggatggtattaggggtttaaaggggcacaagggcgaaaaaggcgaagacggtttccctgggtttaaaggggatatcggcgttaagggcgatagaggtgaagttggggtgccggggagccgaggagaggacgggcctgagggacctaaggggcgtacgggtcctactggggatcccggcccccccggtctgatgggcgaaaagggtaagctgggcgtacccggcctccccgggtaccctgggcgacagggaccgaagggttctctagggttcccgggctttcccggcgcctccggagagaagggtgcgcgcggactctcaggcaaatccggacccagaggggaacggggcccaacagggcccagagggcagaggggcccacggggtgcaacaggtaagtctggcgctaagggcacctcaggcggagatggacctcacgggccacccggggagagggggctgcccgggccgcaggggcctaatggcttccccggccccaagggccccctaggccccccaggtaaagatggcctacccggtcatccaggccagcggggggaggtagggtttcaggggaaaactgggccacctgggcccccaggcgtggtggggcctcagggcgccgccggggagaccgggccaatgggggagagagggcaccccggaccccctgggcccccaggcgagcagggtctgcccggtaccgcagggaaagaaggcaccaagggggaccctgggcctcccggcgcccctggtaaagacggtcctgctgggttgcgggggttccccggggagcgaggacttcccgggacggcaggggggcctggtctcaaggggaacgagggccctagcggtccaccaggtcccgccggtagccctggcgaaagaggcgccgcgggctccggcggaccaatagggccgcctggtcgtccgggccctcagggcccccccggggccgctggggaaaagggagtcccaggcgagaagggtcccataggacccaccgggagagatggcgtccagggaccagtcgggcttccaggacccgcgggccctccaggggttgcaggtgaggacggggataagggcgaggtgggagatccaggccagaaagggaccaaggggaacaagggagagcatggacctccgggcccaccgggcccaattggtcccgttggacagccaggcgctgcaggggcggatggcgagcccggtgctagagggccacagggacatttcggcgcaaagggggacgagggcactcgcgggtttaatgggccgcccggccccatcggtctccaaggtctgcccggtccatctggcgaaaaaggagaaacgggggacgtgggaccaatggggccccctggacccccagggcctaggggcccagctggcccgaatggagccgacggcccacagggccccccaggaggcgtgggaaacttaggacctccaggagagaaaggagaacccggggagtccggtagtccaggcatacagggagaacccggggtgaagggaccccgcggcgagcggggggaaaaaggagaaagcgggcagcccggcgagccagggcctcctggtcctaaaggccctactggcgatgatggccccaaaggaaaccctggtccggtcgggtttccaggagacccgggccctcccggcgaaggcgggcctaggggacaggacggggctaagggtgacaggggcgaggatggcgagcccggccaaccgggctcgcccggccccactggagagaacgggccccccgggccgttgggaaaaagaggccccgccggctctcctgggagtgagggccggcaggggggtaaaggagctaagggagaccccggcgctattggcgcacctggcaagacagggccagtgggcccagccggaccagctgggaaaccagggcccgacggcctgaggggcctacccggttctgtgggtcagcagggccggccaggcgcaaccgggcaggcgggccctccgggacccgttggcccccctggcctcccaggtttaaggggggacgcaggggccaagggggagaagggccaccctgggctgattggactgattggtccaccgggtgagcaaggcgaaaagggagatagaggattgcccggcccccaaggatcccctgggcagaagggcgaaatggggatacccggagcatccggcccaatcggaccaggcggtccccctggcttgcccggtcccgctggccccaagggagccaagggggcaaccggccctggaggcccaaaaggcgagaaaggggtgcaaggcccacccgggcatcctggaccaccaggcgaggtgattcagcccctgcctattcagatgccaaaaaaaacccgcagatcagtagatggatctcggctaatgcaagaagacgaagccatcccaacggggggagcccccgggtcacccgggggcctggaggaaatctttggctctctggattctctgcgtgaagaaatcgaacaaatgagaaggcccacaggcacgcaggacagtcctgccaggacatgccaggacctgaagctgtgtcacccagaacttccagacggggagtactgggtggaccccaaccagggctgcgcccgcgatgctttccgcgtcttctgtaatttcacagcaggcggagagacttgcgtgacgcctcgagatgatgtcacacagtttagctacgtggactcagaggggtctcccgtgggggttgttcagttaacattcctgcgtttgctaagcgtgagcgcacatcaggacgtgtcctatccctgttccggggctgcacgtgacggcccgttgagacttcgaggtgcaaacgaagatgagctgagtccagagacttcgccttacgtgaaagagtttagagacggatgtcagacccagcagggacgcaccgtccttgaagttagaacacccgtgttagaacagctcccggttctggacgcttctttttccgacttaggagctccccctaggcgggggggtgtgctgctgggacctgtctgctttatggggtag

SEQ ID NO: 232739 - DNA, 4968 bp, Artificial Sequence
  derived and/or modified sequence
atggagcggtgcagccggtgccaccggctgctgctgctgctgcccctggttctcggattatccgccgctccgggctgggcgggggctccacctgtcgacgtcctgagggccctgcgctttccctctctccccgatggcgtcagacgcgcaaagggtatctgcccggccgacgtcgcctaccgcgttgcacgaccagctcagctctcagccccaacaagacagctgttcccaggaggtttcccaaaagacttctctttgttgaccgtggtccgcacccgtcctggcctgcaggcccccctactgaccctctatagcgctcagggcgtcaggcagctgggactggaactgggacggcctgtaaggtttttatacgaggatcagactggacgcccccaaccaccaagtcagcctgtgttcagggggctttctctcgcagatggtaaatggcatagagtggcggtggccgtgaaaggccagagcgtgactttgatcgtagattgcaaaaagagggtcacaagaccattaccacgatcagctaggccggttctcgatacccatggagtgatcatatttggagctaggatccttgacgaggaagtgttcgagggtgatgtccaagagttagctatcgtgcctggtgtccaagctgcgtacgagtcttgtgagcagaaggagctggagtgtgagggcggtcagcgggagaggccacagaatcagcaaccccatagagcgcagaggtcgccacaacagcagccctccaggctgcacagacctcaaaatcaggaacctcagtctcagccaactgagtctctctactacgattataagccaccatattatgacgtgatgaccaccggcacgacccccgactatcaggctgctcacgggcccaggggacttaaaggcgagaagggcgaaccagcagtcctggaaccaggcatgctggttgaaggcccccctgggcctgaaggacccgctggactgatcggccccccaggtattcaggggaaccctgggcccgtgggcgaccccggcgaacgtgggccccctggaagagccggcttgcctggtagtgatggcgcacccgggccccccggcacttctctgatgctgcccttccggttcggatcaggcggaggcgacaaaggaccagtcgtcgccgcccaagaagcccaggcacaggccattttgcagcaggcccgacttgcgctgcgcgggccccctggcccaatgggttataccggccggccgggaccactcggccaacccggctcccccggcctcaagggcgagagcggcgacctggggccccagggaccacggggcccacagggactgaccggcccccccggaaaggcaggcagaagaggccgcgcgggcgctgacggtgctcgagggatgcctggtgaccccggcgttaaaggagaccgcggctttgacggtctcccaggcctcccgggagagaaggggcaccggggggatacaggtgcccaggggctcccaggccctcctggagaggacggtgagagaggcgatgacggggagattggacctaggggtctgcccggggagagcggaccaagggggctgctcggccctaagggccccccgggtatccccggaccccccggggtaagggggatggacgggccacagggtcctaagggctccctggggccccagggcgaacccgggccgcctggccagcaaggaacccccggaacgcaaggactgcccgggccacaaggggcaatcggaccgcatggcgagaaaggaccccagggcaagcccgggcttcccggtatgcccggttccgacgggccgccaggtcatcctggaaaagaagggccccctggaacgaaggggaatcaagggccctccggcccacagggacctctaggatatcccggtcctaggggggtaaagggagtggatgggatacgggggctgaaaggacacaaaggggagaaaggagaggacgggtttccaggatttaagggagacatcggcgtaaagggggaccgcggcgaagtgggggtcccaggcagcaggggcgaagacgggccggaagggccaaagggacggacaggtccaacaggcgacccaggacccccaggactgatgggcgagaaaggcaagttgggggtgcctgggctgccgggctatcctgggcgtcagggccccaaaggtagtcttggttttcctggctttccgggggcgagcggagaaaagggagccaggggactcagcggcaagagcggaccacggggggaacgaggcccgactgggcctagagggcagcgcgggccccgcggagcgactggaaagtctggcgctaagggtaccagtggaggcgatggcccacacggaccacccggcgaaaggggtctacctggtccccagggccccaacggctttcccggcccaaagggtcctccagggccccccgggaaggacgggctccctggacacccgggacaacggggcgaagtgggatttcagggaaaaactgggcccccggggcctccgggcgttgttggcccacagggggccgcaggcgagactggtcccatgggtgagcgtgggcacccaggccctcctgggccccctggtgagcaaggcctccccgggaccgccggcaaggaagggacaaaaggcgatccgggaccccccggcgcacctggaaaagacggacctgccggactgagaggctttccaggggaaaggggcttacccggcaccgctggtggaccaggtctcaaaggcaatgagggtccttcaggtcccccagggcccgccggtagccccggagagcgcggggcagcagggagcggggggcccattggaccaccaggacgccctggaccacagggaccaccaggagccgctggggaaaaaggagtccctggcgaaaagggaccaatcggacccaccggcagagacggcgttcagggtcctgtcggcttgccaggcccagccggccccccaggagtcgcgggggaggatggcgacaaaggcgaggtgggcgaccctgggcagaaaggcacgaaaggcaacaagggtgagcatgggcctcccgggcccccagggcctatagggcccgtaggccagcccggcgctgcaggcgccgatggcgagcccggcgctcgcgggccccagggtcactttggtgcaaaaggggatgagggtacccgcggctttaatgggcctccggggcctatcggcctgcagggcctgccaggcccatctggcgaaaagggagagacgggcgatgtgggtcccatgggacctcccggccccccaggtcccagaggccctgcgggacccaacggcgccgacgggcctcagggtccccctgggggggttggcaacctcggtcctcctggagagaaaggcgagcctggagaatctggcagccccggtatccaaggcgaaccaggcgtcaaggggccacggggcgagcgcggggaaaaaggtgagagcggacagcctggggagcccggaccacctgggccaaagggtccaaccggagacgatgggcccaaggggaaccccggcccagttggatttcccggggaccctggaccacctggcgaaggaggaccgaggggacaggacggagccaagggggatcggggggaggacggagaacctggacagccaggttcccccggtcccacgggcgagaacggccctcccggtcccctggggaaaagaggacccgccggtagtcctgggagtgaaggcagacaaggagggaagggagcaaagggtgacccaggagctattggcgcccccggaaagaccgggccagtcggtcctgccgggccggctggcaaaccgggtcccgacggcctgaggggcctgcccggttcagtgggccagcagggccgaccgggagcgaccggacaagctggacccccagggcccgttggtcctcctggtctgccgggtctgcggggggatgccggagctaaaggagaaaagggccatcctggcctcatcggattgattggcccacctggcgaacagggcgagaagggtgacaggggcctaccaggccctcagggaagccccggtcaaaaaggcgagatgggtatcccaggggctagtggtcctattggtcccggcggccctccagggctccccggccccgccggccccaagggcgcaaagggcgccacgggaccaggtggacctaagggagagaaaggggtgcagggcccgcccgggcatcctggacctcctggcgaagtaattcagcccctaccaattcagatgccaaagaaaacaaggcgctccgttgacggatctagattgatgcaggaagacgaagcaatacctacgggcggggcgcctggatcccctgggggtctggaggagatcttcggatcgctcgattccctcagagaggagattgaacaaatgcgacgcccgaccggtacgcaggactccccggctcggacctgccaggatctgaaactatgccatccagagctgcctgatggcgagtattgggttgaccccaatcagggctgcgcccgcgacgcgtttcgcgtgttctgcaatttcacggcaggtggagagacatgcgtgactcccagggacgacgtgacccagttctcttacgtcgattccgagggatctccggtgggggtggtgcaactgacatttttaaggttgctctccgtctcagcccaccaggatgtgtcgtacccttgttccggagccgcacgggatggacccttgcggttaagaggcgccaacgaggatgaactgagtcctgaaacctcaccatacgtcaaggaatttcgggacggctgtcagacgcagcagggaaggactgtgttggaggtgcgtacaccagtgctcgagcagttgcctgtgctggacgcttccttctctgacctgggggctccaccacgaagggggggagtactccttggacctgtctgcttcatgggttag

SEQ ID NO: 232740 - DNA, 5031 bp, Artificial Sequence
  derived and/or modified sequence
atggagcggtgcagccggtgccaccggctgctgctgctgctgcccttagtcctaggcctctcggccgccccaggatgggcaggcgctcctccagtagacgtgttgagagctctgcgatttccatctcttccagatggagtcaggcgggccaaggggatttgtccggccgacgtggcctacagggtggcacggcccgctcaattgtcagcacccacccgacaactttttcccggtgggttccccaaggacttctcgttgctcaccgtggtcaggacccgccctgggttacaggctcccctgttaaccctctactctgcacagggggtgcggcagctggggctggaactggggccccctgtaagattcctttacgaggatcagacagggagaccccaacctcctagtcagccagttttccgggggctgagcctggccgatggcaaatggcaccgggtcgcagtggccgtcaaagggcagtcggtgaccctgatcgtggactgtaagaagcgggtcactagacccctccctagatctgctcggcccgtgctcgacacccacggtgtgatcatcttcggggcccgcatactcgacgaggaagtcttcgagggggatgttcaggagctagccattgtaccgggagtacaggcagcatacgaatcctgtgagcaaaaagagctcgaatgcgagggcgggcagcgggaacgaccccagaatcaacagcctcatagggcacagcgttctccccagcagcagccaagccggctgcatagacctcagaaccaggagccgcagagccagcctacggaatccctgtactatgactacaagcccccctactatgacgtcatgaccactggaacgacccccgattatcaggatccaacacccggggaggaggaagaaattcttgaatctagcttactgccaccgctcgaggaagcagcgcacggccccaggggcctaaagggcgagaaaggggagccggcagttctggaacccggaatgctggtggaaggcccgcctggaccggagggcccagctggtctgatcggacccccaggcattcagggaaacccaggccccgtgggagaccctggagagcgtggccccccgggaagagccgggttgccaggtagcgacggcgcacctggcccaccaggcaccagcctcatgctgccattcagattcggctccggaggtggggataagggacctgtggtggccgcacaggaggctcaggctcaagctattctgcagcaggcccgcctggccctgcggggaccgcccggccctatgggctatacagggaggcctgggccacttggtcaaccaggttctcccggcctgaaaggagaaagtggggatctcgggcctcagggaccaagaggcccacaaggactaactgggccccctggcaaggccggaaggcggggtcgcgcaggagccgatggtgctcgggggatgcctggcgatccaggagtcaaaggggaccggggcttcgacgggttgccaggcctacctggcgaaaagggtcacaggggcgacactggcgctcagggcctgcctgggccaccaggcgaggacggcgagcggggcgatgacggcgagattggaccaaggggcctaccgggagaatctggcccgcgcggacttttgggccctaaaggaccgcctggcataccaggacctccgggtgtacgcggaatggacggtccccaaggccctaagggtagccttgggccacagggggaacctggaccgccgggacagcagggcacgcccggcacgcaagggcttcccggacctcagggcgcaatcgggccccacggggaaaaggggccccagggcaaaccagggctcccgggtatgcccggaagcgacggaccccctgggcaccccggtaaggagggtcctccggggaccaaaggtaatcaaggcccatccggtccccaggggccactgggctatcccggccccaggggcgttaagggcgtggatgggattaggggcctaaaaggccataagggagagaagggcgaagatggatttcccggctttaagggcgatatcggcgtaaagggagacaggggggaagtcggagtccccggctccaggggcgaggatggcccagagggcccaaaaggaagaaccgggcccacaggcgaccctggaccccccgggcttatgggcgagaaaggaaagctcggggtgccaggcctacccggatatcctggacgccaaggaccgaaaggcagcctgggttttcctggatttccaggagcatccggcgagaaaggggcccgaggcctgtcaggaaagtcggggccccggggtgaacgcggacctacaggacccagaggtcagagaggtccgcgtggggcaactggcaagtccggtgctaaaggtacgtccggcggagatggaccacatgggcctcctggggagagggggctccctggaccccaggggcccaacgggttccccggacccaaagggccccccggccccccaggcaaagacgggctcccgggacaccctggtcagcgtggtgaagtgggattccaaggtaagaccgggcctccgggccccccaggcgtggtgggcccacagggcgcagctggggaaactgggccgatgggcgagcgcggccatccaggcccacctggccctcccggggagcagggcctgccaggaactgcaggaaaagaagggacgaaaggggaccctggacctcctggagctcctggtaaggatgggcccgcggggttgaggggattccctggcgagcgggggctgccgggtacagctgggggtccaggcttgaaaggaaacgaagggccctccgggccaccagggccggccggatcgcctggagagcggggcgccgctggtagtggcggtcccatcggtccccctggccgaccaggaccacaagggccacccggagccgccggggagaaaggagtgccaggagaaaaaggaccaatcggaccaacagggagggacggagtccaaggcccagtgggtcttcccggccctgcaggacccccaggcgtggctggggaggacggtgacaaaggcgaagtaggagacccaggccaaaagggcactaaaggtaacaaaggtgagcatgggcccccagggccccccggacctatcggcccggtgggacaacccggcgccgccggagccgatggtgaacccggagcccggggcccgcaagggcacttcggcgctaagggagatgaaggcactcggggctttaatggtcccccaggtcccatcggtttacaggggctccccgggcccagtggggaaaagggagagacaggagacgtgggacccatgggcccgcccggtcctcccgggcccagagggccggccggccctaatggggcggatgggccccagggaccgcctggcggtgtgggaaatctggggcctccaggggagaaaggggaaccaggagagtctggctcccccggtatccagggtgagccaggcgttaaaggcccacgtggggaacgcggagaaaaaggtgaaagtggacaacccggtgagccaggcccacccggcccaaagggacccacgggggatgatggaccaaaaggtaaccccggccccgtggggttccccggagacccaggaccaccaggcgagggcggtcccagagggcaggacggggccaagggcgaccggggtgaagacggggagccaggacaacctggaagtccaggtcccacaggggagaacggcccaccgggtcctctgggaaaacgaggccctgctggctcccctggatctgaagggagacaaggcgggaagggcgccaaaggggatccaggcgctattggagcacccggcaagacaggcccggtagggccggcaggaccggctgggaaaccaggtcctgatggccttcgcggcttgccggggagcgtgggccaacaaggtcggcctggcgccacaggacaggccggacccccgggccctgttgggccccccggacttccaggtctgagaggcgacgcgggtgctaagggggaaaaggggcatccgggcctcattggcctcatagggccccctggcgagcagggggagaagggagatcgcggcctgcctgggccccagggaagccctgggcaaaaaggggagatgggcattccgggcgcctccggtccaatcgggccaggcggaccgcccggacttccaggccccgctgggcccaaaggtgcaaagggggccacagggccagggggtcctaaaggcgagaaaggcgtacaaggtcctcccggacaccctggccctcctggcgaggttatccaacctctgcccattcaaatgccaaagaaaactcgacgatccgttgatggatctcgccttatgcaagaggatgaggccatcccaaccggtggggcacctggctctcctgggggattggaggagattttcggctcgctggattccctcagagaagagattgagcaaatgcggcgcccaacaggtactcaggatagtccggcccggacctgccaggacctgaaactgtgtcaccctgaacttcctgatggcgaatattgggtggatcccaatcaaggatgcgccagggacgcatttagagtgttctgcaatttcaccgccgggggggaaacttgtgtaacaccccgagatgatgtgacccaattctcctacgtggacagcgagggctcaccagtgggggtggtccagttgacattcctgaggttgctttccgtgagtgctcaccaagacgtctcatatccctgtagtggtgccgccagagatggaccactccgccttaggggggccaacgaggatgaattatctcccgagacaagcccttatgtgaaagagttccgggacggatgtcaaacccaacaggggcggacagttctcgaggttcggacccccgtcttagaacagttacccgtgctcgatgcctccttcagtgatttgggggctcctccgcggagagggggcgtactgctcggtccagtgtgctttatgggctag

SEQ ID NO: 232741 - DNA, 5031 bp, Artificial Sequence
  derived and/or modified sequence
atggagcggtgcagccggtgccaccggctgctgctgctgctgcccctggtgctaggcctgagtgccgccccagggtgggctggagctccccctgttgatgtgctgagggctttgcgttttccttctttgcccgatggcgtgcgtcgggcgaaagggatctgccccgctgatgtcgcttatcgggtggccaggcctgcccagctgtctgcccccactcggcagctgttcccgggaggatttcccaaagacttttctttacttacagtggtcagaacacgaccaggtcttcaggctccattacttacactctacagtgctcagggggtgagacagctgggactagagctgggccgacccgtgcggtttctgtacgaagatcagaccggccggccgcagcctccctctcaaccggtgtttagaggtcttagcttggcggatggtaaatggcacagggtggccgtggcggtcaagggccagagtgttaccctcatagtggattgcaaaaagagggtgaccagacccctgccacggtcagcccgcccggtgctcgatacccacggagtgattatttttggagcacggatactggacgaagaggtattcgaaggtgacgtgcaggaactggcaatagtgccaggagtgcaggcggcttacgagtcatgtgaacaaaaggaactggagtgtgaaggaggccaacgagaacgcccacagaaccaacaaccacatagagcccagcgatcccctcagcagcagccttctagattgcaccgaccacaaaaccaggagccacagtctcagccaaccgagtccctctactatgactataaacccccctactatgacgttatgacaactggcaccaccccggattatcaggatcccaccccgggagaggaagaagagattctggaaagttccttactgccgccactggaagaggcggcccatggcccacgaggacttaagggagagaagggagagccagcagtgctggagccgggaatgctagtcgagggccctccaggccctgagggcccagcgggactcatagggccgcctgggatccagggaaatcctggccccgtgggagatcctggcgaacggggaccgcctggtcgggccggcctgccggggtccgatggtgctcccgggccacccgggacaagcctcatgctccccttccggttcggatccggcggcggcgataaaggccccgtggttgccgcccaagaggcccaggctcaagccatcttacagcaggcccgcttagctttgagggggcctcccggcccgatgggttacaccggaaggcccggccccctgggccagcccggatcaccaggactgaaaggggagagtggagatctcggccctcaggggccccgcggtccgcagggcttgaccggtcctcctggtaaagccggaagaagaggacgggccggcgccgatggtgcgcgagggatgccgggtgacccgggcgtgaagggagacaggggtttcgacggccttccagggctgcccggtgaaaagggacatagaggcgacaccggtgcacagggtctgccgggtcctccaggcgaagacggggaaagaggggatgacggggagattgggccaaggggcctccccggggaatctggtcccaggggccttctgggtccaaagggtccccctggcattccggggcctcctggtgtccgcgggatggacggtcctcagggacccaaaggaagcttgggaccccagggcgagcctggccctccaggacaacagggtaccccaggcacgcagggcctccccgggccccagggcgcaattggccctcatggggagaaaggcccccagggcaagcctggcctacccggtatgcccggaagtgatgggccacctggtcacccgggcaaagagggacctcccggcacgaaaggaaaccaaggaccaagtgggcctcaagggcccctaggctacccggggccgcgcggagttaaaggggttgacggcattaggggactgaagggtcataaaggagagaaaggagaagatggcttccccgggtttaagggggatatcggtgtgaagggtgatcgaggtgaagtcggcgtgcctgggagccgcggcgaggacggtccagaagggcctaaagggagaaccggccctacaggcgaccctgggcctccgggtttgatgggcgaaaaagggaagctaggtgtgccaggcctgcccgggtaccctggacgccagggccccaagggtagcctgggattccccggctttcccggtgcctccggcgaaaagggcgccagaggcctgtccgggaagtcaggcccccggggcgagcgcgggcctacaggacccagggggcaacgaggccccagaggcgccactgggaaaagcggcgcgaaagggacatcgggtggcgacggaccccatggcccccctggcgagcgcggactgcctggcccccagggcccaaacggctttcccggccctaagggtccccccggaccacctggcaaagatggcctgccggggcatcctggacagcgcggcgaagtcggctttcagggcaaaactggcccccccggtcctcccggtgtagtagggccccagggggcagccggtgagacaggtccaatgggggagcgaggccatccagggccaccaggtcctccgggcgaacaggggttgccagggaccgcggggaaagaaggtactaagggcgaccccggtcctcccggtgcacctggtaaggatggtccagcagggctccggggtttccccggagagcggggcctccccggaacagccgggggacctggtctgaagggtaatgaggggccttccggcccacccggaccagccgggagcccgggcgaaaggggtgccgctgggtcaggaggacccatcggaccacccggacggccaggcccgcagggccccccaggtgctgctggcgagaaaggggtgcccggcgagaaggggcccattgggcctaccggcagggacggcgttcaggggcctgtaggcctacccggcccagctgggccacctggagtggccggtgaggacggggataagggcgaggttggcgaccctggccaaaagggaacgaagggtaacaagggcgaacacgggcctcccgggccaccaggcccgattggtccagtcggccaaccaggggccgccggggccgatggcgagcctggcgccaggggccctcagggccatttcggcgcgaaaggcgatgagggcacccgcgggtttaacgggcctccaggccccataggcctccagggcttgcccgggccctccggcgaaaaaggggagacgggggatgtcggccccatgggccccccaggtcctccgggaccaaggggcccagccggcccaaacggtgctgatgggccccagggaccacccggaggagtcggaaatctcggaccgcctggcgaaaaaggagagccaggggagtccgggagtcctggcattcagggcgagcccggggtgaaaggtccaaggggtgagagaggagagaaaggggagtcagggcagccaggtgagcccggaccgccaggacccaaaggccctaccggagacgacgggcccaagggaaatccaggaccggtgggctttcctggggatccgggcccacccggagaaggtggaccgaggggccaggacggggctaagggtgatagaggcgaagatggagagccaggccagccagggtctccaggtcctacgggcgaaaatgggccgccggggcccctgggcaagcggggcccagctgggtctcctggtagcgagggcaggcaggggggcaaaggcgctaaaggggaccccggagcaatcggagcaccagggaagaccggccccgttggacccgcgggcccagcgggaaagcctgggcccgacggattgagagggcttccagggagtgtcgggcaacagggaaggcccggggccactggacaggcaggaccgccaggcccagtagggccgcctggattgccaggactgcgaggcgatgcaggggcaaaaggagaaaaggggcacccagggctcattgggctgattggacccccaggtgagcaaggagagaagggtgatcgcggacttcccggcccccaggggtcccctgggcagaagggggaaatgggcatccccggggcctccggccctatcgggcccggtggtccccccgggcttcctgggcctgctggccctaagggggccaagggcgctacaggacctggaggacctaagggcgagaagggtgtccaggggcctcctggacatccaggccctccaggagaggtgattcaacctctgcccatccaaatgcccaagaagacgcgaagatctgtcgacggatcacgacttatgcaggaagacgaagcgattccaactggtggagcccctggttcacctggaggcctcgaagagatctttggatccctggactccctgcgggaggagatcgagcagatgaggcgcccgaccggcacacaggacagtccagcccgcacttgtcaggatctgaagttgtgtcaccccgagcttcctgacggggaatattgggtggacccgaaccagggttgtgccagagacgccttcagagtgttttgcaactttactgccggaggcgaaacgtgcgttactccccgagacgacgtgactcaattctcctacgttgactccgaaggcagtcccgtgggcgtagtccagctcactttcctgcgactgttatcagttagcgcacaccaagacgtaagctacccttgctccggcgccgcaagagatggcccacttcgcctgaggggcgcaaacgaagacgagttgtcacccgaaaccagtccgtatgtgaaagaatttcgtgacggctgccaaactcagcagggacgtacagtccttgaggtgaggacccccgtgttggaacagctccctgtgctggatgcaagtttcagtgacctgggagcaccaccccggcggggaggggtgttgctcggacccgtatgcttcatgggatag

SEQ ID NO: 232742 - DNA, 5031 bp, Artificial Sequence
  derived and/or modified sequence
atggagcggtgcagccggtgccaccggctgctgctgctgctgcccttggtgttggggctctcagcagcacctggatgggctggcgccccccccgtggacgtccttcgtgccctgcggttcccctcgctgcccgatggagtgaggagagccaaggggatctgccccgccgatgtagcgtatcgtgtcgcacggcccgcacaactgagcgctccaacacggcagctctttcctggcggattccccaaggatttttccttactcacggtggtaagaactagacccgggttgcaggcacccttactcaccctgtactccgcccagggtgttagacagctcgggttggagctgggtcgcccagtgcgctttctttatgaggaccagacggggcgcccccagccaccctcccagcctgtctttcgggggctctctctggccgatgggaagtggcatagagtggcagtcgccgtaaagggacagagcgtcaccctgatagtggattgtaagaagcgggtgactcggcccctcccacgctctgcccgcccagtattagatacccacggcgttatcatcttcggagcacggatcctggatgaagaggtcttcgagggggacgtccaagagcttgccatcgttcccggcgtgcaggctgcgtatgagtcttgtgagcagaaagagctggaatgcgaaggagggcagagagagaggccccagaaccagcagcctcacagggcccagcgatcaccccagcaacagccatccagacttcaccgaccacagaatcaggagcctcagtcccagcccaccgaaagcctctattatgactatgaaccaccctactacgatgttatgaccaccgggaccacaccggactatcaggatcctactccgggcgaagaggaagagattctggagagcagcctactcccaccactagaagaggcagctcatggtcctaggggtctgaagggtgagaaaggagagcccgctgtgcttgaaccagggatgttggtggaagggccacctgggcccgaaggccctgccgggctaatagggccgcctggaatccaagggaacccaggcccagtcggggatcctggggagagggggccccccggacgggcgggactgccgggctctgacggcgcacctgggccacccggaacttcccttatgttgccttttcgcttcggttctggaggcggagacaaaggacctgtcgtagcagctcaggaagcccaagcccaggctattctgcaacaggcgaggttggccctcagaggtcctcctggacccatgggctacaccggtcgtcccggacctcttggccagccaggaagtcccgggctaaaaggagaatccggtgaccttgggccccaggggcctcggggccctcaaggcttaactgggccacctggtaaagctggccgtaggggtagagctggtgccgacggagcaaggggaatgcctggcgaccccggagtaaaaggtgacagggggtttgacggactgcctggcctgccaggcgagaaaggccataggggcgatacaggagcccagggacttcccggacctccgggcgaagatggagagaggggggatgacggtgagatcggcccgcgtggcctccctggtgagtctggtccaagaggactcctgggacctaaggggcctccaggcattccaggacctccaggcgttagaggcatggacggcccccaggggccgaagggaagtctcggtccacagggcgagcctgggcctccaggtcaacaggggacccctggcacccaaggcctccccggcccacagggtgcaataggaccacatggagaaaaaggcccacagggaaaacccggcctccctggaatgcctggaagcgacggcccccccgggcacccagggaaggaagggccacccggcaccaagggaaaccaaggccctagtggccctcaggggcccttaggctatccgggccctcgcggagtcaaaggagtcgatggcatcagaggactgaaaggtcataaaggagagaagggcgaagacggctttcccgggtttaaaggcgacataggagtgaagggtgatcgaggtgaagttggtgtgccaggcagccgcggcgaggacggtcctgaagggcccaaggggagaacaggacctactggggatcccggcccgcccggcttgatgggggaaaaaggaaagttgggggtcccggggttgcctggataccccggacgccaaggtcccaaaggttctctgggttttcccgggtttcctggcgcttcgggagaaaaaggagctcgtggtctgtctgggaagtcgggacccagaggcgaacgcggtccgaccggcccacgaggacagcgtggccccagaggcgccaccggcaaaagtggagcaaagggaacctcagggggcgacgggcctcacggcccacccggggagagagggctgcctggaccccagggcccgaacgggtttcccgggcccaaaggaccgcccggtccgcccggcaaagatggcctgcctggccatccaggtcaacgtggcgaggttggttttcagggaaagaccggtcccccagggccaccgggcgtagtggggccccagggcgctgccggagagactgggcctatgggggagcgtggtcacccaggacctcctggacctcccggagaacaggggcttcccggaacagccggtaaggagggaacgaaaggggatccaggcccacccggcgctccggggaaggacggtccagcgggcctccgtgggttcccaggcgagcggggcctgcctggaaccgccggggggccgggcctcaagggcaatgaaggcccatcgggccctcctggccccgcaggctctccaggagagcgcggagccgcaggtagcggtggccctatcggcccccccgggcgccccggccctcagggacccccgggagctgccggcgagaagggagtgccaggtgaaaaaggtcccatcggccctaccggacgcgacggtgtgcaaggaccggtgggtctgccggggcccgccgggcctcccggcgtggcaggggaagacggggataaaggcgaagttggggaccctggacagaaagggacaaagggcaacaaaggagagcacgggcccccgggccctcccggcccaatcggaccagtgggacaacctggcgcagccggcgcagatggagaaccgggcgcgagaggaccccaggggcacttcggggccaagggggatgagggcacccgaggctttaacggcccacctggccccattggactgcagggcctgccaggcccttcgggcgagaagggggagaccggggatgtcggcccaatgggcccgcccggcccccccggccccaggggcccagctggccccaatggggccgacggccctcaaggccctccaggcggggttgggaacctgggtccacccggagaaaagggggagcccggcgagagcggatcaccaggaatccagggtgagcccggcgttaaggggccacggggagagcggggtgagaagggcgaatccggtcagcccggagagccaggcccacctggcccaaaaggacctaccggtgatgatggtccaaaaggcaaccccggccccgtggggttccccggggacccgggaccccccggtgaaggagggccaagaggacaagacggggccaagggagatagaggcgaagatggagagccaggccaacccgggtcccctggaccaaccggggagaacggcccccccggacctctgggaaaacggggacccgctggatccccaggctccgaaggccgccagggtgggaagggcgcaaaaggggatcctggagcaattggggcccctggtaaaacgggccctgttggtcccgcgggaccagccggcaaacctggacctgacggactccgaggattacctggatctgtcgggcagcagggtaggcccggggcaacaggccaggccgggccacccggacctgtaggtccaccagggcttcccgggttacgcggcgacgccggagctaagggtgaaaaaggacacccaggcctgattgggctaattggtcccccgggcgaacaaggagaaaaaggcgatcgcggacttccaggaccacaggggtctccagggcagaaaggggagatggggatacctggcgcatcagggcccattggaccaggcggtcctccgggtttgccaggtcctgccggcccaaaaggagccaaaggcgcaacaggtcctggcggcccaaaaggcgaaaagggcgtgcagggccctccaggtcacccaggtccaccaggggaagttatacagcccctgccaattcagatgccaaaaaaaacccggagatctgtagatggttcacggcttatgcaagaggacgaggcaatcccaactggtggggctcccggctcccctggcggactcgaggagatctttggtagtcttgacagtctccgtgaagaaatagagcaaatgcgccgccctacgggaacccaggacagcccagcgaggacgtgtcaggacttaaagctctgtcaccctgaactgcccgacggcgaatattgggtggaccctaaccagggttgcgccagggatgcctttagagtcttctgtaatttcactgcgggcggagagacctgcgtgactcccagggacgatgttactcaattcagctatgtggattcagaaggctccccggtgggggttgttcagctgacctttctcagactgctgtctgtaagcgctcatcaggacgtgtcctacccatgcagcggggctgcccgggatggcccactgcggctccgcggcgccaacgaagacgaactcagtccagagacaagcccatatgtgaaggaattcagagacggctgccagacacagcagggtagaactgtgctggaggtgagaactcccgtgctcgagcagctgccggtgcttgatgcttctttctcggatctcggggccccgcccaggagagggggagtgctgttgggccccgtttgcttcatgggctag

SEQ ID NO: 232743 - DNA, 5031 bp, Artificial Sequence
  derived and/or modified sequence
atggagcggtgcagccggtgccaccggctgctgctgctgctgcccttggtgcttggcctgtctgcagcaccgggctgggccggggcgcctccagttgacgtgctaagagctctccgcttcccttcgctacctgatggcgtgcggcgggcaaaaggaatttgccccgctgatgtggcatatagggttgcacggccagctcagttatcagctcccacaaggcagttgtttcctggcggcttcccaaaggatttttccttgctgactgtcgtgaggacgcggccgggcttgcaagcgcctctgctgaccctgtactctgcgcagggcgtgagacagctcggcctggaactagggaggccagttcgcttcctgtacgaagatcaaactggacggcctcagcccccctcgcaacccgttttccgcggactgagtctcgccgacggcaagtggcacagagttgctgttgccgtaaagggccaatctgtgaccctgattgtggattgcaaaaagagagttacgcgacccctcccccgctccgcaaggccagtcctggatactcacggtgttattatcttcggcgcccgaatcttagacgaggaggtgtttgaaggcgatgtccaggaactcgccattgtacccggcgtgcaggccgcctacgagtcctgtgagcagaaagagctggagtgtgagggcggacaacgggaacgcccccaaaaccagcagccccaccgcgcacaaagatctccccaacagcagcccagtcggctgcatcgaccacaaaatcaggagccgcagtctcagcccactgaatcactgtattacgactatgagccaccctactacgatgtgatgacaacagggacaactccagattatcaagatccaactcccggagaggaggaagagatactggagagtagcttactcccaccactggaagaagcggcacacggaccaaggggtcttaagggcgagaaaggagagcccgctgtcctggagcccggtatgctcgtggagggaccccctggccccgagggaccagcaggtctcatcggtccgcccggcattcaggggaaccccggtcctgtcggcgaccccggcgaaagaggcccaccaggacgagctggactgcctgggtcagacggcgcccccggaccccctggcacaagcctcatgcttccctttagattcggctcaggaggtggagacaagggccccgttgtggctgcgcaggaggcgcaggcccaggcaatcctccaacaggcacggctggctctgcgaggtcctcctggccctatgggatataccggtcggcccgggcctttagggcaaccaggcagccctggtctcaaaggagagagtggcgatctgggaccgcagggcccaagaggccctcagggcctgactggtccaccaggcaaggctggcagaaggggcagagcgggcgcggacggcgctcggggcatgcctggagaccccggagtgaagggcgaccgggggttcgatggacttcccggtctcccgggcgagaaggggcatcggggcgacacaggcgcccaggggctgcctggtccacccggggaggatggagagagaggggatgacggagagatcgggccacgcggtctcccaggagagagcggcccccgaggactgctgggacctaagggtccacctgggatccccggacccccaggggtgcgcggaatggatggccctcagggccccaagggaagtttaggacctcagggggagccagggcccccagggcagcagggcaccccaggaactcagggcctgccaggcccacaaggtgctattggaccacatggtgagaaagggcctcagggtaagccggggctgccggggatgccgggcagcgacgggccccccgggcaccccggtaaagagggtccacccgggactaagggaaatcagggcccttctgggccacaggggcccctgggctatccagggcctagaggcgtaaagggtgtagacgggataagaggactgaaggggcataagggagagaagggtgaggacgggttccccggtttcaaaggcgatattggcgtcaagggcgatcgcggcgaagtgggcgtgccaggcagccgtggtgaggacgggccagaaggcccaaagggccgcaccgggcccacaggagatcccgggccaccaggtctcatgggagagaaggggaaactgggtgtgccaggcctcccaggttacccagggagacagggccccaaggggtcgttgggcttcccggggttcccgggtgctagtggggagaagggtgcacgaggcctctctggaaaaagcggtcctaggggagagagggggcccacaggtccacggggacagagaggaccccgaggggcaaccggcaagtccggagcaaaaggtacaagtggtggtgatgggccccacgggccccccggagagcgagggttgcccggtcctcaggggcccaatggatttccaggtcccaagggacctttgggtcctccgggcaaagatggcctccccggacaccccggccagagaggcgaggtcggcttccagggtaagacgggaccccccgggcccccgggcgttgttggtccccagggcgccgctggggagaccggccccatgggtgaacggggccatcccggccctcccggaccaccgggagagcaaggactgcccgggaccgctggaaaagaggggaccaagggagaccccggcccccccggcgccccagggaaagacggcccggcaggtcttcgaggttttcctggcgagagagggctcccaggaacggcaggtggcccaggactgaagggaaacgagggacccagcggtccaccgggaccggccggatctcccggagagaggggcgccgccggctccggcgggccgattggcccacctggccgccccggaccccaaggaccgccaggcgccgccggggagaaaggagttccaggtgaaaagggacccattggtcctaccggacgggacggcgtgcagggccccgtaggcctgccggggcctgccggtcccccaggcgtggctggggaagatggggataaaggcgaagttggcgaccctggccagaagggcacgaaaggaaataagggagagcatggtccacccggaccgccggggccaattggccctgtaggtcagccaggggccgccggagctgatggcgaaccaggcgcacgaggcccccagggtcactttggcgctaagggcgacgagggtactagaggtttcaacggcccccccggaccaattgggctccaggggctacccgggcccagcggcgaaaagggggaaaccggggacgttggtcccatgggcccaccagggccccctggtccaagggggcctgccggacccaatggcgctgatggaccacagggacccccggggggcgtgggcaatctgggaccgccaggcgagaagggggagccaggtgagagcgggagccccggtatccagggggagcctggagtgaagggtccccgtggtgaacgaggggaaaagggagaaagcggccagcccggtgaacccggacctcccgggcccaagggcccaaccggcgacgatggtccaaagggtaacccaggtccagttggatttcccggagacccagggccccctggcgaggggggcccgcgcggccaggatggtgcaaagggcgatagaggggaggatggtgaacccgggcagcccggttctccaggccccacaggcgaaaacgggccacctggtccactaggtaagcgcggacctgcggggtcccctggctctgaaggtaggcagggcggtaagggggccaagggggaccctggcgcgattggtgccccaggcaaaacaggacctgtgggaccggctggcccggcaggaaagccagggccagacgggctgcggggactccccggcagtgtgggacaacagggacgtcccggggcgactggtcaggcagggccacccggaccagtggggcctcctggcctgcctggcctcagaggggatgccggtgctaaaggggaaaagggacaccccgggctgattgggttgatcggaccgccgggggagcagggcgagaagggcgaccggggcctgccaggtccccagggatcacccggccagaaaggggagatgggcatccctggcgcaagcggccccattggcccaggcggccctccaggcttaccagggcccgcgggtcctaaaggcgccaagggcgctacaggtccaggcgggccgaaaggggaaaagggagtgcagggccctcccggacaccctggccctcctggcgaagtcattcaaccactgccaattcagatgcctaaaaaaacacggaggagtgtggacggatctcggttgatgcaggaggatgaggctatcccgaccggaggggctcccggatctccgggcgggctggaggaaatcttcggtagcctggacagcctgcgcgaggagattgagcagatgcggagacctaccggtactcaagactccccagcccgcacgtgtcaagatctgaaactctgccacccagagctgcctgacggcgaatactgggtggaccctaaccaggggtgtgcacgggacgcgttccgagtattctgtaacttcacagccggaggagaaacttgcgtgacccctagggacgatgtcacacaatttagctacgtggattctgagggaagcccagtcggtgtagttcagcttacctttctaaggctgttgtctgtgtccgcccatcaggatgtgagctacccttgctcaggcgctgcgagggacgggcctcttagactcagaggggcgaatgaagacgaactgagcccggagacaagtccatatgtaaaggagttccgggatggatgtcaaactcagcagggtaggacagttctcgaggtgagaacgcccgttttggaacagctaccagtgctggatgccagtttttccgatcttggagctccaccccgaagaggtggagtactgctcggcccggtctgttttatggggtag

SEQ ID NO: 232744 - DNA, 6245 bp, Artificial Sequence
  derived and/or modified sequence
cacacagaagcggcagccaccgaggagggagcagtgccgggagccccgacggcgccttgctgcatggagctgggccgctgacagctgtcgctgcccgcagcctctgacctccctgggaccccggcgtctgaggctcatagtctgctccctgtcttctgtcagcctcagggcatccagcgtctcaggccgacctgggtccctgggacccggcgtttcggcttctcagccatggagcggtgcagccgctgccatcgcctcctcctcctcctacctctggtgctggggctgagcgcggccccaggctgggcaggtgcaccccctgtggatgtgctccgggccctgaggttcccctccctccctgatggtgtccggagagcgaaaggcatctgtccagctgatgtggcctaccgagtggcacgacctgcccagctcagtgcacccactcgccagcttttcccaggaggatttcccaaagatttctctctgctgactgttgtccggacccgccctggtctccaagctcccctcctgactctctacagtgcccagggtgtccgacagctgggcctggagctgggccgacctgtccgcttcctgtatgaagaccagactgggcggcctcaacctccctctcagccagtcttccgaggcctcagcctagcagatggcaagtggcaccgtgtggctgtggctgtgaagggccagtctgtcaccctcattgttgactgcaagaagcgagtcacccggcctctcccccgaagtgctcgtccagtattggacacccatggagtgatcatctttggtgcccgtattctggatgaagaagtctttgagggtgatgtccaggagctggccattgtcccaggggtccaggcagcctatgaatcatgtgaacagaaggagctggaatgcgaggggggccagagggaaagaccccaaaaccaacagcctcacagagcccagagatctccacagcagcaaccatcaagacttcacaggccacaaaatcaggaaccccagagccagcccactgagtctctctactatgactacgagcccccctattatgatgtgatgactacggggacaacccctgattatcaggaccccaccccaggtgaagaggaagaaatcctggagtcgagcctcttgccaccccttgaggaggctgcccatggaccccgagggctgaagggagagaaaggagagcctgcagtgttggaacctggtatgctcgtggaggggccccctggcccagaaggccctgcgggattgattggtccccctggcatccaggggaacccaggcccagttggagaccctggagagaggggcccccctggccgagcagggctccctggatcagatggggctcctggtcctcctggcacatctctcatgctcccattccggtttggcagtggtgggggtgacaagggccctgtggtggcggcccaggaggctcaggcccaggcgatcctgcagcaggcgaggctggcgctccgtggaccccctggccccatgggatacacagggcgccctggacccttgggccaacctgggagccctggcctgaaaggagagtctggagacttaggacctcagggccccagaggacctcagggcctcacaggccctcctggcaaggctgggcgaaggggccgggcaggtgctgatggagcccgagggatgcctggagatcctggagtgaagggtgaccgaggttttgatggactcccagggctccctggagagaagggccataggggtgatactggtgcccagggccttcctggtccccctggtgaggatggagagaggggagatgacggggagattgggcctcgagggctgcctggagagtcgggacctcgaggtctccttggccccaaaggcccacctggtattcctggaccccctggcgtccgaggcatggatggtccccagggccccaaagggagcttgggaccccagggagagccaggacctcctggacaacagggcacccctgggacccagggtcttcccgggccccagggtgccatcggccctcatggagagaagggtcctcaagggaagccagggctccccggcatgcctggctcagacggacccccgggtcacccagggaaggaaggtccccctggaaccaaaggaaaccagggtccctctggacctcagggtcctctaggatacccaggacctcgaggggtcaagggtgtggacggaattcggggtctgaagggtcataagggtgagaagggtgaggatggctttcctgggttcaaaggtgacataggcgtgaaaggtgacaggggcgaagttggagtccctggttccaggggagaggatggtcctgaggggccaaagggacgcactggaccgactggagaccctgggcccccagggctcatgggcgagaagggcaagctgggtgttcctggtctgcctggctatcctggacgtcagggacccaaggggtccctaggatttcctggctttcctggtgccagtggagagaagggagcccggggcctgtcggggaagtcagggcctcggggagaacggggccccacgggtccacggggtcagcggggaccccgaggtgccactgggaagtctggagctaagggaacatctggtggtgatggcccccatgggccccctggagagaggggcctccctggacctcagggtcccaacgggtttcctggaccgaaaggacccctgggcccccctgggaaggacgggctgccgggacacccaggccaaagaggagaagtgggtttccaagggaagaccggcccccctggtcctccaggagtggtgggacctcagggagcagcaggagaaaccggccctatgggggagagaggtcacccaggccccccggggccccctggagagcagggactacctgggacagctggaaaagaaggaacaaagggtgaccctggtccccctggggccccagggaaggatggtcctgctggtctgaggggattcccaggagagagaggcctcccaggcactgctggtggacctggtttgaaggggaatgaaggtccgtctggcccccctggccctgcaggctcccctggggaacgaggtgcagcaggatcagggggacccattggtccgccagggcgcccaggcccgcagggtccccctggagcagcaggagagaaaggtgtcccaggtgagaagggccccattggcccaactggccgagatggagtgcagggtcctgtggggcttcctggtcctgctgggcctccaggtgtggctggagaggatggagacaagggtgaggtgggggaccccggacagaagggcaccaaagggaacaagggtgaacatggccctcctggaccccctggacccattggtcctgtggggcagcctggagcagcgggagcagatggggagcccggagctcggggaccccagggacactttggagccaaaggtgatgaaggaacaagaggattcaatgggcccccaggacccattggcctacagggtttgccaggcccctctggggagaagggagaaacaggagatgtgggtcctatgggaccacctggccccccaggacctcgaggtccagctggacccaatggcgctgatggcccacaaggtcccccaggaggtgttgggaacctgggtccccctggagagaagggggaaccaggagagtcaggatctccagggatccagggcgagccaggtgtcaagggtccacgcggggaacgtggagagaaaggagagtcggggcagccaggagagccagggccaccagggcctaaaggccccacaggcgatgatggccccaaagggaaccctggtcctgttggttttcctggtgaccctggcccccctggagaaggtggccctcggggccaggatggtgctaagggtgaccgaggcgaggatggtgagccaggacagcctggatcccctggtcccaccggggagaatggacccccagggccacttggaaagcgaggtcctgctggctcgcctggttccgaggggcgacaaggagggaagggagccaagggagatcctggcgctataggtgccccggggaagacaggcccggtgggtcctgcaggcccagcagggaaacctggccctgatggtctgagggggctcccaggctcagtgggtcagcaaggccgacctggagctacaggccaggctgggcccccaggtcctgtgggacccccagggctgcctggtctccggggcgatgctggagccaagggagagaagggccacccaggtctcattggactgattgggcccccgggtgagcagggagagaagggagatcggggacttcctgggcctcagggctcccctgggcagaagggtgagatgggtatcccaggagcatccggccccattggtcctggaggtccccccggcctccccggacctgctggccccaaaggagccaaaggagccacaggcccaggcggacccaagggagagaagggtgtgcagggccctccaggacacccgggtcccccaggcgaggtgatccagccactgcccattcagatgcccaagaagactcggcgctcggtggatggaagccgtctgatgcaggaagatgaggccataccgaccgggggagcccccggcagtcctggggggctggaggagatctttggctcactcgactccctgcgggaggagatcgagcagatgaggcggccaacagggacccaggacagccctgctcgcacctgccaggacctgaagctgtgccacccagagcttcccgatggagagtactgggtcgaccccaaccagggctgtgctcgggatgccttccgagttttctgcaacttcacagcagggggtgagacctgtgtgacgcctagggatgacgtcacgcagttctcttacgtggactcagagggctccccagtgggtgtggtccagctcaccttcctgcggctgctcagcgtctcagcccaccaggacgtctcctacccctgctctggagcagcccgtgacggtcccctgagactccgtggggccaatgaggatgagctgagcccggagactagcccctatgtcaaagaattcagagatggctgccagacacagcaaggccggacggtgctggaggtgcgaacgcctgtgctggagcagctgccagtgctggatgcctccttctcagacctgggagccccaccgaggcggggaggggtgctgctggggcctgtctgcttcatgggataggaccgtctctgtctgatcctgtccattcggaaccaggcccacctggaatcccacaacatcagctctgtgccacctcccaagagggctcctcactatctagggagccctgggccagggcgtggagagccctcagtcggggcaggccaggggaggggtgaagtggttgcctggacaccccacgggaggagtggcatctggggctcttggccctcccacctggagcctgttacccgttagagagctgagacccttatttaaaactcacctcccaatcaccccaaacaaatggaagagaagagaaaggacatggcgtattttgtatttaaaagtaattgtattaattatttaaagtgtggaaagcaaaataacaaaaaagagaaacgccaacaaaaatcagcagatgttgaagacaggggtctcgggggtgggctccggcacccacatcctggagtcaggactttcctcagtgactgtgtgtaggggggtttcagggctgaaccccacctccctcccaccttcctcccacctcacctgtcgcacccactgtgaaagttggaatatgtggtctccctggcctcagggctctgactctgccagggtggggctctctaacccacaggtgttggctgcctggcccatgtgcccactgtctcttccacttggtctgggtttggcaggcactgcctgctacttgagggccaggatgctcccccagggaagaaacggaatagtgtggggtgtgtgcagggctgcatcccgcagatggctggaatattaaaattcttctatattggctggtaaattgccatggccctgagccactgagtatgttcattgccacccctgtccctcccctgggcacccctcactttccctgatcctgcaattaaagggttaatgtgtggcatatggaagggactcccaggaccctgtgcccagcttccatgctgactgatggttaaataatgtgattgtctcctcccagg

SEQ ID NO: 232745 - DNA, 4968 bp, Artificial Sequence
  derived and/or modified sequence
atggagcggtgcagccggtgccaccggctgctgctgctgctgcccctggtgctgggcttgtcggccgctcccggatgggcgggagcccctcccgtagacgtgctgcgagccctgcgtttccctagtctgccagacggggtgcgccgcgctaaggggatttgtccagctgacgtggcgtatagggtggcgcggccagcccagcttagtgcccccacccgacagttgtttccgggtgggtttcccaaggacttctccctgctgaccgtcgtccggacccgacctggactccaagctccattgttgacactgtactctgcgcagggagtaagacagctgggcctagagctggggccccctgtgaggttcttgtacgaggatcaaaccggccgtccgcagcctccctctcagccggttttccggggactaagcctagcggatgggaagtggcacagagttgcagtcgcagtgaaggggcaatctgtgaccctgatcgtggattgtaaaaagcgggtcacccgccccctgcctaggagtgcccgccccgtgctggatacccatggcgttatcattttcggagcaaggatcctggatgaggaagtgttcgagggcgatgtacaggagctggcgattgttcctggtgttcaggcagcgtacgaaagttgtgagcagaaggaactcgaatgtgaaggtggtcagcgagagcggccccagaaccagcagccccaccgtgcacagcgaagcccccaacaacaaccctcccgtctgcacaggccccaaaatcaagagccacagtcccagccgacggagagtttatattacgactataagccgccctattacgacgtgatgacaaccggtactacacctgactatcaggcagcccacggcccccgcggactgaaaggagagaagggagaaccagccgtcctagaaccggggatgctggtggagggcccgccaggccccgagggccccgccgggctgataggaccccccggaatccagggaaatccagggcccgtgggcgatccaggcgagcgtgggccccccggtcgggctggcttaccgggaagcgatggggctccgggcccaccaggcactagtctgatgctgccctttagattcggctccggcggcggggacaaggggcccgttgtcgcggctcaggaagcacaggctcaggccatccttcagcaggcgagattggccctccgggggcccccagggcccatgggctacaccgggcggccaggtcccctaggacagcccggttcccccggcctcaagggggagtctggggatctcggaccacagggacctcggggcccccaggggttaacaggccctcccggaaaagcaggtcgcagaggaagggctggcgcagatggcgcccggggcatgccaggagacccaggggttaaaggagacagaggattcgatggcctgcctggcctgccaggggaaaaaggccatcggggcgacactggcgcgcaagggttgcccgggcctccaggggaagacggagaaagaggcgacgatggcgagattggcccgcgagggcttccaggggagtcaggtccgcgcgggctgctgggacctaagggcccaccaggaattcccggaccacctggggtgaggggcatggatggcccccagggacccaaggggagcctcggacctcaaggtgaaccagggcctcctggccagcagggcactcctggaacccaaggtttacccggaccacagggagcgatcgggccacatggtgagaaggggccacagggcaagccaggtctccctggaatgccaggttccgatggacctcccggacatccaggcaaagagggccctccagggacgaaaggcaaccagggccctagcggaccacaaggaccacttggttaccctggtcctagaggtgtgaagggggtggatggaatcaggggattaaagggccataaaggcgagaaaggagaggacggattccccggttttaagggcgacatcggcgtaaagggcgaccgaggagaggtcggcgtgcccggcagccggggagaagatgggcccgagggccccaagggtagaacaggacccaccggcgaccccggcccacctgggctgatgggcgagaaggggaagctgggagtccccggactccccggataccctggacgccagggccccaagggcagcttggggtttcctggttttcctggtgcctccggagagaaaggcgcccgaggcctatctggcaagagtgggccgaggggggagcgcgggcccacaggcccaaggggccagagagggccacggggagcgaccggaaaaagcggcgccaaaggcacttcaggaggcgatggaccacacggcccgccaggtgagcgtggactgcctggacctcaggggccgaatggtttccccgggcctaagggacctcctggtccacccggaaaggatggcctgcctggacacccaggacagagaggggaagtagggtttcagggaaaaaccggaccacctgggcccccaggagtggtcggcccccaaggagctgccggcgaaaccggccctatgggggagcgaggccatcctgggccccccggcccccccggcgagcagggcctgcccggcacagccgggaaggagggaaccaaaggcgaccccggtccccctggggccccaggtaaagatggcccggcgggtttgcgtggctttccgggagagagagggctacctggaaccgcagggggccccggccttaaaggaaacgaggggccctctggaccacccggacccgctgggagcccaggggaacggggagcagctgggagtggcggtccaattggcccgccaggaaggcctgggccacagggccccccaggggcagctggagagaagggagtacctggggaaaaaggccctatcggcccgaccggcagagatggagtacaaggacctgtgggcttacccggccctgctggacctcccggagtcgccggggaggacggagacaaaggagaggtgggagatcccggacagaagggcaccaaaggaaacaaaggcgaacacggccctcccgggcccccgggccccattgggcccgtgggacaacccggtgctgcaggagccgatggtgaacctggcgcccgtggtccccagggtcacttcggagcaaagggagatgagggtacaagaggctttaacggaccacccggtcctatcgggctgcaggggctccctggaccatcaggagaaaagggcgagaccggagatgttgggccgatgggtcccccagggcctcctggccctcgtgggccagctggtcccaatggagccgatggcccacagggaccacctggcggcgtgggcaatcttggtccacccggagaaaagggagagcctggagaatctggctctcccggaattcagggagaacccggcgtcaagggtccacggggtgagaggggtgaaaagggggaatcgggccagcccggggaaccgggtcctcccggcccgaagggccctactggagacgatggacctaagggcaaccccggccccgtaggtttccctggagatcctggaccccctggcgaagggggccccaggggtcaggatggagccaagggcgatcgcggggaagacggcgaacctgggcagccgggtagccctggcccgacgggggaaaatggcccccccggccctctgggaaaacgcgggcccgccggtagtccgggttcagaagggcgccagggcggtaaaggagccaagggcgatcccggtgccattggggctcctgggaaaactggtcctgtcggtcccgccggacccgccgggaagccaggaccggacggcctaagagggctaccaggcagtgtcggccagcaaggacggcccggagccactgggcaagctgggcctccgggaccggtaggccccccaggactgcctggactcaggggggacgcaggggcaaaaggagagaaagggcatcctgggctgataggtttgatcggacccccaggcgaacaaggagagaagggggaccgcggcctgcccggtccgcagggctctccgggtcagaagggtgaaatgggcatcccaggggcgtccggccccatcggtcccggcggtcctcccggactgcccggacctgcgggtcccaagggtgccaagggggccactggccccggcggtccaaagggcgagaagggcgtccaggggccccctggtcaccctgggccccctggggaagtcattcagccactccccatccaaatgcctaagaaaacaaggcgctctgtagacggaagccgactcatgcaggaggatgaagctatccctaccgggggagctcccggttcacccggaggattggaggaaatctttggcagcttggatagtttgcgtgaggaaatcgaacagatgcgccgcccaaccgggacccaggacagcccagcaaggacttgccaagaccttaagctctgtcacccagaattacccgatggtgaatactgggttgaccctaatcagggctgtgctcgtgatgccttcagagtgttctgcaattttaccgctggcggagagacctgcgtaacaccaagagatgacgtaacccagttctcgtatgtcgactcggaggggagcccagtaggggtcgtccagctgaccttccttcggcttctttcagtcagtgcacaccaggacgtgagctatccgtgctccggcgccgcaagagatggaccccttagactgagaggagcaaacgaggacgagctctctcccgagacaagcccatacgtcaaggagttcagagatggatgccagacacagcagggtcggaccgtgttggaggtaaggacaccggtcttagaacagctgcccgtcctggacgctagctttagcgaccttggggcgcccccacggcggggaggcgtcctgctcggccccgtgtgctttatgggatag

SEQ ID NO: 232746 - DNA, 4968 bp, Artificial Sequence
  derived and/or modified sequence
atggagcggtgcagccggtgccaccggctgctgctgctgctgcccctagtcctcggactgtcagctgcacccggatgggccggagctccccccgtcgacgtgctgcgcgctctacggttcccgagtctgcctgacggtgtgaggagggctaagggcatctgccccgctgacgtggcctacagagtggcccgacccgcccaactgtcagccccaacgaggcagctcttccccggcggctttcccaaagactttagtttgctgacagtggttcgcaccaggcccgggttacaggccccactgctgaccctgtattccgcgcagggtgtaagacagttggggctggaactgggtagaccagtcaggttcctgtacgaggaccagacgggaagacctcagccgcctagccagccagtgtttcgaggtctctccctggccgacgggaagtggcaccgggttgccgtggccgttaaaggtcagtcagtcaccttgatcgtcgattgcaaaaaaagagtgacccgccccctgccccgatcagcgagacctgtgctcgacacacatggcgttatcatattcggcgctcgtatccttgatgaggaagtgtttgagggtgatgtgcaggaattagcaattgttcccggagtgcaggctgcatatgaatcctgcgagcagaaagaattggagtgtgagggcgggcaaagggagaggcctcaaaaccaacagccccatagggctcaacgatctccccaacaacagccatcaaggctccatcgtccccaaaaccaggagccccaaagtcaacctacggagtctctgtattacgattatgagccaccgtattacgacgtgatgacgaccggcaccactcccgactaccaggcagcgcatggaccaaggggcctgaaaggcgagaaaggcgagcctgccgtcctggaacccgggatgttggtggaaggccccccgggtccggagggacctgccggcctcatcggcccccccggcatccagggtaatccaggccccgttggggaccccggcgaacgcgggccccctggcagagccggcctgccaggtagcgacggcgcccctggaccaccaggcacctctcttatgctcccatttagatttggctccggggggggcgataagggaccagtggtcgccgcccaggaggcccaggcccaagctatactccagcaagcacgtcttgcattgcgaggtccacctggccccatggggtataccggccggccaggaccactggggcagcctggaagtccaggcctgaagggtgagtcaggtgatctcggccctcaggggcctcggggtccacagggcctgacaggcccccccgggaaggccggccggcgtggtagggctggcgccgatggcgcccgcggaatgccaggtgaccctggagtaaaaggggatagaggattcgatgggcttcccggattgcccggcgagaaaggacacagaggcgacactggcgcccagggcctgcctgggcccccaggcgaggatggcgaacggggagacgacggcgagataggtccccgcggcctgcctggagagagtggtcctaggggcttactaggtccaaaagggcctcctgggattcccggcccaccaggggtgagagggatggacggcccccagggcccaaaaggctccctgggaccacaaggggagcccggtcctcccggtcagcaagggactccagggactcagggcctccctggacctcagggggccatagggccgcacggagaaaagggtccacagggcaaaccggggctgccagggatgccgggctctgatgggccaccaggccaccccggcaaggaaggtccacccggcaccaagggtaaccagggaccatcagggcctcagggtccactgggttatcccggccccaggggagttaagggagtggacgggattagaggcctgaagggccacaagggtgagaaaggcgaagatggctttcccggattcaaaggtgacataggcgttaagggcgatcggggggaggtcggagttcccggctcccggggtgaagatggtcctgaagggcctaaggggagaaccgggccaactggggatccgggtcctccaggcctgatgggcgagaagggcaaactgggtgttcccggactccctggctaccctggacgccaggggcctaaaggttccctggggtttcccggtttcccaggtgctagcggagagaaaggcgcccgcggtttgtccggaaagagtgggccccgtggggagagaggacctacaggtccccgggggcagagaggaccccgcggggccactggtaagtcaggagcgaagggtacatctggaggcgatggcccccacggcccacccggagagcgcggactgcctggcccccagggccccaacgggttccctggaccaaagggaccgccagggcctccaggcaaagacggactaccaggccacccggggcagcggggcgaggttggatttcagggtaaaactgggcctcccggcccccccggggtggtgggcccgcagggagcggctggggaaactggaccaatgggcgagcgcggacacccaggcccacccggcccccctggagaacaggggctgcctggaacggctgggaaagaaggtaccaagggcgacccaggtccccccggtgcccccggcaaggacgggcccgctggacttcgcgggttcccaggtgaaaggggcctgcctgggaccgccggaggtcctgggttgaaaggcaacgagggcccctctggcccacctggccctgccgggagccccggagagcgtggggcagctggctccggcgggccaattggcccccccggcaggccaggccctcagggaccccctggggccgctggtgagaagggcgtcccaggtgagaagggtccaattggaccaacaggaagggatggggtccagggacctgtgggactgccgggccccgccggcccaccaggggtagccggcgaagacggtgacaaaggggaggtgggagatccaggccagaaggggacgaaagggaataaaggcgaacatgggccaccaggtccacctggaccaattgggcccgtgggacagcctggagccgccggggccgatggggagcctggggcccgaggcccccaaggacacttcggggccaagggggacgagggtactcgcggattcaatgggcccccagggcccatcggtttacagggacttccggggccttccggcgaaaagggcgaaaccggcgacgtcgggcctatggggccacccggtccgccaggcccaagaggtcccgcagggcctaacggagccgacgggcctcagggcccaccaggcggagttgggaaccttggaccacctggcgaaaaaggggagcctggtgaatccgggtcgccaggtattcagggtgagcctggggttaaagggccaaggggcgagaggggggagaagggtgaatcaggtcagcccggggaacctgggccccctggcccgaaaggccccacgggagacgacggtcctaaagggaaccctggtcctgtgggcttccctggcgacccgggtccacctggcgaaggtggccccagaggccaggacggtgccaagggcgatagaggggaagacggtgagccaggccagcctggatctccgggcccaacaggggagaacggccctcccggtccgctgggcaaaaggggacccgcaggaagccctgggagcgaaggcagacaaggaggcaaaggtgccaagggcgacccaggtgcaataggggccccagggaagaccggtccagtaggcccagctggtccagctggtaagcctgggcctgatggcctgagaggcctgccagggagtgtgggccagcaagggcgccctggtgcgactggccaggcaggacctcctggccccgtgggccctccaggattacccggattgaggggcgacgccggagcaaaaggcgaaaaagggcatcctggcttaataggactgattggcccccctggtgagcagggtgagaagggggacagaggcttgcctggtccccaggggagtcctgggcagaagggggaaatgggtatccccggagctagcggtcccatcggaccgggcggcccccccggactcccaggcccagccggtccgaagggagctaagggagccacaggacccggcggacctaaaggagagaagggcgtccaaggacctcctggccatcccggcccacccggcgaagtcatacagcccctccctatacagatgcctaaaaagacccggagatccgtcgacggctcccggctcatgcaggaagatgaggccataccgaccgggggagccccagggtcccctggaggactggaggaaatttttggatctcttgatagtcttcgcgaggagattgaacagatgagaagaccaacgggtacacaggatagcccagcacgcacctgtcaggacctcaagctgtgccacccggaactgcctgatggagagtattgggtggatcccaatcagggttgtgcaagggacgcttttagggttttctgcaacttcactgccgggggcgagacatgcgtgactcccagggatgatgtgacgcagtttagctacgtggatagtgaggggtctcccgtgggggtcgttcagctgactttcctgcgactgttgtcagtgtcagctcaccaggacgtgtcatatccttgctctggcgccgcccgggacggccctctgagactcagaggggcgaacgaagacgagctgagtcctgagacatcaccttacgtgaaggaattccgggatggctgtcagacgcagcagggacggaccgtattagaggtgcggacaccagtgcttgaacaactacccgtgttagatgcttctttcagcgaccttggggcgcccccgaggcgcggcggagtgcttctcgggccagtgtgttttatggggtag

SEQ ID NO: 232747 - DNA, 5031 bp, Artificial Sequence
  derived and/or modified sequence
atggagcggtgcagccggtgccaccggctgctgctgctgctgcccctggtgctggggctgtctgccgcccccgggtgggccggcgcaccacctgttgacgtcttgagggctctaagattcccatccttgcccgacggagtccgacgcgcaaagggcatatgtcctgcggatgtcgcctatcgcgtggcccgtcctgcccagttgtctgccccgacacgccagctattccctgggggctttcccaaggacttctcacttctaacagttgtgcgcaccaggccgggactgcaggcccctctgctgacactttacagcgcccagggcgtgaggcagctagggctggagctcgggcgcccagtgcgttttttgtatgaggatcagactggaagaccgcagccaccaagtcagcccgtgtttcgcgggctctcactggcggacggcaaatggcacagagtggctgtggcggttaagggccaatccgtgacactcatcgtcgactgcaaaaaacgtgttaccagacccctgccacgaagcgccaggccagtgctcgacacgcacggcgtcattatctttggtgcccgcattctcgacgaggaggtctttgaaggcgacgttcaagagctggcaatcgtcccaggcgtgcaggccgcatacgagagttgcgagcagaaagagctcgaatgtgaaggaggacaacgtgagcgccctcagaaccagcagccacatagggctcagaggagtcctcagcagcagccttcacggttgcaccgaccacagaatcaggagccacagtctcaacccaccgagtccctgtactatgactataaacctccatactacgacgtgatgacaacaggcaccactccagattaccaggaccctacacctggggaggaagaggagattctggagagctctctgttgccacccttagaagaggcagcgcacggaccgcgcgggctcaagggcgagaagggggaacctgccgtcctagagcccggcatgttagtcgagggtcccccaggtcctgagggccccgcggggcttatcggaccaccgggtatacagggcaatccaggccctgttggcgatccgggcgaacgtgggccaccaggaagggccggcctgcccgggtctgatggcgccccagggccacccgggaccagcttgatgctgccctttaggtttgggagtgggggcggcgataaaggtccagtcgtggcggcccaggaagcccaggctcaagcaatcctgcagcaggcaagactcgcactgcggggaccccctggcccgatgggatacacagggcgacccggccctctaggacaaccaggttcgcccggcctcaagggggagtccggcgacctgggaccccagggtccacgaggcccccagggtctgaccggcccacccgggaaggccgggcggcgtggccgcgcgggggctgatggagctcgcggcatgcctggagaccctggtgtcaagggagaccgaggcttcgatggcttaccggggcttcctggtgagaaagggcatcgcggtgacacgggggcacagggactgcctggcccaccaggggaggacggcgaaaggggagacgacggtgagattggcccccgtggcctccccggtgagagcggacctcggggtttgctgggcccaaagggacctccaggaattcccggtcccccaggcgtgagaggtatggacggccctcagggccccaaagggtccctgggacctcagggcgaaccagggcctcctggccagcagggtacccctgggacccagggcctcccaggaccacagggtgctatcggcccgcatggtgagaagggcccccaggggaagcccggattaccgggtatgcccgggtctgatggtcctccaggccacccagggaaggagggtcctcccgggaccaagggaaaccaggggcctagtggccctcagggacctctaggttaccccgggcctagaggcgtgaagggcgtggatggaataaggggtctgaagggccacaaaggtgaaaaaggcgaagacggatttcctggatttaaaggagatatcggcgtgaagggagaccgcggtgaggttggggttccaggatcccggggcgaagacggcccagagggacctaaggggcgcacaggaccgaccggcgaccctggcccccccggcctgatgggggagaaagggaaactgggggtgcccgggctgcctgggtaccccggtagacagggaccaaaaggctcactgggcttccctggctttcccggtgctagcggagagaagggagctagaggtctgagcgggaaaagcggtcctcggggcgagcgcggtcctacagggccaaggggccagcggggcccgcgcggagcgacaggaaagagtggggctaagggtacctctggtggtgatggcccgcatggcccaccaggggagagaggtctccccggaccacagggcccaaacggctttccgggtcccaagggacccccaggtcctccaggtaaggacgggctccccggacatcccggtcagagaggagaggttggatttcagggaaaaaccggcccgcccgggccccccggtgtggttggcccccagggggcagctggggaaactgggcccatgggcgagcgtggccaccctgggccgcccgggccacctggggaacaggggctacccgggacagccggaaaagagggcacaaagggcgatcccggacccccaggagctcctggaaaggacggcccagccggtctcaggggatttcccggggaacgagggcttccaggtactgctggggggcccggactgaaggggaacgaaggtcctagcgggccacccggtccagcaggctccccaggtgagcgcggggccgcagggagtggaggtcccatagggcctcccggacggcccggcccccaaggccccccaggtgcagccggggagaagggtgtgccaggcgagaaggggcccataggccctaccggtcgggacggggttcagggtccggtcggactgcccggccccgcaggaccacctggggtcgccggcgaagatggagacaaaggggaggtcggagaccccggccagaagggaactaagggtaacaaaggagagcacggccccccagggccacctggcccaattggaccagtggggcaaccgggagcagcaggagctgatggggaaccgggagctaggggcccacaggggcacttcggagccaaaggcgacgaaggcactcggggcttcaatggcccaccgggaccaatcgggttacagggccttcctgggccaagtggggagaagggggagacgggcgacgttggcccaatgggcccccccggccctcctggccctcgtggccctgctggcccgaatggagctgacggcccacagggacccccaggtggtgtagggaaccttggaccccctggggagaagggtgaacctggcgagtccggatctcctggcatccagggcgagccaggagtaaaggggcccaggggagagaggggcgaaaagggcgaatccggccagcctggtgaaccaggtccacccggacccaaggggccgactggcgatgacggtcctaaaggcaatcctggcccagtgggtttccccggtgaccctggacccccaggggagggaggaccacgtggacaagatggggccaaaggcgacaggggcgaggatggggaacccggccaaccgggcagccccggccccaccggggagaatggacctccagggcccttggggaaacgcggtcctgccggctcacccggtagcgaagggagacaaggagggaagggcgctaaaggggatccaggcgctattggagcccccggaaaaacaggccctgtgggacccgctggcccggccgggaaaccaggtccagatggcctgcgcggccttcctggctccgtggggcagcaggggcggccaggtgcaactggccaagccggccctcccggaccggtcggccctcccggactcccaggcctacggggcgatgctggcgccaaaggcgagaagggccaccctgggcttattggcctgatagggccacccggcgagcagggggaaaagggagacagagggctccctggccctcagggtagtcctggtcaaaagggtgagatgggcatcccaggcgccagcggcccaattggacccggcgggccacctggcttgcccgggcctgcaggccccaagggggctaaaggcgcaactggcccgggcggccctaaaggtgaaaagggcgtgcagggtcctcccggacacccggggccaccaggcgaagtgatacagccgctccctatacagatgccaaaaaagacacgcaggtccgtcgatggatcaagactgatgcaggaggacgaagccatccctaccggtggtgcaccagggtctccagggggattagaggagatcttcggatccctggatagtttgcgagaagaaatcgagcagatgaggaggcccacaggaacccaggattccccagcaagaacatgccaggaccttaagttgtgccacccagagctgccagatggggagtactgggtagaccccaatcagggatgcgctagagacgccttcagagtgttttgtaacttcaccgcaggcggtgaaacctgcgttacccctagggacgacgtgactcagttctcttatgtggactcggagggatccccggttggggttgtgcaactcacattcttaaggctgttgagcgtgtcagcccatcaggacgtcagctatccctgcagtggggcggcgagagacgggccactgagactaagaggcgctaacgaagacgagctctcccctgaaactagcccctacgttaaagagttcagggacgggtgccaaactcagcagggccgaaccgtgctagaagtgcgcactccagtactcgagcaactcccagtgctggatgcctcatttagtgacctcggtgccccgccccgacgtgggggggtcctccttgggccggtgtgtttcatgggctag

SEQ ID NO: 232748 - DNA, 4968 bp, Artificial Sequence
  derived and/or modified sequence
atggagcggtgcagccggtgccaccggctgctgctgctgctgcccctggtactgggcctgagtgccgcacccgggtgggctggggccccgccagtcgatgtcctccgggccttgcggttccctagtctccccgatggagtcagaagggcaaaggggatctgcccagccgatgttgcttaccgcgtagcgcgtccggctcagctctctgctccaacacggcaactgtttcccgggggatttcctaaggacttttctttgttaacagtggtcagaacgcggcctgggctgcaggcaccacttctgacactgtacagtgcccagggagtgagacagttgggactcgagctcggtcgacctgtcaggtttttatatgaggatcagaccgggaggccacagccgccctcccagcccgtgtttcggggactctcgctggctgacggaaaatggcacagagttgccgtggctgtaaaaggacaaagcgttacgcttatagtggattgtaaaaagcgcgtcacaagacctttaccacgctcggccaggcctgtcttggacacccatggggttattattttcggcgctaggatcctggacgaagaggtgtttgagggggacgtgcaagagctggccatcgtgcccggcgtccaagctgcatatgagagctgtgaacaaaaagagttagaatgtgagggaggccagcgagagagaccccagaaccagcagccccatcgcgcccaaaggagtccccagcaacaaccaagtagattacataggccccagaatcaagagccccagagccagccaactgagagtctatattatgactataagccgccatactacgacgtcatgaccacaggcaccacgcccgactaccaggcagcacatggacctagaggactcaagggggaaaaaggagaacccgctgtcctcgaacctggcatgctggtcgagggccctcctggccctgaaggtcctgccggtttgattgggccccctggtatccagggcaacccagggcccgtcggtgatccaggcgaaagaggacccccaggacgcgccggcttaccaggatccgacggcgctccagggcccccgggcacctccctgatgctgcccttcaggtttgggtcaggaggaggggataaaggcccagtggtcgccgcccaggaagcccaggcacaggcaattctccagcaggctaggttggccctgagagggcctcctggaccaatgggctataccggaaggcccggccctctagggcaaccggggagtcctgggctgaagggtgagtccggcgatctgggaccccagggccctagagggccgcagggattgaccggtccgcctggaaaggctggaaggcgtggcagggcaggagcagacggagcaagagggatgccgggtgatcccggtgtgaaaggcgaccgtggctttgacgggcttcctggattgcccggggagaagggacaccgaggagatacgggtgcacaggggctgccaggtccccctggcgaagacggggaaaggggcgatgatggggagattgggccacgcggacttcccggagagtcagggccaagagggctcttaggccccaaaggacctcctggcattcccggcccaccaggagttaggggaatggatggaccccagggacctaaagggagcctgggcccacaaggggaacctggtccacccggacagcagggtaccccagggacccagggcctgcccggtccacagggggccatcggcccacacggggaaaaaggtccacagggtaaaccgggactgcccgggatgcccggaagcgatggacctcctggccatccgggaaaagaagggccccccggtactaagggcaaccagggcccttctggccctcagggcccgctgggctatcccgggccccgtggagtgaagggcgtggatggcattcgtggcctgaaggggcataagggcgagaagggcgaagacggatttcctggatttaaaggcgatataggggtgaaaggggatcgcggagaagtgggagtacccgggtcacgaggggaggatgggccggaaggtcctaagggccggaccggtccaacaggggacccaggtcccccaggcctgatgggggaaaagggcaagctgggcgttccagggctgcctgggtaccctggaagacagggccccaaagggagcctcggctttcccgggttcccaggcgcctccggcgaaaagggtgcaagaggtcttagtggcaagtccggaccccgtggcgagagaggcccaacaggtccccggggccaacgcggcccccgaggcgccactggtaagtctggggctaagggaacctctggtggagatgggccacatggaccaccgggcgaacggggcctgcctgggcctcagggcccaaacgggtttccaggacccaagggcccacccggtccccctggcaaagatgggttacccggccaccctggacagcgaggcgaggttggctttcagggaaagaccgggccgcccggaccgccaggggtggttggtcctcagggggcagctggagagaccggtcccatgggtgaaagaggacaccccggaccccccggccctcctggggaacagggcctgcctggcacagctgggaaggaagggacaaagggcgatccaggtcctcccggagcacccggcaaagacggacctgccggtctccgggggtttccaggcgaaaggggtctgccaggaaccgccgggggaccagggttgaaaggaaacgaaggaccctctggccctcctggccccgccggatctccaggagagaggggggcagcaggcagtggaggtcctataggtcctcccgggaggcctggcccgcagggcccacctggcgccgccggcgaaaagggtgtgccaggtgagaaaggcccaatcggacctacagggagggatggggtacagggcccggtcggactgcctggccctgccggccctcccggtgtggcaggggaagatggtgataagggagaggtcggcgatccagggcagaaaggaacgaaaggcaacaaaggagagcacggacctccaggtccaccaggacctattggccctgtcggtcagccaggggccgccggcgctgatggagaacctggggcccggggcccccaggggcactttggtgctaaaggcgatgagggtacacgggggttcaatggaccacctggaccaattggccttcagggactgcctggtccatctggagaaaagggtgaaacgggtgacgtgggacctatgggaccacccggtcctccagggcctcgtggtcccgctggccctaatggggcggacgggcctcagggcccccccggaggggtcgggaatctgggccccccgggcgaaaagggtgaacctggtgagagtgggtcacccggcatacaaggggagccaggcgttaaaggccctcgaggcgagcgcggagagaaaggggagtccgggcaaccaggggaacctgggccaccggggccaaagggccccaccggcgacgacgggcccaaaggaaaccccggtcctgttggattccctggcgaccccgggccaccaggagagggcggacctcgggggcaggatggcgccaaaggcgaccgcggcgaggacggagaaccagggcagcccggatctccgggtcccaccggagaaaatggcccgccgggtcctttggggaagagagggccagccggctctccaggatccgaggggcggcagggcggcaagggcgctaagggcgaccctggggccataggggccccaggcaagaccggccccgtggggccagccggcccagctggaaaacctggtccagatggcttgagggggttgcctggcagtgtgggccagcaagggaggcccggagccaccggacaagccggtccaccgggcccagttggtccaccgggcctccccggcctgcgcggcgatgctggcgcaaagggagaaaagggccacccaggcctcattggcctcatcggccctcccggcgagcagggggagaaaggggacaggggcttgcctggtccgcagggttcacccggtcagaaaggagagatgggcattcccggggcgtcaggacccatagggccaggcggcccccccggcctccctgggccggcaggccccaagggcgctaagggagctacaggacccggaggtcccaaaggggagaaaggagtccagggccccccagggcaccccggccccccaggagaagtgattcaacctctccctatacagatgccaaaaaaaacaagacgcagcgtggacggttctcgcttaatgcaagaggacgaggctatccctaccggcggggccccaggcagtccggggggcttagaggaaattttcggttccctggattctctccgtgaggaaatcgagcaaatgaggcggcccactggtacccaggattcccccgcaaggacctgtcaggatttaaaactctgtcatccagagctgccagatggcgagtactgggtcgaccctaaccaggggtgcgcccgcgatgcattccgggttttctgtaattttacggccggaggagaaacctgcgtgaccccccgagacgatgttacccagttcagctatgtggacagcgaaggtagcccggtcggcgtggtccagctaacgtttcttcgcctgctgagtgtgagcgcccaccaagatgtaagttatccttgtagcggcgcagcccgcgacggcccacttcgcctgcgcggagcaaacgaggacgagctgagcccagaaacctcaccatacgtgaaagagtttagagacggatgtcaaactcagcagggtaggaccgtattagaggtgagaacgcccgtgctcgagcaactgcctgtattagatgcctccttctctgaccttggggctccaccccggagaggtggggttctgctgggacccgtttgcttcatgggatag

SEQ ID NO: 232749 - DNA, 6182 bp, Artificial Sequence
  derived and/or modified sequence
cacacagaagcggcagccaccgaggagggagcagtgccgggagccccgacggcgccttgctgcatggagctgggccgctgacagctgtcgctgcccgcagcctctgacctccctgggaccccggcgtctgaggctcatagtctgctccctgtcttctgtcagcctcagggcatccagcgtctcaggccgacctgggtccctgggacccggcgtttcggcttctcagccatggagcggtgcagccgctgccatcgcctcctcctcctcctacctctggtgctggggctgagcgcggccccaggctgggcaggtgcaccccctgtggatgtgctccgggccctgaggttcccctccctccctgatggtgtccggagagcgaaaggcatctgtccagctgatgtggcctaccgagtggcacgacctgcccagctcagtgcacccactcgccagcttttcccaggaggatttcccaaagatttctctctgctgactgttgtccggacccgccctggtctccaagctcccctcctgactctctacagtgcccagggtgtccgacagctgggcctggagctgggcccacctgtccgcttcctgtatgaagaccagactgggcggcctcaacctccctctcagccagtcttccgaggcctcagcctagcagatggcaagtggcaccgtgtggctgtggctgtgaagggccagtctgtcaccctcattgttgactgcaagaagcgagtcacccggcctctcccccgaagtgctcgtccagtattggacacccatggagtgatcatctttggtgcccgtattctggatgaagaagtctttgagggtgatgtccaggagctggccattgtcccaggggtccaggcagcctatgaatcatgtgaacagaaggagctggaatgcgaggggggccagagggaaagaccccaaaaccaacagcctcacagagcccagagatctccacagcagcaaccatcaagacttcacaggccacaaaatcaggaaccccagagccagcccactgagtctctctactatgactacaagcccccctattatgatgtgatgactacggggacaacccctgattatcaggctgcccatggaccccgagggctgaagggagagaaaggagagcctgcagtgttggaacctggtatgctcgtggaggggccccctggcccagaaggccctgcgggattgattggtccccctggcatccaggggaacccaggcccagttggagaccctggagagaggggcccccctggccgagcagggctccctggatcagatggggctcctggtcctcctggcacatctctcatgctcccattccggtttggcagtggtgggggtgacaagggccctgtggtggcggcccaggaggctcaggcccaggcgatcctgcagcaggcgaggctggcgctccgtggaccccctggccccatgggatacacagggcgccctggacccttgggccaacctgggagccctggcctgaaaggagagtctggagacttaggacctcagggccccagaggacctcagggcctcacaggccctcctggcaaggctgggcgaaggggccgggcaggtgctgatggagcccgagggatgcctggagatcctggagtgaagggtgaccgaggttttgatggactcccagggctccctggagagaagggccataggggtgatactggtgcccagggccttcctggtccccctggtgaggatggagagaggggagatgacggggagattgggcctcgagggctgcctggagagtcgggacctcgaggtctccttggccccaaaggcccacctggtattcctggaccccctggcgtccgaggcatggatggtccccagggccccaaagggagcttgggaccccagggagagccaggacctcctggacaacagggcacccctgggacccagggtcttcccgggccccagggtgccatcggccctcatggagagaagggtcctcaagggaagccagggctccccggcatgcctggctcagacggacccccgggtcacccagggaaggaaggtccccctggaaccaaaggaaaccagggtccctctggacctcagggacctctaggatacccaggacctcgaggggtcaagggtgtggacggaattcggggtctgaagggtcataagggtgagaagggtgaggatggctttcctgggttcaaaggtgacataggcgtgaaaggtgacaggggcgaagttggagtccctggttccaggggagaggatggtcctgaggggccaaagggacgcactggaccgactggagaccctgggcccccagggctcatgggcgagaagggcaagctgggtgttcctggtctgcctggctatcctggacgtcagggacccaaggggtccctaggatttcctggctttcctggtgccagtggagagaagggagcccggggcctgtcggggaagtcagggcctcggggagaacggggccccacgggtccacggggtcagcggggaccccgaggtgccactgggaagtctggagctaagggaacatctggtggtgatggcccccatgggccccctggagagaggggcctccctggacctcagggtcccaacgggtttcctggaccgaaaggacccccgggcccccctgggaaggacgggctgccgggacacccaggccaaagaggagaagtgggtttccaagggaagaccggcccccctggtcctccaggagtggtgggacctcagggagcagcaggagaaaccggccctatgggggagagaggtcacccaggccccccggggccccctggagagcagggactacctgggacagctggaaaagaaggaacaaagggtgaccctggtccccctggggccccagggaaggatggtcctgctggtctgaggggattcccaggagagagaggcctcccaggcactgctggtggacctggtttgaaggggaatgaaggtccgtctggcccccctggccctgcaggctcccctggggaacgaggtgcagcaggatcagggggacccattggtccgccagggcgcccaggcccgcagggtccccctggagcagcaggagagaaaggtgtcccaggtgagaagggccccattggcccaactggccgagatggagtgcagggtcctgtggggcttcctggtcctgctgggcctccaggtgtggctggagaggatggagacaagggtgaggtgggggaccccggacagaagggcaccaaagggaacaagggtgaacatggccctcctggaccccctggacccattggtcctgtggggcagcctggagcagcgggagcagatggggagcctggagctcggggaccccagggacactttggagccaaaggtgatgaaggaacaagaggattcaatgggcccccaggacccattggcctacagggtttgccaggcccctctggggagaagggagaaacaggagatgtgggtcctatgggaccacctggccccccaggacctcgaggtccagctggacccaatggcgctgatggcccacaaggtcccccaggaggtgttgggaacctgggtccccctggagagaagggggaaccaggagagtcaggatctccagggatccagggcgagccaggtgtcaagggtccacgcggggaacgtggagagaaaggagagtcggggcagccaggagagccagggccaccagggcctaaaggccccacaggcgatgatggccccaaagggaaccctggtcctgttggttttcctggtgaccctggcccccctggagaaggtggccctcggggccaggatggtgctaagggtgaccgaggcgaggatggtgagccaggacagcctggatcccctggtcccaccggggagaatggacccccagggccacttggaaagcgaggtcctgctggctcgcctggttccgaggggcgacaaggagggaagggagccaagggagatcctggcgctataggtgccccggggaagacaggcccggtgggtcctgcaggcccagcagggaaacctggccctgatggtctgagggggctcccaggctcagtgggtcagcaaggccgacctggagctacaggccaggctgggcccccaggtcctgtgggacccccagggctgcctggtctccggggcgatgctggagccaagggagagaagggccacccaggtctcattggactgattgggcccccgggtgagcagggagagaagggagatcggggacttcctgggcctcagggctcccctgggcagaagggtgagatgggtatcccaggagcatccggccccattggtcctggaggtccccccggcctccccggacctgctggccccaaaggagccaaaggagccacaggcccaggcggacccaagggagagaagggtgtgcagggccctccaggacacccgggtcccccaggcgaggtgatccagccactgcccattcagatgcccaagaagactcggcgctcggtggatggaagccgtctgatgcaggaagatgaggccataccgaccgggggagcccccggcagtcctggggggctggaggagatctttggctcactcgactccctgcgggaggagatcgagcagatgaggcggccaacagggacccaggacagccctgctcgcacctgccaggacctgaagctgtgccacccagagcttcccgatggagagtactgggtcgaccccaaccagggctgtgctcgggatgccttccgagttttctgcaacttcacagcagggggtgagacctgtgtgacgcctagggatgacgtcacgcagttctcttacgtggactcagagggctccccagtgggtgtggtccagctcaccttcctgcggctgctcagcgtctcagcccaccaggacgtctcctacccctgctctggagcagcccgtgacggtcccctgagactccgtggggccaatgaggatgagctgagcccggagactagcccctatgtcaaagaattcagagatggctgccagacacagcaaggccggacggtgctggaggtgcgaacgcctgtgctggagcagctgccagtgctggatgcctccttctcagacctgggagccccaccgaggcggggaggggtgctgctggggcctgtctgcttcatgggataggaccgtctctgtctgatcctgtccattcggaaccaggcccacctggaatcccacaacatcagctctgtgccacctcccaagagggctcctcactatctagggagccctgggccagggcgtggagagccctcagtcggggcaggccaggggaggggtgaagtggttgcctggacaccccacgggaggagtggcatctggggctcttggccctcccacctggagcctgttacccgttagagagctgagacccttatttaaaactcacctcccaatcaccccaaacaaatggaagagaagagaaaggacatggcgtattttgtatttaaaagtaattgtattaattatttaaagtgtggaaagcaaaataacaaaaaagagaaacgccaacaaaaatcagcagatgttgaagacaggggtctcgggggtgggctccggcacccacatcctggagtcaggactttcctcagtgactgtgtgtaggggggtttcagggctgaaccccacctccctcccaccttcctcccacctcacctgtcgcacccactgtgaaagttggaatatgtggtctccctggcctcagggctctgactctgccagggtggggctctctaacccacaggtgttggctgcctggcccatgtgcccactgtctcttccacttggtctgggtttggcaggcactgcctgctacttgagggccaggatgctcccccagggaagaaacggaatagtgtggggtgtgtgcagggctgcatcccgcagatggctggaatattaaaattcttctatattggctggtaaattgccatggccctgagccactgagtatgttcattgccacccctgtccctcccctgggcacccctcactttccctgatcctgcaattaaagggttaatgtgtggcatatggaagggactcccaggaccctgtgcccagcttccatgctgactgatggttaaataatgtgattgtctcctcccagg

SEQ ID NO: 232750 - DNA, 6245 bp, Artificial Sequence
  derived and/or modified sequence
cacacagaagcggcagccaccgaggagggagcagtgccgggagccccgacggcgccttgctgcatggagctgggccgctgacagctgtcgctgcccgcagcctctgacctccctgggaccccggcgtctgaggctcatagtctgctccctgtcttctgtcagcctcagggcatccagcgtctcaggccgacctgggtccctgggacccggcgtttcggcttctcagccatggagcggtgcagccgctgccatcgcctcctcctcctcctacctctggtgctggggctgagcgcggccccaggctgggcaggtgcaccccctgtggatgtgctccgggccctgaggttcccctccctccctgatggtgtccggagagcgaaaggcatctgtccagctgatgtggcctaccgagtggcacgacctgcccagctcagtgcacccactcgccagcttttcccaggaggatttcccaaagatttctctctgctgactgttgtccggacccgccctggtctccaagctcccctcctgactctctacagtgcccagggtgtccgacagctgggcctggagctgggccgacctgtccgcttcctgtatgaagaccagactgggcggcctcaacctccctctcagccagtcttccgaggcctcagcctagcagatggcaagtggcaccgtgtggctgtggctgtgaagggccagtctgtcaccctcattgttgactgcaagaagcgagtcacccggcctctcccccgaagtgctcgtccagtattggacacccatggagtgatcatctttggtgcccgtattctggatgaagaagtctttgagggtgatgtccaggagctggccattgtcccaggggtccaggcagcctatgaatcatgtgaacagaaggagctggaatgcgaggggggccagagggaaagaccccaaaaccaacagcctcacagagcccagagatctccacagcagcaaccatcaagacttcacaggccacaaaatcaggaaccccagagccagcccactgagtctctctactatgactacaagcccccctattatgatgtgatgactacggggacaacccctgattatcaggaccccaccccaggtgaagaggaagaaatcctggagtcgagcctcttgccaccccttgaggaggctgcccatggaccccgagggctgaagggagagaaaggagagcctgcagtgttggaacctggtatgctcgtggaggggccccctggcccagaaggccctgcgggattgattggtccccctggcatccaggggaacccaggcccagttggagaccctggagagaggggcccccctggccgagcagggctccctggatcagatggggctcctggtcctcctggcacatctctcatgctcccattccggtttggcagtggtgggggtgacaagggccctgtggtggcggcccaggaggctcaggcccaggcgatcctgcagcaggcgaggctggcgctccgtggaccccctggccccatgggatacacagggcgccctggacccttgggccaacctgggagccctggcctgaaaggagagtctggagacttaggacctcagggccccagaggacctcagggcctcacaggccctcctggcaaggctgggcgaaggggccgggcaggtgctgatggagcccgagggatgcctggagatcctggagtgaagggtgaccgaggttttgatggactcccagggctccctggagagaagggccataggggtgatactggtgcccagggccttcctggtccccctggtgaggatggagagaggggagatgacggggagattgggcctcgagggctgcctggagagtcgggacctcgaggtctccttggccccaaaggcccacctggtattcctggaccccctggcgtccgaggcatggatggtccccagggccccaaagggagcttgggaccccagggagagccaggacctcctggacaacagggcacccctgggacccagggtcttcccgggccccagggtgccatcggccctcatggagagaagggtcctcaagggaagccagggctccccggcatgcctggctcagacggacccccgggtcacccagggaaggaaggtccccctggaaccaaaggaaaccagggtccctctggacctcagggacctctaggatacccaggacctcgaggggtcaagggtgtggacggaattcggggtctgaagggtcataagggtgagaagggtgaggatggctttcctgggttcaaaggtgacataggcgtgaaaggtgacaggggcgaagttggagtccctggttccaggggagaggatggtcctgaggggccaaagggacgcactggaccgactggagaccctgggcccccagggctcatgggcgagaagggcaagctgggtgttcctggtctgcctggctatcctggacgtcagggacccaaggggtccctaggatttcctggctttcctggtgccagtggagagaagggagcccggggcctgtcggggaagtcagggcctcggggagaacggggccccacgggtccacggggtcagcggggaccccgaggtgccactgggaagtctggagctaagggaacatctggtggtgatggcccccatgggccccctggagagaggggcctccctggacctcagggtcccaacgggtttcctggaccgaaaggacccccgggcccccctgggaaggacgggctgccgggacacccaggccaaagaggagaagtgggtttccaagggaagaccggcccccctggtcctccaggagtggtgggacctcagggagcagcaggagaaaccggccctatgggggagagaggtcacccaggccccccggggccccctggagagcagggactacctgggacagctggaaaagaaggaacaaagggtgaccctggtccccctggggccccagggaaggatggtcctgctggtctgaggggattcccaggagagagaggcctcccaggcactgctggtggacctggtttgaaggggaatgaaggtccgtctggcccccctggccctgcaggctcccctggggaacgaggtgcagcaggatcagggggacccattggtccgccagggcgcccaggcccgcagggtccccctggagcagcaggagagaaaggtgtcccaggtgagaagggccccattggcccaactggccgagatggagtgcagggtcctgtggggcttcctggtcctgctgggcctccaggtgtggctggagaggatggagacaagggtgaggtgggggaccccggacagaagggcaccaaagggaacaagggtgaacatggccctcctggaccccctggacccattggtcctgtggggcagcctggagcagcgggagcagatggggagcctggagctcggggaccccagggacactttggagccaaaggtgatgaaggaacaagaggattcaatgggcccccaggacccattggcctacagggtttgccaggcccctctggggagaagggagaaacaggagatgtgggtcctatgggaccacctggccccccaggacctcgaggtccagctggacccaatggcgctgatggcccacaaggtcccccaggaggtgttgggaacctgggtccccctggagagaagggggaaccaggagagtcaggatctccagggatccagggcgagccaggtgtcaagggtccacgcggggaacgtggagagaaaggagagtcggggcagccaggagagccagggccaccagggcctaaaggccccacaggcgatgatggccccaaagggaaccctggtcctgttggttttcctggtgaccctggcccccctggagaaggtggccctcggggccaggatggtgctaagggtgaccgaggcgaggatggtgagccaggacagcctggatcccctggtcccaccggggagaatggacccccagggccacttggaaagcgaggtcctgctggctcgcctggttccgaggggcgacaaggagggaagggagccaagggagatcctggcgctataggtgccccggggaagacaggcccggtgggtcctgcaggcccagcagggaaacctggccctgatggtctgagggggctcccaggctcagtgggtcagcaaggccgacctggagctacaggccaggctgggcccccaggtcctgtgggacccccagggctgcctggtctccggggcgatgctggagccaagggagagaagggccacccaggtctcattggactgattgggcccccgggtgagcagggagagaagggagatcggggacttcctgggcctcagggctcccctgggcagaagggtgagatgggtatcccaggagcatccggccccattggtcctggaggtccccccggcctccccggacctgctggccccaaaggagccaaaggagccacaggcccaggcggacccaagggagagaagggtgtgcagggccctccaggacacccgggtcccccaggcgaggtgatccagccactgcccattcagatgcccaagaagactcggcgctcggtggatggaagccgtctgatgcaggaagatgaggccataccgaccgggggagcccccggcagtcctggggggctggaggagatctttggctcactcgactccctgcgggaggagatcgagcagatgaggcggccaacagggacccaggacagccctgctcgcacctgccaggacctgaagctgtgccacccagagcttcccgatggagagtactgggtcgaccccaaccagggctgtgctcgggatgccttccgagttttctgcaacttcacagcagggggtgagacctgtgtgacgcctagggatgacgtcacgcagttctcttacgtggactcagagggctccccagtgggtgtggtccagctcaccttcctgcggctgctcagcgtctcagcccaccaggacgtctcctacccctgctctggagcagcccgtgacggtcccctgagactccgtggggccaatgaggatgagctgagcccggagactagcccctatgtcaaagaattcagagatggctgccagacacagcaaggccggacggtgctggaggtgcgaacgcctgtgctggagcagctgccagtgctggatgcctccttctcagacctgggagccccaccgaggcggggaggggtgctgctggggcctgtctgcttcatgggataggaccgtctctgtctgatcctgtccattcggaaccaggcccacctggaatcccacaacatcagctctgtgccacctcccaagagggctcctcactatctagggagccctgggccagggcgtggagagccctcagtcggggcaggccaggggaggggtgaagtggttgcctggacaccccacgggaggagtggcatctggggctcttggccctcccacctggagcctgttacccgttagagagctgagacccttatttaaaactcacctcccaatcaccccaaacaaatggaagagaagagaaaggacatggcgtattttgtatttaaaagtaattgtattaattatttaaagtgtggaaagcaaaataacaaaaaagagaaacgccaacaaaaatcagcagatgttgaagacaggggtctcgggggtgggctccggcacccacatcctggagtcaggactttcctcagtgactgtgtgtaggggggtttcagggctgaaccccacctccctcccaccttcctcccacctcacctgtcgcacccactgtgaaagttggaatatgtggtctccctggcctcagggctctgactctgccagggtggggctctctaacccacaggtgttggctgcctggcccatgtgcccactgtctcttccacttggtctgggtttggcaggcactgcctgctacttgagggccaggatgctcccccagggaagaaacggaatagtgtggggtgtgtgcagggctgcatcccgcagatggctggaatattaaaattcttctatattggctggtaaattgccatggccctgagccactgagtatgttcattgccacccctgtccctcccctgggcacccctcactttccctgatcctgcaattaaagggttaatgtgtggcatatggaagggactcccaggaccctgtgcccagcttccatgctgactgatggttaaataatgtgattgtctcctcccagg

SEQ ID NO: 232751 - DNA, 6182 bp, Artificial Sequence
  derived and/or modified sequence
cacacagaagcggcagccaccgaggagggagcagtgccgggagccccgacggcgccttgctgcatggagctgggccgctgacagctgtcgctgcccgcagcctctgacctccctgggaccccggcgtctgaggctcatagtctgctccctgtcttctgtcagcctcagggcatccagcgtctcaggccgacctgggtccctgggacccggcgtttcggcttctcagccatggagcggtgcagccgctgccatcgcctcctcctcctcctacctctggtgctggggctgagcgcggccccaggctgggcaggtgcaccccctgtggatgtgctccgggccctgaggttcccctccctccctgatggtgtccggagagcgaaaggcatctgtccagctgatgtggcctaccgagtggcacgacctgcccagctcagtgcacccactcgccagcttttcccaggaggatttcccaaagatttctctctgctgactgttgtccggacccgccctggtctccaagctcccctcctgactctctacagtgcccagggtgtccgacagctgggcctggagctgggccgacctgtccgcttcctgtatgaagaccagactgggcggcctcaacctccctctcagccagtcttccgaggcctcagcctagcagatggcaagtggcaccgtgtggctgtggctgtgaagggccagtctgtcaccctcattgttgactgcaagaagcgagtcacccggcctctcccccgaagtgctcgtccagtattggacacccatggagtgatcatctttggtgcccgtattctggatgaagaagtctttgagggtgatgtccaggagctggccattgtcccaggggtccaggcagcctatgaatcatgtgaacagaaggagctggaatgcgaggggggccagagggaaagaccccaaaaccaacagcctcacagagcccagagatctccacagcagcaaccatcaagacttcacaggccacaaaatcaggaaccccagagccagcccactgagtctctctactatgactacaagcccccctattatgatgtgatgactacggggacaacccctgattatcaggctgcccatggaccccgagggctgaagggagagaaaggagagcctgcagtgttggaacctggtatgctcgtggaggggccccctggcccagaaggccctgcgggattgattggtccccctggcatccaggggaacccaggcccagttggagaccctggagagaggggcccccctggccgagcagggctccctggatcagatggggctcctggtcctcctggcacatctctcatgctcccattccggtttggcagtggtgggggtgacaagggccctgtggtggcggcccaggaggctcaggcccaggcgatcctgcagcaggcgaggctggcgctccgtggaccccctggccccatgggatacacagggcgccctggacccttgggccaacctgggagccctggcctgaaaggagagtctggagacttaggacctcagggccccagaggacctcagggcctcacaggccctcctggcaaggctgggcgaaggggccgggcaggtgctgatggagcccgagggatgcctggagatcctggagtgaagggtgaccgaggttttgatggactcccagggctccctggagagaagggccataggggtgatactggtgcccagggccttcctggtccccctggtgaggatggagagaggggagatgacggggagattgggcctcgagggctgcctggagagtcgggacctcgaggtctccttggccccaaaggcccacctggtattcctggaccccctggcgtccgaggcatggatggtccccagggccccaaagggagcttgggaccccagggagagccaggacctcctggacaacagggcacccctgggacccagggtcttcccgggccccagggtgccatcggccctcatggagagaagggtcctcaagggaagccagggctccccggcatgcctggctcagacggacccccgggtcacccagggaaggaaggtccccctggaaccaaaggaaaccagggtccctctggacctcagggacctctaggatacccaggacctcgaggggtcaagggtgtggacggaattcggggtctgaagggtcataagggtgagaagggtgaggatggctttcctgggttcaaaggtgacataggcgtgaaaggtgacaggggcgaagttggagtccctggttccaggggagaggatggtcctgaggggccaaagggacgcactggaccgactggagaccctgggcccccagggctcatgggcgagaagggcaagctgggtgttcctggtctgcctggctatcctggacgtcagggacccaaggggtccctaggatttcctggctttcctggtgccagtggagagaagggagcccggggcctgtcggggaagtcagggcctcggggagaacggggccccacgggtccacggggtcagcggggaccccgaggtgccactgggaagtctggagctaagggaacatctggtggtgatggcccccatgggccccctggagagaggggcctccctggacctcagggtcccaacgggtttcctggaccgaaaggacccccgggcccccctgggaaggacgggctgccgggacacccaggccaaagaggagaagtgggtttccaagggaagaccggcccccctggtcctccaggagtggtgggacctcagggagcagcaggagaaaccggccctatgggggagagaggtcacccaggccccccggggccccctggagagcagggactacctgggacagctggaaaagaaggaacaaagggtgaccctggtccccctggggccccagggaaggatggtcctgctggtctgaggggattcccaggagagagaggcctcccaggcactgctggtggacctggtttgaaggggaatgaaggtccgtctggcccccctggccctgcaggctcccctggggaacgaggtgcagcaggatcagggggacccattggtccgccagggcgcccaggcccgcagggtccccctggagcagcaggagagaaaggtgtcccaggtgagaagggccccattggcccaactggccgagatggagtgcagggtcctgtggggcttcctggtcctgctgggcctccaggtgtggctggagaggatggagacaagggtgaggtgggggaccccggacagaagggcaccaaagggaacaagggtgaacatggccctcctggaccccctggacccattggtcctgtggggcagcctggagcagcgggagcagatggggagcccggagctcggggaccccagggacactttggagccaaaggtgatgaaggaacaagaggattcaatgggcccccaggacccattggcctacagggtttgccaggcccctctggggagaagggagaaacaggagatgtgggtcctatgggaccacctggccccccaggacctcgaggtccagctggacccaatggcgctgatggcccacaaggtcccccaggaggtgttgggaacctgggtccccctggagagaagggggaaccaggagagtcaggatctccagggatccagggcgagccaggtgtcaagggtccacgcggggaacgtggagagaaaggagagtcggggcagccaggagagccagggccaccagggcctaaaggccccacaggcgatgatggccccaaagggaaccctggtcctgttggttttcctggtgaccctggcccccctggagaaggtggccctcggggccaggatggtgctaagggtgaccgaggcgaggatggtgagccaggacagcctggatcccctggtcccaccggggagaatggacccccagggccacttggaaagcgaggtcctgctggctcgcctggttccgaggggcgacaaggagggaagggagccaagggagatcctggcgctataggtgccccggggaagacaggcccggtgggtcctgcaggcccagcagggaaacctggccctgatggtctgagggggctcccaggctcagtgggtcagcaaggccgacctggagctacaggccaggctgggcccccaggtcctgtgggacccccagggctgcctggtctccggggcgatgctggagccaagggagagaagggccacccaggtctcattggactgattgggcccccgggtgagcagggagagaagggagatcggggacttcctgggcctcagggctcccctgggcagaagggtgagatgggtatcccaggagcatccggccccattggtcctggaggtccccccggcctccccggacctgctggccccaaaggagccaaaggagccacaggcccaggcggacccaagggagagaagggtgtgcagggccctccaggacacccgggtcccccaggcgaggtgatccagccactgcccattcagatgcccaagaagactcggcgctcggtggatggaagccgtctgatgcaggaagatgaggccataccgaccgggggagcccccggcagtcctggggggctggaggagatctttggctcactcgactccctgcgggaggagatcgagcagatgaggcggccaacagggacccaggacagccctgctcgcacctgccaggacctgaagctgtgccacccagagcttcccgatggagagtactgggtcgaccccaaccagggctgtgctcgggatgccttccgagttttctgcaacttcacagcagggggtgagacctgtgtgacgcctagggatgacgtcacgcagttctcttacgtggactcagagggctccccagtgggtgtggtccagctcaccttcctgcggctgctcagcgtctcagcccaccaggacgtctcctacccctgctctggagcagcccgtgacggtcccctgagactccgtggggccaatgaggatgagctgagcccggagactagcccctatgtcaaagaattcagagatggctgccagacacagcaaggccggacggtgctggaggtgcgaacgcctgtgctggagcagctgccagtgctggatgcctccttctcagacctgggagccccaccgaggcggggaggggtgctgctggggcctgtctgcttcatgggataggaccgtctctgtctgatcctgtccattcggaaccaggcccacctggaatcccacaacatcagctctgtgccacctcccaagagggctcctcactatctagggagccctgggccagggcgtggagagccctcagtcggggcaggccaggggaggggtgaagtggttgcctggacaccccacgggaggagtggcatctggggctcttggccctcccacctggagcctgttacccgttagagagctgagacccttatttaaaactcacctcccaatcaccccaaacaaatggaagagaagagaaaggacatggcgtattttgtatttaaaagtaattgtattaattatttaaagtgtggaaagcaaaataacaaaaaagagaaacgccaacaaaaatcagcagatgttgaagacaggggtctcgggggtgggctccggcacccacatcctggagtcaggactttcctcagtgactgtgtgtaggggggtttcagggctgaaccccacctccctcccaccttcctcccacctcacctgtcgcacccactgtgaaagttggaatatgtggtctccctggcctcagggctctgactctgccagggtggggctctctaacccacaggtgttggctgcctggcccatgtgcccactgtctcttccacttggtctgggtttggcaggcactgcctgctacttgagggccaggatgctcccccagggaagaaacggaatagtgtggggtgtgtgcagggctgcatcccgcagatggctggaatattaaaattcttctatattggctggtaaattgccatggccctgagccactgagtatgttcattgccacccctgtccctcccctgggcacccctcactttccctgatcctgcaattaaagggttaatgtgtggcatatggaagggactcccaggaccctgtgcccagcttccatgctgactgatggttaaataatgtgattgtctcctcccagg

SEQ ID NO: 232752 - DNA, 4953 bp, Artificial Sequence
  derived and/or modified sequence
atggagagatgttccaggtgccaccggttattactcttgctgcctctggtcctagggctttccgccgcacctggatgggcgggtgcacccccagtcgatgtcttacgcgctctgcgattcccctctttaccagacggagtaaggcgggctaaaggaatctgccccgctgatgtggcataccgggtggcaaggccagcgcagctgtcggctccaacaagacagttgttccctggcggttttcctaaggatttcagcctcctgacagtagtgagaacccgccctggcctgcaagcgcctcttttaacactgtactcggcacagggtgtgcgtcaattggggttggaactgggcagacctgtgcgttttctttatgaggaccagactgggcgaccacaacccccatcgcagcccgtgttccgagggttaagcttagccgatggaaagtggcatcgcgtggcggtggccgttaagggccagtctgttactctcatcgtggactgcaagaaacgcgtgacgaggccccttcctcgctctgccaggccggtcctggatacccacggcgtcatcatatttggggcacggatcctggatgaagaagtctttgaaggcgacgtccaggagttggccatcgtcccgggtgtccaagcggcatatgaatcttgtgagcaaaaggaactggagtgcgagggagggcaacgcgagcgaccgcagaaccagcagccacaccgggctcaacgctctccccagcaacagccaagccgactccaccgcccacagaaccaggagccccagagccaggaccctacacctggtgaagaagaggagatactcgagtcttctctcctgccgccattggaagaggcagcgcatggtcctcggggacttaagggagaaaaaggggaacccgctgtgctggaaccaggcatgctcgtggagggccctcccggtcccgaagggccagccggtctcatcggaccgccagggattcaggggaaccctggtcccgtcggagaccctggcgagcggggtcctcctgggagggccggtcttcccggttcggatggggcacctggcccaccaggtacctctttgatgttaccattccggttcggaagcggaggaggtgataaagggccagttgtcgctgctcaggaggcccaggcccaggccattctgcagcaggctaggctggcattaagagggccacccggacctatgggatacactgggaggccaggccctctaggacagccaggctctccaggcctaaaaggagagtcaggggatctcggacctcaagggccaagggggcctcaagggctgaccggccctcccggaaaagcgggaaggcggggaagagccggtgctgacggagctcgtggcatgcccggtgatccaggggtgaaaggtgaccggggattcgacgggcttcccggactcccaggggaaaaggggcaccgaggggataccggagcacagggactgcctggccctcctggggaagatggtgaacgtggagacgacggggagatcggtcccagggggctgccgggagaaagtggtcctaggggtctactgggtccaaaggggcctcctggaattccagggcctcccggtgtgaggggcatggacggcccacagggaccaaaaggaagcttaggacctcagggggagccaggccctccaggccagcaggggacaccagggacccagggcctgcccggtccgcagggagcgatcggtcctcacggggaaaaaggccctcagggcaagcctggcctgcccggtatgcctggcagcgacggtcctccagggcatcccggtaaagaagggcctcctggaactaaaggaaaccagggccctagtggaccccagggaccgttgggctaccctggtccgaggggtgtcaaaggagtggacggcattcggggtcttaagggccacaagggggagaaaggtgaagacggcttcccgggatttaagggggacattggtgtaaagggggatcggggtgaggtgggcgtgcctggctctcgtggggaagatgggccagaaggcccaaaaggtcgtacagggcctacaggcgaccccggaccgccaggcctgatgggggagaaggggaagcttggagtgccaggactgcctggctaccctgggaggcagggccctaagggctccttaggctttcctggattccctggagcaagtggggagaaaggggcaaggggtctgagcgggaagtcaggacctcgcggagagcggggaccaacagggccacgcggacagcgcggtcccagaggagccaccgggaaatctggtgcgaagggtaccagcggaggcgacggtcctcacggtccacccggtgagcgcggactccctgggcctcagggtcccaacgggtttcctggaccaaaggggccaccagggccacctggcaaagacgggttacccggtcaccctgggcagagaggcgaggtgggttttcaaggtaaaaccggaccccctggacctccaggggtggtaggaccacagggcgcagccggtgagacaggaccaatgggcgagagaggccatcccggaccgccaggtccccctggtgagcagggcctgcccggaaccgccggaaaagaaggaacaaaaggcgatcccggaccaccgggagcccctggaaaggatgggcctgcgggactcagggggtttccaggcgaacgagggctgcccggtaccgctggaggcccaggtcttaagggcaacgagggtcctagcggaccaccaggacctgctggctctcccggtgagcgcggtgccgctggttctgggggacctatcggacctcctgggaggccaggtccccaagggccacccggagcagccggtgagaaaggagtacccggtgagaaggggcctatcgggcctaccggcagggatggcgtccaaggtcctgtcggcctgcccggtcccgctgggccacccggagttgcaggggaagacggcgacaagggcgaagttggagaccctggacaaaagggcaccaagggcaacaagggcgaacatggaccacccggacccccaggacctatcggaccggtggggcagcctggtgccgcaggcgctgacggcgagcccggtgccagggggccacaaggccatttcggggcaaaaggggatgaggggacaagaggatttaacggcccaccgggaccaatagggctgcaaggcctgcccggacctagcggagagaaaggcgagactggcgacgtgggccctatgggcccaccaggaccgcctggacctcgtggacccgcagggccaaatggagcggatggcccacaaggacccccaggtggcgtgggaaacctgggaccaccaggcgaaaaaggtgagcctggggaatcaggctcccccggaatccaaggagaacctggggttaaaggccctaggggagagcgaggtgaaaaaggcgagtccggccaacccggtgaaccagggccacccggtccaaaaggccctactggtgacgatggtcctaaggggaacccaggaccggtgggatttcccggagacccgggacctccaggagaaggcggaccccgtgggcaggatggcgctaaaggagaccgtggagaggacggtgaaccaggtcagcctggctctcccggtccaactggagagaatggccctcctggccctctgggtaagcgcggtccagccggatctcctggcagtgaaggaaggcagggaggcaaaggagctaaaggcgatcctggcgcaataggggctccaggcaagacagggcctgtggggcctgctggccctgcagggaagccagggccagacgggcttaggggactcccaggatctgtgggccagcagggtcgacctggcgctaccggtcaagctggtcctcccggacccgtgggacccccaggacttccaggcctccgaggcgacgctggcgctaaaggcgagaaaggacatccagggctgattggcttgattgggcctcctggggaacagggggaaaaaggtgatagagggttgcctgggccacaggggtctcccggacagaagggcgagatggggataccaggcgctagcggcccaattggcccaggtgggccaccagggctgccaggaccagctggacctaaaggtgcgaagggcgctacgggacctggtgggcctaagggagagaagggagtccagggacccccaggacatccgggaccgccaggggaagtgattcagcctttgccaatccaaatgcctaagaagactcggagaagtgtggacggcagtcggcttatgcaggaggacgaagccatacctacggggggagcgcctggaagcccgggaggcctggaagagatttttggttcactggattctctgagagaagaaatagagcagatgcggagacctactggaacacaagacagccccgcaagaacatgtcaagatctgaaattatgccatcctgaattgcccgacggtgagtactgggttgaccccaatcaaggatgtgcacgagacgccttccgcgttttctgtaattttaccgctgggggagagacctgcgtgacccccagagacgacgtcacacagtttagttatgttgattcagaaggatcccctgttggtgtcgttcagctgacctttctgaggctgttatccgtctccgctcatcaggacgtctcatacccatgcagcggggcagcccgtgacgggccactgaggcttcgaggggctaacgaagacgagttgagtcccgaaacaagcccctatgttaaggagttccgcgacggctgccagacccagcaagggaggactgtgctggaggtacgcacccccgtccttgaacagctccctgtcctggatgccagctttagcgacttgggcgctcccccaagacggggaggcgtactgctgggaccggtctgttttatgggctag

SEQ ID NO: 232753 - DNA, 4967 bp, Artificial Sequence
  derived and/or modified sequence
atggagagatgttcacgctgtcaccggcttctgctgctactgcccttagtcctgggcttaagcgccgctcctggttgggctggggctccaccagtggatgtactgcgagccctgcggtttcccagtctgcccgacggcgtgcggagggccaaggggatttgcccagccgacgtcgcctaccgggtggccaggccagcacagttaagcgcccctacaagacagttatttcctggaggcttcccgaaagatttcagtttgctaaccgtggtgcgtactaggcctggactgcaggcacctctgcttacgctttattcggctcagggggtgcggcaactcggactggaactggggagacccgttcgctttctgtacgaggatcagacagggaggccacagcccccatctcagccagtcttccgtgggcttagtttggcagacgggaagtggcatcgagtcgctgtggcggtcaaggggcagtcggttacgctgattgttgactgtaagaaaagagtgaccagaccactacctagatcagctcgtccagtcctggatactcatggtgtgatcatctttggcgctagaatcttagacgaggaagtgtttgaaggagacgtgcaggaactagccattgtgcccggtgtacaggcagcctacgaatcctgcgaacagaaggagctagaatgcgaagggggacagagggaacgcccacagaatcagcagccccaccgtgctcaacggagccctcaacaacagccgagtcggctgcataggcctcagaatcaggaaccgcaaagtcagccaaccgagtccctctattacgactacgagcctccatactatgatgttatgacaacggggactactcctgattaccaggctgctcatgggcctaggggcttaaaaggggaaaagggggagcctgccgttctagagccagggatgcttgtggaaggtcctcccggacccgagggtcccgcaggtttaattggacctcctgggatacaagggaatcccggacccgtaggggaccccggagagcggggaccccctggcagagcaggattgcccggttcggatggggcaccaggccctcccggtacgtccctgatgttaccttttcggttcggctcagggggaggggataagggccctgtggtggcagctcaggaggcccaggcacaggccatcctccaacaagccaggctagccctgaggggacccccaggacctatgggctacactggtaggccgggtcccctgggccaacctggctctccaggcctaaaaggagagtctggagacctcggccctcagggccctcgcggtccacaaggcttgacaggccctccaggcaaagctggaagaaggggccgtgccggagccgatggcgctaggggtatgcccggtgaccccggagtgaagggtgacagaggtttcgacggcctcccagggctacccggagagaagggtcatagaggggacacgggagcccaaggtctacctgggccacccggagaagacggcgaaagaggagatgatggcgagattggacccagaggactcccaggcgagtccgggcctcgcggtctgctaggaccgaagggccctcctggaattcccggtccaccaggagtgcgcggaatggatggccctcagggcccaaagggcagcctgggaccacagggagaaccagggcctcctgggcagcagggcaccccaggaacgcagggacttcctggtcctcagggcgctatcggcccacacggcgaaaagggccctcagggcaagccaggactgcctgggatgcccggaagcgacggaccaccagggcacccagggaaggagggaccacctggtacgaaagggaatcagggcccttcaggccctcaaggccctctgggttacccaggacccaggggagtgaagggggttgatggcatccgcggattaaagggtcacaagggggagaaaggtgaggatggtttccccggattcaaaggcgacatcggagtgaaaggagacagaggcgaggtcggcgtgcccggtagtcgcggagaagacggccctgagggcccaaagggaaggaccggtccaactggtgacccgggacctcctggcctcatgggagaaaaaggcaagctaggcgtgccaggtttgccaggttacccaggcagacaaggcccaaagggaagtctcgggttccctggtttcccaggcgcttcaggggagaagggggcacgcggattgagcggaaaatccggaccaagaggagaacgagggccaaccgggcctagaggacagagagggccacggggagctacaggcaaaagtggtgctaaagggacctctggcggagacggtccacacggacccccaggggaaaggggtctccccggaccccagggcccaaacggttttccgggaccgaagggacccccaggccctccaggaaaagatgggctaccgggtcatcccggacagcgtggtgaggtcggatttcagggtaagaccgggcctccgggtccccctggggtcgtcggaccgcagggggcagcgggagaaacgggccctatgggagaacggggtcaccctggacctcctggtccccctggagaacagggacttcctggaacggcgggtaaggaaggcacaaaaggggacccaggtcccccaggtgcgcctggcaaggacgggcctgccggtcttcgcggattccccggagagcgaggtctgcctgggacggccggaggacccggacttaaggggaatgaggggcctagcgggcctcccggacctgccggatccccgggagaacgcggtgccgcagggtcaggaggccctatcgggcctccgggtaggcccggtccacaggggcctccaggagccgcaggcgaaaagggcgttccgggtgagaaagggcctatcggacctaccgggagggatggagtgcagggccctgtgggtttgccagggcctgcaggcccacctggtgtcgcaggagaggatggggacaaaggcgaagtaggcgatccaggccagaaaggaaccaaagggaacaaaggggaacacggtccccctgggcctcccggacccatcggtcccgtcgggcaacccggagcagccggagcggacggagaacctggagctagggggcctcagggccacttcggtgcaaagggcgatgaagggacaagagggttcaacggcccaccaggtcccatagggctccaggggctcccaggaccttcgggcgagaagggggagacgggggacgtcggccctatgggaccacctggacctcctggcccacgagggcctgccggacccaatggtgcggacggaccacagggtcctcctggcggagttggcaaccttggccctcctggggagaagggagaacctggggagtcgggttcacccggtattcagggagagccgggtgtgaaagggcctcggggagaacggggagagaagggcgagagtggtcagcctggagaaccagggccaccgggtccgaaaggacccaccggagatgacggcccaaagggcaatccagggcctgtcggttttcctggagatcccggtccacccggtgaggggggacctcggggacaggatggtgccaagggagacagaggcgaagacggcgaaccaggtcagcctggctcacctggccctacaggcgagaacggcccacccggaccactcggaaagaggggccctgcgggttccccaggatctgaggggcgtcagggaggaaaaggcgctaaaggagaccccggtgccatcggggctcctggcaagaccggcccagtgggtcctgccggtccagctgggaagcccggtccagacggtctgcgtgggctacccggatccgtcgggcagcagggacggccaggggctaccggtcaggcgggtccccctggaccggtgggtccccctggcctgcctggactgaggggtgacgccggagccaaaggcgaaaagggccatccgggactgattgggctcatagggcctccaggagagcagggagaaaagggtgatcggggactgcccggtccacaggggtcccccggtcagaaaggcgaaatgggcatccctggcgcttccggtccaattggccctggagggcctcctggcctgccaggccctgcgggtcccaagggcgcaaagggagcaacaggtccagggggtccaaaaggcgagaaaggggtccaaggaccacccggacacccaggccctccaggggaggtcatccagccacttcctattcagatgccgaagaaaacccgcagaagcgtggatggttccaggctgatgcaggaggatgaagctatacccaccggtggcgcacctggatcccctggcggactcgaggagatctttgggagtctggactcgctgcgcgaagagatcgagcagatgcgcagacccactggcactcaggactcaccagcccgaacctgccaagatctgaaattgtgccatcctgaactgcctgacggagagtattgggtagatccgaatcaggggtgtgctagggacgcctttagggtgttctgtaattttacggctgggggagagacctgcgtcaccccaagagacgacgtgacacaattctcctacgttgattcagagggttcgcccgtcggggttgttcagctcacttttttaaggctgttatctgtgagcgcacatcaggacgtctcttatccgtgttctggcgctgctcgtgatggtcctttacggcttagaggcgctaatgaagacgaactgtcccccgaaacatcaccatatgttaaggaatttcgggatggctgccagacccagcagggacggacggtactcgaggttcgcacacctgtgcttgagcaactccccgtgctcgatgcctctttttccgatttgggcgcaccccctagaaggggaggagtcttgctgggccctgtgtgttttatgggtta

SEQ ID NO: 232754 - DNA, 4953 bp, Artificial Sequence
  derived and/or modified sequence
atggagcggtgctctagatgtcaccgcctcctgctccttctacccctggtgctgggactgtccgccgcacccggttgggcgggagctccacccgtggacgtgctgcgagctctccggttcccctccctcccagatggtgtgaggcgggcaaaaggaatatgtccagccgacgtggcatatagggttgctagacctgcacagctgagtgctcctactaggcagctcttccctgggggatttcccaaggactttagcctgctgactgtcgtgagaaccagaccagggcttcaggccccactattaaccctctatagcgcacagggcgtgcggcagctgggtttagaactgggtagaccagtgcgcttcttgtacgaggaccaaactggaaggccgcagcctcccagccagcctgtttttcgagggctgagccttgctgacgggaagtggcatagggtggcagtggctgtgaaggggcaatcagttactttgattgtggattgtaaaaaacgagtcactcgcccacttccaaggtctgctagaccagttctggatacacacggagtgattatttttggggcacgtattctggacgaagaggtgttcgaaggagacgtgcaggagctggcaatcgtccctggcgttcaagctgcgtacgagtcatgtgaacagaaagagctcgagtgtgaaggtggacaaagagaacggcctcaaaaccaacagccacaccgggctcaacggtccccccagcagcagccctcaaggcttcatagaccgcagaaccaggagcctcaaagccaggaccccactccaggagaggaagaagagattttagaaagctccttgctccctccactggaagaggcagcccacggacccagaggtttaaagggcgagaagggggagccggctgttctggagcccggtatgctcgttgaaggacctcctgggccagaggggccagccggtctgatcggaccaccaggaatccaggggaaccctggacccgtgggagatcccggagagagaggacccccaggtcgtgccggtttgcctggttccgacggcgctccgggtccacctgggaccagccttatgctcccttttcggtttggaagtggtggaggtgacaaaggcccagtcgtggctgctcaggaagcacaggctcaggctatactgcagcaagccaggcttgctctgcgcggaccccctggacccatgggctatacaggtaggcccggtcccctggggcaaccaggatcacctggcctgaaaggagaatcaggcgatttgggaccacagggcccaagaggcccacaggggttaacgggaccgccagggaaggccggaaggcgaggacgcgctggcgcagatggggctcgaggaatgcccggagatccaggcgtgaagggagacagggggttcgacggcctgcccggactgcctggcgagaagggccaccgaggcgacacgggagctcaggggctccctggcccacctggcgaggatggcgagcggggagatgacggcgagataggtcctaggggcctcccaggggagtccgggcctagaggacttctgggccctaaaggcccaccagggatcccagggccacccggtgtgagaggcatggatggaccgcagggcccaaaaggctctttagggcctcagggcgaaccaggacctccgggtcaacaggggaccccaggcacccaggggttaccaggccctcagggggctatcgggccacacggcgaaaaaggaccgcagggtaaaccgggactaccaggcatgcctggctctgatgggcctccaggacaccccggaaaagaggggcctcctggaaccaaggggaatcagggcccatcaggacctcagggaccgctcggttatccaggtccacgaggtgtaaagggtgtggacggaatcagagggttaaaaggacacaagggcgagaagggcgaggacggattcccgggattcaagggcgacatcggtgttaaaggcgatcgtggggaagtcggggtgcccggaagtaggggggaggatggcccagaaggcccaaagggcaggactggtcccaccggcgatcctggccctccaggactaatgggcgagaaaggcaagctgggcgtgccaggtttaccagggtatccaggtcgtcagggccctaagggctcactcggttttcccggtttccccggtgcctcgggtgagaagggagcccgaggcttgtccggaaaatcaggccctagaggtgagcgaggaccaaccggcccacgcggacagagaggtcctaggggggctactgggaagtcgggcgcaaagggaacatctggtggagacggcccacatgggcctcctggcgaacgtgggctgcctggacctcaggggcctaacggatttccaggcccaaaaggtcccctcggaccgccaggcaaagacgggcttccaggacacccagggcaacgtggcgaggtgggattccagggcaagactgggccaccagggcctccaggggttgttggcccacagggggctgccggtgaaaccggacctatgggcgagcgaggccatccagggccacccggacctcccggagaacagggtctgcccggtaccgcagggaaagagggcacaaagggagatccaggtccacccggtgccccaggcaaggatgggccagccggactgaggggctttcccggagaaagagggctgcctggcaccgcgggaggccctggccttaaagggaatgaaggaccctctgggccacctggccctgcgggaagtccaggtgagcgcggtgccgctggcagcggaggtccaatcggccctccgggtaggcccggaccccagggcccacctggagccgctggggagaagggagtcccaggcgaaaaagggcctatcggcccaaccgggcgagacggcgtccagggcccagtgggtctgccgggtcccgcaggaccgccaggggtggcgggtgaggatggagataaaggagaggtgggtgaccctgggcagaagggaaccaaaggaaacaagggtgaacatgggccaccaggcccaccgggaccaattggtcccgtggggcaaccaggtgctgccggtgcagacggcgagcctggagcaagaggtccgcagggccattttggcgctaagggggacgaagggacccgcggattcaatgggcctcctgggccaatcggtttgcaagggctacccggaccttccggagaaaaaggcgaaactggtgatgtggggccaatgggacctcccggacctccgggacctcgcggtccagccggtcccaatggcgctgacggccctcagggccctcctgggggtgtcggcaacctgggcccacctggtgaaaagggcgaacctggagaatctggctcccccggaattcagggcgagccaggagttaaaggaccacgaggcgaaaggggcgaaaagggcgaaagtggacagcctggtgagcccggtccaccaggcccaaaaggtcctaccggcgacgacggaccaaaaggaaatcctggccctgtcggatttccgggagaccccggtcctcccggagaaggcggtccacgcggacaggatggagcaaaaggggataggggagaggacggcgagccgggtcaacccggaagcccaggacctaccggcgagaatggaccccctgggccacttggcaagagggggccagccggatcacctggctctgaaggcaggcagggcggaaagggcgcaaaaggcgacccaggcgctataggggcacctggaaagactggcccagttgggcctgccggtccggctggaaagcccggaccggacgggctgaggggcctgcccggttcagtgggacagcaaggtcggccaggcgcaactggacaagccggtcctcctggacccgtgggccctccaggtctgccgggtctgagaggcgacgccggagcaaaaggcgaaaaaggacatccaggattaataggactcattggaccacctggcgaacagggagagaaaggagaccggggattgcccggtccacagggttcccctggacagaagggcgaaatggggattcccggtgcctctggacctattggaccgggaggacccccaggcctgccagggccagccggtcctaagggcgctaagggagctacaggcccaggcggacctaagggagaaaaaggtgtgcaggggccacccggtcatcccggtccccctggtgaggtaatacagccactgcctatccagatgcctaagaaaactagacgcagcgttgatggaagcaggctgatgcaggaagacgaggccattcctacaggtggcgctcccggttcgcctgggggtctggaagagattttcggctccctagatagtctgagagaggagatcgaacaaatgcgcagacccaccggcacccaagacagccctgcgaggacttgccaagatctgaaactgtgtcaccccgagctgcccgatggagagtattgggttgacccaaaccaaggatgcgccagggatgcgttccgggtgttctgtaatttcaccgccggtggcgaaacctgtgttaccccacgcgacgacgtgacccagttcagctacgttgactcagagggctctcctgtaggcgtcgtgcagttgacgtttctgaggcttctgtctgtgagcgctcaccaggacgttagctatccgtgttctggggctgctcgcgatggacccctgagattgagaggtgcaaacgaagatgagctttctcctgagacctcgccatacgtaaaggaattcagggacgggtgtcaaacgcaacagggcagaaccgtgcttgaggttcggaccccagtcttggaacagctgccggtcttggacgcgtccttcagcgacttaggagctcctcccaggagaggcggtgtgcttctcgggcctgtctgttttatgggctag

SEQ ID NO: 232755 - DNA, 4953 bp, Artificial Sequence
  derived and/or modified sequence
atggaaagatgcagcagatgccaccgtctcctccttctcttacctctggtactgggactgagtgcggctccaggatgggctggtgccccacctgtggacgtcctcagagccctgaggtttccatctctaccagacggggtgcgtagagccaagggaatctgtcctgccgatgtggcctaccgagtggctagacctgcccagcttagtgcccctacccggcagctgttcccaggcggattcccaaaggacttctcacttctgacagttgtcagaactcggccaggccttcaggctccgttgctgaccctgtatagtgctcagggcgtgcggcagctgggcttagagctgggccgacccgtgcggtttctgtacgaagaccagaccggaaggccccaaccacctagccagcctgtgtttaggggcctgtctttagcagatggaaagtggcacagagtcgcagttgcagtcaaggggcagtctgtaactctgattgtggattgtaagaaacgcgtcacccgtcctctgccccgtagcgccaggccagtgctggacactcatggtgtcataatctttggtgcgagaatcctggacgaggaggtatttgagggtgacgttcaggagttggctatcgtgccgggagtccaggctgcctatgagtcttgtgagcagaaagaattagaatgcgagggcggtcagcgcgaaaggccccaaaatcagcagccccatagagcccagaggagcccacagcagcagcccagccgcttgcatcgcccacagaaccaggaaccccagtctcaagatccaacacccggagaagaggaggaaattctggagtcatccttactgccaccgctggaggaggctgcccacggccctagggggctcaaaggcgaaaagggcgaacccgcagtgctggagcccggaatgctcgtggagggcccaccaggaccggaaggcccagctggccttatcggcccacctgggattcaggggaacccagggccagtaggggatccaggagagaggggacccccaggacgcgctggcttgcccggaagcgacggcgcacctggaccccctggcacatccctgatgttaccctttcgtttcggctctggcggtggagacaaggggcctgttgtggccgcacaagaggcccaggcacaggccatcttacagcaggcacggctagccctgcggggtccacccggaccaatgggttacactggcagacccggaccattaggacagccaggctccccaggattaaaaggcgaatctggcgacctgggccctcaggggcctagaggcccacagggcttgaccggccctcccggaaaggccggaagacgcggtcgggcaggcgctgacggggctcgcggaatgcccggagacccaggggtgaagggcgatcgcggattcgacggcctgcctggcctccccggagagaaagggcatcgcggtgacaccggtgctcaagggttaccaggaccccctggtgaggatggagagagaggtgatgacggtgagatcggtcctagaggattgcctggggagagcggccctcgtggtcttcttggccctaaaggccctccaggaatccctggcccacccggagtcagggggatggatgggcctcaggggcctaaggggagtcttggcccacagggtgaaccaggacccccagggcaacaaggcacacccggaactcagggcctgcctggccctcagggagccattgggcctcacggggagaagggtccgcagggcaaaccgggtctcccgggtatgccaggcagcgacggaccgccagggcatccaggaaaagaaggacctcctggcacgaaggggaatcagggcccatctggaccacaaggacctctcgggtaccccggacctcgtggcgtcaaaggagttgatggcattcgcggactgaaaggccacaagggggagaagggggaggacgggtttcccggattcaaaggcgacattggggtgaaaggcgatcgcggtgaggtgggagtgccaggcagccgcggagaggatggcccagagggtcccaagggccgaactggccctaccggggaccctggccctcctggtctgatgggggaaaaaggcaagttgggggtccccggtcttccgggatatccgggtcgtcagggacctaagggcagtctcggattcccaggtttccctggggcatccggcgaaaaaggtgctagaggcctttctgggaaatccggaccacgcggagaacgaggcccaacaggacccagaggccagagaggcccaagaggcgctacgggcaagtcgggagctaagggcaccagcggaggcgacggtccacacggcccaccaggagaaagaggtctgcccggaccccagggacctaacggatttcccggacccaaaggcccaccaggccctccagggaaggacggactacctggacatccgggtcagaggggagaagtcgggtttcagggtaagacaggcccaccagggccaccaggcgtcgtcggacctcagggtgctgcaggtgagacaggtccaatgggagagcgaggccaccctgggcctcccggaccccctggtgaacagggcttacccggtacggcaggcaaggagggcactaaaggcgatcctggaccacctggagctcccggtaaagatggccctgctgggctaagggggtttccgggtgaacgcggactgcccggaactgcaggcggaccgggtctcaaggggaatgaagggccttccggtccacctggacccgcaggctctcccggagaacggggagccgcaggcagcggcggacctatcggaccacccggacgtcccggaccgcaggggccaccaggcgcagcaggtgaaaagggggtgcccggagaaaagggcccaatcggaccaacaggccgtgatggggtgcagggcccagtgggattgcccggacctgcaggccctcctggcgtcgcgggagaagatggtgataaaggagaagtgggcgatccaggccagaaggggacaaagggaaacaaaggggagcacggacccccagggccaccaggcccaatcggacctgttggccaacctggcgcagccggagctgatggcgagcccggagccaggggccctcagggacactttggggctaagggggatgaagggaccagaggattcaatgggccaccaggcccaatcggccttcaaggcctgccgggacctagtggcgagaaaggagagactggcgatgtaggcccaatgggcccacccggaccccctggaccacggggacccgctggtccaaacggggcagacggcccacagggacctcctggcggtgttggtaatctggggcctcctggtgagaagggtgagcccggagagtccggaagccctggaatccagggagagcccggtgtgaagggcccaaggggagagcgaggcgaaaagggagaatcaggccagcccggtgagccaggccctccaggcccaaaaggacctaccggtgatgacgggccaaagggcaaccccggaccagtcggcttccccggtgacccaggtcctccgggagagggaggaccacggggacaagatggcgcaaagggcgacagaggcgaggatggagaaccaggccagcctggtagtccaggtcctaccggggagaacggaccaccaggccctctcgggaaaaggggacccgctggctcacctggcagcgagggccgacaaggcggaaaaggcgcaaaaggggatccaggagctatcggcgctccgggtaagaccggcccagtggggcctgctggtcccgcaggcaaacccggacccgatggcctgcgaggccttcctggaagtgttggacagcaaggcaggcctggggcaacgggccaggccggtcctcccggacccgtcgggcctccgggattgccaggattgcgcggtgatgcaggggcaaagggagaaaagggccacccgggactgatcggattgatcggcccacccggtgagcagggggaaaagggcgatcgcggactgcccggtccccagggaagccccggacagaagggggaaatgggtatccctggtgcaagcggtcctattgggccaggcggacctcccggactgcctgggcctgcaggcccaaagggtgctaaaggcgcaacgggaccaggagggccaaagggagagaagggcgtgcagggccctccagggcacccagggcctcccggagaagtaattcagcccctgcctatccagatgcctaaaaaaacacgaagaagtgtcgacggcagccgcctgatgcaggaggacgaggcgatccctacaggaggtgcccctgggtcacctgggggtctggaggaaatttttggtagtctcgattctttgcgcgaggaaattgagcaaatgcggagaccaactgggactcaggatagtcccgctcgaacctgccaggacttgaagctatgtcatcctgaactgcccgatggtgagtattgggtggatcctaaccagggctgtgccagggacgccttccgagtgttctgcaacttcacagccggaggggaaacatgcgtgaccccgagagacgacgttacccagttcagttacgtagatagcgaagggtctcccgtgggggtcgtgcagttgaccttccttagactgctgagcgttagcgcccatcaggatgtgtcatatccctgttcaggcgcagcccgagatggacccctccggctgaggggggctaatgaggatgagttgtctcccgagacatctccttatgtgaaggaattccgcgacggctgtcagacccagcagggcagaactgtactggaggtgcgcacccccgtgctggagcagttacctgttctggatgcctcctttagtgatctgggagcccctccacgacgcggaggagtgctcttagggccagtatgctttatggggtag

SEQ ID NO: 232756 - DNA, 5031 bp, Artificial Sequence
  derived and/or modified sequence
atggaacgctgctcacgctgccaccgcttgctcctgctcctccctctcgtcctgggcctgtctgcagcccctgggtgggccggagcgccaccagtggacgtactcagagctctgcgctttccctctttgcccgacggcgtgcgtagggccaaagggatttgcccggctgatgtggcatatcgggtcgcaagaccagcccagctgtctgctcccaccagacagctgttccccggaggctttccaaaggacttctccctcttgaccgtggttaggacccgacctggcttacaggcaccacttctaaccctctatagtgcccagggggtgcgacagctgggcctcgaactgggacggcctgttcgctttctctatgaggaccagaccgggaggcctcagccaccatcccaaccggtcttcaggggtctaagtctggctgacggaaaatggcatagagttgccgtggctgtgaaaggacagtctgtgactctgatcgtggattgtaaaaaaagggtgacacgtcccctacccaggtcagctcgaccagtgttggatacccacggagtaataatcttcggtgctcgaatcctggatgaagaagttttcgagggggatgttcaggaactcgcgattgtaccgggtgtacaagccgcttatgagtcctgcgaacagaaagagttagaatgtgagggaggccaaagagaacgccctcagaaccagcaacctcacagagcacagcggtcccctcagcagcaaccctctcggctgcaccgaccacagaatcaggaacctcaaagccagccaacagagtcactgtattacgattacgagccaccatactacgacgtgatgactactggaactacacccgactatcaggatccaacaccaggcgaagaggaagagatcttagaatctagcctgctgcccccactggaggaggcagctcacggaccacgcggactgaagggcgagaagggtgagcccgctgttttggaaccaggaatgctggtcgaggggcctcccggtccagaaggtcccgctggcttgataggaccccctgggatccagggtaatcctggccctgtcggcgatccgggtgaaaggggtcccccagggagggctgggttaccaggttcggatggtgctccaggcccacccggtacatcccttatgttgccattccggtttgggtccgggggtggggacaaaggtcctgttgtggccgcacaggaagctcaagcgcaggccatcctccagcaggctagactggccctgcggggacccccaggcccaatgggttacacaggcagacccggtcccctgggtcagcccggaagtcctgggcttaaaggtgaaagcggtgaccttggccctcaaggaccaagagggccacagggccttacagggccacctggcaaagcaggccgtagaggtcgagccggagcagacggcgctcgtgggatgcctggagaccccggtgttaagggcgaccgcggtttcgatggactgcctggtctgcccggagaaaagggccaccgcggtgatactggggctcagggcctgccgggaccacctggggaggatggcgagcgaggcgatgatggggagatcgggccaagaggcctgcctggtgaaagcggccctagggggttgctggggccaaaaggaccacctggaatcccgggtccccctggggtgcgaggcatggacggaccacaagggccaaagggctccctaggaccacaaggggaacccggaccacctggccagcagggcacgcccggaactcagggccttcccggtcctcagggcgctataggcccacacggggagaaggggccacaggggaagccagggttacccggtatgcctgggagcgatggcccacccggtcaccccggaaaggaggggcctccgggaactaaggggaatcaaggtccctctgggccacagggcccattgggttatcccggaccccgaggcgtgaaaggagtcgacggtatccgcggtttgaagggtcataaaggtgaaaaaggagaagacggctttccaggtttcaaaggcgacattggagtgaagggcgacaggggcgaggtcggcgttcccggttctaggggcgaggacggacctgagggacctaaaggccgaacgggccctaccggcgatccaggaccaccaggtctgatgggagaaaaagggaagctcggcgtgcctgggctgccagggtaccccggtaggcaagggccaaaaggctcactgggatttcctggtttccccggagccagtggtgagaaaggcgctaggggactgagtggaaagtctggcccacggggagagagaggaccaacaggtccaaggggccaaagagggcctcgcggtgctacaggtaaatccggagccaagggaacctctgggggtgacggacctcacggcccaccaggtgaacggggtcttccgggaccccaaggacctaatgggtttcctggaccgaaaggcccacccggaccccctggcaaggatggactgccagggcaccccggacagagaggtgaggtgggctttcaagggaaaacaggccctccaggcccacctggggtggtgggaccacaaggggctgccggagagacaggacccatgggggagcgcggacacccaggcccacccggtccaccgggtgaacaaggcctgccaggcactgctggcaaggaaggcaccaaaggcgatcccggaccccctggagctcccggtaaggacggccctgcgggactcaggggtttccccggagaaagaggcctgcctggaaccgcgggaggccctggcttgaagggtaatgaggggcctagcggccctcctggcccagccggttctccgggagagcggggagctgcaggtagcggcggacccattgggccacctgggaggcccggacctcaggggcctcccggtgccgctggcgagaagggggtgcccggagagaaagggcctataggtccaacagggagagatggcgtccaggggcctgtggggttgccagggcctgctgggcctccaggcgttgccggagaggatggtgacaagggtgaagtgggggatcctgggcagaaaggaactaagggaaataaaggtgagcatggaccaccgggtccacccggtccgatcggaccagtaggacagcctggagcagccggtgcagatggcgagcctggggctcgcggacctcaaggccatttcggtgccaagggtgatgaggggacccggggattcaatggccctccaggacccatcggtctccagggcctgcctggtccttctggcgagaagggcgagacaggggacgtggggcctatgggccctcccggaccccctggaccacggggtccagccggaccgaatggcgcagacggccctcagggtcctcctggaggagtgggaaacctgggcccaccgggtgaaaagggagaaccaggagagagtgggagccccggtattcaaggggaacccggagtaaaggggccacgcggagagcggggagaaaaaggggagagcggccagccaggtgaaccgggtccgcctggccctaaaggtcccactggagatgacggtcctaaaggcaatccaggcccagtggggtttcccggtgatcctggaccacctggcgagggtggcccacgaggtcaggatggtgcgaagggcgataggggagaggacggggaacccggtcaaccaggctcccccggtcccactggagaaaacggcccacctgggccattaggaaagcgcggaccagcaggtagcccaggttcagagggtcgccagggagggaagggcgcaaaaggagaccccggagcaattggggcaccaggaaaaacgggcccagtgggacctgcagggccagcgggtaagcccggacccgatggactgcggggactgcccggatccgtgggacaacaggggagaccaggcgcaactggtcaggccggtccaccaggcccagtcggaccccctgggctcccgggactgcggggagatgctggcgctaaaggggagaaagggcaccccggactgatcggactcattggcccaccaggagagcaaggagagaaaggcgacagaggcctcccaggcccacagggatcccccggtcagaaaggagaaatggggattcccggagcgagcggccctatcggtcctgggggtcctccaggactgccgggaccagcgggtcccaagggggctaaaggagccactgggccaggaggacccaagggagagaagggcgttcagggtccccctggtcatccgggtccaccaggcgaagtcattcagcctctgcctatccagatgcccaagaagactagacgctctgtagatggcagtcgtctgatgcaggaggatgaggcaatccccacgggaggagctcccggttctcctgggggactggaagaaatctttggaagtcttgactccctgagggaggagattgaacaaatgcggcgtcccacagggactcaggatagtcctgcccgtacctgtcaggacctgaagttgtgtcaccccgaactccctgacggggaatattgggtcgatccaaaccagggttgtgcgcgagacgcattccgggtattttgcaattttactgctggcggagaaacgtgcgtgacccctcgagacgacgtgacacagttttcctacgtggattctgaaggctcacccgttggagttgtgcagttgaccttcctcaggctactctctgttagtgctcatcaggatgtcagctatccatgcagtggggcagcgagagatggccctcttcggcttagaggagctaacgaagacgagctaagtcccgagacaagcccttacgtgaaagagtttcgggatggctgtcagactcagcaggggagaacggtactggaagttcgaactccagtcctcgagcagctcccagtgttggacgccagttttagcgatttgggtgcccctcctcgcagagggggagtgttgcttggcccagtgtgtttcatgggatag

SEQ ID NO: 232757 - DNA, 4953 bp, Artificial Sequence
  derived and/or modified sequence
atggagcggtgctcaaggtgccaccgcctgctcttgctgttgccactggtactcgggttaagcgcagcccctggttgggcaggcgctccccctgtggatgtgctgagggccctgcggttcccctctctgcctgatggcgtgcggcgagctaaggggatctgtccagctgacgtggcctaccgtgtggcacgcccagcacagctgtcagcccctactagacagctgtttcctggaggctttcctaaagatttctcactcctgaccgtcgttcgcaccagacctggactacaggctccacttctgaccctctattcagcgcagggcgtacgtcaactgggtctagaacttggtccgccagtcagatttctctatgaggaccagactggcagacctcagccgccaagccagcccgtgtttagaggattgagtctggcagatggcaagtggcaccgggttgcggtcgccgtgaaagggcagagcgtcacacttatcgtagactgcaagaagagagttactaggcctttgccgaggtctgctcggccagtcctggacacccatggggtgattattttcggagctcgaatcctggatgaagaggtgttcgaaggagacgttcaggagttggccatcgtgccgggtgtccaggctgcctacgaatcgtgtgaacaaaaggaactcgaatgcgaagggggacagagggagcgtccacagaatcaacagccccatcgtgctcagcgctctcctcagcagcagccgtcccgcctacatagacctcagaaccaggaacctcagtcccaggatccaacacccggtgaagaagaggagattctggaatctagtctgctccctcctctagaggaagcagcacacggccctcggggtctgaagggagagaagggcgaacccgcagttctggaaccagggatgctcgtggagggtccgccaggcccagaaggacccgctggactgataggcccacctggaatacagggcaatcctgggccagtgggagatcccggagagcgcggacctcccggacgcgctggactcccagggtctgatggggctccgggtcccccaggcacaagcctgatgctccccttccggttcggctccgggggaggtgacaaaggacccgtcgtagctgcgcaggaagcccaagcccaagcaatcctccagcaagccagactggcgctacgcggacccccaggcccaatgggctacacaggccgtcctggacctttggggcagccgggttctcctggcctaaaaggagagagtggagacctaggtccgcagggtcccagaggacctcaagggttgaccggcccacccggaaaggcagggagaagagggagggccggagctgatggggctcggggaatgccaggagatcccggagttaagggcgacaggggtttcgacggacttcctggacttcctggagagaaaggacacaggggcgataccggcgctcaaggcctccctggaccaccaggtgaggatggggaaagaggggacgacggcgaaattggacctcggggtttgcctggtgaaagtggccctcgcggtctgttaggccctaagggccctccaggtatcccaggaccccctggggtgcggggaatggatggccctcagggccctaaaggaagcctgggccctcagggggagcccggaccccctggacagcagggaacaccaggtacacaaggactgcccggtccccagggggctatcggtcctcatggggagaagggccctcaggggaagcctggactcccaggcatgcctggaagcgacggaccccctgggcatcccggaaaagaaggtccaccaggcacaaagggaaatcagggaccctctggtccacagggcccactggggtaccctggaccaagaggcgtgaagggtgtggatggcattcggggtctcaagggtcacaagggcgagaaaggcgaggacggatttccaggcttcaagggcgacatcggcgtgaagggggacaggggcgaagtgggggtgccaggctcccgaggggaggacggtccagaaggcccaaaaggtcgaaccggtcccacaggggacccgggtccacctggcctgatgggggagaagggaaagcttggcgtccctggcctgccaggctatccagggcgtcaggggccaaagggcagtttgggatttccgggattccccggagccagcggagaaaaaggtgccagggggctctctggcaagagcgggcctaggggtgaaaggggtcctactggaccacgcggacagaggggccctcgtggtgccactggcaaatcaggagcgaaggggacatcagggggagatggacctcacggacccccaggtgaacgcggattaccaggccctcagggacctaacgggttccctggacctaaggggccaccaggccctcccggtaaagacggcctccctggtcacccaggccagcgcggtgaggtgggcttccagggaaagaccggtccccctggtcctcctggggtggtaggccctcagggcgctgccggagagaccggtcctatgggagagcggggacatcccggtccccctggtccgccaggcgagcaaggattgccgggaacagccggaaaggagggcaccaaaggcgatccgggtccgccaggagctcccggtaaagacggaccagccggtcttcgcggtttcccaggggaacggggacttcccggtaccgccggtggcccaggcctgaaagggaacgaaggacccagtggtcctcccggaccagctggctcacctggcgagagaggagctgccggaagcggagggcctatagggcctccaggccgacccggtccccaggggcctcccggtgccgctggcgaaaagggcgtgcctggagaaaaaggtcccattggacctacaggacgggatggagtgcagggacccgtgggcctcccgggaccggcaggtccacccggagtggctggagaagacggcgataagggagaagtaggggaccccggacaaaaggggaccaagggcaataagggcgaacatggtcccccaggccctccaggaccaatcggaccagtgggtcagccgggagccgcaggggcagacggcgaaccaggcgctagggggcctcagggacactttggcgctaaaggggacgagggcacaaggggttttaatgggccacctggtccaataggcctgcagggcctgcccggtccaagtggcgaaaaaggtgagacaggagacgttggacccatgggccctccgggaccacctgggccaagggggcctgcagggccaaatggtgctgacggccctcagggcccaccgggaggagtgggcaatttgggtccaccgggtgagaagggtgagcctggagaaagcgggagccccggaattcagggcgagcccggagtaaaaggccctcgcggtgagaggggggaaaagggagaaagcgggcagccaggagagcccggtcccccaggacccaaaggtccaaccggagatgatgggcctaagggtaatccgggtccagttgggttccctggagaccccggaccgccaggcgagggcggacctaggggacaggatggagccaagggcgacagaggagaggatggtgaaccgggacagccagggtctcctggaccaacgggcgaaaatggaccgccaggtcccttaggcaaacgaggccctgcaggtagcccaggtagcgaagggaggcagggaggcaagggagccaaaggggatcccggtgctatcggagccccaggcaaaaccggacctgtgggtccagctgggccagccggaaagcccggacccgatggcctgcgcggtctgccagggagtgtggggcagcagggtaggccaggagccactggacaggccggtcccccaggacctgtgggacccccagggttacccggactgcggggagacgcgggtgctaaaggtgagaaaggacatccaggtcttattggacttatcgggccacccggtgagcagggagagaagggcgacaggggactgcctgggcctcagggaagtcccggtcagaaaggagagatgggtatccccggtgcgagtgggcctatcggcccaggagggcctcccggactccctggccctgccggacctaaaggcgctaagggggctaccggtcctggcggacctaaaggcgagaaaggagttcaggggccaccagggcatccagggcctccaggagaggtgattcagccactgccaattcagatgcccaaaaaaacgcggaggagcgtcgatggatcccgcctgatgcaggaagatgaagcgattcccaccgggggagccccaggctctccaggtggactagaagagatttttggatcattagacagtctgcgtgaggaaatcgaacagatgcgtcggcctaccggcacacaagactcacctgctcgaacctgccaggacctgaagctgtgccatcctgagttgcccgatggcgagtattgggtcgaccctaaccagggctgtgcaagagacgcgttccgcgtcttttgtaacttcacagcaggcggtgagacctgtgttacacccagagacgacgtgactcaatttagttatgtggactcagaggggagccccgtgggagtggttcaactgacttttctcagactgttgagcgtgtccgcccaccaggatgtatcttacccatgttctggagcagccagagatggcccacttcgactgcgtggcgctaacgaagatgagctgtctcccgaaacatcaccttatgtaaaggaatttcgggatggttgtcagacgcaacaaggaagaaccgtcctcgaggtcaggactcccgtgcttgaacagctcccagtgttagatgcctccttctcagatctcggcgctccccctcgcagaggcggagtgctgctcggacccgtgtgtttcatgggctag

SEQ ID NO: 232758 - DNA, 4872 bp, Artificial Sequence
  derived and/or modified sequence
tgagcaccacccgttgatgtgttgcgcgctcttcgttttccttccctaccagatggagtgagaagagcaaaaggcatttgccctgctgacgttgcctaccgcgtcgcccgtccggcacaactgagtgcccctacacgtcagctattcccaggtgggttccccaaggactttagcctcttaacggttgttaggacccgcccaggactacaagccccactgttgaccctgtattctgctcagggagtgagacagcttggcttggagctgggtcgtccagtcaggtttttatatgaagaccagactggtagaccacagcccccaagtcagcccgttttcagaggcttgtctctcgcagacggcaagtggcaccgcgttgctgtggccgtgaagggacagtctgtaacccttattgtcgactgcaaaaaacgggtcactaggcccctacctcgaagtgctcgacccgtgctggatacccatggggttattatcttcggtgccaggattttggatgaggaagtctttgagggagatgtccaggaacttgccattgtgccaggcgtccaggccgcatatgaaagctgtgaacaaaaggagcttgagtgtgagggaggccagcgggagcggcctcagaaccagcagccgcatagggcgcagaggtccccccagcagcagcccagtcggctgcatcgccctcagaaccaggaaccccaatctcaagacccaacaccaggtgaagaggaggagatcctagagtcttcactcctcccgccactggaagaagcagcccacgggccacgaggactgaaaggagagaagggagagccagctgtgcttgaaccaggcatgcttgttgagggcccacccggtcccgaggggcctgccggtcttatcgggcctccgggaatccaggggaatcccggtccggtcggcgaccccggagagcgcggaccccctggaagggcgggtctccctggatccgatggcgcacccggaccccctggaacctctctgatgctcccttttcgtttcggaagtggcggtggggacaaggggcctgtggtggcggctcaggaagcccaggctcaggctatccttcagcaggcccgtctcgcattgcggggaccaccaggccctatgggctacactggcagacctgggccactgggccagcctggttccccgggacttaaaggagaatcaggagatctgggcccacagggtccgcgaggaccccaaggccttaccggccctcccggtaaggctggcaggcgcggacgggcaggcgctgacggtgcgcgaggcatgccaggggatcccggtgtgaaaggcgaccgaggatttgatggtctgccaggtctgcccggagagaaaggccatcggggagataccggcgcacaaggccttcccggacctcccggtgaggatggcgagcgcggagacgatggagaaatcggacccaggggcctgccaggtgagtccgggccacgcggtctcctggggcctaagggaccaccaggcatacccggacccccaggggttcgcggaatggacgggccacagggacccaagggaagcttaggaccacagggggagcctggacctcccggacagcaaggcactcccggtacccagggcctgccgggtcctcagggagctattggtccgcatggtgagaagggccctcagggcaagcctggcctgccgggtatgcctggtagtgatggaccaccaggacatccaggaaaggagggccctcctggcaccaaggggaaccagggcccttcaggccctcagggtccactcggctaccctggccctcgaggggtcaagggcgtggatggtattcggggactgaaaggtcacaagggagaaaagggtgaggatgggttcccgggatttaaaggagacatcggcgtgaagggggacaggggagaggtgggtgtgccaggaagtcggggagaagacggaccagaggggccaaagggtagaacaggccctacaggggaccctggccctcctggtctcatgggggagaaagggaagcttggggtcccaggactcccgggatatcctggcagacagggaccaaagggtagcctcgggttccccggttttcctggcgcatccggggagaagggggctcggggactgtcggggaaatctggcccaagaggcgagcgtggccctaccggaccacggggacagaggggacccagaggcgctacagggaaaagcggagctaagggaacctcaggaggtgatgggccacatggacctccaggagagagagggttgcctggaccccagggacctaatgggttccccggaccaaaaggccctcctggccctcctggtaaggacggattgccgggtcatcccggtcagaggggggaggtcggtttccagggaaaaacagggccacctggacccccaggagtcgttggacctcagggggctgctggtgaaaccggacctatgggcgagcgcggacaccctgggcctcccggacccccaggcgagcagggcttgcctgggaccgccggaaaggaggggacaaagggtgatcccggaccgcctggagctcctgggaaagacggacccgctggcctccgcggattccccggagagagagggctgccaggtaccgctgggggacctggtctgaaggggaatgaggggccttcgggcccacctggacctgctggcagccccggagagcgcggtgccgcaggctcaggcggtcccatcggcccaccaggtaggccgggtccgcagggtccaccgggtgccgctggtgagaagggagtgccaggagagaaaggcccaatcggacccactggacgtgatggggtgcagggccctgtgggactgcccggaccggctggtcccccaggcgttgctggcgaagacggggataaaggcgaggttggggatcctggacaaaaggggacaaaagggaacaagggcgagcacgggcctcctggacctccaggtccaataggacccgtggggcagcccggtgcagccggtgccgacggcgagcccggtgctcggggaccgcaggggcatttcggagcaaagggggatgagggaactcgaggctttaacggacctcctggcccaattggtctccaaggacttccaggcccatcaggggagaaaggcgaaacaggggatgtgggacctatggggcctccaggcccacctggtccaagaggccctgcagggcctaatggggctgacggccctcagggcccacccggaggggtcgggaacttaggacccccaggagaaaaaggcgagccgggagagagcggaagccctggtatccagggcgagccaggggtgaagggccctcgaggagagcgcggagagaagggggagagcggacagccaggcgagcctggaccccctggccctaagggcccaacgggcgatgatggacctaaggggaatcctgggccagttggtttcccgggtgatcctggtccgcctggggagggtggaccaagggggcaggacggcgctaaaggagacagaggagaagatggcgaacccggtcagcctggctccccaggaccaacgggcgagaatggacctcctgggcctctcgggaaacgagggccagcaggatcccccggatccgagggtcgtcagggaggcaaaggcgcaaagggcgacccaggagctatcggggctccagggaaaactggcccagtggggcctgcagggcctgcagggaagcccggaccggacgggcttcggggactgcctggctccgtaggtcagcaggggaggcctggagcgactgggcaggctgggccaccagggcctgtaggtcctcccggactccccggactgcgcggtgacgctggcgcaaagggcgagaaaggacaccctgggctaatcgggcttattggaccacctggagagcagggagaaaagggcgatcggggacttccaggcccacagggttcccccggacagaagggcgagatgggcatcccaggcgctagtgggcctattgggccaggaggtccgcctggtcttcctgggccagcaggaccgaagggggctaaaggtgcgacagggccaggcggtccaaaaggggaaaagggggtccagggcccacctggacacccaggaccccctggggaagtaattcagcctctcccgatccagatgccaaagaagacaagacggtcagttgatggtagtagactcatgcaggaggatgaggccattcctaccggaggtgcaccgggatccccgggtgggctcgaagaaattttcggttcgcttgactcactccgcgaggaaattgaacagatgaggcgccctactgggacccaggacagtccggctagaacgtgccaagatctgaagttgtgccaccctgaactgcccgatggagaatactgggtcgatcccaaccagggctgcgctcgggatgcgtttagggtgttttgtaacttcaccgccggaggggagacatgcgtaacaccacgggacgacgtcacacaattttcttacgtggatagcgagggtagcccagtgggcgttgtccaactcactttcttacgactgctatctgtgtctgcacatcaggatgtgagttacccttgttcgggtgcagcccgagatgggcctctgaggctgcggggagcaaacgaagacgaactgtcaccagagacctccccatacgtgaaggaattcagggacgggtgccagacacaacagggcaggactgtgctggaagtgagaacgcctgtcttagaacagctcccagttctggacgcttccttctccgacctcggggcacctcctagacgcggtggtgttctcctcgggccagtctgtttcatgggctag

SEQ ID NO: 232759 - DNA, 4953 bp, Artificial Sequence
  derived and/or modified sequence
atggagaggtgtagtcgctgccaccggttgcttctccttcttccgttagtgcttggcctgagcgcagcacctggttgggccggagctccaccagtagacgtgttgcgcgctttaagattcccaagcctgcccgatggggttaggcgagccaaaggtatctgccctgccgatgtggcatatcgggttgccagacccgctcaactgagcgccccaacacgacagctctttccaggagggttcccaaaagactttagtctcttaaccgtggtcaggactaggcccggtctccaggcccctctcctgactttgtattctgctcagggggtgcggcagttaggactggagctggggaggccggtcaggttcctctacgaggatcagacaggacgccctcagcctccatcccaaccagtgtttcgagggctgtcgctggccgacggcaaatggcaccgcgtcgctgtggctgtgaaggggcaatccgttacgctgattgttgactgcaaaaagagagtgacacgacctcttccccgttctgcacgacccgtgctcgacacacatggcgtcatcatttttggagccagaatcttagatgaggaagtgtttgaaggagatgtccaggaacttgccattgtacccggtgtgcaggcggcttatgagagctgtgaacaaaaggagctcgagtgtgaaggcggtcagcgagaacgtccacagaaccagcagccacatcgtgcacagcgctccccgcaacaacagcctagtcgccttcatcggccacagaaccaggagccccagtcacaggatccaacacctggtgaggaggaagaaattttggagtcatccctcctgcctccactggaagaggccgcacacggcccacgaggactgaaaggagagaagggggagcctgctgtgctggagccaggaatgctcgtcgagggaccaccaggccctgaaggacctgcaggtctgatcggcccaccagggatacagggcaaccctggaccagtcggtgatcccggagaacgcggaccccctggcagagccggacttcctgggagcgacggtgccccaggtccccctggcacctctttgatgctgccctttaggttcggtagcggtggcggtgacaaaggccctgtggttgcagcacaagaagcacaggctcaggcaatccttcaacaggcaaggctggcattaagaggcccaccaggccctatgggatataccggaaggcctggcccattgggccaacccggatcacccggactgaagggagagtcaggagatcttggccctcagggacccaggggacctcagggcctgacaggacctcccggtaaagccggacgcagggggagagcgggtgccgacggggctcgcggtatgcccggtgaccccggagtgaaaggagacagaggattcgacggattgcccggtctaccgggagagaaaggacacagaggagataccggcgcacagggcctcccagggcctccaggcgaagatggcgagcggggtgacgatggagagatcggaccacgcggacttcctggcgagtctggtccacggggactgctgggccctaaagggccacctggaattcccggaccacctggcgtacgagggatggacggtcctcagggcccaaaggggtctcttggccctcagggagagcctgggcctccaggccaacaaggaactccgggaacacaaggactcccgggaccccagggggcaatagggccacacggagagaagggcccacagggtaagcctggcctacctggaatgcctggtagtgatgggcctcccggacaccctggaaaagaaggaccccctggaacaaaaggaaatcagggcccaagtggtccccaagggcctcttgggtaccccggtcccagaggcgtcaagggtgtggatgggataagggggctgaagggacataaaggggaaaagggcgaagatgggttcccaggattcaaaggggacataggagtgaaaggtgatcgcggtgaggttggggtgcctggaagcaggggagaggatgggccagagggcccaaagggcaggactgggccaaccggcgatccaggccctccaggtctgatgggggagaaaggaaagttgggagtgcccggactcccgggttatccgggacggcagggtcccaaagggagccttggcttcccaggctttcccggagcctctggagaaaagggagcaagaggcctttccggaaagtctggtcctagaggcgaacgaggaccgactgggccacgcggacagcgcggacctaggggagctacaggcaaaagcggggcaaagggcacctcaggtggagatggcccacatggaccccctggggagagagggctgcccggtcctcagggtccaaacggatttccagggcctaaaggcccaccaggtccccctggaaaggacgggttaccaggccacccaggtcagcggggagaagttggcttccagggcaaaactgggccacccggtcctcctggcgtagttggtccacagggcgcagcaggcgagacgggtcccatgggcgagcggggacaccccggaccacctgggcctcctggggagcagggccttccgggtaccgccggaaaggagggaactaagggcgatccaggcccacccggagccccagggaaggatggcccagctgggttgcgcggattccctggtgagagaggtctacctggaaccgctggcggacccggactcaagggtaacgaggggccttctgggcctcctggtccagcgggaagtcccggagaacgtggcgctgccggatcaggcggtcctattggcccacctgggcgacccggacctcaggggccacctggtgccgcaggggaaaagggggtgcccggagagaaaggaccgattgggccaaccggcagagacggtgttcagggtcccgtgggtctgcccggtccggcaggacctcctggcgtagcaggggaagacggagataaaggggaggttggcgatcctggccaaaagggtacaaagggcaacaaaggggagcatggtcccccagggcctcctggaccaattggccctgtaggacaacccggtgccgctggtgccgatggtgagcccggtgccagaggaccacaggggcatttcggcgctaagggcgacgagggtactcggggattcaacgggcctccaggacctattgggcttcaggggctcccgggtcctagcggagagaagggtgaaaccggagacgttggaccgatgggccctcctggtccgccaggcccaagagggccagccggtcccaatggagctgatggccctcaagggcctcctggtggggtgggcaacctagggcctccgggagagaaaggagaaccaggcgagtccggctctcctggcatacagggcgagcccggagtcaaagggcctagaggagagaggggtgagaaaggagagtccgggcagccaggagaacccggtcccccaggacccaaaggcccaaccggtgacgatggccctaagggtaatccaggccctgttggctttcccggtgacccaggcccacccggtgaaggagggcctcggggacaagacggagcaaaaggagatcgcggtgaggatggggagccgggacagccagggtcccccggacctacaggtgaaaacggcccacccggacctctgggcaaaaggggacctgccggttcaccaggcagtgagggcaggcaaggaggcaagggcgcaaaaggggacccaggagcgattggagccccaggtaaaacaggcccagtcggacccgctgggcctgcaggtaagccaggacccgatggacttcgcggtttgcctggctcggtgggccagcagggtcgacccggtgcaaccggccaggccggtcctcctggcccagtgggccctccagggttgccaggactacggggagatgctggggctaaaggggagaaggggcatcccggactaatcggtttgattggtccgccaggagagcaaggcgagaaaggggatcggggacttcccggaccccaaggaagtcccggacagaagggcgaaatgggcattccaggcgcatcaggcccaattggcccaggcggtccccctggcctccccggacccgctggtccaaagggcgcaaagggcgctacaggccctggtggacccaaaggtgagaagggtgtgcagggccctccagggcatcctgggccacctggagaagtgattcaacccctcccaatccaaatgccgaagaagacccgcagatcagttgacggatcccgcctcatgcaggaggatgaggcaatcccgaccgggggtgccccaggtagccctggagggctcgaagagatcttcgggtccttagattcactccgtgaagagattgagcagatgcggagacccacggggacccaagactctcccgcacgtacctgccaagatctgaaattatgccaccctgagctgccggatggcgagtactgggtcgacccaaaccagggctgcgccagagacgcctttcgggttttctgcaactttaccgccggaggcgaaacatgcgtgacccctagggacgacgtgacccagttttcctatgtggactctgaagggtcccccgtcggcgtggttcagttaaccttcctcaggctgctgtctgtaagcgcgcaccaggacgtctcatatccttgctctggagccgctcgagacggaccattgcgactccgcggagccaacgaggacgaactgtctccagaaacctctccgtacgtgaaagagtttcgtgacgggtgtcagacacagcagggtcggaccgtcctggaggttcgcacacctgtcctggagcagctcccagtgctagatgcctcttttagcgacctcggggcacccccaagaagaggaggcgtattactgggtcctgtgtgctttatgggctag

SEQ ID NO: 232760 - DNA, 4953 bp, Artificial Sequence
  derived and/or modified sequence
atggagagatgcagcagatgtcaccggctcctgctgctgctgcccctggtgctcggcttgagtgcagcccctggttgggccggagcacccccagtcgatgttctgagggcactcaggttcccatcactcccggatggtgtgagacgcgctaaaggcatatgtcctgccgatgtggcctacagagtagcgcgtcccgctcagctgtccgctcccacgcgccagttgttccctggcggatttccgaaagatttcagcttactcaccgtcgtccgcacccggcctgggctgcaggcccctctgctgactttatactcggctcaaggggtgcgccagctcggcttagaactcggccgaccagtgcgcttcctgtatgaagatcagacgggcagaccccaacctcctagccagcctgtgtttcgaggcctatccctggctgatggtaaatggcacagggtggccgtggccgtgaagggacaatctgtcacacttatagtagattgtaaaaaacgagttacgcggcctctgcccaggagcgcccgaccggttctggatacgcatggggtgataatttttggggctagaatcctcgatgaggaggtatttgaaggcgacgtgcaggagctcgcaatagttccaggcgtacaggctgcttacgagagttgcgagcagaaagagctcgaatgcgagggcggtcagcgcgagcgcccacagaaccagcagccacatagagctcagcgttccccccagcagcagcctagccgactccatagacctcagaaccaagaaccacagtcacaggacccgactccgggtgaggaggaagaaatcctcgagagctccttgctgcctcccctggaggaggcagcacacggcccaaggggcttgaagggggagaagggagaaccagccgtcttggagcccggaatgctggtagaagggcctccaggcccagaaggccctgccggtctcattggacctcctggcattcaaggaaacccaggccctgtcggggacccaggagagaggggaccacccggacgagccggtctgcctgggtccgacggggcacctggacccccagggacatcattgatgctgccgttccggttcggtagtggcggaggggacaagggtcccgtggtggcggctcaggaggcgcaagcgcaggcaattcttcagcaagcaaggctggctctgcgaggaccgccaggcccaatgggctacacggggaggcccggtcctttgggacagccagggtctcccggactaaaaggggagagcggcgacctggggccacaaggaccgagaggaccccagggactgacagggcctccgggaaaggcaggacgtaggggaagagcaggggctgacggcgctcggggaatgccaggcgatcccggtgttaagggcgatagaggcttcgacggattgccagggctacctggcgaaaaagggcatcgcggtgatacaggggctcagggcttgccagggccacctggagaggatggcgagaggggggacgatggcgagatcggtccacgcggtctacccggtgagagtgggcctagaggactactgggacccaaggggcctccaggcattcccggtccacccggtgtgagaggaatggacgggcctcagggacccaaggggagcctaggacctcaaggcgagcctggaccacccggtcagcagggtacaccaggcacacagggattacctgggcctcagggcgcaatcggaccgcatggtgagaagggcccacagggaaaacctggcctccccggtatgccaggcagcgacggtccccctgggcatccagggaaggagggtccacctggtaccaagggaaaccaggggccatccgggcctcagggtcccctgggctaccccggacctagaggggtgaaaggcgttgacggcatccgaggcctcaaaggacataaaggcgagaaaggcgaggatggctttccagggtttaaaggagacattggagtgaaaggggaccgcggagaggtcggcgtgcccggtagtagaggtgaggatggaccagagggccctaaaggacgaacaggtcccacaggcgacccaggtccaccgggactaatgggtgaaaaaggaaaattgggcgttcccggactgccaggctatcccggaaggcaaggtcctaaagggagcctgggtttccccggatttcccggtgcctcaggcgagaaaggggcaaggggtctgagtggcaaatccggccctcgaggagagcggggaccgaccggacccaggggccagaggggcccaagaggagcaacaggcaaaagcggcgctaaaggaacttccggcggtgatggaccgcatgggccacctggagaacgcggattgcccggaccgcagggcccaaacgggtttccaggccctaaaggccctcccggaccaccgggtaaggacggcctgcccggacaccccggacagaggggcgaagttggattccagggaaaaactggcccaccgggacctcccggagtcgtggggccacaaggagccgcaggggagacgggtcctatgggagaacgtgggcacccgggtcctccaggacctcccggtgaacagggactaccaggcactgcaggcaaagaagggactaaaggcgatcctggacctccaggggctcctgggaaagatggtcccgctggcctccgcggtttcccaggggagcgcggtctccctggaactgcgggtgggccaggcctaaaaggtaacgagggccctagcggcccacccggacccgctggcagcccaggcgagagaggggctgcaggtagcgggggacctatcggccctcccggtagacctggcccacaaggaccacccggtgccgctggcgagaagggcgtgccaggcgagaaagggcctatcggcccaactgggagagatggcgtgcaggggccagtggggctgcctggcccagcaggcccacctggagtcgcgggagaagacggtgataaaggagaagtgggagaccccggtcagaagggaactaaagggaacaaaggagaacacggtccccctggtcccccaggccctataggcccagtgggccaacctggagcggctggtgcagatggtgaaccgggagctcgcggacctcagggccactttggcgctaagggggatgagggcacgcgtggcttcaatgggcctcctgggcctattgggcttcagggtctaccaggccctagcggtgagaagggcgaaacaggcgacgtcgggcctatgggtccaccaggcccaccaggccctagagggccagctggccctaacggcgctgacggccctcaaggaccccctgggggagttggtaacctcgggcctccaggggagaaaggtgaaccaggcgagtccggctcgccagggattcagggagagccgggtgtcaaagggccacggggtgaacgtggagaaaaaggggagagcggacaacctggcgagcccggaccaccaggacccaagggacccaccggcgacgatggcccaaaaggaaatcctgggcctgtggggttccctggtgatcccggacccccaggggaaggaggccctcggggacaggatggcgctaagggtgatcgcggagaggatggcgagcctggacagccaggctcccctggccctacaggtgagaatggaccaccaggtccgctgggtaaacgaggtcccgctggctctcctgggagcgaaggcaggcagggcggaaaaggcgcaaagggcgaccccggtgctatcggtgcacctggcaagacaggccctgtgggtcccgctggtcccgcaggaaaaccaggcccagacggattgagggggctcccgggaagtgtgggtcaacaggggcgtccgggagctaccggccaggccggaccgccagggccagttggcccaccaggactgccgggactccgaggcgacgcaggtgcgaagggagagaaagggcaccccggtctgatcggattgatcggcccacctggagagcaaggtgaaaagggtgacagggggcttcccggaccccagggatcacccggacagaagggtgagatgggcatccctggggcatccgggccaattggccctggcggacccccaggcttgccgggtcctgccggtcctaagggagccaagggtgctaccggtcccggaggacccaagggagaaaaaggagtgcaagggccacctggacaccccggaccaccaggggaggttatacagccactgcctatccaaatgccgaagaaaacacgacggagcgtggacggtagccggctgatgcaagaggacgaggccataccaaccggaggcgcacccggtagccctgggggactagaggaaatctttggcagcctggattcactccgggaggagattgagcagatgcgcaggcccactgggacccaagacagtccagccaggacatgtcaggatctgaagctctgccatcctgagctgccggacggggagtattgggttgaccccaaccaggggtgcgcaagagatgctttcagggttttttgcaacttcacagccggaggagagacgtgcgtcacaccaagagacgacgtgacacaattctcctacgtggactccgagggctcgccagtgggtgtcgtgcaactgacgttcttgcgcctgttatctgtgtctgcccaccaggacgtgtcttatccatgctccggggctgccagagatgggcctttgcgactcagaggggcaaacgaagacgaactgagcccagaaacatccccgtatgtaaaagagtttagagacgggtgtcagacacagcagggaagaactgtgctagaggtgcgcacccctgttttagaacaactccctgtccttgacgcgtcattctctgacttgggagcaccacctagacgagggggtgttctgctggggccagtgtgtttcatgggatag

SEQ ID NO: 232761 - DNA, 4968 bp, Artificial Sequence
  derived and/or modified sequence
atggaacggtgttccaggtgtcacaggctgctgctgttgctgccattagtcctaggcctttcagcagcacccggatgggctggagcaccccctgtcgacgtcttgagggctcttcgcttcccatcacttccagatggggtgcgcagggctaaagggatatgtcccgctgatgtcgcttatcgcgtggccaggcccgctcaattgagcgcccctacccgccagctgtttcccggtggattcccgaaggacttcagcctccttacagtagtgcgaactcgtcccggactgcaagcaccattgctaacattgtattcggcgcagggcgtgcggcagctgggactggagctggggcgaccagtgcgtttcctgtacgaagaccaaacggggcgaccacagccaccaagtcagcccgttttccggggacttagtttagccgatgggaaatggcatcgggtggcagtcgctgttaaggggcaaagcgttactttgatcgtcgactgcaaaaagagagttaccaggcccctgcccaggagtgctagacccgtcctcgacactcacggtgtgattattttcggagctcggattctcgatgaggaggtgttcgaaggcgatgtgcaggagctggctattgtgccaggggtgcaggccgcttatgagagctgtgaacagaaagagctcgaatgcgagggtggacagcgggaaagacctcaaaatcaacagccacacagagcccaaaggagcccgcagcagcagccttcccgactacacagaccacagaatcaagagccacagtctcagcctacagaaagcctgtactacgactacgagcctccctattatgacgtgatgaccaccgggacaacccccgattatcaggcagctcatggaccaaggggccttaagggtgaaaagggagaacccgctgtcctggaacctggaatgcttgtcgaaggcccacctggacccgagggtcctgctgggctcataggaccccctggtatacagggcaatcccggtcccgtgggcgacccaggcgagaggggtccacccggaagagccggactgccgggttcagacggcgctcccggaccccctggaacaagtttgatgctcccctttaggttcggcagcgggggtggcgataagggcccagtggttgctgcacaggaggcccaagcacaggccatcctacaacaagcgcgacttgcgttgagaggcccacctggacctatggggtacactggtagacccggaccactggggcagcctggttcccctgggttgaagggtgagtctggggatttggggcctcagggcccacgcggacctcaggggctgaccggcccacctgggaaggccggtaggcggggaagggctggggctgacggcgctcgaggaatgcctggggatccaggcgtgaagggcgaccgaggttttgacgggttgcccggactgcctggcgagaagggtcaccggggtgataccggagcgcagggcctgccaggaccgcctggcgaagacggcgagaggggtgacgatggagaaattggccctagaggacttccaggtgaaagcggccctcgcggtctgctaggcccaaaggggccacccggaataccaggtccccctggcgtccgtggcatggatggaccgcaagggcctaaaggctccctcggacctcagggcgagcccggtcctcctggtcagcaggggacgcctggcacacagggactaccaggacctcagggggcaatcggcccacacggagagaaggggccacaggggaaacctggacttcctgggatgcctgggtccgatggccctcctggacacccgggtaaagaaggcccaccaggaaccaaaggcaaccagggccctagtggtcctcaggggcctttgggctatccaggccctcgcggagtaaaaggggtggatggcatccgcggactgaaaggacataaaggcgaaaaaggcgaggatgggttccccggatttaaaggggatattggggttaaaggcgacaggggggaggtgggcgttcctggctctcgcggagaggatggacctgaagggccaaagggcagaactggaccgaccggcgatcccggaccgcctggactgatgggtgagaaaggcaagctgggggtgccagggctgccgggataccccggaagacaggggcctaagggctctctcggtttcccaggcttccctggtgcctccggcgaaaagggtgccaggggactgtcaggaaagagcggtccgaggggcgagagggggccaaccggaccacgaggtcagcgcggaccacggggtgcaaccggaaaaagcggcgcaaaaggcacctccggtggcgacggcccacacggccctcctggcgagagaggactgcctgggcctcaaggcccaaatggatttcctgggccaaaagggcctctggggcctcccggtaaggacggactgcccggtcacccgggtcagcgcggagaagtcgggttccaggggaaaactggaccaccaggcccaccaggcgtagtaggacctcaaggcgctgcgggagagacaggacccatgggcgagcggggacaccccggaccccctgggcctccaggagagcaaggactgcctggcactgctggaaaggaaggtaccaaaggagatcctggacctccaggtgcaccgggaaaagatggtcccgcaggactgcgtggttttcctggcgagcgaggcttgccaggaactgcaggtggccctggcttgaagggtaatgaaggacccagtggccctccgggacccgctggaagtcccggagaaaggggcgctgcagggagcgggggaccgattgggcctcccggacggccaggaccccaggggccaccaggcgctgccggagaaaagggtgtaccaggcgaaaagggcccaatcggtcctactggtagagatggggttcaggggcctgtggggttacccggtcctgctggaccacctggagtcgcaggtgaagatggggacaagggagaagtgggggaccctggacagaagggcacgaaaggaaacaaaggcgaacatggccctcccggtccaccaggaccaatcggtccggtggggcaacccggtgcagcaggcgcagacggggagcctggggctagaggtccgcaaggacacttcggtgccaagggagacgaaggtacgcggggattcaacggtcccccagggcctataggcctgcaggggctgcccggacccagtggggaaaagggagagactggcgatgtggggcctatgggaccgcctggcccacccggtcctcgtggaccagcaggcccaaacggggctgacggaccgcaaggaccccctgggggtgtcggcaacctgggcccaccaggagagaaaggagagcccggtgagtctggatctccgggaatccagggtgagccaggggtcaaagggccacggggagaacgcggagagaaaggcgagagcggacaacctggggagccgggacctcctgggccaaagggtcccaccggagatgacggtcctaaaggcaatcccggacccgttggcttccctggagatccaggaccaccaggtgaggggggacccagggggcaagatggagccaagggagaccgcggtgaagatggtgagccagggcaacccggaagccctggacccactggcgagaacggccctccgggaccattggggaaacgaggccctgccggtagtccaggctccgaaggacgccagggtgggaagggcgcaaagggcgaccccggtgcaatcggagcaccaggcaaaactggtccagtgggacctgcaggacctgcaggcaaacccggtcccgatggccttagaggcctccctggcagcgtgggccagcagggcagaccaggggctacaggtcaggcaggcccacccggtcctgttggtcctcccggattgccgggactgaggggggacgctggcgctaaaggggagaaaggccatcctggattgattgggctgatcggccctccgggagaacagggcgagaagggagacagaggtctgcccggtccccagggcagccccggacagaagggagaaatgggaattcctggcgcttccgggccaatcggcccaggcggtccaccaggtttgccgggaccagctggaccaaaaggggcaaagggtgcgaccggaccagggggtccaaagggcgaaaaaggcgttcagggccctcctggccatccaggaccacctggagaagttatccagcctctgccgatccaaatgccgaagaaaactcgcagatctgtcgacgggtcgagactaatgcaggaggacgaggcaattcccacaggcggagcgccaggtagtccagggggtctagaagaaatcttcgggtctctggatagcctgagggaggaaattgagcaaatgaggagaccaactgggacccaggattcacccgctaggacttgtcaggatctgaagctgtgccatccggagctgcccgatggcgaatactgggtcgatcctaatcaggggtgcgctcgggacgcttttcgggtcttctgtaactttaccgcgggaggcgagacttgtgttacgccacgtgatgacgtcacgcaattcagttacgtggatagtgaaggaagccctgtcggagttgtgcagctaacatttttgcgtctgctgagcgtatccgctcatcaagatgtgtcctatccctgctccggtgcggctcgcgatggacccctgagactccgtggggctaacgaagacgagctgagtcccgagacgtcaccatatgtgaaggaattccgtgacggatgccagacacagcaggggagaacagttctggaggttcggaccccagtgttggagcagctgccggttctggatgcctccttctctgatttaggcgctcccccacggagggggggagttctcttgggcccagtttgcttcatgggctag

SEQ ID NO: 232762 - DNA, 4968 bp, Artificial Sequence
  derived and/or modified sequence
atggagcgctgcagccggtgccaccggttactgttgctgctgccgcttgtgctggggctctcggcggcacccggttgggccggagctccacccgtggatgtgctgcgggctctccgcttcccctcattgccagatggggtgaggagagccaagggaatctgcccggcagatgtcgcatatcgtgtggcacgaccagctcagttgagcgccccaacaagacagctttttccaggtgggttcccaaaggatttttccctcctcactgttgtgcgtactcggccagggcttcaggccccactcctgactctttattctgctcaaggcgtacgccaacttgggctggaacttggaaggcccgttcgttttctgtacgaggatcaaacagggaggccccagcctccttcccagcctgtgtttagaggtctctcactggccgatggaaagtggcatagagtggctgtcgccgtcaagggccagtcagttacgctgattgtggattgtaaaaagcgggtcacgcgccctctgccccgaagcgcaagacccgtcctagacactcatggggtaattatctttggggcaagaatcctggacgaggaggtttttgagggggacgttcaagagctggcaattgtgccaggcgttcaggccgcatacgagtcatgtgagcagaaggaactcgaatgcgaaggaggccagcgagagaggccgcagaaccaacagccacatcgggcacaaaggtcacctcagcaacaaccttctcgactgcacaggcctcaaaaccaggagccccagagtcagccaactgaatccctctactacgactataagcctccgtactacgatgtgatgacgaccggaacaacgcccgattaccaagcggctcacggtccaaggggcctaaaaggggagaagggagagcctgctgtgttggagcccggaatgctagtcgagggacctcctggaccagaaggcccagccggacttattggcccacccggtattcaggggaatccgggaccggtcggagaccccggagagcgtggacccccaggaagagcagggctcccagggagcgacggggctccaggccctcccggaacgagcctcatgctgcccttccgcttcggcagtggaggcggagacaaggggcctgtggtggccgcacaggaagcccaggcgcaggctatccttcagcaggctagactggcactgaggggcccaccgggaccaatgggatacactgggagacctggccctctcggccagccagggtctcccggactgaagggcgagtcaggggacctcggccctcagggtcccaggggccctcaaggtcttaccggaccgccagggaaagccggacgaaggggcagggctggagccgacggggcacgcggtatgccgggagatcccggagtaaagggcgaccggggatttgacgggctgccagggctgcctggagagaaaggccataggggggacaccggcgctcaaggactgcctgggcctcccggagaggacggtgaacgaggcgacgatggggagattggcccacgcggtcttcccggagaaagcggacccaggggattgcttgggccaaaagggcctcctggaatccccggaccaccaggagtgcggggtatggacggccctcagggcccaaaaggttctctaggacctcagggggagcccggaccccctgggcaacagggaacccctgggacccagggactgcccggtccccaaggcgcaatcggcccacacggagagaaggggcctcagggcaagcctggactgccgggaatgcccggttcagacggcccaccgggtcaccctggtaaggaggggccacccggaacaaaagggaatcaggggccttctgggccacaaggcccactaggttatcccggaccgaggggtgtcaagggagtagacggtataagaggacttaagggacataagggcgaaaaaggtgaagacggttttcccggttttaaaggcgatattggcgtcaaaggagaccgtggcgaagtcggtgtcccgggttctaggggcgaggacgggcctgagggacccaagggaaggactggacctaccggagatcctgggcctcccggtctgatgggtgagaaaggtaagctgggcgtgccgggactccccggttaccccggtcgccagggcccaaagggctctttgggattccccggattccccggtgccagcggggagaagggcgctcggggacttagtggtaaatctgggccacggggtgagcgcggacctacaggccctagaggccagcgcggtccaaggggagcaactggcaaatctggcgcaaaagggaccagcggtggagacgggccacacggcccaccaggcgaaagagggctcccgggtccacaggggccaaacgggtttccaggaccgaagggccctccaggaccacctggaaaggacgggttgcctggacacccagggcaacggggagaagtgggatttcagggaaagaccggtccccctggccctccaggcgttgttggaccacaaggcgcagcaggagaaactgggccaatgggcgaaagaggccaccctggcccaccaggccctcctggcgagcagggcttgcccggaacagctggtaaggaaggcaccaaaggagaccctggcccaccaggcgcacccggtaaggatggaccagcgggactgcgcggtttcccaggcgagaggggcctgccaggaacagcagggggtcccggtttgaagggaaacgaagggccatctggcccacctgggcctgcgggttcccccggtgagaggggagccgcaggctccggcggacctatcgggcctcccggaagaccgggtccgcagggcccaccgggagctgcaggcgagaagggcgtgccgggagaaaaaggccctattggcccaactggcagagatggcgtccaaggaccggtgggacttccaggccctgccggtccccctggtgtggcaggggaggacggggataagggagaagtgggggatcctgggcagaagggcactaagggtaacaagggcgaacacggccctcctggccctcctggccctattggtccggtcggtcaacccggtgccgctggcgctgatggcgagcctggggctagaggtccgcagggacatttcggcgcaaagggagatgagggcacccgcggatttaacggtccgcctgggccaatcggcctccaagggttgcctgggccaagtggcgaaaagggagagaccggggatgtgggacccatgggcccaccagggcctcctggaccaagaggtcctgccggacccaacggggcagatggccctcaggggcctccaggcggagttgggaacctgggtccaccaggcgagaaaggcgaaccaggcgaatcggggagtcctggtatccagggcgagcccggtgtaaaagggcctcggggtgagaggggagagaagggggagtcagggcagccgggtgagcctggccctcccggacccaaggggcctactggtgacgacggtcccaagggtaatcccggtcccgtaggattccccggagaccctggcccaccaggagaagggggaccgagaggccaggacggagcaaagggggaccgcggtgaggacggcgagccgggacagcccggatcacctggccctaccggggaaaatggccctccaggccctctgggaaagcgaggtccagcaggcagccccggaagtgaaggtaggcagggaggcaaaggggctaaaggcgatccaggggcaatcggcgctcctggcaaaacgggcccagtcggcccagcaggaccagcagggaagcctggtcccgacggattgcgcggtctgcccggaagtgtgggccagcagggtaggcccggagcaacaggacaagcgggacccccaggcccagtgggacccccaggcctacccggtctgaggggggatgccggagccaagggcgaaaagggccaccctggcctgatcggcctcatcggtccaccaggggaacaaggcgaaaaaggcgacaggggccttcccggaccccaggggagccccggacagaagggcgaaatggggattccgggagctagcggacctattggcccaggaggcccaccagggctccctggacccgctggacctaagggcgcaaagggggcaaccggtcctggcggacccaagggcgagaaaggcgtgcagggcccacctggtcatccaggcccacccggtgaggtgatacagcccctgccaatacagatgcctaaaaagactcgacggtctgtagatggatcccggctgatgcaggaagacgaggcaatcccgaccggtggcgctccaggatctcccggtggactggaggaaatcttcggatccctggatagtctccgggaggagatcgagcaaatgcggcgacctaccggaactcaagactccccggctcgcacgtgtcaggatttgaagttgtgccaccctgaactccctgatggcgagtactgggtagaccccaaccagggatgcgcccgtgacgcattcagggtattctgtaattttactgccggaggcgaaacatgcgtgactccacgagacgatgtcacacagttcagctacgtcgattccgagggctcccctgtaggcgtggtgcagctgacattccttaggctcctctcagtgtcagcacaccaggacgtcagctacccttgctcaggcgcagccagagacgggccattacgacttagaggggctaacgaggatgagctttccccggaaacaagcccgtatgtgaaggagttcagagatggatgtcaaacacagcaggggaggacagtactggaagttaggacacctgtgttggaacaactgccggtcctggatgcttcattctccgatctgggcgctccaccaagaaggggaggcgtgctgctcgggccagtgtgttttatgggatag

SEQ ID NO: 232763 - DNA, 5030 bp, Artificial Sequence
  derived and/or modified sequence
atggaacggtgctccaggtgtcacaggttgctgttgctgctgcctcttgtcttggggttaagtgccgcaccgggatgggcgggagctcctcccgtggacgtcctgagggcactgaggtttcccagcctgcctgatggagtgcgacgcgctaaggggatctgcccagctgatgtagcgtatagggttgccaggcctgcacagctatctgccccaactcggcaactctttcctgggggatttccaaaagatttctctctcctcactgttgtgcggactaggcctggtctccaggccccactcctcactttgtattctgcccagggcgttcggcaactgggacttgagctggggcctcccgttcgtttcttgtatgaagatcagaccggcagaccacagccaccctctcaacccgtgtttaggggactgtccctagccgacggcaaatggcatagagtagccgttgccgtaaaggggcaaagcgtgacattaattgtggattgcaagaagcgggtcactagacccttaccccgtagcgccagacctgtgctggatacgcacggagtgattatatttggcgcaagaatactggacgaggaagtcttcgagggcgatgtgcaagagctagcaattgtgccaggcgttcaagccgcatatgaatcctgtgagcagaaggaattggagtgcgaaggcggtcagagggagagaccccaaaaccaacagccacacagggcacaacgcagtccccagcagcagcccagtagacttcacaggcctcagaaccaggaaccacaatcacaacccacagaaagtctgtactacgactacaagcctccctattacgacgtcatgaccacaggtacaaccccagactaccaagaccccacgccaggggaagaagaggagatactggaatctagtttgttaccaccactggaggaggctgcacacggaccacgaggacttaaaggggagaagggggagcctgctgtattagagccaggtatgctggttgaagggccaccaggcccagagggcccagctggactaatcggcccaccgggaatccagggaaatcctggacctgtaggtgatccaggggaaaggggcccaccgggaagagccggactccccggtagtgatggggctccaggcccaccagggacctccctgatgctgccctttaggttcggatccggtgggggtgacaagggccctgtggtcgccgcacaggaagcccaggcacaagcaatcctccagcaggcgcgtttggccctgcgcggacctcccggtccgatgggctataccggaaggcctgggccactcggccaacccggttcaccaggcctgaaaggtgagtccggcgaccttgggccacaagggcctaggggccctcagggcctgactggtcctcctgggaaagccggtaggaggggcagggccggtgccgatggagccagagggatgccaggggatccaggggtgaagggggacaggggctttgacggcctgccgggactgccgggtgaaaagggccatcgaggcgacactggagcacaaggactgccaggccctcctggagaagatggagagaggggggacgacggggaaattggccctcgaggcctgcctggcgagtcaggtcctagaggtcttctgggccctaagggccctccaggaatcccgggacctccgggagtcagaggcatggatggtccccagggcccaaaaggatcactgggccctcagggtgagcctggaccgccaggacaacagggcaccccaggtacccagggcttgcctgggccacagggcgctatcggccctcatggcgaaaagggccctcagggaaagcccggtctccccggaatgcctggttccgatgggccaccgggacatcctggcaaggagggaccccctggcaccaagggcaaccaaggacccagtggaccgcaagggcctctgggatacccgggaccacggggtgtaaaaggcgtcgatggtataaggggactgaagggacataaaggagagaaaggagaagatggcttcccaggcttcaagggagacatcggggtcaaaggggaccgaggtgaggtcggagtgccaggaagccgcggagaggatggtccagaaggccctaaggggagaactggacctactggcgatccagggccacccggactgatgggcgagaagggcaagctgggagtaccagggctgcccggatacccaggccgacagggtcccaagggaagcctgggttttcctggattccccggtgcctcgggggagaaaggcgcacgcggactgagtgggaaatccggccctaggggagagagaggacccactggacctagggggcaaagaggccctcgaggggctacagggaagagcggcgcaaaaggcacatccggcggagacgggccacacgggccacccggagaacggggtttgcccggtccacagggcccaaacggattccctggtcccaagggccctccagggccacctggcaaagatgggctgcccggacatcccggacagaggggcgaggttggctttcaagggaagactgggcctcccggaccccctggcgttgtgggccctcagggtgccgcaggtgaaaccggtcccatgggtgagcgaggccatcctggccctcccggacctcctggcgagcaaggcctacccggaaccgctgggaaagaaggaactaaaggagaccccggtcccccaggcgctccaggcaaagacggcccagcgggtctgaggggcttccctggggagcgcggactacccggaactgcaggcggtcctggcctgaaaggcaacgagggccctagcggccctcccggacccgctggttctcccggtgagcgaggcgcagctgggagcggagggccaatagggccacctggaagacctggaccccagggcccacccggtgcagccggtgaaaagggtgtgccaggcgagaagggacctatcgggcctactgggagggatggcgttcagggcccagttggcctgcccggtccggcaggaccacctggggtggccggagaggacggtgataagggagaggtcggcgatccagggcagaaaggaaccaaaggcaacaaaggcgagcatgggcctcctggcccacccggacccataggacccgtcggacagcctggtgccgcaggggcagacggcgagcccggagccagagggcctcagggccacttcggagctaaaggagatgaaggaactcgtggcttcaatggccctcctggacccataggtcttcagggacttcctggaccttccggcgagaaaggggagactggagatgtcggtcctatggggccaccaggccctccaggcccaagaggtcccgcaggacccaatggcgctgacgggccacagggcccaccaggcggtgttggtaaccttggcccaccaggcgagaaaggcgagcccggtgagagtggaagccctggcattcagggcgaacccggagtcaaaggcccaagaggagagcgaggtgagaagggcgagagcggacaacctggcgagcccggaccacccggtccaaaaggccctacaggtgacgacggacctaagggaaaccctggccctgtaggctttccaggcgatcccggtcccccaggcgaggggggtccaaggggccaagacggcgctaaaggggatagaggagaagatggagaacctgggcagcccggaagtcccggacccacgggagagaacggccctcctgggccacttggaaagcgcggtcccgcaggaagccccggtagcgaaggaaggcaggggggaaaaggagctaaaggagacccgggtgcaatcggtgccccagggaaaacaggacccgtgggtccagccggacccgctggtaaacccggaccagacgggctgcgaggactaccgggatctgtggggcagcaggggcgtccaggggctacaggtcaggccggaccacccggacccgtgggcccaccgggacttccgggactgcgaggcgatgccggagctaagggcgagaagggtcaccctggactaataggacttatcggccctcccggagagcagggggagaagggtgatcggggactgcccggaccgcagggaagtcctgggcagaagggcgagatgggcattcccggagcaagcgggcctattgggccaggcggtccgccaggactgcccggaccagccggtcccaagggcgctaaaggagcaaccggccctggcggaccaaagggagaaaaaggagttcaagggcctcctggccatccagggcctcctggcgaagtaatccagccactgcctattcagatgccaaaaaagactagaagatctgttgatggaagccgtctgatgcaggaggacgaagctattccaaccgggggtgccccaggctctcctggcggactggaagagatctttggaagcctggactcactgcgcgaggagatcgaacagatgagacggcctacaggaacccaggactcaccagcaagaacatgccaggacctcaagttgtgccaccctgagcttccagacggagagtattgggtggatccaaaccaaggatgtgccagggatgcttttcgagtgttctgtaacttcacagcaggcggagagacctgcgtcacccctcgagacgacgtaactcaattttcatacgtggactcagagggaagtccagtgggggtggttcaacttaccttcctgcggctcttgtccgtctctgcccaccaggatgtctcttacccctgttccggcgctgcacgagacggccctcttaggttaaggggagctaatgaagacgaattgtctcccgaaacgagtccctacgtgaaagaattcagggacggttgtcaaacacaacaggggcgaacagtgctcgaagttcggactcccgtgcttgagcagctgcctgtgcttgacgcatctttctccgatctgggggctcccccacggagaggcggagtgctactgggtccagtatgttttatggggta

SEQ ID NO: 232764 - DNA, 5031 bp, Artificial Sequence
  derived and/or modified sequence
atggaacgttgtagccgttgccatcggctgctcctgttgctgcctttggtgctggggctatcagctgcccctggatgggccggagcccctcccgtcgatgtactaagagcactgaggttcccgagtttgccggatggcgttcgacgagcaaaggggatttgtcccgcagacgtggcttaccgtgtggccaggccggctcagctctccgccccaacccggcagttgtttcctggaggattcccgaaagacttttctttattaactgttgtccggacaaggcctgggttgcaggcaccactcttgaccctctactctgcgcagggtgtgcggcagctgggactcgaactgggacgtccagtgaggtttctgtacgaagatcagactggtcgacctcagcctccttctcagccggtgttcagagggctgtccctcgccgatgggaagtggcaccgcgtggcagtggccgtgaagggccagtctgtgacgctaattgtcgactgtaaaaagagagtcacacggccactgcctcgctccgctcggcctgttctggatacacacggtgtgataatctttggcgctcggattctggatgaagaggtctttgagggggacgtgcaggaattggcaatagtgcccggagtgcaggcggcatacgagtcctgtgaacagaaagaactggaatgtgaaggcggacagagagagcgccctcagaatcaacagccccaccgtgcccagagatcacctcagcagcagccatcaaggctccatcggccacagaaccaggagcctcagagtcaacccacagagagcctatactatgactacaaaccgccatactacgacgtgatgactaccggtacaactcccgattatcaggatcctacacctggggaggaggaggagatactcgagtcctccctgctgcccccactggaagaagccgctcacggtccgcgtggccttaagggagaaaagggcgagccggctgtgctagaaccaggcatgctcgtcgagggcccacccggtcccgaagggcctgctggactgatcggtccacccggtatacagggcaaccccggaccggtcggggacccaggcgagcgaggcccacccggtcgggctggccttcccggaagtgacggggctcctggacctcctgggacatcattgatgttgccatttcgcttcggatcagggggtggcgataaaggtcccgtcgtggctgcacaggaagcccaggctcaggcaatcctccagcaagccagactggctctacgtggtcctccagggccaatgggatacactggtaggcccggaccactcggtcaacctggaagcccaggacttaaaggggagtctggcgatctgggcccacaggggcctcgtggaccccagggactgaccggtcccccagggaaagccggacggaggggccgagcaggcgcagacggagcaagagggatgcctggagatcctggggtgaagggcgatcggggatttgacgggttgccagggttacccggtgaaaaaggccatcggggtgacaccggcgctcagggcctgcctggtccgccaggggaggacggcgaacgaggagatgacggtgagataggtcctagggggcttccgggtgagtccggcccaagggggctgctcggccctaaagggccaccaggtatacccggtccccctggagtgcggggaatggatggtccacagggtcctaagggatccctgggacctcagggggagcccggacctccgggtcagcaaggcacccccggaactcaggggctgcctggaccacagggagctataggtccgcacggggaaaagggcccacagggaaagcccggtctacctggaatgcctggatccgatggaccacccggacatcccggaaaggaaggaccacccggaactaaggggaatcagggcccatccggcccacagggccctctgggataccctggcccaagaggagttaagggtgtcgacggaatacggggactgaagggccataagggtgagaagggggaggacggcttcccaggcttcaaaggggatataggcgtaaagggtgaccgaggcgaggtcggagtgcccggtagtaggggtgaagacgggcctgagggcccaaaaggaaggactggtccaactggcgaccccggaccacctggactgatgggagaaaaaggcaagcttggggttccgggtttgcccggatatcctggtaggcagggccctaaagggtctctaggattccccggttttcctggagccagcggcgagaagggagctagaggactgagcggcaagagcgggcctaggggcgagagaggtccgacaggacctcggggacagagaggtcccagaggcgctaccgggaaaagcggtgccaagggcacttcgggaggagatggcccacacggacccccaggagaacgaggcctcccaggaccccagggcccaaacggatttccaggtcctaaggggcctcccggacccccaggcaaagatggtctgcccggacatcccggtcagaggggggaggtcggcttccagggaaagaccggacctccaggaccaccgggtgtggtcggaccccagggagctgctggagaaacaggaccaatgggggagcgcggacacccgggtcccccaggaccccctggggaacaggggctccctggcacagccggaaaggaaggcactaagggcgaccccggtccgccaggggctcctgggaaggatggaccagccggtctgcggggtttcccaggtgagagggggttgccagggacagcaggcggtcccggattaaagggtaatgaggggccatccggtcctccaggaccggctgggtctcccggagaacgcggtgctgccggttccggtggtccgatcggaccacccggacgcccaggtcctcaagggcctccaggggcagccggagagaagggagtgccaggagagaaagggcctatcgggcctactggccgagacggggtccagggtcccgtgggcctccccggaccagcgggtccccctggagtggctggggaagatggggataaaggcgaggttggggacccaggtcagaaagggacgaaagggaataagggggagcatggaccccctgggccacctggacccattggccctgtcggccaacccggagccgcaggagcagacggtgaacccggagcacggggacctcagggccattttggtgccaaaggggatgaaggaactcgcggttttaacggtccgcctggtcccatcgggctccagggtctgccgggtcccagcggggaaaagggagagacaggagatgtggggcctatgggtccaccaggaccaccagggccaagaggacccgcaggaccaaatggtgctgatggtccccagggtccaccaggcggtgtcgggaatctgggaccacccggagaaaaaggtgaacctggggagtctggcagccccggaatacagggagagccgggtgtgaagggaccacggggtgagcgtggtgagaaaggtgagagcggccagcctggggagccaggaccgcctggccctaaagggccaacaggcgacgacggacctaagggaaacccaggacccgtgggattcccaggggacccagggcctccgggagagggcggtcctcgcggacaggatggagcgaaaggtgacagaggggaggacggcgaacccggtcaacctgggtctccaggtccgacaggcgagaatggacctccaggcccattggggaaacgcggaccggctggatcacccggaagcgagggtagacagggcggtaaaggggcaaaaggcgacccaggggcaattggcgcaccaggcaaaaccggccctgtcggacccgctggacctgcaggcaagccaggcccagacggcctcagggggctgcctggatccgtgggacaacagggtagaccgggagccacaggacaggctggccctcccggacccgtgggtcccccaggcctgcccggattaaggggtgatgctggcgcaaagggtgaaaaggggcaccccggtcttatcggcctgataggccctcccggagaacagggggagaagggagaccggggactccccggtcctcaggggtcacccggacagaagggggagatgggtatccccggtgcttccgggccaatcgggccaggaggaccgcctgggttgccgggtccagcaggacctaaaggggcaaagggagcaaccggtcccggtggccctaagggagagaaaggggtgcagggacctcctggtcatcctgggccacccggagaggttatccagccactgcccatccagatgcccaaaaagacacgtcgctcggtagatggatcccgcctgatgcaagaggatgaggctattccgacagggggtgcgcctggctcaccgggagggctagaagagatcttcggctcactggactcgcttagagaggaaatcgaacaaatgaggagaccaaccggcacacaggacagtcctgccaggacatgccaggaccttaagctgtgtcacccagagctacctgatggagagtactgggttgacccaaaccaagggtgcgcccgtgatgcctttcgcgtcttctgcaatttcactgccggtggagagacatgcgtcacccccagggatgacgttacacagttctcctacgtggatagtgagggctctcctgtgggtgtcgtgcagctgacttttttacggttgctctccgttagtgcccaccaggatgtatcttacccatgttccggggctgctagggacgggcctctccggctcagaggcgctaatgaggatgaattatcccccgagaccagcccctatgtgaaggagtttcgcgacggttgtcagacccagcagggtcgaacagtgcttgaagtgaggacaccagtgcttgaacaactgcctgtgctcgacgcttctttcagtgatctgggagctccacccagaaggggcggtgttctactgggtcccgtttgtttcatgggatac

SEQ ID NO: 232765 - DNA, 5031 bp, Artificial Sequence
  derived and/or modified sequence
atggagcggtgctcacggtgccatcggctcttactcctccttcccctagtcctggggctgtcagcagcccctgggtgggctggcgcaccaccggtagacgtactgcgggcactgaggtttccatctctccctgatggggtaaggagagccaaggggatatgtccagccgacgtggcctacagggtggccagacccgctcagctttccgcccctacacggcagctgttccccggtggctttcctaaagacttcagcctgctcacggtggtgagaactcgccctggccttcaggccccacttctcaccctgtacagcgcccagggtgtcaggcaactcggtctggagctcggccgaccagtgcgcttcttatatgaggatcagactggcagacctcagccacccagtcaaccagtgtttcgagggctttcactcgctgatggtaaatggcacagggtagcagtagctgtgaagggacaatccgtgactcttattgtggactgcaagaaacgtgtaacccgccctcttcctcgttcagcccgacccgtcctcgatactcacggggttatcatttttggagcaagaatcctggatgaggaggtgttcgaaggcgacgtgcaagagctggccattgtgccaggcgtccaggctgcctatgaatcttgcgaacagaaggagctagaatgcgaaggcggacagcgagaaagaccccaaaatcagcagccacaccgagctcaacggtcacctcagcaacaaccttcccgactccatcggcctcagaaccaggagccccagagtcaaccaacagaaagtctctattacgactacgaacctccatattacgatgttatgaccaccggcactacaccagattatcaagacccaacccccggagaagaagaagagatcctcgagtcgagcctgttgcctccactcgaggaagcagcacatggtcccaggggcttgaaaggagagaagggagagcctgccgttctagagccaggcatgctggtggagggccctcccggtccagagggcccagctggcttgatcggccctcctggaattcagggtaatcccggacctgtgggcgatccgggtgagagaggccctcccggacgagcgggactcccaggcagcgatggagccccaggccctcctggaacgtcactcatgctgccattccgcttcggtagtggtggaggggacaagggtcctgttgtggccgctcaagaggcacaagctcaggctatactgcagcaggcccgacttgcactcagaggacctcccggacctatgggatacacaggacggccaggcccactgggacagcccggaagtccgggactcaaaggtgagtctggggaccttgggccacaaggccctagagggcctcaaggtctaacaggccctccaggtaaggctggacggagaggtcgcgctggcgcagatggcgctcgtggaatgcctggggaccctggcgttaagggcgaccgagggttcgacggcttgcctggtctgccaggagaaaaaggccaccgtggcgatacgggtgcacaaggcttacccggtcccccaggcgaggacggagaacgcggtgacgatggggagatagggccacgcggactgcccggtgagagcggcccacggggattactggggccaaaaggccctcctggaatcccaggaccaccaggcgtgagagggatggacggcccacagggtcccaaaggctccctcggtccgcagggcgagcccggtccccctggacaacaaggaactccaggcacgcagggcctgccaggtcctcagggtgccatcgggcctcacggtgagaaagggcctcaagggaaaccaggcctgcccggaatgccagggtctgatggccctccgggacacccgggtaaagaagggcctcctggaaccaagggcaaccaggggccaagtgggcctcaggggcctttggggtatcctggcccaaggggcgtcaagggagtggacgggattcgcggactcaaagggcacaaaggggagaagggggaggacggtttccctggttttaagggcgatattggtgtcaaaggggaccgaggcgaggtcggggttccagggagccgaggagaagatggtcctgagggtccaaaaggcaggaccgggcctactggagacccaggacccccaggcctcatgggagaaaagggcaagctgggagtcccgggtttacctggctaccctggcagacagggccctaaaggctcactgggattcccaggcttccctggagctagcggcgaaaaaggtgccagaggcctgtcggggaagtctggaccaagaggggagcgaggtcctaccggtcccagaggacagcgcggtccaaggggcgctaccggaaagagtggagcgaagggaacctcaggaggcgacggtccacatggacccccaggggagcgcggacttccaggtccacaaggtccaaatggattccctggtccaaaaggcccacctgggcctccagggaaagatggcctacccggacatcccggacagcgaggggaagttgggttccagggcaagactggccctcccggacctcctggtgtggtgggtccccagggtgctgctggggaaaccggccctatgggagaacgcggacaccccggtcctcccggtccccctggcgagcaggggctgccaggcaccgcaggtaaagagggaacgaaaggcgacccagggcctccaggggcaccagggaaagacggccctgcaggcctgcgcggttttcccggagagcgcggattaccgggaacagccggagggccaggcctgaagggaaacgaagggccttccgggccacccggtccggcaggctcccctggcgaaagaggggcagccggaagcggcggtcccatcgggcctcctggacggcctggcccacaaggccctccaggcgcagctggggaaaaaggagtccccggagagaagggccctatcggaccgacggggagagatggtgtgcaaggcccagtggggctgcccggacctgccggacccccaggcgtggcaggcgaggatggggataaaggagaggtgggcgacccagggcagaagggcacgaagggcaataagggcgagcatgggccacctggtccccctggacccatagggccagtcggacaacctggggctgccggtgctgatggtgagcctggcgcaaggggaccacagggccactttggggctaaaggcgatgagggaacccggggatttaatggacctcccggacctatcggactccaaggccttccaggtcccagcggagagaaaggggagacaggagacgtcgggccaatgggtccacccggtccgccaggacctagagggccagcaggacctaatggggctgatggccctcaggggcctccaggaggagttggcaatttaggaccgcctggggaaaaaggtgagcccggtgagtcaggcagcccagggattcagggcgagcccggtgtgaaaggacctagaggagagaggggcgaaaaaggggagagcggccagcccggagaacccggtcccccaggccctaaggggccaaccggggatgatgggcctaagggaaacccaggacccgttggattccccggagatccaggtcctccaggtgaaggtggcccacggggacaggatggagcgaagggagatagaggcgaggacggtgagcccggacagccaggctcaccaggacccacaggggagaacggtcccccagggcctctgggtaagcgcggacccgctggaagcccaggaagcgagggcaggcaaggcggaaagggcgcaaaaggagaccctggcgctattggtgctcccggaaagacagggccagtggggccagccggacccgcaggaaaacccggtccagatggcttacgaggcctgccaggtagtgtcgggcaacagggaagacctggagcaacggggcaggcgggtcctcctgggcctgtgggcccacccggtttgcctggattgcgcggagatgcaggagctaaaggcgaaaaggggcaccctgggctcatcggcctgatcggcccacccggagaacaaggtgagaaaggtgatcggggattgccaggaccccagggctccccaggacagaagggggagatgggcatccctggtgcatccggtccaatcggtcccggtggcccaccagggttaccagggccagcaggcccaaagggggctaaaggcgcaaccggccctggcggtcccaagggcgagaagggagtgcagggcccacctggacatcctgggccacccggtgaggtgatacaacctctccctattcaaatgcccaagaaaacgagaaggtctgtggatgggtcccggctgatgcaggaggatgaagcaatcccaactggcggagcccctgggtcaccaggaggcctggaggagattttcggctcactagattctcttagggaagaaatagaacagatgcgcaggccaaccggcactcaagacagtccagcccgaacatgccaggatctgaagctttgccatcctgaattgcccgatggcgagtattgggtggaccccaatcagggctgcgcccgtgacgctttcagagtcttttgtaatttcaccgctgggggtgagacctgcgtcactcctcgcgacgatgtgacacagtttagttacgtggactccgaagggtcaccagtaggtgttgtccaactgacttttctgaggttgctcagcgttagtgctcaccaggatgtcagttacccttgttccggcgcagcacgcgatggaccgttgaggttgcgaggggctaatgaggacgaactttctccagaaacatctccatatgtgaaagagttccgcgacgggtgccagactcagcagggcagaactgtgctggaagtccgcacacccgtgctagagcagctgcccgtactcgacgcctccttctccgatctcggagctcccccacgtagaggaggggtgctgctcggacctgtttgtttcatgggctac

SEQ ID NO: 232766 - DNA, 5030 bp, Artificial Sequence
  derived and/or modified sequence
atggagagatgctcacggtgtcatcggctgctgttgctgctgccactggtccttggcctgagtgccgcaccaggctgggccggtgcccctcccgtcgatgtgttgcgagcactgcggttccccagtctgcccgacggtgtgcgcagggctaaggggatctgcccagcagacgtggcatatagagtggccagaccagcgcagctgtcagctcccacccgccagctatttcctggaggcttccccaaggactttagtcttttgactgtcgtgcgcactcggccagggcttcaggcccctctgttgacattgtacagcgcccagggagtccgtcaactgggacttgaacttgggcgacctgtgagatttctgtatgaagaccaaacagggagaccacagcccccatcacaacccgtcttccggggtctttcgcttgctgatggcaaatggcacagggttgccgtggctgtgaagggccaatccgttactcttatcgtggactgtaaaaagagagttactaggccgctgcccagatccgccaggcccgtactcgacacccatggagtcatcattttcggcgcacgaattcttgacgaagaggtatttgagggagacgtgcaggagctcgcgattgtgcctggtgtgcaagctgcctatgaaagctgcgagcagaaggagctcgaatgtgaagggggacaacgtgagcgtcctcagaaccagcagccacatcgggctcaacgatcaccccaacagcaaccttccaggttacatcggccacagaatcaggagcctcaatcacaaccgacagaatctttgtattatgattatgaaccgccatactatgatgtcatgaccacaggaaccacccctgactaccaggacccaactccaggagaggaggaagagatcctggaatcctccctgttacctcccttagaggaggctgcccacggccctcgtggccttaagggcgagaagggcgagcccgctgttttagagcctgggatgttagtggaggggcctcccggacccgaaggccctgctggcctgataggcccacctggcattcaaggaaaccctgggcctgttggtgaccccggagagaggggacctccgggtagagctggcctacccggatcagatggagctcctggtccgccagggactagcctcatgcttccttttcggtttggctccggtggtggcgataagggacccgtagtcgcggctcaggaggcacaagctcaagcgatcctgcagcaggccagactcgcgttgagggggcctccaggtcctatgggttacaccggcagacccggtcccctcggacaaccaggctcaccgggtctgaagggtgaaagcggagatctcggaccacaggggcctcgagggcctcagggtctaactggacccccaggaaaggcaggaagaagaggacgagccggtgccgatggcgcacggggaatgcccggtgatcccggagtgaagggcgatcggggtttcgacggcctgccagggttaccgggagaaaagggacaccgcggagataccggcgctcagggcctccctgggcctcctggtgaagacggcgagcgcggagacgatggggaaattggccctagaggcctgcctggtgaatctgggccaaggggactactggggccaaaggggcctccgggtatccccggaccccctggtgtcaggggcatggacggccctcaaggacccaaaggttcactagggcctcagggcgagcccggtccacctggtcagcaagggacccccggtactcagggcctcccaggcccacagggcgcaatcgggcctcatggagagaagggaccccagggcaaacccggtctccctggaatgccaggatcagatggcccacctgggcatccaggcaaggaaggtcccccaggaacgaaagggaatcaggggccttccggcccacaagggcctctcgggtatccaggccctaggggggtaaagggggtggatggtatccggggacttaaaggccataaaggcgagaaaggagaggacgggttcccaggatttaaaggggacatcggcgtgaaaggcgacagaggtgaagtcggtgtaccgggaagccggggagaggatgggccagagggacctaaggggaggactggacctactggggacccgggaccaccgggacttatgggcgaaaagggaaaactaggagtgcctggcctgccaggctatcctggcaggcagggccctaagggcagcctgggttttcctgggttcccaggagccagcggggaaaagggggctaggggtctgagcggcaaaagtgggccacgcggagagagaggcccaaccggacccagagggcagaggggtcctcgtggcgcaactgggaagagcggcgcaaaagggacatctggcggtgacggaccacatgggcctcccggtgaacgcggtctgccaggaccccagggccctaacggattccccggtccaaagggacctctgggtccaccaggcaaggacggtctgcccggacatccagggcagcgtggagaagtgggttttcagggcaaaaccgggcctccaggcccacccggtgtggttggcccacagggcgctgctggtgagactgggccaatgggcgaacgcggtcacccagggccacctggtccgcctggggaacagggtctgcccggaaccgctggcaaggaggggactaagggggatccaggcccacccggagccccaggtaaagatggccctgcagggctccgcggatttcctggggaaagaggactgcccggaaccgcaggcggacctggacttaaaggaaacgaaggcccatcgggcccacctggccctgcaggctcaccaggagaacggggagctgctggctctgggggacccatcggacccccaggaagacccggaccgcaaggccctcccggtgcagccggagaaaagggcgtgcccggagagaagggcccaatcgggccaaccggcagggatggggttcagggacccgtagggctgcccggacccgctggtcctccaggtgtggccggtgaagatggcgacaaaggcgaggtcggggaccccggacagaagggaacaaagggcaacaagggcgaacatgggcctccagggcctccaggccctatcggccctgtggggcagcctggcgcagccggagcagatggagagcctggggctcgcggtccacaaggccatttcggcgctaagggagacgaaggtactcgcggattcaacggcccacccggaccaatcggattacaaggacttcctggcccatcaggcgagaagggcgagacgggggatgtggggcctatgggaccaccagggccacctggtcctcgcggacctgctggacctaatggagctgacggccctcaagggccacccggaggcgtggggaaccttggccctcccggtgaaaagggcgaacctggtgagagtggatcccctgggatccagggggagcctggagtgaagggcccacgaggggagcggggtgaaaaaggcgagtccgggcagcccggtgagcccggaccgcctggacccaaaggcccaacgggggacgatggcccaaagggaaaccctggacccgtaggattcccaggagatcctgggcctcccggagaaggaggccctagaggacaggatggagccaagggggaccgcggagaggacggcgaacctggccagccaggaagccccggaccgactggagagaacggacctccaggcccattgggtaaaagaggtcctgccggttcacctggcagtgaaggtcgccaggggggtaagggtgctaagggcgaccccggagccatcggggctccagggaagaccgggccagtcggcccagcaggcccagcaggcaaacccggacccgatggcctaaggggtctgccgggatccgttgggcagcaggggaggccaggagctaccgggcaggccggaccccctggaccagtgggcccaccaggtcttccgggactgagaggcgacgccggagcaaagggcgagaaaggtcaccctgggttgatagggctcattggccctccaggcgagcaaggagagaaaggggacaggggactacccggtccgcagggctctcccggtcagaaaggagagatgggaattcccggtgcctcaggtccgatcgggcctggcggaccccctggacttcctggcccagccggtcccaagggcgcaaaaggggcaaccggccctggcggtccaaagggggagaaaggtgtgcaagggcctccgggtcatccgggacccccaggagaagtcattcagcctctgcctatccaaatgcctaaaaaaacacgcagaagtgtcgacggctctagattaatgcaggaggatgaggccatcccaaccggtggcgcacccggtagtccgggtggactggaagagatattcgggagtcttgacagcttgcgggaggaaattgaacagatgcgacgccctacaggcactcaggactcccctgctagaacatgtcaggacctgaaattatgccacccagagcttccggacggtgagtattgggtagatcctaaccagggatgcgccagggacgctttccgggtgttttgcaattttaccgccggaggggagacctgcgttaccccacgggacgatgtgacccagttttcttacgtagacagtgaaggcagccccgtcggggtggtgcagcttaccttcctgcggttgctttccgttagtgcacaccaggacgtgtcttacccttgcagcggcgctgcccgagacggcccactcaggctccgaggagctaacgaagatgagttgagtcccgagacctctccctatgtgaaggagttcagagacggatgccagacccagcagggcagaaccgtgctggaggtccgaacgcccgtcttggaacagcttcccgttcttgacgcatccttctccgacctgggagcaccacctaggagaggcggagttctactgggcccagtttgcttcatgggata

SEQ ID NO: 232767 - DNA, 4968 bp, Artificial Sequence
  derived and/or modified sequence
atggaaaggtgttctaggtgtcataggctactgttactgctccccctagtgctaggtctatctgcggctccgggatgggctggcgctccccctgtggatgtgttgcgggcattgcggtttccttctctgccagatggcgtgcgcagggccaagggtatctgccctgctgacgtggcctaccgcgttgcaagaccggctcagttgagcgcccctacacgacagttgttcccaggaggattccctaaggatttctcattgctcacggtggtgaggaccagacctgggctgcaggctccactgctgactctgtattcagcgcaaggggtgcgacagctggggctcgaactggggccaccagtgaggtttctttacgaagaccagactggcaggccgcagcccccaagccaaccagtattccgcggactctctcttgccgatggtaagtggcacagagttgctgtggcggtaaagggtcaatcggtcactctcatcgtagattgtaaaaagagagtcactcgtcctttgccccgatctgctaggcccgtgttggacacccatggagtaatcatcttcggagctcgcattctagacgaggaggtttttgagggagacgtccaagagctggcaatcgtacctggagtgcaggctgcatatgaatcatgcgagcagaaggagctggagtgtgaaggaggccagcgcgagcggcctcagaaccaacagccgcatagggcgcaacgaagcccccagcagcaacccagccgcctgcacaggcctcaaaatcaggaaccacagagccagcccaccgagtccttgtattacgactacaaaccaccctactacgatgtaatgactactggaacaactcctgactatcaggccgctcatgggcctcgtggcctgaagggggagaaaggggaaccagcagtgctggaacccggtatgctggtggagggtcctcctggcccagaaggacccgcaggactcattggacctccgggaatccagggaaaccctggcccagtgggagacccaggagagcggggacctccgggacgcgctggtctgcctggatccgatggagctcctggaccacctgggacttcactcatgttgccatttcgattcggcagcggagggggagataagggcccagtggtggccgctcaggaagcgcaggcacaggcaatcttgcagcaggctcggctggcgctcaggggacccccaggcccaatgggatacactggcaggccagggccattgggccagccgggatctcccggattgaaaggtgagagcggagatctggggcctcagggccctagaggcccacaaggcctaactgggcctcctgggaaagccggaagacggggtagagctggcgcagatggcgctagaggcatgccaggtgacccgggtgtgaagggcgaccggggtttcgacggcctaccaggacttcctggtgaaaaggggcacagaggcgatactggtgcccagggactgcccggacctcccggagaagatggtgaaagaggagatgatggagagatcgggccacggggtctcccaggtgagtctggccctcgaggcctcttaggccctaagggtcccccaggcattcccggaccaccaggggtgcgagggatggacgggccacagggtcccaagggttccctaggccctcagggcgaacccggtccacctggccaacaaggcactcccggtactcagggacttcctggacctcaaggcgcaatcggaccacacggtgagaaaggaccccagggaaagccaggactacctggtatgccaggatcagatggaccccctggccaccctgggaaagagggtccacctgggacgaaaggcaatcaaggtccttcaggcccacagggccctctggggtatcccggacccaggggagtgaaaggagtcgatggcatccgcggactgaaaggacataaaggggagaagggtgaggatggcttcccagggttcaagggcgatattggagtgaagggagacaggggagaggtcggtgtaccaggcagtaggggagaggacggtcccgaagggcctaaggggagaacgggacctacaggggaccccggaccgccagggttgatgggagaaaaaggaaaactcggcgtgcccggtcttcctggctatccaggtaggcagggtcctaagggttccctcggtttcccaggctttcctggtgcaagtggggaaaaaggagccagagggttatccgggaaaagtggccctaggggggagagaggacctaccggccctcgaggtcagaggggacctagaggggctacggggaagtccggggctaaaggtaccagtgggggtgacggaccccacggaccccctggagagcggggattgccagggcctcagggcccaaacggcttcccgggaccaaaggggcctcccggaccccctggcaaagatggcctccccggacacccaggccaacggggagaagtcggtttccagggcaaaacaggccctcccggaccgcctggcgttgtgggaccgcaaggcgcagccggagaaactggacctatgggcgaacggggtcaccctggaccgcctggccctccaggcgagcagggtttgcccggaacagccggaaaagagggaacaaaaggggaccctggacctccgggagctcccggtaaggacggacccgctggtctgcgcggtttccctggagagcgaggcttacccggtacagccggagggcctggccttaaaggtaatgagggtccatcagggcctcctggcccagccggtagtccgggagaaagaggcgctgccggtagcggaggtcccatcggaccaccaggccgaccgggtccccaaggaccaccaggtgccgcaggggagaagggcgtgcccggtgagaagggaccgatcggaccgactggccgagatggtgtgcagggtcccgtaggcttacctggtccagctggcccacctggtgtagcgggtgaggacggggataagggcgaggtcggagatcccggacaaaaaggtactaaaggtaacaagggagaacatgggccacctggaccgccaggccctataggaccagtgggtcagccgggagctgcaggggctgacggcgagcctggggctcggggaccccaagggcactttggcgcaaaaggggatgaaggtacccggggttttaatggaccccctggtcccattggtctgcagggcctgccaggcccttcgggtgagaaaggtgagaccggcgatgtggggcctatgggccctccaggaccgcctggcccaaggggtcccgctggaccaaatggggctgacggcccacagggtccacccggaggcgtaggaaacctgggaccccctggagaaaagggggaaccaggcgagtccggctctccaggcatacagggcgaaccgggagtgaagggacccaggggcgaacggggagagaagggagaatccggccagccaggagaaccaggtccacctggtcccaagggacccaccggagacgacggtcctaagggtaacccaggcccagtggggtttccaggcgatccagggcctcccggagaagggggacctcgcggtcaggacggggctaagggagaccggggagaggacggagagccaggccaacctggctcacccggtccgacgggagagaacggacctcctggtccattgggaaaacggggaccagctggaagccccggatcagaaggcaggcagggcggaaagggcgctaagggagatcccggtgctatcggcgctccgggtaaaacgggccctgtgggaccagcaggcccagctgggaagccgggacctgacggacttcgaggtcttccgggaagtgttggccagcaagggaggcccggagccactgggcaagccggtcctcccggacctgtggggccacctggcctgcccggactaaggggtgatgcgggtgctaagggcgagaaaggccacccagggctgataggcctcattggaccacccggagagcagggcgagaaaggtgaccgcggtctgcccggaccccagggctctcccggacaaaaaggggaaatgggcattccaggcgcttccgggcctatcggtccgggtggacctcccggacttccaggccctgctggtcctaaaggtgctaagggagcgactggtcctggtgggccaaagggggaaaagggcgtacagggtcctcccggacaccccggaccccctggagaggtgatacagcccctgcctatacagatgccgaaaaagacacgacgaagcgtcgacgggtcccgactgatgcaggaggatgaggctattccaactggtggagcccctggcagtcctggcggactggaagaaatctttggcagtctggattctcttcgggaggagattgaacagatgcggaggcctaccgggacgcaagattctccggctaggacgtgtcaggacttaaaactgtgtcatccggaattgcctgacggcgagtattgggtggatccaaaccaaggctgcgctcgcgacgccttcagagtcttttgcaactttacagcagggggtgaaacatgcgtgacacccagagacgatgtgactcagttcagttacgtcgatagcgagggctccccagtgggtgtagtgcaactcacgttcctgaggctgctgagtgtatccgcccaccaggacgtgtcctatccttgctccggcgcagccagggacgggccactgagactgaggggggctaatgaagacgaactgagcccagagacttcaccttatgtgaaagagtttcgcgatggctgccagacgcagcaagggaggactgtcctggaggtgcgcacacctgtccttgaacaactgcctgtattagacgcctctttcagcgacctcggggctccccctaggagaggaggggtgctgctcggcccagtctgcttcatggggtag

SEQ ID NO: 232768 - DNA, 4968 bp, Artificial Sequence
  derived and/or modified sequence
atggagcgctgttcccgctgccatcgactgcttcttctcttacctttagtcctggggctgtctgccgcacctggatgggccggagctccaccagtagacgtgctgcgcgcactgcgcttccccagcctgcctgacggggtgcgcagggccaagggaatatgcccagctgatgttgcctatcgcgttgctcgccctgcccaactctccgctccgactcggcaattgttcccaggaggtttcccaaaggattttagtcttttgacagtggtgagaaccagacccggtttgcaggctcccctactgacactttactctgcccagggggtaaggcagttgggcctcgaactggggcgaccagtcaggttcctgtatgaagaccagacaggtcggcctcagcctcccagccagcctgtgtttcggggattatctctggcagatggaaagtggcatcgggtcgccgtcgctgtgaagggtcaatcagtgacactcatcgtggattgcaagaagagggtgacaagacctcttcctagatctgccaggcccgtcctggacactcatggtgtaatcatctttggcgctcgcatactcgatgaagaagtgttcgaaggcgacgtccaggagctggccatcgtgccgggtgtgcaggcagcgtatgagtcgtgcgaacagaaggagttggagtgcgagggagggcagagagagcggcctcaaaaccagcagccccacagagcacagcgttctccacagcagcagccatcgagactgcatcgccctcagaaccaggaaccccagagccagcccactgagtcactgtactatgactacgaacctccatattacgacgtgatgacaaccggaactactcccgattatcaagcagcccacggccctagaggattgaagggcgaaaagggggagcccgctgtgcttgaacccggaatgctcgtcgagggcccacctgggcctgaaggccctgcgggacttatcggcccacctggtatccaggggaatcccggacccgtgggcgacccaggcgaaagagggcctccaggtagagccggtcttccgggttccgacggagcacccggaccaccgggtaccagcctcatgcttcctttccggtttggatccggcggtggtgataaagggcctgtggtcgcagcccaagaggcacaggcgcaagctatcctccagcaagctaggcttgctctaagaggccctcccggacctatgggctacactggtagaccagggcctctgggccagcctggctccccgggtcttaagggagaaagcggagacctgggtccacaggggccacggggaccccagggcctgacaggacccccaggcaaggcgggtagacgcggacgagctggcgcagacggcgctaggggaatgccaggagaccctggtgtgaagggcgacaggggtttcgatggtctgccgggactgccaggagagaaaggtcacagaggtgatacaggggcacaggggctgcccggtcctcccggagaggacggcgagcggggtgatgacggcgagatagggccacgaggacttccaggcgaaagcggacctagaggactgttgggacccaagggaccgcctggcatacctggccctccaggggtgagggggatggatgggccacaaggcccaaagggatccctggggccacaaggcgagcccggaccccctggccagcaggggacgcccggtacccaaggactccccggtccccagggtgccatcggaccccacggggagaagggaccccaagggaaaccaggactgcccggaatgccaggctctgacgggcctccaggccatccagggaaggagggaccgccaggaactaagggaaatcaggggcctagcggcccacagggtcctcttggatatcctgggccacggggtgtgaaaggggtcgacgggattcgtgggctgaaagggcataaaggagagaaaggcgaggacggatttcctggatttaagggcgacattggtgtgaaaggggatagaggggaggtcggagtgcctggctcgcggggagaagacggaccggagggccctaaaggtcgaacaggacctactggggatccgggaccacctggcctgatgggggagaagggaaagctgggcgttcctggccttcccggttaccccggtaggcagggaccaaagggtagcctgggttttccaggtttccctggggctagcggtgaaaagggtgctaggggcctgtctggcaagagcggtccgaggggagagagaggcccaactgggcctcgcggacagcgcggaccgagaggcgctacaggtaagtctggcgctaagggaacttccggtggcgacggtccacatggccctccaggtgagagaggcctgcccggaccacagggccctaacgggttcccgggtcctaaaggacccccaggacctcccggaaaggatggccttcccggacatcccggacagagaggagaagtaggctttcaggggaaaacaggaccaccaggccctccaggagtagttgggcctcagggtgccgcaggcgaaaccggaccgatgggagagaggggccaccccggtccgcctggacccccaggagagcagggcctgcctggcacggcgggaaaagagggtaccaaaggcgatccaggccctcccggtgcacctggaaaagacgggccagcagggctccggggattccctggggagcgtgggctcccaggcaccgcagggggaccgggacttaagggcaacgagggcccttccggaccccctggccctgcagggagccccggagaacgtggagctgcaggctccggcggtcctattgggccacccggtagacctggccctcagggccctccaggggctgctggtgagaaaggcgtcccaggtgagaagggtcctatcggaccgacaggacgggacggcgtccaggggccagtgggcctacccggacccgcaggtcctccgggagtggccggtgaagacggcgataaaggcgaagtgggtgacccgggtcagaagggtaccaagggcaacaaaggagaacacggcccacctggccctccaggccctattggccctgttggacagccaggggctgcaggggctgacggtgagcccggagccagaggccctcagggacactttggtgcaaagggcgacgaaggtacacgcggtttcaatggaccaccaggcccaatcggcttgcaaggattaccgggaccatccggtgaaaaaggggaaacaggagatgtggggccaatgggaccaccgggacctccgggacctcgaggtcccgctggtcccaacggagccgacgggccacaggggcctcccggtggggtcggcaatttggggcctcccggagagaaaggcgagcctggcgagtccggatcaccgggtattcagggagagcctggcgtaaagggccctaggggagagcggggagagaaaggcgagtcaggccagcccggtgaacccggacctcctggccctaaaggacccacaggagacgacgggccaaaaggcaaccctggccctgtgggattccccggagatccaggccctcccggtgagggcggtccacggggtcaggatggtgcaaaaggtgacagaggcgaggatggtgagcccggacagcccggtagtccaggccctacgggagaaaatgggccacctggacctctggggaaacgcggacctgccggttcccctggctctgagggcagacagggcggaaaaggtgccaaaggtgaccccggagcgataggggcaccaggtaaaaccggtcccgtaggccctgccggacccgcaggcaaacctgggccagacggactgcgcggtcttccaggttccgtcggacagcagggtcgacctggcgcaactggacaggccggtcccccaggcccagtgggaccccctgggctacccggtctcaggggcgatgcgggtgccaaaggggagaaaggtcatccagggctgatagggttgatcggacctcctggtgaacagggtgagaaaggggacaggggcctaccgggtccacagggtagtcccggtcagaaaggggagatggggatcccgggagcgtccgggcctattgggccaggaggaccaccgggtctgcccggtccagccggacccaagggagcaaaaggagctaccgggcctgggggtccaaaaggggagaaaggcgtgcagggacccccaggtcatcctggtccacccggtgaagttattcaacctctgcccattcagatgccgaagaaaacccgccgaagcgtcgatggttcacgactgatgcaagaggatgaagccattccaacagggggtgcccctgggagccctgggggtcttgaagagatctttggcagccttgactcactccgcgaagaaatcgagcaaatgcgaagacctactgggacacaagactccccagcgaggacatgccaggacctcaaattatgccatccggagctcccagatggagagtactgggtggatcctaatcaaggatgcgcaagggatgctttcagagttttttgcaacttcactgctgggggagagacctgcgtgactcctagagatgatgtcacccagttctcctatgtggatagtgagggttcacccgtcggagtggtacagttgacattcctgcgactattgagtgtgtcagcacaccaggatgtcagttacccatgttctggagccgctagagatgggcctctaaggctgagaggcgctaatgaagatgaattgagtccggaaacctccccatacgtgaaagaattcagagatgggtgtcagacgcaacagggacgcacagtactggaagtgaggacgcccgtattagagcagctgcccgtgttggacgcgtccttctccgatctcggagccccaccaaggaggggcggtgtgctactcggtcctgtgtgctttatgggatag

SEQ ID NO: 232769 - DNA, 5030 bp, Artificial Sequence
  derived and/or modified sequence
atggaaagatgcagcaggtgccatcggttgttgctgcttctgcccctggtgctgggcctcagcgctgcgccaggctgggccggtgcgcctccagttgacgtgctgcgcgctttgagatttccctctttaccagacggtgtgcgaagggcaaaggggatctgtcccgctgatgtggcctatagggtcgctaggcctgcgcagctgtctgctcctacccggcagttattcccgggtggctttcccaaagacttttcgctgctgacagttgtcaggacaagacccggactgcaggcccctttactgacattgtattcggcccagggagtgaggcagctggggctagaactagggcgtccagtccggttcctctacgaagaccagacagggcgacctcagccccctagtcaaccggtgttccgcggactctccctcgccgacggcaaatggcatcgggtggcagtggctgtcaaaggacaatcagtgacattgatcgtggactgcaaaaaaagagtcacacgtcccctccctcgaagtgccagaccagtcctggatactcacggggtgattatatttggcgcacgtatacttgacgaagaggtctttgagggggacgtgcaagaactggcaatcgttcctggggtgcaggccgcatacgagtcatgtgaacaaaaggaactggaatgcgaagggggacaacgcgagagaccccagaaccagcagcctcaccgggcacagagaagcccgcagcagcagccatccagactccaccgacctcagaaccaggagccgcagtcccagcctaccgaaagcctgtactatgattacaaacctccttactatgacgtcatgactaccgggactacccccgactatcaggaccctacacccggagaagaagaggagatcctggagtcatctctgttgcctccactagaggaagccgctcatggcccaaggggtctgaaaggggaaaaaggcgaaccagccgtgctcgaaccaggcatgctggttgaagggccacccggacccgagggacctgccggtcttattggccctcccggaatccagggcaaccctggacctgtaggagatcctggagaacgcggacccccaggaagagctggattaccagggagcgatggcgctccagggcctccagggaccagtttaatgctgccattccgcttcggcagtggagggggagacaaagggcctgtcgtggccgctcaagaggcccaggcccaggcaatcctccagcaagccaggctagccttgcgcggaccacctggcccaatggggtacaccgggagacctgggcctctgggccaaccaggctcacccggacttaagggcgaaagcggggacctgggcccacagggtccgcgaggcccacaaggtctgacagggcctcctggcaaggcgggtcgtcgcggtcgggcaggagccgacggcgctcgtggaatgcccggtgatcctggagtcaaaggcgatcggggattcgacgggctgccagggctgcccggtgaaaaggggcaccgaggggacaccggcgctcaaggtttgcccggacctcccggagaggacggcgaaagaggggacgacggcgaaatcggaccccgtgggctgcccggagagtccggacctcggggtctcctcggacctaaaggcccaccaggaatccctgggcctccgggagttcggggaatggacggtccacaagggcctaaggggagtctgggcccacaaggtgagcccggaccaccaggacagcagggcacacctggaactcagggactgcccggaccccagggggctataggaccacacggagaaaaggggcctcaaggcaagcccggacttcctggcatgccaggtagtgatgggcctcctggtcatccagggaaagagggaccacccggtactaagggaaaccaggggccaagcggccctcagggcccattaggctatcctgggcctcggggtgttaagggggttgatggcatcaggggcctgaaaggccacaagggggagaaaggagaagacggctttcccggttttaaaggtgatatcggcgtgaagggagaccggggagaagtgggagtccccggttcaaggggggaggatggcccagaaggaccaaagggccgaacgggcccaaccggcgatccaggccctcctggattaatgggggaaaaaggaaaactgggtgtcccaggactaccgggttatccgggaaggcagggaccgaagggcagtctcgggttccccggattcccaggagcctcaggagaaaagggagccaggggacttagtggcaagtccggtccaagaggggaaagaggcccaacagggccaagggggcagagaggtcctcggggagctaccggcaagtctggcgcaaaggggacgtccggaggtgatggccctcacggcccacccggagagaggggcctccctggcccacagggacctaacgggttccctggacctaaggggcctcccggacctccagggaaagatggcctgccagggcatccaggccagcgaggcgaggtaggcttccagggaaagaccggtccacccggtccccctggagtcgttggaccccagggcgcagcgggagagaccgggccaatgggcgagagaggacatcctgggccacccggtcctccaggtgagcaggggctgccaggtacagcgggtaaggaaggcactaagggggacccaggtcctcctggggcacccggtaaggatggccctgctgggctgaggggtttccccggtgaacggggactacccggtacagccggagggccagggttaaaaggtaacgaagggcctagtggtcccccaggacctgcagggtcccccggagagcggggtgccgcaggctccggcggtccaattggtcctccgggaagaccaggccctcaggggccacctggcgctgccggtgaaaaaggcgtaccaggagagaaaggtcctataggcccaactggcagggacggggtacaggggccagttggccttcccggacccgctggccctcctggcgtcgccggagaggatggagataagggagaggtcggcgacccagggcagaaagggacaaagggcaataaaggagagcacggtcccccaggaccgcctggcccaatcggtccagtgggacagcccggagcggcaggcgctgatggagagcctggtgccagaggaccccagggacacttcggcgctaagggcgacgaggggactagaggcttcaacggaccaccagggcctatcggactgcagggactgcctgggccttccggcgaaaaaggggagactggtgacgtggggccaatggggccacccggaccacctgggcctaggggaccagccggacctaacggggctgacgggccacagggaccaccaggtggagtaggcaacttgggtccgccaggggaaaaaggcgaaccaggcgaatcaggcagccccggtatccagggcgaacctggagtgaaaggtcccagaggagagaggggcgagaaaggtgagtctggccagccaggagaacctggtcccccaggccctaagggcccaaccggggatgatggacctaagggaaatcccggaccagtgggcttcccaggggatcccggtcccccaggggaaggtgggcctcgcggacaggacggcgctaagggggaccggggtgaagatggggagccagggcaacctggctcccctggaccaacgggcgagaatgggcctcctggccctctgggaaaacggggacctgcgggaagtccaggctctgaaggacgccaggggggtaagggcgcaaaaggagatcctggcgctatcggtgctcctgggaagactggcccagtcgggccagccggacccgctggaaaacctggtcccgatggtctgcgtggactgcccggttctgtaggccagcagggtcgccctggagctacagggcaggccggacccccaggacctgttggcccacccggtttgccaggtcttcggggagacgccggagcaaagggggagaagggccatcctggtctaattgggctgatcgggccaccaggagaacagggggaaaagggggaccgtggcctgcccggaccacaaggcagccccggacagaaaggggaaatggggatccctggggcaagtggaccaattggtcctggcggtccgcctggcctcccaggccctgcagggcctaaaggtgccaaaggcgctaccggaccaggaggtcccaaaggggagaagggcgtccagggcccacctggccaccccggaccgcctggcgaggtgatccagccactgcccatccagatgcccaaaaaaacccggcgaagcgtggatgggtctcggctgatgcaggaggatgaggccattcccaccggcggtgcacctggatcacctgggggactagaggagatatttggctccctcgactcacttagagaagagatagagcagatgagacggcctacggggacacaggattctccagcacgcacatgtcaagaccttaagttgtgccacccggagctgccagatggcgaatattgggtcgatcctaaccaggggtgtgcaagagacgcgttcagagtcttttgcaactttactgccggaggcgagacctgtgtgactccacgtgacgacgtaacacagttctcttacgttgacagcgaaggtagcccagttggagtggtgcagttgactttcctccgactgctgtccgtgtctgcccaccaagacgtctcttacccttgctctggtgccgcaagagatggacccctgagactcagaggggcaaacgaggatgagttgagtcctgagaccagcccctatgtgaaggagtttcgcgatgggtgtcaaacacagcagggtagaacggtccttgaggtgagaaccccggtactggaacagctgcctgttttggatgcctccttttctgaccttggggcaccacccaggcggggtggagtacttctgggacccgtgtgcttcatggggta

SEQ ID NO: 232770 - DNA, 4968 bp, Artificial Sequence
  derived and/or modified sequence
atggaaagatgttcccgctgccaccggctgcttctgctgttacctttggtattagggcttagcgcagcgccaggatgggccggagctcctccagtggatgtacttcgcgctctgcgattccctagtctgcctgacggagtccggagagctaaaggaatctgcccggctgacgtggcgtatagagtggccagacctgcacagctaagtgccccaactaggcaactgttccctggagggtttcccaaagacttttcactgttgactgtcgtgagaacccgccctgggttgcaggcaccacttctcactctgtactcagcgcagggcgtcaggcagctgggcctggagctaggtaggcccgtaaggttcctgtacgaagatcaaactggcagaccccaacccccaagccagccagtgttcaggggcctgtcgcttgcggacggaaagtggcacagagtcgcagtggccgtgaaggggcagtccgttacactgatcgtggattgcaaaaagcgtgtgaccaggcctctgcccaggtccgccaggccggtgctcgatacacacggtgtgatcatctttggagcacgaatactggacgaggaggtgtttgaaggtgatgtgcaggaactcgcgatcgttcccggtgtgcaggccgcatatgagtcttgtgagcagaaggaattggagtgcgaaggtgggcagagagagagaccccagaatcagcaaccccaccgggctcagcggagtccacagcagcagccttccagacttcataggccacagaatcaggaacctcagtcccaaccaacagaaagtttatattacgactacaaacctccttattacgacgtcatgactacaggcacaacgcctgattatcaagcagcccatggccctaggggactaaaaggtgaaaagggcgagccagcggttctagagcctggaatgcttgtcgaaggcccaccaggtccggaaggcccagcaggacttatcggcccacctggcatccagggcaatccaggcccagtgggggatcccggtgagcgcggtccccctggtagggccggactaccaggctctgatggtgcaccaggcccaccaggcactagcctgatgctgcccttcaggtttggatctgggggaggcgacaaggggcctgtcgtggccgctcaggaggcccaggcgcaggccattctccagcaggccaggctggccctccgcggaccccctggccctatgggctacacgggcaggcccggaccattggggcaaccaggtagcccaggcctgaaaggcgaatccggcgatttaggccctcaaggtcctcgtggccctcagggtctgaccggccctccgggtaaagccggtcgccgaggcagggcaggagccgatggtgctcgcggaatgccgggagatcccggagtgaaaggcgacagggggttcgatgggctccctggcctgcctggcgaaaagggccaccggggagacaccggggctcaggggctgcccggaccacctggagaggatggagagaggggtgacgatggcgaaatcggcccacgcggactgcctggcgagagcggtccccgaggacttctagggccaaaaggaccaccaggtatccccggaccacccggagtgagaggaatggatggaccgcaggggccaaagggtagtctaggtccacaaggcgagccagggcctcctggccaacagggtacccccggaacccaaggattacctggaccccagggagctattggaccccatggcgaaaagggaccccaggggaagccaggtttgcccggaatgccagggtccgacggcccaccagggcatcctggcaaggaaggaccacccggaacaaagggtaatcagggtccttccggcccacaggggccactgggctaccccggtcctaggggtgtgaagggcgtggacggcatccgtggcctgaagggacacaagggtgagaagggcgaggacgggtttcctggcttcaaaggagatattggggtaaagggtgatagaggggaggtgggggtacctggctcccgaggcgaggatggcccagaggggccaaaagggagaacaggcccaacaggcgacccagggcctcccggtctcatgggtgagaaaggaaaactgggcgtgcccggtttaccaggttaccctggccgacaggggcctaagggcagcctaggcttccccggattccccggtgcctctggcgaaaagggggctagaggccttagcgggaagtcgggtcctcggggtgagcgcggtcccaccgggccaagaggccagaggggcccacgtggcgctactgggaaatcaggggcaaaagggacgtcaggcggagacggaccccacggaccgccaggagaaaggggcctacctggaccccaagggccaaatggttttcctggtcctaagggaccaccagggcctcctgggaaggatggacttccaggccatccgggtcagagaggagaggtgggttttcaggggaaaacagggccaccagggcctcccggtgtggtgggccctcagggggctgccggtgagactgggccaatgggcgaaagaggccacccaggcccacccggtccacccggtgaacagggccttcctggaactgccggaaaggagggcacaaagggcgaccctggtccccctggcgcacccggaaaagacggacctgcgggactgcgcggatttcccggtgagcgtggtctgccgggaactgctgggggacccggtctgaagggcaacgaagggccaagtggcccacccggaccggctggtagtcccggagagagaggggcagccggatcgggaggccctatcggaccccctggacgcccaggcccacagggcccacccggagcggctggggagaaaggcgtcccaggggagaaggggcctattgggccaacgggacgagatggcgtacagggacctgttggcctgcccggtccggctggaccaccaggcgtggcgggtgaagacggggataaaggcgaggtaggagacccagggcaaaaaggtacaaaaggaaacaagggtgaacacggtccccctgggccacccggaccaatcggcccagtaggccagccaggggctgctggggcagatggcgagcccggagcgcgaggccctcagggccatttcggggcaaaaggtgatgagggtacaaggggattcaacggccctccgggaccgatcggcctgcagggactcccaggaccttctggcgaaaaaggtgagacaggggatgtggggcctatgggccctcctgggcctcctggcccaagaggccctgcgggtccaaatggtgcagatggcccacaaggacctcccggaggcgttggcaacttgggtccgccaggcgaaaaaggagaaccaggagagtcgggatcacccggtatccaaggcgagccaggcgtgaaggggcctcgaggggagagaggggagaaaggcgagtctggtcagcctggagagccagggccaccaggtccaaaagggccaacgggagacgatgggcctaaggggaatcccggacccgttggtttccccggagacccaggacctccaggagaagggggacccagaggtcaggacggagctaagggcgaccgaggcgaagatggggaacccggtcagcccggttcccccggacccacaggcgagaacggccctccaggacctttaggcaagcgcggacctgccggttctcctgggagtgagggccgtcagggcggaaagggggctaagggcgaccctggagctatcggagctccgggtaaaacaggccctgtcggaccagccggacccgctggaaagcccggaccagatggattgagaggtttgccaggatcggtcgggcagcagggtcggccaggtgccaccgggcaggccggaccgcctggccctgtgggcccaccaggcttaccgggactgcggggagatgccggagccaaaggtgaaaaaggtcatccaggattaattgggcttatcggaccgccaggagagcaaggcgaaaagggagatcgcggattgcctgggcctcaaggcagtccgggacagaaaggagagatggggatccctggagcgtctgggcctatcggaccaggcggtcctcccggtctgccaggccctgctgggcctaaaggggcaaagggcgctacaggccctgggggtcctaaaggcgaaaaaggtgtgcagggaccacctggacacccaggcccaccaggtgaggtgattcagccccttccaattcagatgcctaaaaaaacacggaggtctgtcgacggctccaggctcatgcaggaggacgaagctatccctactgggggagctcctggatcccctggtgggcttgaggagatcttcggatccctggattcgttacgggaagaaattgaacaaatgagaaggcctactggcacgcaagacagcccagctaggacatgtcaggatctaaagttatgtcatcccgaactccctgatggagagtactgggtggacccgaaccagggttgtgcccgagacgcctttagagtattttgcaatttcaccgctgggggagagacctgtgttaccccgcgtgatgatgtaacacaattttcatatgtggattctgagggtagccccgtaggcgtggtgcaactgacattcctgcggttgctctcggtgagcgctcatcaggacgtttcatatccctgttcaggagctgctagagatgggccactacgactcagaggagccaatgaggacgaactctcccctgagactagcccttacgttaaggaatttagagatggctgccaaacccagcagggcaggacagtgctggaagtcagaacgcctgttctggagcagcttcctgtcctggacgctagtttctccgatttgggtgcacccccaaggcgaggaggcgtgctgctagggccagtatgtttcatgggctaa

SEQ ID NO: 232771 - DNA, 4953 bp, Artificial Sequence
  derived and/or modified sequence
atggagcgatgctcacggtgtcatcggctgctgctactccttcccctggttctaggtctgagtgcagcccctggatgggctggcgccccaccagttgatgtcctgcgggccctgaggtttcctagtctgcctgacggcgtgcggagagcaaaaggaatatgccccgctgatgtcgcctaccgcgtggctaggccagctcaactctccgcccccactaggcagttgtttcctggtgggttcccaaaagacttcagccttctgacggtggtacgaacaaggcctggattgcaggcacccctactcacgttgtatagcgcacagggggtgcgccagcttggcctggaattgggccggcccgtgaggtttctttacgaagatcaaaccgggcggccgcagcctccctcccagcctgtctttcggggcctgagccttgctgatggaaagtggcaccgcgtagccgtggccgtgaaaggacagagtgttaccctaatcgttgactgcaagaaaagggtgacaagacctctgccccgcagcgcccgccccgtcttggatacccatggagtgataatctttggcgcccggatcctggacgaagaagtgttcgagggggatgtacaggagctagccatcgtgccgggcgtccaggccgcttatgaaagctgtgagcaaaaggagttggagtgtgaagggggtcagcgcgagcgtccccaaaatcagcaaccacaccgtgcccagcgctctccccaacaacagcccagccgactgcatagacctcagaaccaggaacctcaaagtcaggaccctacccctggcgaggaggaggaaatcctcgagagctcgttgctcccaccactggaggaagccgctcacggcccccgcgggttgaaaggagaaaagggagaacccgcagtcctggagcccggcatgctggtggaaggccctcccggccctgaaggcccagccggccttatcgggccacccgggattcaaggaaacccgggccccgtcggtgaccctggagagaggggaccacccgggcgagctggtctgccaggaagcgacggcgcaccaggccctcccggaacaagcttgatgctgcccttccgttttggttcgggtgggggtgataaagggcctgtcgtggctgcccaggaagcacaggcgcaggccatcctccaacaggctcggctggcgctacgcggcccaccaggacctatgggttataccggtagacccggaccacttggccagccaggctcaccaggactgaagggcgaatccggtgacttgggaccccagggccctcgtggccctcagggattaactggccctcccggcaaggcgggcaggagagggagagccggggccgacggagccaggggcatgcccggcgacccaggggttaaaggagatagggggttcgacgggttaccaggccttcctggcgagaaaggccaccgcggggatacaggagcccagggcctcccaggcccacccggcgaggacggcgagcgtggagacgacggggaaatcggacctcgggggcttccaggcgaatcaggaccccgcggcctgctgggccccaagggcccacccggcatcccagggccacctggcgttcgggggatggatggcccacagggccctaagggatcgttaggtccccaaggagagcctggccctccagggcaacaaggcacccccggcacccagggcctgcccggtcctcagggtgctatagggcctcacggggagaaaggaccgcagggcaagccaggactgccgggcatgccaggaagtgacggtcctccagggcaccctgggaaagaaggacctcctggcaccaaaggcaaccaaggcccttctggcccccaagggcctctggggtatcctgggccacgaggcgttaaaggtgtggacggtatccgaggtctgaaagggcataaaggcgaaaaaggggaggatggttttccaggatttaagggcgacatcggcgttaaaggggatagaggagaggtgggggtgcctgggtctaggggtgaagacggtccagagggcccaaagggacgaaccggcccaacaggagacccgggaccccccgggctcatgggagaaaaagggaaattgggagtccccggactaccaggatatcctggacgacagggaccaaaagggtcactcgggtttcccgggtttcccggcgcaagtggcgagaaaggggccaggggcctgagcggtaaaagtggccctaggggcgagagaggacccaccggaccaagagggcagagggggccaagaggcgccactgggaaatcgggggctaagggaacgtctggaggagacggacctcacggtcctcctggagagagaggcttgccagggcctcaaggccccaacggcttccccgggccaaaagggccccccggccccccaggtaaagacggattaccaggccacccagggcagagaggcgaagttggtttccaggggaagacgggacctccggggcctccaggtgtggtcggcccacagggggccgccggagaaactggccccatgggcgagcgtggacaccccggcccccccggcccacctggtgaacaggggttgccagggaccgctggaaaagagggcacaaagggggatcccggtcctccaggagcaccgggaaaggatggccccgccggactgcgtggcttccctggcgagagaggcctccctggcactgccggaggccctggcctgaaaggcaatgagggaccttcaggccccccaggcccggccggatccccgggagagcggggagccgccggttcaggcggtcctattggccctcctggacgtcccggcccacagggtccacctggagcagctggcgaaaaaggggtacccggggagaaaggaccaatcggacccaccgggcgggacggagttcagggccccgttggtctccctggccctgcagggcctcccggtgtggcaggggaggatggggacaagggcgaagtcggtgaccctggtcagaaaggcactaaaggcaacaaaggagagcacggaccccccggacccccgggccccattgggccggtagggcagcccggagccgcaggcgctgatggggaacccggggctaggggaccacagggccacttcggcgcaaagggggacgaaggaactcgtggattcaacgggcctcctggtccaatcggtctgcagggacttccaggcccctcaggagagaaaggagaaaccggcgacgttggccctatgggacctccaggacctccaggcccacggggtcctgccgggcccaacggagctgacggcccccaggggccacctgggggggtgggcaacctgggccccccaggcgaaaagggagaacctggggaatcagggagtccaggcattcagggtgagccgggcgtgaagggtccccgcggtgagaggggtgaaaaaggcgaatcaggacagccaggggaaccaggtccaccagggccaaaaggacccaccggagacgatggcccaaaaggaaatcctggacccgtcggatttccgggcgacccagggcctcccggggaaggcggaccgagaggtcaagacggcgcaaaaggcgaccggggagaggatggcgaacctgggcagcccggatcccctggcccaacgggcgaaaacggaccacccggacctctggggaaacgcgggccagcaggcagtcccggcagcgaagggcggcagggggggaagggtgcaaaaggtgaccccggtgccatcggcgcccctggcaagaccgggcctgtgggacctgccgggcctgccggcaagcccggcccagacgggctgcgtggccttccgggcagtgtgggccagcaggggcggccaggggccactgggcaagcaggtccaccaggaccggtgggccctcctggtctgccggggctaagaggcgacgcaggagccaaaggcgagaaagggcacccaggattgattgggttgattggccctccaggcgagcagggagaaaagggtgaccgaggtctgccaggtcctcaagggtcccctgggcagaaaggtgagatgggtattccaggggccagtggccccattggccctggaggcccaccaggtctacccggccccgccggtcctaaaggagccaagggggcaaccggtccaggcgggccaaagggggagaagggtgtacagggcccgccagggcatccgggaccccctggagaggttatccaacccctcccgattcagatgcccaaaaagacccgccgttctgtggacgggagccggctaatgcaagaggacgaggctatccctacaggtggcgcccccggttcccctggaggactggaggagatttttggctcactggactctctgcgggaggaaatcgagcagatgcggcggcccaccggcacccaggactcccccgctcggacgtgccaagatttaaaactgtgccaccctgaactgcccgacggagagtattgggttgaccccaaccaggggtgcgcacgggacgccttcagggtattttgcaactttacggctggtggagaaacttgcgttactccaagggacgacgtgacacaattttcttatgtcgatagtgagggctctccagtcggcgtggtgcagcttacttttctgaggttactttctgtgtcggcccatcaggatgtcagctacccctgctctggtgctgcacgtgacggacctctgcggctgcgtggagccaacgaggatgagctgagcccagaaacaagtccctacgtaaaggaatttcgtgatggctgccagacacagcaagggcggaccgtgctcgaggttcgaaccccagtgcttgagcagctgccagttctggacgcttccttctctgatctcggcgctccccctcgcaggggcggcgtactcctaggtcccgtctgctttatggggtag

SEQ ID NO: 232772 - DNA, 4968 bp, Artificial Sequence
  derived and/or modified sequence
atggagaggtgcagcaggtgccaccgcctgctgctgctcttaccactggtacttggactttccgctgccccaggctgggctggagcaccccccgtggacgttttgcgcgcgctcaggttccctagtctgcctgatggagtgaggcgggcaaaagggatttgccctgctgacgtggcatatcgggtcgcacgaccagcacagctgtctgctcctacccggcaactattcccgggtggcttccctaaagatttttctctattaacggtcgttagaacgcgccctggtctgcaggctcccctgctgaccctgtactctgcacagggcgtgcggcagttgggattggaattggggcgcccagtgaggttcctgtatgaagatcagacaggtcgaccacagccaccttctcagccagtgtttcgaggcctttccttggccgatgggaagtggcatcgtgttgccgtcgcagtgaagggacagagcgtgaccctcatcgtagattgcaaaaagcgagtcacgcggcctctgccacgcagcgctaggccagtgctagatacacacggggtcattatcttcggtgcgcgaattctggatgaagaagtctttgagggtgatgtccaggagttggcaatcgtccccggcgtgcaagctgcttacgagtcttgcgaacagaaggaacttgaatgcgagggcggacagcgtgaaagaccacaaaaccagcaaccccatcgcgcgcagcggtctccccagcagcagccttcacgtctccatagaccgcaaaaccaggaaccccagagccagccaacggagtctctgtattatgattacgaacccccctactatgacgtgatgactactggcactacaccagactaccaggctgcccacggacccagaggccttaaaggcgaaaaaggagagcccgctgttctcgagcccggcatgttggtggagggtccccctggccccgaaggaccagcgggactgatcggcccccctggaatccagggaaatcccggtcctgtgggagaccccggagagcgcggcccaccaggtagggccggcctgccaggcagcgacggggctcccggccctcccggcacttcgttaatgctccctttccgctttgggtccggtgggggggacaagggtccagtggtcgcagcccaagaggcccaggcacaagcaattttgcaacaggccagattggccctgcgtgggcccccgggccctatgggctacaccgggcggccaggcccactgggccagccgggcagcccaggactcaaaggggaatctggagacttgggacctcaaggccctcggggcccgcaaggcttaaccggaccacctggaaaagccggccggaggggccgagctggtgcggatggcgcgcggggaatgcccggggaccccggcgttaaaggagacaggggatttgacggcttgccagggttacccggagaaaagggtcatcgcggggacactggcgcgcaaggactcccaggacccccaggcgaggacggagagcgcggggatgatggggaaattggacctcgcggcttgcccggggaatccggaccgcgcggtctcctcgggcctaagggtcctccaggaattcctggcccacccggagtcagaggaatggatggccctcagggaccaaagggatctctcggccctcagggagaaccaggacccccaggtcaacaagggacgcccggaacccagggactacctggtccacagggcgccatcggtccccatggagagaaaggtcctcaaggaaagccagggctgccgggcatgccggggagtgacggccctccaggccatcctggcaaagaggggccacccggtaccaaggggaatcagggaccctcaggaccccaaggccctctgggttatcccggacccaggggagtcaaaggcgtcgatggaataaggggcctgaagggccataaaggggagaaaggagaggacgggttccctggctttaagggcgacatcggtgtgaagggcgacagaggcgaagtaggagtgcctggcagccgtggcgaggacggacctgagggccctaaagggaggaccgggccaaccggtgacccaggaccgcccgggctgatgggagagaaaggaaagttaggggtcccaggcctccccggctatcctggacggcagggcccaaagggctcactgggtttcccaggattccccggcgcgtctggcgagaaaggtgcccgggggttgtccggcaagtcgggccctcggggggagaggggacctacagggccccgaggacagcgcggccctaggggagcaacaggaaaatcaggagctaagggcacatccggaggggatgggccccatggacctcctggcgaaagagggctgcccggaccacaaggcccgaacggtttcccgggtcccaagggcccccccgggccgccaggaaaagacgggctgccagggcaccctgggcaacgcggggaggtagggttccaaggaaaaactggaccgccaggccctcccggagtggtcggtccccaaggcgctgcaggagaaacaggccctatgggcgagcgcggccaccccggcccacccggcccacccggcgagcagggactgcccggaaccgccggcaaagaggggacaaagggagacccagggcctcccggggcgccaggaaaggatgggccagccggcctccgcggtttccccggtgagagggggctccctggaaccgcgggagggcctgggcttaagggcaacgagggccctagtggacccccagggcccgccgggtcccctggtgaacggggggcagccgggagcgggggtcccatcgggccccctggaagacctgggccacaggggccaccaggcgctgccggagagaagggagtgcccggcgagaagggccctatagggccaactggcagagacggcgtgcagggaccagtgggattgcctggccctgctggtcctccaggagtggcaggagaggacggcgacaagggagaagtgggagacccaggacagaaaggcaccaagggcaataagggcgagcacggaccacctggaccgcctggacctatcggccccgtgggacagcccggagcagctggcgcggacggggaaccaggagcaaggggcccccagggccacttcggggccaaaggggatgaaggtacacgtgggttcaacggaccaccagggccaatcggcctgcagggtttgccgggaccctctggcgagaagggcgaaactggggacgtgggaccaatgggaccccccggccctcctgggcccaggggcccagcagggccgaacggagccgatggaccacaaggaccccccggcggagtcggcaatctaggtcctcccggcgagaagggtgaacctggtgaaagtgggagtcccggcatccaaggcgagccaggcgtgaaaggaccacggggagagaggggtgagaagggcgagtctggtcaaccaggcgaaccaggccctccagggccaaaagggcctaccggggacgacggccctaaaggcaacccaggcccagtagggttccccggagatcctgggccaccgggtgagggcgggcctaggggacaggatggcgcaaagggggataggggagaggacggtgagcccggacagccagggtcaccagggccaacgggcgaaaacggcccacctgggcctttggggaagcgcggccctgccggctcacccggatccgaaggacgacaaggcggcaaaggcgctaaaggggatcccggcgcgataggcgccccagggaagaccgggcctgtgggtccagcaggacccgctggtaagcctgggcctgatggtctgcgaggcctgccagggtccgttgggcagcagggccgcccgggagccactggacaagccggcccaccaggccccgtcggtccacctggtctgcccggactgcgaggggacgcaggcgcaaagggagagaagggtcatccagggctgataggtctcattggaccacctggcgaacagggggagaaaggagaccgcggtcttccaggcccacagggaagccccggacagaaaggagagatgggcatccccggggcatctggacccatcggtcccggaggtcctcccggcctccccggccctgctggaccaaaaggagcgaagggcgctacaggaccaggcgggcctaagggggagaaaggagtccagggaccaccaggacatcctggccctccaggcgaggtcattcagccactgccaatccagatgcccaagaaaactaggcggtccgtagacggatctaggcttatgcaagaggacgaagccattcctaccggaggtgctccaggtagccctggcggtctggaggaaatctttggcagcctagacagcctgagggaggagatagaacagatgagaagaccaaccggcacccaggactcccctgctcgtacctgtcaggatctgaagttgtgtcatccagagctacccgatggtgagtactgggtggacccaaatcagggatgtgccagagatgcgtttagggtgttctgcaactttactgccgggggtgaaacatgcgtgactcccagagatgatgtcactcagttctcctatgttgattctgaaggctctcctgttggcgtggtccagctgacgttcttacgcttgctctccgtcagcgcgcatcaggatgtgagttatccgtgctccggcgccgcacgggacggccctttacgccttagaggagccaacgaagacgagctcagccccgagacttctccctacgttaaggagttccgtgatgggtgccaaacccagcagggccgaaccgtactagaggtacgaactcccgtattagaacaactgccagtcttggacgccagttttagtgatctgggcgcgcctccgcgtcgaggcggagtactcctgggtcctgtctgtttcatggggtag

SEQ ID NO: 232773 - DNA, 5031 bp, Artificial Sequence
  derived and/or modified sequence
atggagcgctgttctagatgccacaggctgctcttgcttcttcccctcgtcttgggacttagtgctgcccccggctgggcaggggcacctcctgtggatgtgctgcgggctctaagatttcctagcctgcctgatggcgtgcgtagagcgaagggaatatgcccagccgatgtggcttaccgagtagctcgccctgcacagttgtccgccccaactcgccagctctttccgggcggatttcccaaggacttcagcctcctgaccgtagtgagaactaggccaggcttgcaagctcccctgctgactctctactccgcacagggagtgagacaacttgggctagagctcggcaggcccgtcaggttcctgtatgaagaccaaaccggacgaccacagccaccttcccagcccgtctttagaggattgtctttggcagatgggaaatggcatcgtgtcgcagtcgcagttaagggccagtctgtcaccctgatagttgattgtaaaaagagagtaacacgtcccctgccacggagcgccaggccggttctagatacccatggtgtgattattttcggagcaagaatcctggacgaggaggtttttgagggagatgtccaggaactcgctattgtccccggcgttcaggcggcttacgagagctgtgagcagaaggagctggagtgcgagggcggacaaagagagcgtcctcagaatcagcaacctcaccgtgcacagcgtagcccgcagcaacagccaagccgcctacaccgacctcagaaccaagagcctcagagtcagcccaccgaaagcctctattatgattacgagcctccatattacgatgtaatgacgactggaacaacccccgattatcaagatccgactcccggggaggaggaggaaatcttagagtcatcactgttgccaccgttagaggaagctgcacacggtcctcgcgggctcaaaggcgaaaagggtgaacccgcagtcctagagccaggaatgctggtggagggccccccaggtccagagggacctgcaggcctgatagggcctccaggcattcagggaaatccaggtccagtcggcgaccccggcgagagaggtccccccgggcgagctgggttgccaggatccgacggcgctccaggacctccaggcaccagcctgatgctgccattccggtttgggtcgggaggcggcgataagggtcccgtcgtagccgcccaggaagcccaagcacaggctattctccagcaggctcgcttggccctacgaggaccaccaggaccaatgggttacaccggaaggccagggcccctcgggcaaccaggttcccccggactgaagggggagagcggagacctgggaccccagggaccccgtggaccacagggcttgacaggccccccgggcaaagctggaaggagagggagagctggagcagacggagctcgaggaatgcccggcgacccaggcgtcaaaggggaccggggattcgatggcctgcccggtctgccaggggagaaaggtcatcggggagatacgggagctcaagggctccccggaccaccaggagaggatggggaacgaggcgatgatggagaaataggccctcgtggactcccaggagaaagtgggcccagaggactactggggcccaaagggcccccaggcatcccaggaccgcccggtgtgcgggggatggatggcccgcagggcccaaaagggtctttgggcccgcaaggcgagccagggccaccgggccagcagggcacccccggcacgcaagggcttccgggcccacagggagccatcggaccccatggggagaagggccctcagggaaagccgggactcccagggatgccaggttccgacgggcctcccgggcaccctggaaaggagggcccaccaggcaccaaaggtaatcagggaccaagcgggccccagggacctctgggctaccctggcccaaggggtgttaagggcgttgatgggatcagagggctgaaggggcacaaaggcgagaaaggtgaagatggcttccccgggtttaagggtgatatcggagtgaagggcgatcgcggtgaagtgggagtgccaggctctcggggagaggacggtccggaggggcctaaaggccgtactgggcccactggcgaccctggcccacccggacttatgggcgaaaaaggaaagttaggagtacctggcctgccgggctacccagggcgtcagggtcccaagggatccttgggttttcccgggttccccggagcaagcggagaaaagggcgctcggggtttgtccgggaagagcggaccaaggggagaacggggcccaactggtccgaggggtcagcgcgggccacgcggcgccaccggtaagtcaggagcaaaagggactagcggaggagacggccctcacggcccccctggtgagcgtggcctcccaggtccgcagggcccaaacggcttccccggcccgaaaggaccacctggcccccccggtaaggatggactgccaggccacccaggtcaacgcggagaggtagggttccagggtaagacaggtccacccggacctcctggtgtcgtgggaccccagggcgcggcaggcgagactggccctatgggggaaagaggacatcccgggccacccgggcctcctggcgagcaaggtttgccagggaccgccggtaaagaggggacaaagggggaccctggtcctccgggcgcccccgggaaggacggaccggctggcctgaggggatttcctggcgaaagagggctgccagggactgcaggaggccccggtcttaagggaaatgaaggccccagcggcccaccgggccccgcagggtctcctggcgaacgaggcgccgccgggtccggtggccccatcggcccgcccgggagaccgggacctcagggaccgcctggggcggccggtgaaaagggggttccaggagaaaagggaccgatcgggcccaccggtagggatggtgtccaaggaccagttggactgccgggcccagctgggcccccaggcgtcgctggagaggacggagacaaaggcgaagtcggtgacccaggacagaagggtacaaagggaaacaagggcgaacatggtcctcctggtccacccggacccatcggccccgttggccagcccggagccgcaggggcggacggtgagccgggcgctcgcggtccacagggccattttggcgccaaaggagacgaaggcacaaggggttttaatggcccacctggacccatcggtctacaagggctgccgggcccaagcggcgagaagggcgaaactggagatgtcgggcctatgggacccccaggtccacctggtcctagaggccctgctgggcctaacggggccgatggacctcaaggtccacctggtggcgtcggaaatctcggacccccaggcgagaaaggggaaccgggcgagagcgggtccccagggatacagggcgagccaggtgtcaaaggccccagaggggaaagaggcgagaaaggcgaatccggccagcctggagaaccagggccgcctggtccgaagggacccactggtgatgatggcccaaaggggaatcctggccccgttggattccccggagatccaggaccaccaggagaaggaggtccaagagggcaggacggagcgaaaggtgaccggggtgaggacggcgaacctggacagccgggctctcccgggccaaccggggagaacggtcctcccggtcctctgggcaaaaggggaccagccgggagtcctggctccgaggggcggcaaggtggcaaaggtgccaaaggagatccaggggctattggagcaccaggcaagaccgggcccgtagggcccgctggccctgccgggaaacctggacccgatggattaaggggcctacccgggagtgtcggccagcaggggcgccccggggccaccggacaggccgggccaccggggcctgtcggtcctcccggccttcccgggttaaggggcgacgccggtgccaagggggaaaaaggccaccccgggctcatcggcctaatcgggccccccggcgagcagggcgaaaagggcgacaggggactgcctgggccacaaggatcacccggacagaagggcgagatgggcattcctggcgcctccggtccgattggcccaggagggccgccgggtcttcctggccctgcagggccaaagggagccaaaggcgccacaggccctggtgggcccaagggagaaaaaggcgtgcaggggccgcccggccaccccggccctccaggtgaagtcatccagccacttccaatacagatgcccaagaaaactcggcgttctgtggacggaagcaggttaatgcaagaggacgaagctatccccactggcggcgcgccggggtcacccggcggattagaagaaatcttcggtagcttggactcattgagggaagaaatcgagcagatgcgaagacctactggaacacaggatagccctgctagaacatgtcaggatttgaagctctgtcatccggaactgcccgatggcgagtactgggttgatcccaatcagggatgtgcccgcgacgcttttcgagttttttgcaattttacagccgggggcgaaacatgtgtgacacctcgcgatgatgtcacacagttcagttatgttgactccgaaggtagccccgtgggagtggttcagctaacattcttgcgactgctctctgtaagcgcacatcaggacgtcagctatccttgctctggggccgcccgagacggacctttgagactgagaggcgccaacgaagacgagctctctcctgagacctccccctacgtaaaagagtttcgagatggatgccagactcagcagggccgtacagttttggaggttcggaccccggtgctggagcaactgcccgtcctcgacgcaagcttctcagaccttggggctcccccacgccgtggaggtgtgctcctggggcctgtgtgctttatgggatag

SEQ ID NO: 232774 - DNA, 4953 bp, Artificial Sequence
  derived and/or modified sequence
atggagaggtgttcccgctgtcaccgactgctgttactgctgcccctagtgctcgggttatccgcggctcccggatgggctggggctcccccagtcgatgttctcagggcactgcggtttcccagcttgcccgatggagtccgcagggccaagggcatttgccccgccgacgttgcctatcgcgtcgcacgccctgcccaactctcagctcccaccagacagttgtttcccggcggcttccctaaggacttcagcctactaaccgtggtccggacccgaccgggactacaggctcccttgctgacactgtacagtgcacagggtgtacgacagctcgggttagaactgggaagaccagtacggttcctgtatgaggaccagacagggagaccccagcctccttctcagccagtgttcaggggtctgtctttagctgatggaaagtggcaccgggtggctgtggccgtaaagggccagtccgtgacacttatagtcgattgcaaaaaacgtgtcacacggcccctaccaaggtccgcccggccagtgcttgatactcacggggtgattatctttggagcacgtattttggacgaagaagtgttcgaaggcgacgtccaggagctcgctattgtccctggtgtgcaggccgcttacgaaagctgcgagcagaaagagctggagtgcgaaggaggacagcgcgaacggccccagaatcaacaaccacaccgcgctcaaagaagcccccagcagcaacctagccggcttcatagaccgcagaaccaggagccacaatcccaggacccaactcctggagaggaggaagaaatcctggagagcagccttctcccccctctcgaagaggccgctcatggaccaagaggcctgaagggggagaaaggtgagccagctgtgctggaaccaggaatgcttgtggagggacccccaggcccagagggccctgccggcctcatcggcccgcccggcatccaggggaatcctgggccagtcggagaccccggcgaacggggcccccctggtagagctggtctccccggatcggacggtgcccctggtcctccagggacctctctgatgctcccgttccgatttgggtccggtggtggcgacaaggggccggtggtcgccgcgcaggaggctcaggcgcaagcgatcttacagcaagcccgactggctctgcgggggccccctggccccatgggctacacggggcgtccgggaccattagggcaaccaggaagccccggcctcaaaggcgagagcggggatctaggtcctcaagggccccgcggtcctcagggcttaacaggcccacctggcaaggccgggagaagggggcgggctggggcggatggtgcgagaggaatgcccggcgatcccggtgtgaaaggcgataggggattcgatgggctgcccggacttcctggggaaaaggggcacagaggagataccggcgcccagggcttgcctggacctcccggcgaagacggagaacgcggagacgatggagagataggacctcgtgggttacctggtgaatccggcccaagaggattgctcggacccaagggcccaccaggcattccaggacctcctggggtcagaggaatggacggacctcaaggccctaaaggaagcctgggcccccagggcgagccaggccccccaggacagcagggcaccccaggcactcaaggtctgcccggtcctcagggcgcaataggacctcacggcgagaagggaccacaggggaaacccggcctacctggtatgcccggctctgatgggccccctggccatccaggcaaggaaggtccccccggcaccaaaggcaaccagggaccatccggcccacaggggcccttggggtaccccgggccgaggggcgtcaagggagtggacggcatccgcggccttaaaggtcacaagggtgaaaaaggcgaggatggtttcccagggttcaagggtgatattggcgtcaagggcgacaggggtgaggtgggtgtccccggctccaggggagaagacgggcctgaggggcccaagggcaggaccgggccaaccggagacccaggacctcctggactaatgggagagaaggggaaactcggcgtgcctggcctgcccggttaccccggcaggcaagggccgaaaggatctctgggctttccggggtttcccggagcctccggggagaagggagcaagggggctcagcgggaaaagtggacccagaggggaacggggacctacgggccctcgaggccaaaggggaccgcgcggggccaccggcaaaagtggagcgaaaggaacatctgggggtgacggcccacacggtccacccggggagcggggtttacctgggcctcagggtcccaatggctttcctggacctaaaggtccccctgggccccctggaaaagacggactgcctggacaccccggtcagcgtggcgaagtaggatttcagggcaagacgggaccgccagggcccccaggggttgtgggtccccagggggctgctggagagacaggaccaatgggtgagcggggacatcccgggccccccggaccccccggcgagcagggactgcccggtaccgctgggaaagaaggcacaaaaggtgaccctggaccacctggggcccctgggaaggatggtcctgccggcctcaggggttttcctggcgagcgaggattacctgggactgccggcggacccggactgaagggaaacgaagggccatccgggcctcctggacctgctggctcccctggggagcgaggggccgcgggaagtgggggcccgattggcccgcccggacgacccggtcctcaagggcccccaggtgcagcaggcgagaagggggtgccaggggagaagggccctattggacccaccggcagagacggtgtgcagggacccgtgggcttgccaggaccagctgggccacccggcgtggctggcgaagatggtgacaagggagaggtgggcgacccgggccagaaaggtaccaaaggcaacaagggagaacatgggccccccggtccgcccggacctatcggccccgtcggacagcccggggccgctggcgcggatggcgaacctggggctcgcggacctcagggtcattttggggctaaaggagacgagggcactcgcggcttcaacggaccacctgggccaataggactgcaaggcctcccgggaccatccggagaaaagggagagacgggcgacgtgggccctatgggacccccaggtccaccggggccccgcggacccgcgggcccaaatggagccgatggaccacagggccccccaggcggcgtggggaatctgggcccgccaggagaaaagggggaacctggggagagtgggtctccaggtatccagggcgaacccggagtgaaaggtccaaggggtgagcggggagagaagggcgagtccggccagccgggagaaccagggccacctggcccaaaaggtccaaccggggacgacgggcctaaaggcaacccggggcccgtggggttcccaggtgaccccggacccccgggcgagggcggccctagaggtcaagatggggccaaaggagaccgaggtgaggatggcgagccaggtcaacctgggtcacccggcccaacaggagaaaatggaccgccaggaccccttggaaagcgcggccccgctggctcccccggaagcgagggacgccagggtggaaagggcgccaaaggagatcctggcgctataggcgccccagggaagaccgggccagtgggccctgctggcccagctggtaagcccggccccgacggactgaggggtttacccgggtccgtgggccagcagggaagacctggcgcgacaggtcaggccggtccacccgggcccgtgggacctccgggattgcctggattgaggggagatgctggcgctaagggcgagaaaggccatccaggacttatcggtctcattggaccaccaggtgaacagggggagaaaggggatcgagggctgccaggtccccaggggtctcctggccaaaagggagagatgggaatacccggagcctcaggaccaatcggacctggcggtccgcctgggctgcccgggcccgctggacccaaaggcgccaaaggagccacaggtccaggtggcccgaaaggcgaaaagggtgttcagggcccccccggccatccaggacctccaggcgaggtcatccagccccttcccatacaaatgccaaagaagaccaggcgctccgtggatggcagccgtcttatgcaggaggatgaggcgatcccaactgggggtgcccctggtagtccagggggcctggaggaaatctttggttctctcgattctctgcgggaggagatcgaacaaatgagacggcccaccggaactcaagatagccctgcacgaacatgtcaggatttgaagctttgtcaccccgagcttcctgacggtgagtattgggtggacccaaatcagggatgcgccagggacgcctttcgagtattttgcaactttactgccggaggcgagacttgcgtgaccccaagagatgacgtcactcagttctcctacgtcgattccgaaggcagccccgttggagtggtacagttgacctttctccgcttattgagtgtcagtgcccatcaggatgtcagttatccttgttccggggccgcccgggatggcccacttagactgaggggcgcgaatgaagatgagctctctccagaaaccagcccctacgtcaaggaatttcgcgacggatgtcagactcagcaaggccgcaccgtcttagaggtacgtacccccgtgctcgagcaacttccagttctggacgcaagcttctctgacctaggcgcgcctcctcggagaggaggagtgctgcttggtccagtctgtttcatgggatag

SEQ ID NO: 232775 - DNA, 5031 bp, Artificial Sequence
  derived and/or modified sequence
atggagcgatgctctcgttgccatcggttgctactgctactgcccctggtccttgggttgagtgcagccccaggatgggcaggtgcaccacccgtggatgtgctgagagccctccgctttccctccctgcccgacggcgtgcggcgggctaagggaatctgtccagccgacgttgcatatagggttgctaggcccgcccagctttccgcccctactcggcagttattcccggggggtttccccaaagacttcagcttactcaccgtcgtgcgcacacgacccggccttcaggcaccccttcttaccctatacagtgcccagggtgtgcggcagttaggcctcgaattaggccggccagtccggtttttgtacgaagaccagactggacgaccccagccacctagtcagcccgtcttccgcggcttgtccctggccgacggaaagtggcatagggtcgccgtcgcagttaaaggccagtctgtcaccctaatcgtagactgcaagaaaagggtgactcgacccttacccaggagtgcgagacccgtccttgacacacacggtgtcataatctttggagccaggatcctcgatgaggaggttttcgaaggcgatgtgcaggaattggcaatcgtgcccggtgtacaggccgcctacgaaagctgcgagcagaaggaattggaatgcgaggggggtcagagagaaaggccccagaaccaacaacctcaccgagcccaaagatccccccagcagcagcctagtcgcttgcatcggccccagaaccaggaacctcagagtcagccgaccgagagtctttactacgattataaaccaccttactatgacgtcatgacaacaggaacgaccccagactatcaggatccaaccccaggcgaggaggaggaaatcctcgaaagcagcctgctgccaccattggaggaggccgcccatggcccgaggggactgaagggcgaaaagggtgagccggctgtgctcgaacctggcatgctggtggaagggcctccaggcccggagggacccgcaggcttgatagggccaccaggtatccaaggcaatcccggacctgtgggtgacccgggggagagagggccacctggacgcgcgggcctgcccggctcagacggcgcgccaggcccaccaggcaccagcctcatgctccccttccgctttgggtccggtgggggcgacaaaggcccagtggtggccgcgcaagaagcacaggctcaggccattctgcagcaggctcggttggcactgaggggcccgcccggtcccatgggttacacaggtcgccctggccctctcggtcagcctggctcccccggcctcaaaggtgagagcggtgacctgggtccccaaggcccccggggccctcaggggttgactgggccgcctggcaaggccggccgacgcggtcgggcaggagccgatggcgccagaggcatgccaggggacccgggtgtgaaaggcgaccgaggctttgatggccttccaggactaccaggagaaaaagggcacagaggggacacaggagcccagggcctgccggggccaccgggagaggatggagaacgaggcgacgatggtgagatcggaccacgcggcctacccggcgaatcaggtcctaggggtctgttgggcccaaaaggaccaccaggtattccaggccctcccggagtgaggggcatggatggaccccagggcccaaaaggttccctaggcccgcagggggagcccggtccgccaggacaacaggggactccaggcacccagggtttacctggtccccaaggggcaatcggaccccacggtgaaaagggcccacagggtaagcccggtctacctggcatgccgggctcagacggacctcctgggcacccgggcaaggagggcccacctgggaccaaaggtaaccagggaccttctggacctcaaggccctctggggtaccccggtccaaggggcgtaaagggcgttgatggaattcggggcttgaaggggcacaagggtgagaaaggagaggatggattccccggatttaagggcgatattggcgtcaaaggcgatagaggggaggtcggcgtcccaggaagccgcggcgaagatgggccagaaggacccaagggccgtactggacccaccggcgatccagggccccccggacttatgggggaaaaagggaaactgggcgtgccgggcctgccaggctaccctggcagacagggtccgaaaggctctctcggcttccccggttttcccggcgcttcaggggagaaaggggctcgcggcctgagcggaaaatctggaccaaggggcgaacgcgggccaactggtccaagaggacagaggggaccccgcggagcgactggaaaaagcggcgccaagggcacttccgggggcgatggcccacatggccctccaggcgagcgaggtctgcccgggccacagggtcccaacggatttcctggcccgaagggcccccccggaccccctggtaaagatggattacccggacatcctgggcagcgcggagaagtgggcttccagggtaagaccggaccacctgggccaccgggcgtcgtggggcctcaaggagccgcaggagaaacggggccaatgggcgagagggggcatcccggaccacctggaccccctggagagcaggggctgccaggcacagctggcaaggaggggacgaaaggggaccctggaccacctggagccccgggaaaggacggaccagccggcctgcgaggattccccggtgaacgaggactacccggcacagctggcgggcctgggttgaagggaaatgagggcccttcaggcccccctggacctgccgggagcccgggtgagaggggagcagctgggagcggagggcccattggaccgcctgggcgcccaggccctcaaggccctcccggcgccgctggggagaagggcgtccccggggaaaaaggaccgattggccctactggcagggacggagtgcaaggacctgtcggactgcccgggcctgccggaccgcccggcgttgcaggagaggatggtgataagggggaggttggcgacccagggcagaaaggcacaaaaggcaataaaggcgagcacggacctcccggcccaccaggaccaatcggcccagtggggcaaccaggtgcagccggtgccgatggtgaacccggtgctcgtggcccccagggacattttggggcgaagggcgatgaggggacccggggattcaacggcccccccggccccattggcctgcagggactgccaggcccatccggtgagaaaggcgagaccggtgatgtgggccctatgggcccaccaggaccgcccggccctcggggccccgcaggcccaaacggggcggacggaccccaagggcctcccgggggcgtggggaatctgggcccccccggcgagaaaggcgagccaggtgaatcaggctcaccgggaatccaaggcgagcccggagttaaggggccaaggggcgaacgcggcgagaagggtgaatcagggcagcccggggaacccggacctcccgggccaaaagggcccacaggcgatgacggccctaagggcaatccaggacccgtgggattcccaggagatccgggccctccaggggaaggcgggccgaggggccaggatggcgccaaaggggatagaggtgaagacggcgaacctggccagccagggagccccggacccacgggggagaatggccccccaggacctctaggcaaacggggcccggccggcagtcccggatctgagggtcggcaggggggaaagggcgcgaagggtgatcccggtgcaattggcgctccaggcaagacaggaccagtgggacccgctggccccgccggcaaacccggtcccgatggcttacgagggttgcctggttccgtaggccaacagggccgtccaggtgctacaggacaggctgggcctcccggccctgtgggacctccagggctgcccggactcagaggtgacgccggtgcaaaaggcgaaaagggccatccaggcctgattggcctgattgggcctcccggcgagcagggagagaaaggcgaccgagggttgcccggtccccagggaagccccggtcagaaaggcgagatgggcattcctggagcatctggacccatcggtcctggggggcctccagggttgccaggcccagctgggccaaagggcgctaaaggcgcgacaggcccaggcggacccaaaggagaaaaaggggtgcaaggaccacccgggcatcccggtccccccggtgaagtgatccagccattgcccattcagatgcccaagaaaaccaggaggtctgtggacggcagcaggctgatgcaggaagacgaggccatcccaacggggggcgctccaggtagccccggggggcttgaggagattttcggttctctggattccctacgcgaagagatcgaacagatgcggcggccaacaggcacacaagactctcccgcaagaacctgtcaagatctcaagctgtgtcaccccgaactgcctgatggggagtactgggtagatccaaaccaagggtgcgcccgtgatgcatttagagtgttctgcaattttactgccggaggggagacatgcgtgactcctagagatgacgtcacccaatttagttatgtggattccgagggatccccagttggagtcgtgcagcttacttttttgcggctgctgtccgtcagtgcacaccaggacgtatcgtatccctgtagtggggctgctagagacggaccactgcgcttgcgtggagctaacgaggatgagctcagtcctgaaacctctccttacgtaaaagagttcagagatgggtgccagactcaacagggaaggaccgtacttgaggtgcgcacccccgtactcgaacagctgcctgtcctggacgccagtttctccgaccttggagcgccaccaagacgcggcggggtgcttctgggaccagtttgcttcatggggtag

SEQ ID NO: 232776 - DNA, 4968 bp, Artificial Sequence
  derived and/or modified sequence
atggagcgctgttctcggtgtcatcgtctgcttctacttctacctctggttttaggcctaagtgccgcaccgggctgggccggcgcgccacccgtggacgtgttgagagcactccgttttccttcactgccagatggggtccgacgggccaaggggatttgcccagctgacgtggcatatcgagttgcaagacccgcccagctatccgcgcctactcgccagctattccccggcggttttccgaaagattttagtctccttacagtggttcgaacgagacctgggcttcaagccccactattaactctgtatagtgcccagggtgtcagacagcttggccttgaactgggcagacccgtgcgttttttgtatgaggaccagacaggcaggccccaacctccttcacagcctgtcttccggggtctgagcctggctgacggcaaatggcatcgcgtagctgtggcggttaagggccagagcgtaactctgatcgtggattgcaagaagagagtgactagacccctccccagatctgccagacctgttcttgatacacacggcgttatcatcttcggcgcccggatacttgatgaagaagtgttcgaaggagacgtccaagagctggcaattgtgccaggggtgcaggctgcttatgaatcgtgtgagcagaaagagctggagtgcgagggcggacagagggagcggccccaaaatcagcagccgcaccgggctcagaggtctccccagcaacagccttcaagactacaccggccacagaaccaagaaccgcaaagtcagcccacagagagcctgtattacgattacaagcccccttactacgatgtgatgacaacaggcacaacgccagattaccaggcagctcatggccctagaggcctcaaaggagagaaaggcgagccagctgtgttggagccaggcatgcttgtggaggggcctcccggccctgaaggacctgcaggcctgattggacctcccggcattcagggcaatccaggaccagtgggggaccctggagagcgtggacccccgggccgcgctggactccctggctccgatggcgctccgggcccaccaggtacaagtctgatgctaccgttccgttttggttctggcggaggggataagggccctgtggttgctgctcaggaagcccaggctcaagctatcctgcagcaggcccgcttggcgctgcgcggccctccaggtccgatgggatacaccggtcgcccaggcccgcttggccagccgggcagtccggggcttaagggtgaatctggagaccttggtccgcaggggccgagaggtccccaggggctgacaggtcctcctgggaaggccggtcgtaggggacgcgcaggtgccgacggcgccaggggaatgccaggggatcccggagtcaaaggtgaccgtggttttgacgggctcccagggttgccaggcgagaaagggcacagaggcgatactggcgctcagggcctacccggaccacctggcgaggatggcgaacgcggggacgacggcgaaatcggaccaagaggcctgccaggggagtccggcccccgcggtcttctcgggcccaaagggccccctgggatcccaggaccccctggtgtcagagggatggacggcccacaaggccctaaaggctcacttggcccacagggggaacccgggcctcctgggcagcagggcacaccaggtacccaggggctgccaggcccccagggggccattggccctcatggagagaaaggaccccaaggaaaaccaggcttgcctgggatgccaggctctgacggaccaccgggacatccagggaaggaaggtccgcctgggaccaaaggaaatcagggcccctcaggaccccaggggcctcttggctaccctggcccaagaggagtgaagggtgtcgatgggattcggggactgaaagggcataaaggcgagaagggcgaggatggatttccggggttcaagggtgatatcggcgtgaaaggggatagaggagaggtgggcgtgcctgggtccaggggagaagacggcccagaaggcccaaaaggaaggacaggacccacgggtgacccgggaccaccaggccttatgggcgaaaagggaaagctcggggtgcccggcctcccagggtaccctgggcggcagggacctaagggcagccttgggtttcccgggttccctggtgcctcgggggaaaagggagcccgggggctgtccggaaaatcgggccctagaggcgagagggggccaacagggccgaggggacagcggggtccacgtggggcaacaggcaagagcggcgccaaaggcacttccgggggagacggacctcatggaccacctggcgaaaggggactgcctggcccccagggacccaacgggtttcctggtcctaagggtcctccggggcctcctgggaaggatggactgcctggacaccccgggcagcgaggagaggtggggtttcagggcaagactggaccgccaggaccaccaggtgttgtgggtcctcagggagctgctggagaaactggtccaatgggggagcgtgggcaccccgggccccctggcccccccggcgagcaggggctcccaggcacagccggaaaagaggggactaaaggggacccaggacctcccggggcacccgggaaagacggccccgccggacttcgcggcttcccaggggagagaggtctgcctggaacagccggtgggcccggactcaaagggaacgaaggcccaagcggcccacctggacccgccggctcacccggcgagaggggggcggctggcagtgggggtcccataggccctcctggtagaccaggcccccagggccctcccggggccgcaggtgagaagggagtgccaggagagaagggacctattggtcccaccggacgggatggagtacagggacccgtggggttacccggccctgcaggcccccccggtgtcgccggcgaggacggcgacaaaggcgaagtaggagatcctggccagaagggaactaaaggtaacaaaggagagcacggcccacccgggccaccaggtcctatcggacctgtgggccagccgggcgccgccggggccgatggagagcctggggcacgcggcccccaaggtcacttcggcgcaaagggtgatgagggaacccgtggctttaatggtcctccaggccctatcggtttgcagggactgccggggccgagcggcgaaaagggggagacgggtgacgtgggaccaatgggtccacctgggcctccaggacccagaggaccagctggccctaacggtgcagatggaccacagggtcctcctggcggtgttggcaaccttggaccccctggtgagaagggagagcccggtgagtcagggtccccaggaatacagggcgaacctggagttaaagggccacgaggggaacgaggtgaaaaaggagaatctggccagccaggagaaccaggaccaccaggtcccaaggggccgactggcgacgatggcccaaagggtaaccctggccctgtgggcttccccggagaccctgggccgccaggggaaggaggcccccgagggcaggacggggccaaaggcgaccgaggagaagacggggagcctggtcagcccgggagcccgggccctacgggggagaacgggccaccaggccctttaggcaagcgcggtccagccggctcaccgggaagcgaggggcggcaggggggtaaaggcgctaagggggatcctggtgctattggcgcccctgggaaaactggacccgtcggcccagctggccctgcaggcaagccaggaccagatggccttcgaggattgccaggatctgttggccagcagggtcgcccaggcgcaacaggtcaggcaggccctcctgggcctgtgggccctcccggtttgcctggcctaaggggcgacgcaggagccaagggggagaagggacatccgggtctcatcggcctgatagggcccccaggtgagcagggagaaaaaggggatagaggccttcctggacctcaaggcagcccgggacagaaaggggaaatgggcattccgggggcctccggtcccatcgggccagggggcccaccaggcttgccaggccccgcaggaccaaaaggagcaaagggtgccactggtcccggcggacctaaaggcgaaaagggggtgcaagggccccccggccacccaggcccgccaggggaagtcattcaaccactgcccatccagatgccaaagaagacacggcgatcagtcgatggaagtcgccttatgcaggaagacgaggcaatcccaaccggaggcgctccaggatctcccggcgggctggaggagatcttcggctccctggactcattaagggaggagatcgagcagatgagacggcccaccggcacccaggattcccctgctagaacatgtcaagatcttaaattatgtcatcccgaattaccagacggcgagtattgggtcgaccccaaccaaggttgtgctagagatgcgttcagagtgttctgtaacttcacagccggcggagaaacctgtgtcactccgcgcgacgatgtaactcaattcagttatgtagattccgaggggtcccctgtgggggtagtccaacttactttcttacgcctcttgagtgtgtccgcccaccaggatgtctcctacccttgctccggagccgcccgggatggaccactgaggctgcgcggagccaacgaggatgaactctctcccgaaacttctccttacgtaaaagagtttcgggacggctgccagactcagcagggcaggactgtcctggaagtgaggaccccagttcttgagcaactcccggtgttggatgctagcttctcagatctcggtgctcctcctaggcgtggcggagtactcctgggacccgtctgttttatgggatag

SEQ ID NO: 232777 - DNA, 4953 bp, Artificial Sequence
  derived and/or modified sequence
atggagcgctgttcaaggtgtcaccgcttgttacttctcttgcctctggtgctcggcctcagcgccgcgccaggttgggctggggctcctcccgtagatgttttgagagcccttaggttccctagtctgcccgacggggtgagacgtgctaaaggaatatgccctgccgatgttgcctatcgagtcgctcgccctgctcagttgtccgcgcctacacggcagctatttccgggaggttttccaaaagatttcagcctgcttacagtggttagaactcgtccagggctgcaagcccccctactcacgctctactccgcccaaggggtccgacagctgggcctcgagttaggaagacccgttcgctttctctatgaagatcagaccggccggccccaacctcccagtcaaccagtgtttcgggggctctcactggctgatggaaaatggcatcgagtcgctgtggctgtcaaagggcaaagtgtaaccctcatcgtcgattgcaagaaaagggtgacccgcccactgccacggtcggcacgtcccgtgctcgatacccacggtgtaatcatcttcggcgcaaggatattagacgaggaggtgttcgaaggtgatgtgcaggaactggcaatcgtgccaggagtgcaggcggcttatgaatcctgtgagcagaaagagctggaatgcgagggagggcaaagagaacggccgcagaatcagcaacctcatcgagcacaacggagtccccagcaacagcccagtagattacaccggccacaaaaccaggaaccccagtctcaggacccaactcctggtgaggaagaagagatcctggagagctctctgttaccacctctagaggaggcagcgcacggacctagaggacttaagggcgaaaagggggagcccgctgtgctcgaaccgggtatgctggttgaaggcccccctggcccagaaggccccgcgggacttattgggccccccggaatccaggggaacccaggaccagtcggtgatcccggagagagaggacccccaggtcgcgctggtttgccggggtctgatggcgcgcctggaccacctggcacttctttaatgcttcccttcagattcggttccggcggtggagataaaggcccggtggtggctgcccaggaggcacaggcccaggccattctccagcaggcgcgacttgctttgaggggtcctcccggacctatgggatacactggtcgtcctggacccctggggcagccaggctctccaggtctcaaaggagaaagcggcgacttgggtcctcaaggcccaagaggaccacaggggcttacaggccctccaggtaaagctggaagacgaggccgtgccggagcagatggggctcgtggtatgcccggagatccaggggtcaaaggggatcgcggattcgatggcttgcctggcttaccgggagaaaagggccaccggggggacacaggcgctcagggactgccaggacccccaggagaggatggggaaaggggggacgacggtgagattggaccaagaggcctgccaggggaaagcggcccacgaggtcttctgggacctaaaggacctccagggatccccggaccaccaggggtgcgcggaatggacggacctcagggcccaaagggctcattaggaccacaaggtgagcccggacctcccggacagcagggtacccccggtacacaaggccttcctggtccccagggtgccatcggccctcacggggagaaaggacctcaaggaaagccaggactgccagggatgccagggagtgatgggccacccgggcatccgggcaaggaaggcccacctgggacgaagggaaaccagggcccttctggaccgcaaggcccactgggttacccaggcccaagaggagtgaagggagtggatggcattaggggtctgaaggggcacaaaggggaaaagggggaggacggttttccaggtttcaagggtgatatcggggttaaaggtgataggggagaagtaggcgtgccagggagcaggggagaagatggacccgaaggtcctaaaggccggaccggccctacaggcgatcccggacctccggggctcatgggagaaaaagggaaattgggagtccccggactaccaggatatcctggacgacagggaccaaaagggtcactcgggtttcccgggtttcccggcgcaagtggcgagaaaggggccaggggcctgagcggtaaaagtggccctaggggcgagagaggacccaccggaccaagagggcagagggggccaagaggcgccactgggaaatcgggggctaagggaacgtctggaggagacggacctcacggtcctcctggagagagaggcttgccagggcctcaaggccccaacggctttcctggccctaaaggtcctccaggacctcctggcaaagacggtctgcccggccaccccggacagagaggtgaagttgggttccaaggtaagactggtccccccgggccccctggagtggtgggtccacaaggcgctgcgggcgaaactggccccatgggcgagcgaggacaccccgggccacctggccctccaggcgaacagggcctgccagggaccgcgggaaaagagggaaccaagggtgaccccggcccccctggtgcaccgggcaaggatggccctgcaggcttgcgtgggtttccaggcgagcgaggtctacccgggaccgctggtggacccggcctgaagggtaacgaaggtccatcggggccaccgggcccggcaggtagtccgggggagaggggagccgcaggaagcgggggtcccattggaccccctgggcgcccaggacctcagggacctccaggagccgcaggcgagaaaggagttcccggtgaaaaaggccctattggacccacaggacgggacggtgtgcaagggcccgtgggcctgcctgggcccgctggcccaccaggagtggcaggagaagacggcgataaaggtgaagtgggagacccgggtcagaagggaacaaaggggaataaaggagagcacgggccgcctgggccaccgggccctatcggaccagtgggacaacccggagcagcaggtgcggatggcgaaccaggggctcgaggcccacaaggtcacttcggcgctaagggagatgaaggtacccggggatttaacgggccccccggtccgatcggcttacaggggctgcctggtccaagcggcgaaaaaggggaaacaggagatgtgggccccatggggccccccggcccacctggaccacgcggtccggcgggaccaaacggagcagacggaccacaagggccacctggtggcgtcggaaacttagggcccccaggggagaaaggtgaaccaggggagtccggttcccccggtatccagggagagccaggcgtgaaaggcccccgcggtgaacggggtgagaaaggcgagagcgggcagcctggagagccaggacctccaggccctaaagggcctactggcgacgatgggccaaagggaaatcctggtccagtgggattccccggggatccaggccctcctggtgagggcgggccacgaggacaggatggagcgaaaggagacaggggggaagacggggaaccgggccagcccggctcgcccggacccacaggcgaaaatggtccacccggacctttgggtaaacgtggtcccgcaggtagtccaggttcagaaggtaggcagggaggaaagggcgctaaaggggatcctggcgcgattggtgcgcctgggaagacagggcccgtaggacccgccggtccagccggaaaacccggccccgacggacttcgcggtttgccagggagcgtgggacagcaaggtcgccctggtgctacagggcaagccgggccccccggacccgttgggccccctggccttccggggttgagaggagatgcaggagccaagggcgaaaaggggcatccgggattgattggcctgataggacctccaggagagcagggggaaaagggtgacagaggccttccagggccccaaggctcccccggtcagaagggcgaaatgggaatccctggcgcttccggaccaataggacccggaggccctcctggcctcccaggccctgcaggcccaaagggcgcaaaaggagctaccggcccaggcggacctaagggcgaaaagggtgtgcagggacccccaggacatccaggacccccgggtgaagtaattcagcccctccccattcagatgccaaagaaaacacggcggtctgtggatggaagtcgactgatgcaggaagatgaggctatacccaccggaggcgcccctggatcaccaggaggccttgaggaaattttcgggtccctcgatagtctgcgcgaggagatagaacagatgagacggcccaccggaacacaggacagcccagcccgaacttgccaagatctaaaactatgccaccccgagctgcccgatggcgaatactgggttgaccccaatcaaggatgtgctcgagacgcttttagggtcttctgcaattttaccgctgggggggaaacctgcgtgacacccagagatgacgtcacccagttctcatatgtcgacagtgaaggaagtccggtcggtgtggtgcagcttaccttcctcagattattatccgttagcgcacatcaagacgtttcttatccctgctcaggcgctgcccgagacggaccactcaggctcaggggtgccaacgaagatgaactgtctcccgagacctctccgtacgttaaggagttccgggatgggtgccaaactcaacagggacgaacagtcttggaagtcagaacaccggtcttagaacaactgcccgtattagacgcttctttttcagatctgggggcccctcctcgccgcggtggcgtgcttctgggaccagtgtgcttcatgggatag

SEQ ID NO: 232778 - DNA, 4968 bp, Artificial Sequence
  derived and/or modified sequence
atggaaaggtgctcccgatgccataggcttttactgttgctgccacttgtactgggattaagtgctgcacccggttgggctggcgccccacccgtcgatgtcttaagggcactgagattcccttctttgccagatggtgtccgccgtgccaaaggaatctgtcccgctgatgtggcttatcgcgtggctaggccagcacagctctcagcccctactcgccaactgttccccgggggattcccgaaggatttttccctgttgactgtcgtaagaacacgaccaggactacaggcgcctcttttaaccctttattctgctcagggcgttcgtcagcttggcttggaacttggcaggcctgtacgcttcctgtatgaagaccagaccggccgccctcaacccccctctcaacctgtctttcgagggctgtcacttgcagacggaaagtggcatcgagtcgctgtggccgtaaaagggcaaagtgtcactctgatcgtggactgtaagaagcgggttactcgacctctgcctcggtcagcaagacctgtgctagatactcacggcgtcattatttttggggcacgtatccttgatgaggaggtgtttgaaggggatgttcaggagcttgccatcgttcctggagttcaagctgcctacgaatcatgcgaacaaaaggagctcgagtgtgaggggggtcaacgagagcgtccacagaatcagcagcctcaccgagcccaacgatcaccacaacaacaacctagccgcctccacagaccccaaaaccaggaacctcagagccagccaacagagtcactctactacgactacgaacccccttactacgatgtaatgacgacaggtacaactccagactaccaggcagcacacggaccacgcggcctgaaaggagagaagggagaacctgctgttcttgaaccaggaatgttggtggaaggcccccctgggcccgagggacctgccggacttatcggcccacctggaatacaagggaaccccggaccagtcggggatcccggagagcggggtcccccgggtagagccgggctgccagggtccgacggcgcgcccggcccgcccggaacaagcttaatgctccctttcagattcggtagcgggggtggtgataaaggacctgttgtagctgcgcaagaggcccaagcccaggcgatattacagcaagccaggctggccttaagaggaccgccagggcctatgggatacacgggcaggcctggcccactggggcaaccggggtcaccaggcttaaagggagagtcaggtgatctaggcccacagggcccgaggggtccccagggattgacaggaccacctggaaaagcaggtagaagggggagagctggtgccgatggagccagagggatgcccggtgaccccggcgtgaagggggatcgaggttttgatggactgccaggactgcccggggagaagggtcacagaggtgacaccggggcacagggactcccaggtcccccaggagaagatggcgagcgtggcgatgatggcgaaataggtcctaggggacttcccggtgagagtggcccacggggtcttcttgggccaaaggggcctccagggattcccggccctccgggtgtgcgcggtatggatggacctcaaggccccaagggctcccttggcccccagggggagcccggacctcccggacagcaaggtacacctggcactcagggcctgcccggtccccagggagccataggaccgcacggcgagaaaggaccacagggaaaacccgggctcccggggatgccaggcagcgatggccctccagggcaccctgggaaggagggaccaccaggcacgaaaggaaatcaaggacctagcggcccgcaaggccccctggggtaccccggcccaaggggagtaaagggtgtcgacggcattagaggcctgaagggacataagggagagaagggagaagatggctttcccggattcaaaggcgacatcggagtgaagggcgacagaggcgaagtcggggtgcccggaagtagaggagaggacgggccggaggggccaaagggcaggaccggtccaactggagatcctggcccccctggactgatgggcgagaaaggcaagctcggcgtcccaggccttccgggctacccaggcagacagggtcccaaaggcagcctggggttccccggatttcctggagctagtggcgagaaaggagcaagaggtctctcaggtaaaagtgggccaagaggagagcgcggacctacaggcccccgcggacaaagaggtccaaggggtgctacggggaaaagtggggcaaaggggaccagtggtggggacggcccacatggacctcctggcgagcggggcctgccaggcccacagggacccaatggatttcccgggcccaaggggcctccaggacctcccggcaaggacggcctgccaggtcaccccggacagcgaggggaggtgggattccagggcaaaaccggacctccaggacctccaggagtcgtgggaccccagggagctgcaggagagactggtcctatgggcgagcgtgggcacccaggaccccccggtcccccaggagagcaaggactgcccggaacagctggcaaggaggggacgaaaggtgacccagggcctcccggagcgccgggcaaagatggacccgccgggcttcgcgggttcccaggcgaaagaggactaccgggtacagcgggagggcccggactcaaaggcaacgagggaccttctggaccccctggaccagcaggaagccctggggagagaggggctgcaggaagtggtggcccaattggcccccctggtcgacccggcccacaaggccctccgggcgcggccggagagaagggcgtgccaggagaaaagggacctatcggtcctacaggtagagatggggttcagggtccggtggggctgccaggtcccgctggtccaccaggagtggcaggagaggacggcgacaagggagaagtgggagacccaggacagaaaggcaccaagggcaataagggcgagcacggaccacctggaccgcctggacctatcggccccgtgggacagcccggagcagctggcgcggacggggaaccaggagcaaggggcccccagggccacttcggggccaaaggggatgaaggtacacgtgggttcaacggaccaccagggccaatcggcctgcagggtttgccgggaccctctggcgagaagggcgaaactggggacgtgggaccaatgggaccccccggccctccaggaccccgaggaccggctggtcctaatggcgcagacggccctcaaggccctccgggaggcgtgggaaatctggggccgcctggcgagaagggggaacccggggagagcgggagcccaggcatacagggagaaccaggagtgaagggaccaaggggcgaaaggggggagaagggtgagtccgggcagccaggcgagcctggacctccggggcctaagggacctactggagatgacgggcccaagggaaatccaggaccggtcggatttcctggcgatccaggccctcctggggaaggaggacccaggggtcaagacggagccaaaggggaccggggtgaagacggtgaacctggacaacctggatcccccggacctactggagagaatggtccacctggcccactggggaagcgtggccccgcaggctcacccggaagcgaaggaaggcaagggggaaaaggtgccaaaggggaccctggagctattggcgccccagggaagaccgggcccgtgggacccgcaggaccagctggcaaacccggaccagatggcctgaggggtcttccagggagtgtgggacaacaggggcgacccggagccactggacaagccggcccaccaggccccgtcggtccacctggtctgcccggactgcgaggggacgcaggcgcaaagggagagaagggtcatccagggctgataggtctcattggaccacctggcgaacagggggagaaaggagaccgcggtcttccaggcccacagggaagccccggacagaaaggagagatgggcatccccggggcatctggacccatcggtcccggaggtcctcccggcctccccggccctgctggaccaaaaggagcgaagggcgctacaggaccaggcgggcctaaaggcgagaaaggagttcagggacctcctggccatccgggcccccccggcgaggtcattcagcccctcccaattcagatgcctaagaaaaccagaagaagcgtggatggctcacgcctgatgcaagaagacgaagctattcccaccggcggtgcccctggatccccaggtggtctagaagaaattttcgggagtttggatagcctgcgcgaagagatcgaacagatgcgtcgtccaactggaacccaggacagtccagccaggacgtgccaagatttaaaactgtgtcatcccgaattacccgacggagagtattgggttgatccaaaccaggggtgtgcaagagatgccttcagagtgttttgcaactttactgccggaggagaaacatgcgttactccccgtgatgatgttacccaattctcttatgtcgactccgaagggagccctgttggagttgtacagctcacctttcttcgcctcctatctgtcagcgcgcaccaggacgtgagctatccttgttcaggcgctgcccgcgacggccccctacgcctgagaggcgccaatgaggatgaactttcacctgaaacaagcccatatgtgaaggagtttcgggacggatgtcaaactcagcagggtcgtaccgtactggaagtcagaacaccagttctagaacagttaccagtcttggatgcaagtttttctgatctgggcgccccacctcggcgcggtggtgtgcttttaggaccagtctgctttatggggtag

SEQ ID NO: 232779 - DNA, 5031 bp, Artificial Sequence
  derived and/or modified sequence
atggagaggtgtagcaggtgtcataggctgttattactcttacctttagtcctcggcctgtcagctgccccaggctgggcgggagccccccctgtcgatgtgttgcgtgctctgaggttcccaagcttgcctgacggtgtgcggcgggccaaaggaatatgcccagccgacgttgcctacagagtagccaggcctgcccaactgtccgcccctacccgccagctatttcctggaggttttcccaaagattttagtcttttaactgtggtcagaacccgccccggactccaggccccacttctgactctctactccgcacagggagtgagacaacttgggctagagctcggcaggcccgtcaggttcctgtatgaagaccaaaccggacgaccacagccaccttcccagcccgtctttagaggattgtctttggcagatgggaaatggcatcgtgtcgcagtcgcagttaagggccagtctgtcaccctgatagttgattgtaaaaagagagtaacacgtcccctgccacggagcgccaggccggttctagatacccatggtgtgattattttcggagcaagaatcctggacgaggaggttttcgaaggggatgtgcaggagctagcaattgtgcctggagtgcaggccgcttacgagagctgcgaacaaaaagagttggaatgcgaaggaggacaacgcgagagaccacagaatcaacaaccacacagagcccagagatctcctcaacagcagccctcccgcttgcataggcctcagaaccaggagccccagagtcaaccaacggagtccctatactacgactacgagccaccctactacgatgtgatgaccacaggaaccacacccgactaccaggatccaaccccaggggaagaggaggaaattctggaatcaagtctgctcccccctctcgaggaagccgcccacggcccccgtggattgaagggtgaaaaaggggaaccagccgtgctcgaacctggtatgcttgtagaaggaccacctggacctgaaggacctgctggactaattggtcccccgggaatccaaggtaaccccggccccgtgggggaccctggcgaacgtggccccccaggtcgggccgggcttcctggctccgacggcgcacctggtcctcccggaacttccctgatgctcccgtttcgcttcggatccggtgggggggataaaggaccagtcgtcgctgctcaggaggcacaggcacaggctatcctgcaacaggctcggctggcacttcgcggcccacctggacctatgggatacaccggacgacctggacctcttggtcagcctggtagtccgggactcaaaggcgaaagcggggatctgggtcctcaggggcctcggggtccgcagggactaaccggtccacctggtaaagccggcagacgtgggagagccggcgccgacggcgcaaggggaatgccgggggaccccggtgtgaagggtgatcgtggatttgatgggctacctggactgcccggggaaaaggggcaccgtggagatacaggcgcgcagggcctgccggggccccctggggaggatggggaacggggcgacgatggagagataggacctaggggtctcccaggggagagcgggcctcggggactgcttggaccaaagggaccaccgggcattcccggaccacccggcgttcgaggaatggacggcccgcagggaccaaagggaagcttaggccctcagggggagccaggaccaccgggacagcaaggcaccccaggcacccaaggcttgccaggcccgcagggagccattggccctcacggagaaaagggaccacagggcaagcctggactgccagggatgcccggatctgacggacctcccggacatccagggaaggagggaccaccaggcactaaagggaatcagggccccagtggaccccagggccccctagggtaccccggtcccagaggggtgaagggcgttgatgggatcagagggttgaaagggcacaagggagaaaaaggggaggatggtttcccaggatttaagggcgacatcggcgtcaaaggcgacagaggggaggtcggagttcctggcagccgcggagaagacgggccagaggggccaaaaggaagaacaggtcctacaggcgatccaggaccaccaggcctgatgggagaaaagggaaagctcggcgtgcccggattgccgggctaccccggcaggcagggaccgaagggaagcttggggttccctggatttccaggggcgtccggagagaaaggggctcgcggcctgagcggcaagagtggacctcgtggggaacggggaccgactggacctcgggggcagcgcggtcctagaggcgcaaccgggaagagcggcgccaaaggcacttccggtggcgatggaccccatggcccgccaggagagagaggattgcctggtccacagggcccaaatggattccctggccctaagggtccacctgggccacccggcaaagatggactgcctggtcatcccggccagcgaggggaagtaggatttcagggtaaaactggacctccaggcccacccggcgtcgttgggcctcagggtgccgccggggaaactggcccgatgggtgagagaggacacccgggcccgcccggaccccccggagaacaaggactacccggtaccgccggcaaagagggtactaaaggagacccgggacctcctggagctcctggaaaggacggaccagccggcttgagaggttttccaggtgaacgcggcctgcctggaactgctggtggtccgggactcaaaggaaatgaaggaccgtccgggccacccggacctgcgggatcccctggcgagagaggcgctgcagggtcaggcgggccgattgggccccctggcagacccggtcctcagggccctcccggtgccgcaggagagaagggggtgccaggtgagaaaggtcccattggacctactgggcgcgatggtgtccaaggacccgtgggactcccgggacccgcaggaccccccggcgtggcaggtgaagatggtgacaagggcgaggtaggcgaccctggtcagaaagggacaaaggggaacaaaggggagcacgggccccccggtccccctgggcctatcgggccggtcggtcagccgggtgcagctggagcagacggcgagccaggtgccagagggcctcaaggacactttggtgcaaaaggagatgaggggacacgaggtttcaatggaccacccggcccaatcggactccagggcctccctgggccaagcggagagaagggagagacaggcgatgttggacctatgggtccccctggtccgccaggaccccgcggtcctgccggacctaacggagcggatggacctcagggtcctccagggggagtcggtaacctcggtccccccggcgagaaaggcgagcccggtgaatctgggagtccaggcatccagggcgaaccaggcgtgaagggtcctcgtggtgaaagaggggaaaagggtgagtctggtcaaccaggagaaccgggtccacctggtccaaaaggtcccactggggatgatgggccaaagggcaatcctggccctgttggttttcccggtgatcccggtccgcctggagaaggagggcccagaggccaggatggggccaaaggagacagaggcgaagatggagagccagggcagcccgggagtccaggcccaacaggtgaaaacggaccgccaggaccactaggaaagcgcggtcctgcgggcagcccgggttcagagggtagacaggggggcaagggagcaaaaggcgatccaggggctattggggcacctgggaaaacaggtcccgtcggtccggccggccctgccgggaagcccggtccagatggacttaggggcctgcctggctcagtaggacagcagggtcgtccaggcgctaccggccaagccggtcccccaggaccagtggggccccctggactcccaggcttgaggggtgatgcaggcgcaaagggggaaaaaggccatcccggactgattggattaattggtcccccaggggaacagggggaaaagggtgatcgcggcctgcccggcccacaaggttctcccggtcagaaaggagagatgggaatccctggcgcttctggcccaatcggtcccggaggccctccaggtcttccgggccccgcaggtccaaagggcgccaagggcgcaaccggaccaggaggacctaaaggagagaaaggagtgcaagggccacccggccaccctggcccccccggcgaagtcatccagccactgcctatacagatgcccaagaaaacccgccgctccgtggacggctcgcgcctcatgcaggaagatgaggccatcccaactggaggggcccccggtagcccaggtggcttagaagaaatttttggaagtttggattcactcagagaagagatcgagcagatgcgccgccctacaggcacacaggacagccccgctcgtacttgtcaggacttgaaactctgtcaccctgagttgccagatggggagtattgggttgaccctaatcaaggctgtgcccgggacgctttccgagttttttgtaattttaccgctggaggcgagacttgcgtgactccaagagacgatgtgacccagttttcctatgtcgacagtgaagggtcaccagtaggagtagtccagcttacattcctacgcctcctgtcagtaagcgctcaccaagatgtctcctatccttgctccggtgccgctagggacggtcccctgcggttgagaggagccaatgaagatgagctgtcccccgaaacgtctccatatgtcaaagagttccgagacggatgtcagacccagcagggtcgtacggtactggaggttagaacgccagttctggagcaattgcctgtgttagatgccagctttagtgatttgggggcccctccacgccgtggtggggtgctcctgggtcctgtgtgttttatgggttag

SEQ ID NO: 232780 - DNA, 4953 bp, Artificial Sequence
  derived and/or modified sequence
atggaacgttgctcccgatgtcatcgactgcttctactgttgcctctggtattaggcctctctgccgccccaggttgggccggcgcaccccccgtggacgttctgcgagctctcagatttccttccctccctgacggagtgagacgggctaaagggatttgtcccgcagacgtggcctatcgagtcgcacggccagctcagttgtccgcccctactcgacagctttttccggggggctttcctaaagactttagcctgctgacagtggttagaactcgacctggcctccaggctcctctgctgacactgtatagcgcacagggcgtccgtcaacttggcctggaactgggccggcctgtgaggtttctttacgaagatcagaccggtaggccacaacctccatcacagcccgtattccgcggtttatcactggctgatggcaaatggcatcgcgttgcagtggcagtgaagggacagagcgttacactgattgtagattgtaagaaacgagtgacgagacccctcccacgcagtgctaggccagtactcgatacgcacggcgttatcatctttggcgcccgaattctggacgaggaagtgtttgagggggatgttcaagagttagccatcgttcctggcgtgcaggccgcctatgagtcgtgcgaacagaaggagctggaatgtgaaggcggacagagagaacggccacagaaccagcagcctcatagggcacagaggagtccacaacaacaaccctccagattgcaccgacctcaaaatcaagagccgcaaagtcaggatccaaccccgggtgaggaagaagaaatcctggagtcaagtttgctgccccccctggaggaggctgcgcatggtccacgaggcctgaagggtgaaaagggggaaccggccgttctcgaacctggcatgcttgtagaggggccacctggccccgaggggcccgcaggactgatcggaccacccggtatccaaggaaatcctggtccagtgggggatcctggtgaaagaggccctcccggcagagcagggttaccgggctccgatggcgctcccggccctcctggtacatcacttatgctgcctttccggttcggttcgggtggaggggacaaggggcccgtagtcgccgcccaggaggctcaagcccaggctatactccagcaggcaagactggcccttaggggaccacccggcccaatggggtacaccggacgccccggccctttgggccagcctgggagccctggactgaagggggaaagtggcgatttgggtccacaggggccaaggggtccccagggattaacaggcccaccaggtaaggccggaaggcgcggacgagccggagctgacggggctcgggggatgcccggcgatcccggtgtaaagggagatcgcggatttgacgggttgccaggccttcccggggaaaagggtcacagaggggataccggtgcgcaaggtctcccaggccctccaggagaagacggagaacgcggagacgatggagagataggacctcgtgggttacctggtgaatccggcccaagaggattgctcggacccaagggcccaccaggcattccaggacctcctggggtcagaggaatggacggacctcaaggccctaaaggaagcctgggcccccagggcgagccaggccccccaggacagcagggcaccccaggcactcaaggtctgcccggtcctcagggcgcaataggacctcacggcgagaagggaccacaggggaaacccggcctacctggtatgcccggctctgatggccccccaggacaccccggaaaggagggcccacctggtactaaaggaaatcagggaccaagcggcccacaggggccactgggttaccccgggccacgaggagttaaaggcgttgatggaatccgagggctaaaagggcacaagggcgaaaagggcgaagatggatttcccggtttcaaaggcgatattggggtgaaaggcgatcggggcgaagtgggcgtgccagggagtagaggcgaggacggcccagaggggcccaaaggtcgcacaggcccaactggcgatcctggtcctcccggtctgatgggggagaaaggcaaactcggcgtgccaggattgcccgggtaccctggacgtcagggtccaaaaggaagtctgggatttcccggcttcccaggtgccagtggcgaaaaaggagcgagaggcttatcggggaaatcaggcccccgaggcgaaaggggaccaactggcccaaggggccaaagaggcccgcggggcgcaacagggaagagtggagccaagggtacatctggaggtgatgggccacacggaccccctggtgaacgaggactcccagggccacagggacctaacggatttcctggccctaaaggaccccccggacccccagggaaggacgggttacccggacaccccgggcaacgtggtgaggtcggctttcagggcaagaccggtccgcctggcccacccggcgttgtcgggcctcaaggcgcagctggtgagacagggccaatgggtgagaggggtcaccccgggcctccagggcctccaggtgagcaaggcctgccaggaactgccggtaaagaaggaaccaaaggcgatccagggcccccaggggctcccgggaaagacggacctgcaggactccggggcttcccaggagagcgaggtttacccggtaccgccgggggaccaggactgaagggaaatgagggaccaagtggaccccctgggccggccggttctcccggagaaagaggggctgcgggctccggtggaccaattggccccccaggccggccaggaccgcagggaccccccggagccgcaggggagaagggtgtgcctggagaaaagggaccgatagggccgactggacgggatggtgttcagggcccagtgggactgcccggccctgccgggccaccaggtgtcgcaggagaagatggggacaagggcgaagtcggcgacccaggacagaaaggaaccaaaggtaacaaaggggaacatggcccgcccggcccacccggacccattggacctgtgggccagcccggggccgccggtgccgacggcgaaccgggagcacgcggacctcagggtcatttcggggctaaaggcgatgagggtacaagaggatttaacggcccccccgggcctattggtctgcagggattaccaggaccctccggagagaaaggagaaactggagacgttgggccaatggggcccccaggcccaccaggtccccgcgggccagctggacctaacggggcagacggcccacaggggcctccaggaggcgtgggaaacttggggccaccaggtgaaaagggagaaccaggggaaagcgggagccctggcatccaaggtgagccaggcgtaaaggggccgcgtggcgagcgaggagagaagggtgaatcaggacagcccggggaaccgggtccccctggacctaaaggaccgactggggacgatgggccgaaaggaaatcctggcccggtgggattccccggagatccaggacctccaggtgagggcgggcctagggggcaggatggcgcgaagggggataggggagaagacggcgaacctggacagccgggatcccccggaccaacaggagaaaatgggccccccggaccactcggaaagcgcggccccgccggctctccaggtagtgaaggacgtcaaggaggcaaaggagctaaaggcgaccctggagcgattggggcccctggaaaaactggaccggtgggccccgccggtccagccggcaagccagggccagatgggctgcggggacttcctggtagcgtggggcaacagggcaggcctggagccactgggcaggcggggccccccggcccggtcggtcctcccggcctccccgggctgaggggtgatgctggagcaaaaggagaaaaaggacatccaggactgatcggccttatcggcccacccggggaacaaggcgagaaaggcgacagaggactgcccggaccacaaggaagccccggtcagaaaggagagatgggtatcccgggcgcgagcggacccataggccctggaggccctcctggcctgccaggtcccgctggccctaaaggtgctaaaggcgcaaccgggcccggtggaccaaagggcgagaaaggggtacagggcccgccagggcaccctggccctcctggagaagtcatccagcccttgccgattcagatgccaaaaaagacccgcagaagcgttgatggctcacggctcatgcaggaagatgaggcaatacctactggcggcgcccccggaagcccaggaggcctggaagaaatatttggatcactggatagtttgcgagaagagatcgagcagatgcgaagacccacaggtacacaggacagccccgcccgtacatgtcaggatcttaaactctgccaccctgaactgcctgatggagaatattgggtcgatccaaatcaaggctgcgctcgggatgcatttagagtattctgtaattttactgccggcggcgaaacttgtgtgacaccaagggacgacgtgactcagttcagctatgtggattcagaggggtctcccgtcggcgtggttcaattgactttcctgcgcctgttgtcggtaagcgcccatcaagatgtgtcctatccatgcagcggggccgcaagagatggcccattgaggctgaggggggctaacgaggatgagctaagtcctgaaacctcaccgtatgtcaaagagttccgcgatggctgtcagacccaacaaggaaggacagtactagaagttaggacccccgtgctggaacagttaccagtgctggacgctagcttttccgacctcggtgctcctcctagacgtggcggcgtgctgctaggccccgtttgctttatgggctag

SEQ ID NO: 232781 - DNA, 5031 bp, Artificial Sequence
  derived and/or modified sequence
atggagcgctgtagccgctgccaccgcctcttacttctgctgcccctggttctgggcctgtcggcggcacctgggtgggcaggtgctcccccagtggatgtgctgcgagccttgcgcttcccaagcttgcctgacggagttcgaagagcaaagggaatctgtcccgctgatgtggcttacagagtggcccgacctgcccagttaagcgctcctactcgccaattattccccggaggttttcccaaggacttttctttactgacggtcgtacgcactaggcctggtctccaagcccccttattaaccctctatagcgcccaaggcgttagacagctgggccttgaacttgggaggcctgttcgtttcctctacgaagatcagacgggacgtccacagccacctagccagccagtgtttaggggcttaagtctcgctgacggcaagtggcacagagtcgctgtagctgtaaagggccagtccgtcacactcatcgtggattgtaaaaagcgggtaacgagaccattgccacggagtgccaggcccgtactggatacacatggagtcatcatttttggcgcccggatcctggacgaagaagtctttgagggagatgttcaagagcttgccattgtaccaggagtacaggccgcatatgagtcttgcgagcagaaggaattagaatgcgagggcgggcaaagagaaaggccacagaaccagcagccacatagggctcagaggtccccccagcagcagcccagtcgacttcaccgcccacagaatcaagaaccccagagccagcctacagaatctctttactacgattataagcccccctattatgatgtgatgacaacaggaaccacaccagattaccaggatcccacacccggtgaagaagaagaaatcctggaaagttcacttctgccaccacttgaggaagctgctcacggacccagaggccttaagggtgaaaaaggcgagccagccgttttggagcctggtatgcttgtggaggggcctcctgggcccgaaggacccgcaggactcatcggaccaccagggatccaaggcaatcccggacctgtcggagatccaggagaacgaggaccccccgggcgggcgggcttacctggttccgacggagcgccaggtcccccgggaactagcctgatgctgcccttcagattcgggagtggtgggggtgataagggcccggtagtggctgcccaggaggcacaagcccaggcaattttgcaacaggcgcgacttgcgctcaggggtcccccaggccccatgggttacaccgggcgacccggacctctgggacaacccggcagccccggcctcaagggggagagcggcgacctaggaccgcaggggccaaggggaccacaggggctcactggtcctccagggaaagccggacgacgtggacgagctggtgccgacggggctcggggaatgcctggggaccctggtgtaaaaggcgatagaggttttgatggattaccaggactgccaggagaaaaaggccatcggggggatacaggagctcaaggactccctggtccgccaggcgaggacggggaacggggagacgacggagaaatcggcccgaggggcctacctggggaaagcggtccaagaggcctgttgggcccaaagggtccacccgggatccctgggccccccggcgtaagagggatggacggtccgcagggacccaaaggctcattaggaccacagggcgaaccgggcccaccaggacagcagggcactcccggaacacagggactcccaggaccgcagggagcaattgggccccatggggaaaagggaccgcagggaaaaccaggattacccgggatgccaggcagcgacggaccgccaggacatccaggtaaagagggtcccccaggaaccaaaggaaatcagggtccctcaggaccacaggggcctctggggtatccaggcccacggggcgtcaaaggagtagacgggatccgaggactgaaaggccacaaaggtgagaaaggcgaggatggcttcccagggtttaaaggcgacatcggcgttaaaggagacagaggcgaagtgggagtgccggggagcaggggcgaagatggaccggagggacccaaaggtcgcactggcccgacgggggacccagggcccccaggtttaatgggagaaaagggcaagctcggtgtgcccggacttccaggctaccctggcagacaaggccctaaaggatcactcggttttcctggctttccaggggctagcggcgaaaagggagccaggggtctgtcaggcaagtccggccctcgtggtgaacgcggacccacaggcccacgcggacaacggggaccacgcggcgccaccggcaaatcgggggctaagggcactagcggcggagatggacctcacggaccccctggtgagaggggcctcccaggcccacagggacctaatggctttcccggcccaaaaggcccgcctggccctccaggcaaagatggccttcccggacatcccggacagcgcggggaagtggggtttcaaggaaaaacaggccctcctggaccgcccggggttgtagggcctcaaggcgccgcgggagagaccggccccatgggcgaacgtggccatccaggccctcctggcccacccggagagcagggactcccaggaacagcggggaaagagggcacaaagggcgaccccggacctccaggcgcaccaggcaaagatggccctgccgggcttcgtgggtttcccggagagcgcgggttaccaggaaccgccggcggtcccgggttgaagggcaatgaaggaccgagcggcccacctggtccagccggatcccctggcgagcgtggcgcagccggaagcgggggaccgataggacctccggggcgaccaggtccccaggggccacccggagccgcaggagaaaaaggagtgcctggcgaaaaggggccaatcggcccgactgggcgggatggtgttcagggaccggtgggtctcccaggaccagcaggcccaccaggcgtggccggagaggatggagacaagggcgaagtcggagatccaggccagaaaggcaccaaaggtaacaagggagaacatggaccaccagggccacctggtcccataggccccgtcgggcagcctggtgccgcgggggccgacggcgaacccggagcgagaggaccgcaggggcattttggcgccaagggtgatgagggaacacgaggcttcaatggacctccaggacccataggactccaagggctgccaggacctagcggcgaaaagggtgagacaggggacgtgggcccaatgggacctccagggccccctggacctcgaggccctgcaggccccaatggcgcggatggacctcagggtcctccgggaggcgttggcaaccttgggccacccggagagaagggcgaacctggggagagcgggagcccaggcatccaaggagagcccggagtgaaaggcccgcgcggggaacgcggagagaaaggcgaatcaggacagccaggagaacccggacctccaggccccaaaggacccaccggtgatgacggccccaaggggaatcctggaccagtgggctttccaggcgaccctggcccacccggtgaggggggacctcgggggcaggatggagcgaaaggggatagaggcgaagacggcgagcctgggcagcccggttctcctggacctactggcgagaacggcccgcccggacctctggggaagaggggccctgctggctctccaggatcggaaggaaggcagggcggtaaaggagcaaagggggaccctggagcgatcggagcaccaggaaagacgggtcccgtgggtcccgcaggaccagcaggcaaacctggtccagatggcttaaggggtcttccagggagcgtcgggcagcaaggccggccaggagcaactggccaggcaggtcctcccggtcccgttggacccccaggcctgccagggttgcgcggcgatgcaggagcaaaaggcgagaagggacatccaggtttaatagggctgatcggccccccaggggaacagggtgagaaaggagatcgaggcctaccgggaccccaaggaagcccagggcaaaagggcgaaatggggatccccggagccagtggacctattggacctggcggcccaccagggctgccaggtcctgccggccccaaaggagcgaagggggccacgggacccggaggacccaagggcgaaaaaggggttcaaggacctccaggacatcccggccccccgggcgaagtgatccagcctctaccaatccaaatgcccaaaaaaacaagaagatccgtggatgggagtcgtcttatgcaggaggatgaagcaatccccaccggtggtgctcctggttctccaggcggcctggaagaaatttttggctcacttgatagcttacgcgaagaaattgagcaaatgagacgtcccaccggaactcaggattcacccgcccggacttgccaagacttgaagctctgccatcctgaactgccggatggggaatactgggtggaccccaaccaaggctgcgctcgcgatgctttccgagtcttttgtaattttactgccggaggtgaaacttgcgttactccaagggatgatgtcacgcagttcagctatgtagatagtgaaggctctccagttggcgttgtgcaactgaccttcttgaggcttttaagcgtctctgctcatcaggacgtgagctatccttgttcgggtgccgcacgtgacggtcctcttcgtcttagaggagcaaatgaagatgaactctctcctgagacctccccatatgttaaggagtttcgtgatggctgccagacccagcaaggaaggactgttctggaagtgcggaccccagtgctcgagcagttgccggtgctcgatgcttcattttctgatttgggcgcaccacctagacgaggcggagtgctattaggtccagtgtgctttatggggtag

SEQ ID NO: 232782 - DNA, 4968 bp, Artificial Sequence
  derived and/or modified sequence
atggagcgctgttctcggtgtcatcgtctgcttctacttctacctctggttttaggcctaagtgccgcaccgggctgggccggcgcgccacccgtggacgtgttgagagcactccgttttccttcactgccagatggggtccgacgggccaaggggatttgcccagctgacgtggcatatcgagttgcaagacccgcccagctatccgcgcctactcgccagctattccccggcggttttccgaaagattttagtctccttacagtggttcgaacgagacctgggcttcaagccccactactgaccctttactcagctcagggcgtacgacagctggggttggaattgggaagacccgtccgttttctgtatgaggatcagaccggaaggccccagcctcccagccagccagtctttaggggactaagccttgcggacggcaaatggcatcgagtggctgtggcagtcaaaggccagtccgtaacgcttattgttgattgtaaaaagagagtgactagaccactgccacgctccgccagaccagtccttgacacacacggcgtgattatctttggagctcggatcctagatgaagaggtttttgagggtgatgttcaagaattagccattgttcccggagtccaagcagcttacgagagttgtgagcaaaaagagctggagtgtgaaggcgggcagagagaacgccctcaaaaccaacagcctcacagagcccaacgatccccccagcagcaaccctctcgcctgcaccgtcctcagaatcaagagccccagtcgcagccaacagagtcactatactacgattacaagcccccttattatgatgtgatgacaactggcactactcctgattatcaggctgcccacggacccagaggtctcaagggagagaaaggcgagcctgccgtgttggagccgggcatgctcgtggagggccctccgggtccagagggtccagcaggtttaattggacctcctggaatacaagggaaccctggccctgttggcgaccccggcgaaaggggaccaccaggccgtgcaggattaccaggcagcgatggagcacctggaccacccggaacctccctgatgttgcccttccgctttggttccggcggtggcgacaaaggacctgtggtggctgcccaggaagcacaggcacaggctattctgcagcaagctcgcttagctttgaggggaccaccaggacctatggggtataccggaagacctggacctctgggacaacccggctcccctggcctcaagggagaatcaggagatcttgggccgcaggggccacggggaccacaaggtctaaccgggccacctggcaaagccggtagacggggcagagctggcgctgacggggccagggggatgcccggcgatccaggcgtgaaaggcgacagagggttcgacgggttgcctggactacctggggagaagggccatcgcggagacaccggtgcacagggactcccaggtccgcccggtgaggacggagaaagaggcgacgacggggaaattggacccagaggcctccccggtgagtccggacccagggggttactaggcccaaaaggcccacccggcatcccagggcctcctggcgttcgaggaatggacggcccccaaggaccaaaaggaagcttgggaccacagggagaaccgggcccaccgggacagcagggcacccccgggacacagggactgcctggcccccagggagcgattggcccccacggcgaaaagggtccccagggaaagccaggcttgccaggcatgcctgggtcagacgggcctccaggccatcctgggaaagagggacctcccggaactaaggggaaccaggggccttcgggcccacaggggccgttgggataccccgggccaagaggagtgaaaggagtagacggcatcagaggattaaagggccacaaaggggagaagggcgaggacgggtttccgggcttcaaaggcgatatcggggtgaagggggatagaggcgaagtaggagtccccgggtcgaggggggaagacggccctgagggaccaaaaggccgaacgggcccaaccggtgatcccggacctcccggtctgatgggagaaaagggcaaattaggggtgccaggactgcccggttatcctgggagacagggacccaaaggatcactgggcttcccggggttccccggcgcatccggagaaaaaggggcccgcggcctttctggtaaatccgggcctaggggtgaacgaggacctaccgggcccagagggcagagagggccaagaggggcaactggaaagagtggcgcgaagggcacaagtggaggtgatgggccacacggaccaccgggcgaaaggggtttaccaggtccacaggggcccaatggtttcccagggccaaaaggacctcctgggccacctggaaaggacggactgccaggccacccaggacaaagaggtgaagtaggatttcagggcaaaaccggcccacctggtccaccgggggtggtggggccccaaggtgccgccggcgaaacaggaccaatgggcgaaaggggtcatcctggcccacccgggccacccggtgaacagggactaccaggaaccgcaggaaaggaaggaactaagggggatcccgggccacccggggctcccggcaaagatggaccagccggcttgagagggttcccgggtgagcgcggcctgcccggaaccgctggaggcccaggactcaaaggcaacgaagggcccagcggaccgcccggaccagcaggaagccctggagaaagaggcgcagccgggtctggcggccccataggacctcctggtagacccggacctcaaggcccaccgggtgctgcaggggagaaaggagtaccaggagaaaaagggccaatcggacctaccggcagagatggagtgcaagggcccgtgggactcccaggcccagctggaccgcctggcgtggccggagaagacggtgataagggcgaagtcggcgatcccggccagaaaggaactaagggtaacaagggtgagcatggtcctcccggcccgcccggccctattggaccagtagggcagccaggcgcagcaggtgccgacggcgaacccggtgctcgaggaccccagggacatttcggcgcaaagggagatgaaggcactaggggcttcaatggtccaccaggaccaattgggctacagggcctccctggtcctagcggagaaaagggtgagactggcgatgtcggacctatgggcccccccggcccaccaggccctagaggcccagctggacctaacggtgccgacggccctcaaggcccacccggaggcgtggggaacctcggccctccgggcgaaaagggggagcccggggagagtggaagtcccgggattcagggcgagcccggtgtcaaaggacccaggggggagcgaggagaaaaaggcgagtcaggacagccaggagagcccggacctcccggacctaaaggccctaccggagatgatggacccaaggggaatcctggacccgtaggcttcccaggcgaccccggaccacccggagaaggcggacccaggggtcaagatggtgccaaaggcgatcgcggcgaggatggtgaacccggtcagcctggaagcccagggcccaccggcgagaacggtccccccggtccccttgggaaacggggccctgcaggttcccctggaagtgagggccgccagggcggtaaaggggcaaagggcgatcctggagcaattggagcacccggaaagacagggcccgtgggacctgccggacccgccggcaaaccaggcccagatggactgagaggtcttcccggatctgtgggacaacaaggacggcccggagcgactgggcaagccgggcccccagggcctgtcggacctcccgggctcccagggcttagaggagacgctggtgcaaaaggcgaaaaaggccatcccggtctgatcgggctgatagggcccccaggcgagcagggggagaaaggagatcgcggcctcccagggcctcagggaagcccagggcagaaaggagaaatgggaattccaggagcatccggtccaatcgggccaggcggcccccccggtctcccaggtccagctggtcctaaaggcgctaagggagccacaggcccagggggacctaagggcgaaaaaggcgttcagggaccccctggccatcctggcccccctggggaggtcatacaacccttgccgatacagatgcccaagaagacacgccgctcggtggatggcagtaggctaatgcaggaagatgaagctattcctacagggggagccccaggctcaccaggagggcttgaagaaatatttggctcactagacagtctgagagaagaaattgagcaaatgagaagacctaccgggacccaggattccccagccaggacttgtcaagacctaaagctgtgccaccccgaactccccgatggagagtactgggtagacccaaaccaaggatgcgcccgggacgcattcagagttttttgtaatttcaccgccggcggcgagacttgtgtaacacctagggacgacgttacccaatttagctatgtggacagcgaaggatcccctgtgggagtcgtgcagttgacatttttgcgcttgctctccgtttcagcccaccaagacgtcagctacccctgttcaggagcagccagggacggtccattacgcctgagaggtgcaaacgaggacgagctatcccctgagacctctccctacgtgaaagagtttcgtgatggatgtcaaacacagcaagggagaacagttctcgaggtccgcacacctgtgctagaacaactgccagtcctagatgcaagcttttctgacttgggggcccccccacgaaggggcggcgtgctactcggccccgtctgctttatgggttag

SEQ ID NO: 232783 - RNA, 4953 nt, Artificial Sequence
  derived and/or modified sequence
auggagcgaugcucacggugucaucggcugcugcuacuccuuccccugguucuaggucugagugcagccccuggaugggcuggcgccccaccaguugauguccugcgggcccugagguuuccuagucugccugacggcgugcggagagcaaaaggaauaugccccgcugaugucgccuaccgcguggcuaggccagcucaacucuccgcccccacuaggcaguuguuuccugguggguucccaaaagacuucagccuucugacggugguacgaacaaggccuggauugcaggcaccccuacucacguuguauagcgcacagggggugcgccagcuuggccuggaauugggccggcccgugagguuucuuuacgaagaucaaaccgggcggccgcagccucccucccagccugucuuucggggccugagccuugcugauggaaaguggcaccgcguagccguggccgugaaaggacagaguguuacccuaaucguugacugcaagaaaagggugacaagaccucugccccgcagcgcccgccccgucuuggauacccauggagugauaaucuuuggcgcccggauccuggacgaagaaguguucgagggggauguacaggagcuagccaucgugccgggcguccaggccgcuuaugaaagcugugagcaaaaggaguuggagugugaagggggucagcgcgagcguccccaaaaucagcaaccacaccgugcccagcgcucuccccaacaacagcccagccgacugcauagaccucagaaccaggaaccucaaagucaggacccuaccccuggcgaggaggaggaaauccucgagagcucguugcucccaccacuggaggaagccgcucacggcccccgcggguugaaaggagaaaagggagaacccgcaguccuggagcccggcaugcugguggaaggcccucccggcccugaaggcccagccggccuuaucgggccacccgggauucaaggaaacccgggccccgucggugacccuggagagaggggaccacccgggcgagcuggucugccaggaagcgacggcgcaccaggcccucccggaacaagcuugaugcugcccuuccguuuugguucgggugggggugauaaagggccugucguggcugcccaggaagcacaggcgcaggccauccuccaacaggcucggcuggcgcuacgcggcccaccaggaccuauggguuauaccgguagacccggaccacuuggccagccaggcucaccaggacugaagggcgaauccggugacuugggaccccagggcccucguggcccucagggauuaacuggcccucccggcaaggcgggcaggagagggagagccggggccgacggagccaggggcaugcccggcgacccagggguuaaaggagauaggggguucgacggguuaccaggccuuccuggcgagaaaggccaccgcggggauacaggagcccagggccucccaggcccacccggcgaggacggcgagcguggagacgacggggaaaucggaccucgggggcuuccaggcgaaucaggaccccgcggccugcugggccccaagggcccacccggcaucccagggccaccuggcguucgggggauggauggcccacagggcccuaagggaucguuagguccccaaggagagccuggcccuccagggcaacaaggcacccccggcacccagggccugcccgguccucagggugcuauagggccucacggggagaaaggaccgcagggcaagccaggacugccgggcaugccaggaagugacgguccuccagggcacccugggaaagaaggaccuccuggcaccaaaggcaaccaaggcccuucuggcccccaagggccucugggguauccugggccacgaggcguuaaagguguggacgguauccgaggucugaaagggcauaaaggcgaaaaaggggaggaugguuuuccaggauuuaagggcgacaucggcguuaaaggggauagaggagaggugggggugccugggucuaggggugaagacgguccagagggcccaaagggacgaaccggcccaacaggagacccgggaccccccgggcucaugggagaaaaagggaaauugggaguccccggacuaccaggauauccuggacgacagggaccaaaagggucacucggguuucccggguuucccggcgcaaguggcgagaaaggggccaggggccugagcgguaaaaguggcccuaggggcgagagaggacccaccggaccaagagggcagagggggccaagaggcgccacugggaaaucgggggcuaagggaacgucuggaggagacggaccucacgguccuccuggagagagaggcuugccagggccucaaggccccaacggcuuccccgggccaaaagggccccccggccccccagguaaagacggauuaccaggccacccagggcagagaggcgaaguugguuuccaggggaagacgggaccuccggggccuccagguguggucggcccacagggggccgccggagaaacuggccccaugggcgagcguggacaccccggcccccccggcccaccuggugaacagggguugccagggaccgcuggaaaagagggcacaaagggggaucccgguccuccaggagcaccgggaaaggauggccccgccggacugcguggcuucccuggcgagagaggccucccuggcacugccggaggcccuggccugaaaggcaaugagggaccuucaggccccccaggcccggccggauccccgggagagcggggagccgccgguucaggcgguccuauuggcccuccuggacgucccggcccacaggguccaccuggagcagcuggcgaaaaagggguacccggggagaaaggaccaaucggacccaccgggcgggacggaguucagggccccguuggucucccuggcccugcagggccucccgguguggcaggggaggauggggacaagggcgaagucggugacccuggucagaaaggcacuaaaggcaacaaaggagagcacggaccccccggacccccgggccccauugggccgguagggcagcccggagccgcaggcgcugauggggaacccggggcuaggggaccacagggccacuucggcgcaaagggggacgaaggaacucguggauucaacgggccuccugguccaaucggucugcagggacuuccaggccccucaggagagaaaggagaaaccggcgacguuggcccuaugggaccuccaggaccuccaggcccacgggguccugccgggcccaacggagcugacggcccccaggggccaccugggggggugggcaaccugggccccccaggcgaaaagggagaaccuggggaaucagggaguccaggcauucagggugagccgggcgugaaggguccccgcggugagaggggugaaaaaggcgaaucaggacagccaggggaaccagguccaccagggccaaaaggacccaccggagacgauggcccaaaaggaaauccuggacccgucggauuuccgggcgacccagggccucccggggaaggcggaccgagaggucaagacggcgcaaaaggcgaccggggagaggauggcgaaccugggcagcccggauccccuggcccaacgggcgaaaacggaccacccggaccucuggggaaacgcgggccagcaggcagucccggcagcgaagggcggcagggggggaagggugcaaaaggugaccccggugccaucggcgccccuggcaagaccgggccugugggaccugccgggccugccggcaagcccggcccagacgggcugcguggccuuccgggcagugugggccagcaggggcggccaggggccacugggcaagcagguccaccaggaccggugggcccuccuggucugccggggcuaagaggcgacgcaggagccaaaggcgagaaagggcacccaggauugauuggguugauuggcccuccaggcgagcagggagaaaagggugaccgaggucugccagguccucaaggguccccugggcagaaaggugagauggguauuccaggggccaguggccccauuggcccuggaggcccaccaggucuacccggccccgccgguccuaaaggagccaagggggcaaccgguccaggcgggccaaagggggagaaggguguacagggcccgccagggcauccgggacccccuggagagguuauccaaccccucccgauucagaugcccaaaaagacccgccguucuguggacgggagccggcuaaugcaagaggacgaggcuaucccuacagguggcgcccccgguuccccuggaggacuggaggagauuuuuggcucacuggacucucugcgggaggaaaucgagcagaugcggcggcccaccggcacccaggacucccccgcucggacgugccaagauuuaaaacugugccacccugaacugcccgacggagaguauuggguugaccccaaccaggggugcgcacgggacgccuucaggguauuuugcaacuuuacggcugguggagaaacuugcguuacuccaagggacgacgugacacaauuuucuuaugucgauagugagggcucuccagucggcguggugcagcuuacuuuucugagguuacuuucugugucggcccaucaggaugucagcuaccccugcucuggugcugcacgugacggaccucugcggcugcguggagccaacgaggaugagcugagcccagaaacaagucccuacguaaaggaauuucgugauggcugccagacacagcaagggcggaccgugcucgagguucgaaccccagugcuugagcagcugccaguucuggacgcuuccuucucugaucucggcgcucccccucgcaggggcggcguacuccuaggucccgucugcuuuaugggguag

SEQ ID NO: 232784 - RNA, 4968 nt, Artificial Sequence
  derived and/or modified sequence
auggagaggugcagcaggugccaccgccugcugcugcucuuaccacugguacuuggacuuuccgcugccccaggcugggcuggagcaccccccguggacguuuugcgcgcgcucagguucccuagucugccugauggagugaggcgggcaaaagggauuugcccugcugacguggcauaucgggucgcacgaccagcacagcugucugcuccuacccggcaacuauucccggguggcuucccuaaagauuuuucucuauuaacggucguuagaacgcgcccuggucugcaggcuccccugcugacccuguacucugcacagggcgugcggcaguugggauuggaauuggggcgcccagugagguuccuguaugaagaucagacaggucgaccacagccaccuucucagccaguguuucgaggccuuuccuuggccgaugggaaguggcaucguguugccgucgcagugaagggacagagcgugacccucaucguagauugcaaaaagcgagucacgcggccucugccacgcagcgcuaggccagugcuagauacacacggggucauuaucuucggugcgcgaauucuggaugaagaagucuuugagggugauguccaggaguuggcaaucguccccggcgugcaagcugcuuacgagucuugcgaacagaaggaacuugaaugcgagggcggacagcgugaaagaccacaaaaccagcaaccccaucgcgcgcagcggucuccccagcagcagccuucacgucuccauagaccgcaaaaccaggaaccccagagccagccaacggagucucuguauuaugauuacgaaccccccuacuaugacgugaugacuacuggcacuacaccagacuaccaggcugcccacggacccagaggccuuaaaggcgaaaaaggagagcccgcuguucucgagcccggcauguugguggagggucccccuggccccgaaggaccagcgggacugaucggccccccuggaauccagggaaaucccgguccugugggagaccccggagagcgcggcccaccagguagggccggccugccaggcagcgacggggcucccggcccucccggcacuucguuaaugcucccuuuccgcuuuggguccggugggggggacaaggguccaguggucgcagcccaagaggcccaggcacaagcaauuuugcaacaggccagauuggcccugcgugggcccccgggcccuaugggcuacaccgggcggccaggcccacugggccagccgggcagcccaggacucaaaggggaaucuggagacuugggaccucaaggcccucggggcccgcaaggcuuaaccggaccaccuggaaaagccggccggaggggccgagcuggugcggauggcgcgcggggaaugcccggggaccccggcguuaaaggagacaggggauuugacggcuugccaggguuacccggagaaaagggucaucgcggggacacuggcgcgcaaggacucccaggacccccaggcgaggacggagagcgcggggaugauggggaaauuggaccucgcggcuugcccggggaauccggaccgcgcggucuccucgggccuaaggguccuccaggaauuccuggcccacccggagucagaggaauggauggcccucagggaccaaagggaucucucggcccucagggagaaccaggacccccaggucaacaagggacgcccggaacccagggacuaccugguccacagggcgccaucgguccccauggagagaaagguccucaaggaaagccagggcugccgggcaugccggggagugacggcccuccaggccauccuggcaaagaggggccacccgguaccaaggggaaucagggacccucaggaccccaaggcccucuggguuaucccggacccaggggagucaaaggcgucgauggaauaaggggccugaagggccauaaaggggagaaaggagaggacggguucccuggcuuuaagggcgacaucggugugaagggcgacagaggcgaaguaggagugccuggcagccguggcgaggacggaccugagggcccuaaagggaggaccgggccaaccggugacccaggaccgcccgggcugaugggagagaaaggaaaguuaggggucccaggccuccccggcuauccuggacggcagggcccaaagggcucacuggguuucccaggauuccccggcgcgucuggcgagaaaggugcccggggguuguccggcaagucgggcccucggggggagaggggaccuacagggccccgaggacagcgcggcccuaggggagcaacaggaaaaucaggagcuaagggcacauccggaggggaugggccccauggaccuccuggcgaaagagggcugcccggaccacaaggcccgaacgguuucccgggucccaagggcccccccgggccgccaggaaaagacgggcugccagggcacccugggcaacgcggggagguaggguuccaaggaaaaacuggaccgccaggcccucccggaguggucgguccccaaggcgcugcaggagaaacaggcccuaugggcgagcgcggccaccccggcccacccggcccacccggcgagcagggacugcccggaaccgccggcaaagaggggacaaagggagacccagggccucccggggcgccaggaaaggaugggccagccggccuccgcgguuuccccggugagagggggcucccuggaaccgcgggagggccugggcuuaagggcaacgagggcccuaguggacccccagggcccgccggguccccuggugaacggggggcagccgggagcgggggucccaucgggcccccuggaagaccugggccacaggggccaccaggcgcugccggagagaagggagugcccggcgagaagggcccuauagggccaacuggcagagacggcgugcagggaccagugggauugccuggcccugcugguccuccaggaguggcaggagaggacggcgacaagggagaagugggagacccaggacagaaaggcaccaagggcaauaagggcgagcacggaccaccuggaccgccuggaccuaucggccccgugggacagcccggagcagcuggcgcggacggggaaccaggagcaaggggcccccagggccacuucggggccaaaggggaugaagguacacguggguucaacggaccaccagggccaaucggccugcaggguuugccgggacccucuggcgagaagggcgaaacuggggacgugggaccaaugggaccccccggcccuccugggcccaggggcccagcagggccgaacggagccgauggaccacaaggaccccccggcggagucggcaaucuagguccucccggcgagaagggugaaccuggugaaagugggagucccggcauccaaggcgagccaggcgugaaaggaccacggggagagaggggugagaagggcgagucuggucaaccaggcgaaccaggcccuccagggccaaaagggccuaccggggacgacggcccuaaaggcaacccaggcccaguaggguuccccggagauccugggccaccgggugagggcgggccuaggggacaggauggcgcaaagggggauaggggagaggacggugagcccggacagccagggucaccagggccaacgggcgaaaacggcccaccugggccuuuggggaagcgcggcccugccggcucacccggauccgaaggacgacaaggcggcaaaggcgcuaaaggggaucccggcgcgauaggcgccccagggaagaccgggccuguggguccagcaggacccgcugguaagccugggccugauggucugcgaggccugccaggguccguugggcagcagggccgcccgggagccacuggacaagccggcccaccaggccccgucgguccaccuggucugcccggacugcgaggggacgcaggcgcaaagggagagaagggucauccagggcugauaggucucauuggaccaccuggcgaacagggggagaaaggagaccgcggucuuccaggcccacagggaagccccggacagaaaggagagaugggcauccccggggcaucuggacccaucggucccggagguccucccggccuccccggcccugcuggaccaaaaggagcgaagggcgcuacaggaccaggcgggccuaagggggagaaaggaguccagggaccaccaggacauccuggcccuccaggcgaggucauucagccacugccaauccagaugcccaagaaaacuaggcgguccguagacggaucuaggcuuaugcaagaggacgaagccauuccuaccggaggugcuccagguagcccuggcggucuggaggaaaucuuuggcagccuagacagccugagggaggagauagaacagaugagaagaccaaccggcacccaggacuccccugcucguaccugucaggaucugaaguugugucauccagagcuacccgauggugaguacuggguggacccaaaucagggaugugccagagaugcguuuaggguguucugcaacuuuacugccgggggugaaacaugcgugacucccagagaugaugucacucaguucuccuauguugauucugaaggcucuccuguuggcgugguccagcugacguucuuacgcuugcucuccgucagcgcgcaucaggaugugaguuauccgugcuccggcgccgcacgggacggcccuuuacgccuuagaggagccaacgaagacgagcucagccccgagacuucucccuacguuaaggaguuccgugaugggugccaaacccagcagggccgaaccguacuagagguacgaacucccguauuagaacaacugccagucuuggacgccaguuuuagugaucugggcgcgccuccgcgucgaggcggaguacuccuggguccugucuguuucaugggguag

SEQ ID NO: 232785 - RNA, 5031 nt, Artificial Sequence
  derived and/or modified sequence
auggagcgcuguucuagaugccacaggcugcucuugcuucuuccccucgucuugggacuuagugcugcccccggcugggcaggggcaccuccuguggaugugcugcgggcucuaagauuuccuagccugccugauggcgugcguagagcgaagggaauaugcccagccgauguggcuuaccgaguagcucgcccugcacaguuguccgccccaacucgccagcucuuuccgggcggauuucccaaggacuucagccuccugaccguagugagaacuaggccaggcuugcaagcuccccugcugacucucuacuccgcacagggagugagacaacuugggcuagagcucggcaggcccgucagguuccuguaugaagaccaaaccggacgaccacagccaccuucccagcccgucuuuagaggauugucuuuggcagaugggaaauggcaucgugucgcagucgcaguuaagggccagucugucacccugauaguugauuguaaaaagagaguaacacguccccugccacggagcgccaggccgguucuagauacccauggugugauuauuuucggagcaagaauccuggacgaggagguuuuugagggagauguccaggaacucgcuauuguccccggcguucaggcggcuuacgagagcugugagcagaaggagcuggagugcgagggcggacaaagagagcguccucagaaucagcaaccucaccgugcacagcguagcccgcagcaacagccaagccgccuacaccgaccucagaaccaagagccucagagucagcccaccgaaagccucuauuaugauuacgagccuccauauuacgauguaaugacgacuggaacaacccccgauuaucaagauccgacucccggggaggaggaggaaaucuuagagucaucacuguugccaccguuagaggaagcugcacacgguccucgcgggcucaaaggcgaaaagggugaacccgcaguccuagagccaggaaugcugguggagggccccccagguccagagggaccugcaggccugauagggccuccaggcauucagggaaauccagguccagucggcgaccccggcgagagagguccccccgggcgagcuggguugccaggauccgacggcgcuccaggaccuccaggcaccagccugaugcugccauuccgguuugggucgggaggcggcgauaagggucccgucguagccgcccaggaagcccaagcacaggcuauucuccagcaggcucgcuuggcccuacgaggaccaccaggaccaauggguuacaccggaaggccagggccccucgggcaaccagguucccccggacugaagggggagagcggagaccugggaccccagggaccccguggaccacagggcuugacaggccccccgggcaaagcuggaaggagagggagagcuggagcagacggagcucgaggaaugcccggcgacccaggcgucaaaggggaccggggauucgauggccugcccggucugccaggggagaaaggucaucggggagauacgggagcucaagggcuccccggaccaccaggagaggauggggaacgaggcgaugauggagaaauaggcccucguggacucccaggagaaagugggcccagaggacuacuggggcccaaagggcccccaggcaucccaggaccgcccggugugcgggggauggauggcccgcagggcccaaaagggucuuugggcccgcaaggcgagccagggccaccgggccagcagggcacccccggcacgcaagggcuuccgggcccacagggagccaucggaccccauggggagaagggcccucagggaaagccgggacucccagggaugccagguuccgacgggccucccgggcacccuggaaaggagggcccaccaggcaccaaagguaaucagggaccaagcgggccccagggaccucugggcuacccuggcccaagggguguuaagggcguugaugggaucagagggcugaaggggcacaaaggcgagaaaggugaagauggcuuccccggguuuaagggugauaucggagugaagggcgaucgcggugaagugggagugccaggcucucggggagaggacgguccggaggggccuaaaggccguacugggcccacuggcgacccuggcccacccggacuuaugggcgaaaaaggaaaguuaggaguaccuggccugccgggcuacccagggcgucagggucccaagggauccuuggguuuucccggguuccccggagcaagcggagaaaagggcgcucgggguuuguccgggaagagcggaccaaggggagaacggggcccaacugguccgaggggucagcgcgggccacgcggcgccaccgguaagucaggagcaaaagggacuagcggaggagacggcccucacggccccccuggugagcguggccucccagguccgcagggcccaaacggcuuccccggcccgaaaggaccaccuggcccccccgguaaggauggacugccaggccacccaggucaacgcggagagguaggguuccaggguaagacagguccacccggaccuccuggugucgugggaccccagggcgcggcaggcgagacuggcccuaugggggaaagaggacaucccgggccacccgggccuccuggcgagcaagguuugccagggaccgccgguaaagaggggacaaagggggacccugguccuccgggcgcccccgggaaggacggaccggcuggccugaggggauuuccuggcgaaagagggcugccagggacugcaggaggccccggucuuaagggaaaugaaggccccagcggcccaccgggccccgcagggucuccuggcgaacgaggcgccgccggguccgguggccccaucggcccgcccgggagaccgggaccucagggaccgccuggggcggccggugaaaaggggguuccaggagaaaagggaccgaucgggcccaccgguagggaugguguccaaggaccaguuggacugccgggcccagcugggcccccaggcgucgcuggagaggacggagacaaaggcgaagucggugacccaggacagaaggguacaaagggaaacaagggcgaacaugguccuccugguccacccggacccaucggccccguuggccagcccggagccgcaggggcggacggugagccgggcgcucgcgguccacagggccauuuuggcgccaaaggagacgaaggcacaagggguuuuaauggcccaccuggacccaucggucuacaagggcugccgggcccaagcggcgagaagggcgaaacuggagaugucgggccuaugggacccccagguccaccugguccuagaggcccugcugggccuaacggggccgauggaccucaagguccaccugguggcgucggaaaucucggacccccaggcgagaaaggggaaccgggcgagagcggguccccagggauacagggcgagccaggugucaaaggccccagaggggaaagaggcgagaaaggcgaauccggccagccuggagaaccagggccgccugguccgaagggacccacuggugaugauggcccaaaggggaauccuggccccguuggauuccccggagauccaggaccaccaggagaaggagguccaagagggcaggacggagcgaaaggugaccggggugaggacggcgaaccuggacagccgggcucucccgggccaaccggggagaacgguccucccgguccucugggcaaaaggggaccagccgggaguccuggcuccgaggggcggcaagguggcaaaggugccaaaggagauccaggggcuauuggagcaccaggcaagaccgggcccguagggcccgcuggcccugccgggaaaccuggacccgauggauuaaggggccuacccgggagugucggccagcaggggcgccccggggccaccggacaggccgggccaccggggccugucgguccucccggccuucccggguuaaggggcgacgccggugccaagggggaaaaaggccaccccgggcucaucggccuaaucgggccccccggcgagcagggcgaaaagggcgacaggggacugccugggccacaaggaucacccggacagaagggcgagaugggcauuccuggcgccuccgguccgauuggcccaggagggccgccgggucuuccuggcccugcagggccaaagggagccaaaggcgccacaggcccuggugggcccaagggagaaaaaggcgugcaggggccgcccggccaccccggcccuccaggugaagucauccagccacuuccaauacagaugcccaagaaaacucggcguucuguggacggaagcagguuaaugcaagaggacgaagcuauccccacuggcggcgcgccggggucacccggcggauuagaagaaaucuucgguagcuuggacucauugagggaagaaaucgagcagaugcgaagaccuacuggaacacaggauagcccugcuagaacaugucaggauuugaagcucugucauccggaacugcccgauggcgaguacuggguugaucccaaucagggaugugcccgcgacgcuuuucgaguuuuuugcaauuuuacagccgggggcgaaacaugugugacaccucgcgaugaugucacacaguucaguuauguugacuccgaagguagccccgugggagugguucagcuaacauucuugcgacugcucucuguaagcgcacaucaggacgucagcuauccuugcucuggggccgcccgagacggaccuuugagacugagaggcgccaacgaagacgagcucucuccugagaccucccccuacguaaaagaguuucgagauggaugccagacucagcagggccguacaguuuuggagguucggaccccggugcuggagcaacugcccguccucgacgcaagcuucucagaccuuggggcucccccacgccguggaggugugcuccuggggccugugugcuuuaugggauag

SEQ ID NO: 232786 - RNA, 4953 nt, Artificial Sequence
  derived and/or modified sequence
auggagagguguucccgcugucaccgacugcuguuacugcugccccuagugcucggguuauccgcggcucccggaugggcuggggcucccccagucgauguucucagggcacugcgguuucccagcuugcccgauggaguccgcagggccaagggcauuugccccgccgacguugccuaucgcgucgcacgcccugcccaacucucagcucccaccagacaguuguuucccggcggcuucccuaaggacuucagccuacuaaccgugguccggacccgaccgggacuacaggcucccuugcugacacuguacagugcacaggguguacgacagcucggguuagaacugggaagaccaguacgguuccuguaugaggaccagacagggagaccccagccuccuucucagccaguguucaggggucugucuuuagcugauggaaaguggcaccggguggcuguggccguaaagggccaguccgugacacuuauagucgauugcaaaaaacgugucacacggccccuaccaagguccgcccggccagugcuugauacucacggggugauuaucuuuggagcacguauuuuggacgaagaaguguucgaaggcgacguccaggagcucgcuauugucccuggugugcaggccgcuuacgaaagcugcgagcagaaagagcuggagugcgaaggaggacagcgcgaacggccccagaaucaacaaccacaccgcgcucaaagaagcccccagcagcaaccuagccggcuucauagaccgcagaaccaggagccacaaucccaggacccaacuccuggagaggaggaagaaauccuggagagcagccuucuccccccucucgaagaggccgcucauggaccaagaggccugaagggggagaaaggugagccagcugugcuggaaccaggaaugcuuguggagggacccccaggcccagagggcccugccggccucaucggcccgcccggcauccaggggaauccugggccagucggagaccccggcgaacggggccccccugguagagcuggucuccccggaucggacggugccccugguccuccagggaccucucugaugcucccguuccgauuuggguccggugguggcgacaaggggccgguggucgccgcgcaggaggcucaggcgcaagcgaucuuacagcaagcccgacuggcucugcgggggcccccuggccccaugggcuacacggggcguccgggaccauuagggcaaccaggaagccccggccucaaaggcgagagcggggaucuagguccucaagggccccgcgguccucagggcuuaacaggcccaccuggcaaggccgggagaagggggcgggcuggggcggauggugcgagaggaaugcccggcgaucccggugugaaaggcgauaggggauucgaugggcugcccggacuuccuggggaaaaggggcacagaggagauaccggcgcccagggcuugccuggaccucccggcgaagacggagaacgcggagacgauggagagauaggaccucguggguuaccuggugaauccggcccaagaggauugcucggacccaagggcccaccaggcauuccaggaccuccuggggucagaggaauggacggaccucaaggcccuaaaggaagccugggcccccagggcgagccaggccccccaggacagcagggcaccccaggcacucaaggucugcccgguccucagggcgcaauaggaccucacggcgagaagggaccacaggggaaacccggccuaccugguaugcccggcucugaugggcccccuggccauccaggcaaggaagguccccccggcaccaaaggcaaccagggaccauccggcccacaggggcccuugggguaccccgggccgaggggcgucaagggaguggacggcauccgcggccuuaaaggucacaagggugaaaaaggcgaggaugguuucccaggguucaagggugauauuggcgucaagggcgacaggggugagguggguguccccggcuccaggggagaagacgggccugaggggcccaagggcaggaccgggccaaccggagacccaggaccuccuggacuaaugggagagaaggggaaacucggcgugccuggccugcccgguuaccccggcaggcaagggccgaaaggaucucugggcuuuccgggguuucccggagccuccggggagaagggagcaagggggcucagcgggaaaaguggacccagaggggaacggggaccuacgggcccucgaggccaaaggggaccgcgcggggccaccggcaaaaguggagcgaaaggaacaucugggggugacggcccacacgguccacccggggagcgggguuuaccugggccucagggucccaauggcuuuccuggaccuaaaggucccccugggcccccuggaaaagacggacugccuggacaccccggucagcguggcgaaguaggauuucagggcaagacgggaccgccagggcccccagggguuguggguccccagggggcugcuggagagacaggaccaaugggugagcggggacaucccgggccccccggaccccccggcgagcagggacugcccgguaccgcugggaaagaaggcacaaaaggugacccuggaccaccuggggccccugggaaggaugguccugccggccucagggguuuuccuggcgagcgaggauuaccugggacugccggcggacccggacugaagggaaacgaagggccauccgggccuccuggaccugcuggcuccccuggggagcgaggggccgcgggaagugggggcccgauuggcccgcccggacgacccgguccucaagggcccccaggugcagcaggcgagaagggggugccaggggagaagggcccuauuggacccaccggcagagacggugugcagggacccgugggcuugccaggaccagcugggccacccggcguggcuggcgaagauggugacaagggagaggugggcgacccgggccagaaagguaccaaaggcaacaagggagaacaugggccccccgguccgcccggaccuaucggccccgucggacagcccggggccgcuggcgcggauggcgaaccuggggcucgcggaccucagggucauuuuggggcuaaaggagacgagggcacucgcggcuucaacggaccaccugggccaauaggacugcaaggccucccgggaccauccggagaaaagggagagacgggcgacgugggcccuaugggacccccagguccaccggggccccgcggacccgcgggcccaaauggagccgauggaccacagggccccccaggcggcguggggaaucugggcccgccaggagaaaagggggaaccuggggagagugggucuccagguauccagggcgaacccggagugaaagguccaaggggugagcggggagagaagggcgaguccggccagccgggagaaccagggccaccuggcccaaaagguccaaccggggacgacgggccuaaaggcaacccggggcccgugggguucccaggugaccccggacccccgggcgagggcggcccuagaggucaagauggggccaaaggagaccgaggugaggauggcgagccaggucaaccugggucacccggcccaacaggagaaaauggaccgccaggaccccuuggaaagcgcggccccgcuggcucccccggaagcgagggacgccaggguggaaagggcgccaaaggagauccuggcgcuauaggcgccccagggaagaccgggccagugggcccugcuggcccagcugguaagcccggccccgacggacugagggguuuacccggguccgugggccagcagggaagaccuggcgcgacaggucaggccgguccacccgggcccgugggaccuccgggauugccuggauugaggggagaugcuggcgcuaagggcgagaaaggccauccaggacuuaucggucucauuggaccaccaggugaacagggggagaaaggggaucgagggcugccagguccccaggggucuccuggccaaaagggagagaugggaauacccggagccucaggaccaaucggaccuggcgguccgccugggcugcccgggcccgcuggacccaaaggcgccaaaggagccacagguccagguggcccgaaaggcgaaaaggguguucagggcccccccggccauccaggaccuccaggcgaggucauccagccccuucccauacaaaugccaaagaagaccaggcgcuccguggauggcagccgucuuaugcaggaggaugaggcgaucccaacugggggugccccugguaguccagggggccuggaggaaaucuuugguucucucgauucucugcgggaggagaucgaacaaaugagacggcccaccggaacucaagauagcccugcacgaacaugucaggauuugaagcuuugucaccccgagcuuccugacggugaguauuggguggacccaaaucagggaugcgccagggacgccuuucgaguauuuugcaacuuuacugccggaggcgagacuugcgugaccccaagagaugacgucacucaguucuccuacgucgauuccgaaggcagccccguuggagugguacaguugaccuuucuccgcuuauugagugucagugcccaucaggaugucaguuauccuuguuccggggccgcccgggauggcccacuuagacugaggggcgcgaaugaagaugagcucucuccagaaaccagccccuacgucaaggaauuucgcgacggaugucagacucagcaaggccgcaccgucuuagagguacguacccccgugcucgagcaacuuccaguucuggacgcaagcuucucugaccuaggcgcgccuccucggagaggaggagugcugcuugguccagucuguuucaugggauag

SEQ ID NO: 232787 - RNA, 5031 nt, Artificial Sequence
  derived and/or modified sequence
auggagcgaugcucucguugccaucgguugcuacugcuacugccccugguccuuggguugagugcagccccaggaugggcaggugcaccacccguggaugugcugagagcccuccgcuuucccucccugcccgacggcgugcggcgggcuaagggaaucuguccagccgacguugcauauaggguugcuaggcccgcccagcuuuccgccccuacucggcaguuauucccgggggguuuccccaaagacuucagcuuacucaccgucgugcgcacacgacccggccuucaggcaccccuucuuacccuauacagugcccagggugugcggcaguuaggccucgaauuaggccggccaguccgguuuuuguacgaagaccagacuggacgaccccagccaccuagucagcccgucuuccgcggcuugucccuggccgacggaaaguggcauagggucgccgucgcaguuaaaggccagucugucacccuaaucguagacugcaagaaaagggugacucgacccuuacccaggagugcgagacccguccuugacacacacggugucauaaucuuuggagccaggauccucgaugaggagguuuucgaaggcgaugugcaggaauuggcaaucgugcccgguguacaggccgccuacgaaagcugcgagcagaaggaauuggaaugcgaggggggucagagagaaaggccccagaaccaacaaccucaccgagcccaaagauccccccagcagcagccuagucgcuugcaucggccccagaaccaggaaccucagagucagccgaccgagagucuuuacuacgauuauaaaccaccuuacuaugacgucaugacaacaggaacgaccccagacuaucaggauccaaccccaggcgaggaggaggaaauccucgaaagcagccugcugccaccauuggaggaggccgcccauggcccgaggggacugaagggcgaaaagggugagccggcugugcucgaaccuggcaugcugguggaagggccuccaggcccggagggacccgcaggcuugauagggccaccagguauccaaggcaaucccggaccugugggugacccgggggagagagggccaccuggacgcgcgggccugcccggcucagacggcgcgccaggcccaccaggcaccagccucaugcuccccuuccgcuuuggguccggugggggcgacaaaggcccagugguggccgcgcaagaagcacaggcucaggccauucugcagcaggcucgguuggcacugaggggcccgcccggucccauggguuacacaggucgcccuggcccucucggucagccuggcucccccggccucaaaggugagagcggugaccuggguccccaaggcccccggggcccucagggguugacugggccgccuggcaaggccggccgacgcggucgggcaggagccgauggcgccagaggcaugccaggggacccgggugugaaaggcgaccgaggcuuugauggccuuccaggacuaccaggagaaaaagggcacagaggggacacaggagcccagggccugccggggccaccgggagaggauggagaacgaggcgacgauggugagaucggaccacgcggccuacccggcgaaucagguccuaggggucuguugggcccaaaaggaccaccagguauuccaggcccucccggagugaggggcauggauggaccccagggcccaaaagguucccuaggcccgcagggggagcccgguccgccaggacaacaggggacuccaggcacccaggguuuaccugguccccaaggggcaaucggaccccacggugaaaagggcccacaggguaagcccggucuaccuggcaugccgggcucagacggaccuccugggcacccgggcaaggagggcccaccugggaccaaagguaaccagggaccuucuggaccucaaggcccucugggguaccccgguccaaggggcguaaagggcguugauggaauucggggcuugaaggggcacaagggugagaaaggagaggauggauuccccggauuuaagggcgauauuggcgucaaaggcgauagaggggaggucggcgucccaggaagccgcggcgaagaugggccagaaggacccaagggccguacuggacccaccggcgauccagggccccccggacuuaugggggaaaaagggaaacugggcgugccgggccugccaggcuacccuggcagacaggguccgaaaggcucucucggcuuccccgguuuucccggcgcuucaggggagaaaggggcucgcggccugagcggaaaaucuggaccaaggggcgaacgcgggccaacugguccaagaggacagaggggaccccgcggagcgacuggaaaaagcggcgccaagggcacuuccgggggcgauggcccacauggcccuccaggcgagcgaggucugcccgggccacagggucccaacggauuuccuggcccgaagggcccccccggacccccugguaaagauggauuacccggacauccugggcagcgcggagaagugggcuuccaggguaagaccggaccaccugggccaccgggcgucguggggccucaaggagccgcaggagaaacggggccaaugggcgagagggggcaucccggaccaccuggacccccuggagagcaggggcugccaggcacagcuggcaaggaggggacgaaaggggacccuggaccaccuggagccccgggaaaggacggaccagccggccugcgaggauuccccggugaacgaggacuacccggcacagcuggcgggccuggguugaagggaaaugagggcccuucaggccccccuggaccugccgggagcccgggugagaggggagcagcugggagcggagggcccauuggaccgccugggcgcccaggcccucaaggcccucccggcgccgcuggggagaagggcguccccggggaaaaaggaccgauuggcccuacuggcagggacggagugcaaggaccugucggacugcccgggccugccggaccgcccggcguugcaggagaggauggugauaagggggagguuggcgacccagggcagaaaggcacaaaaggcaauaaaggcgagcacggaccucccggcccaccaggaccaaucggcccaguggggcaaccaggugcagccggugccgauggugaacccggugcucguggcccccagggacauuuuggggcgaagggcgaugaggggacccggggauucaacggcccccccggccccauuggccugcagggacugccaggcccauccggugagaaaggcgagaccggugaugugggcccuaugggcccaccaggaccgcccggcccucggggccccgcaggcccaaacggggcggacggaccccaagggccucccgggggcguggggaaucugggcccccccggcgagaaaggcgagccaggugaaucaggcucaccgggaauccaaggcgagcccggaguuaaggggccaaggggcgaacgcggcgagaagggugaaucagggcagcccggggaacccggaccucccgggccaaaagggcccacaggcgaugacggcccuaagggcaauccaggacccgugggauucccaggagauccgggcccuccaggggaaggcgggccgaggggccaggauggcgccaaaggggauagaggugaagacggcgaaccuggccagccagggagccccggacccacgggggagaauggccccccaggaccucuaggcaaacggggcccggccggcagucccggaucugagggucggcaggggggaaagggcgcgaagggugaucccggugcaauuggcgcuccaggcaagacaggaccagugggacccgcuggccccgccggcaaacccggucccgauggcuuacgaggguugccugguuccguaggccaacagggccguccaggugcuacaggacaggcugggccucccggcccugugggaccuccagggcugcccggacucagaggugacgccggugcaaaaggcgaaaagggccauccaggccugauuggccugauugggccucccggcgagcagggagagaaaggcgaccgaggguugcccgguccccagggaagccccggucagaaaggcgagaugggcauuccuggagcaucuggacccaucgguccuggggggccuccaggguugccaggcccagcugggccaaagggcgcuaaaggcgcgacaggcccaggcggacccaaaggagaaaaaggggugcaaggaccacccgggcaucccgguccccccggugaagugauccagccauugcccauucagaugcccaagaaaaccaggaggucuguggacggcagcaggcugaugcaggaagacgaggccaucccaacggggggcgcuccagguagccccggggggcuugaggagauuuucgguucucuggauucccuacgcgaagagaucgaacagaugcggcggccaacaggcacacaagacucucccgcaagaaccugucaagaucucaagcugugucaccccgaacugccugauggggaguacuggguagauccaaaccaagggugcgcccgugaugcauuuagaguguucugcaauuuuacugccggaggggagacaugcgugacuccuagagaugacgucacccaauuuaguuauguggauuccgagggauccccaguuggagucgugcagcuuacuuuuuugcggcugcuguccgucagugcacaccaggacguaucguaucccuguaguggggcugcuagagacggaccacugcgcuugcguggagcuaacgaggaugagcucaguccugaaaccucuccuuacguaaaagaguucagagaugggugccagacucaacagggaaggaccguacuugaggugcgcacccccguacucgaacagcugccuguccuggacgccaguuucuccgaccuuggagcgccaccaagacgcggcggggugcuucugggaccaguuugcuucaugggguag

SEQ ID NO: 232788 - RNA, 4968 nt, Artificial Sequence
  derived and/or modified sequence
auggagcgcuguucucggugucaucgucugcuucuacuucuaccucugguuuuaggccuaagugccgcaccgggcugggccggcgcgccacccguggacguguugagagcacuccguuuuccuucacugccagaugggguccgacgggccaaggggauuugcccagcugacguggcauaucgaguugcaagacccgcccagcuauccgcgccuacucgccagcuauuccccggcgguuuuccgaaagauuuuagucuccuuacagugguucgaacgagaccugggcuucaagccccacuauuaacucuguauagugcccagggugucagacagcuuggccuugaacugggcagacccgugcguuuuuuguaugaggaccagacaggcaggccccaaccuccuucacagccugucuuccggggucugagccuggcugacggcaaauggcaucgcguagcuguggcgguuaagggccagagcguaacucugaucguggauugcaagaagagagugacuagaccccuccccagaucugccagaccuguucuugauacacacggcguuaucaucuucggcgcccggauacuugaugaagaaguguucgaaggagacguccaagagcuggcaauugugccaggggugcaggcugcuuaugaaucgugugagcagaaagagcuggagugcgagggcggacagagggagcggccccaaaaucagcagccgcaccgggcucagaggucuccccagcaacagccuucaagacuacaccggccacagaaccaagaaccgcaaagucagcccacagagagccuguauuacgauuacaagcccccuuacuacgaugugaugacaacaggcacaacgccagauuaccaggcagcucauggcccuagaggccucaaaggagagaaaggcgagccagcuguguuggagccaggcaugcuuguggaggggccucccggcccugaaggaccugcaggccugauuggaccucccggcauucagggcaauccaggaccagugggggacccuggagagcguggacccccgggccgcgcuggacucccuggcuccgauggcgcuccgggcccaccagguacaagucugaugcuaccguuccguuuugguucuggcggaggggauaagggcccugugguugcugcucaggaagcccaggcucaagcuauccugcagcaggcccgcuuggcgcugcgcggcccuccagguccgaugggauacaccggucgcccaggcccgcuuggccagccgggcaguccggggcuuaagggugaaucuggagaccuugguccgcaggggccgagagguccccaggggcugacagguccuccugggaaggccggucguaggggacgcgcaggugccgacggcgccaggggaaugccaggggaucccggagucaaaggugaccgugguuuugacgggcucccaggguugccaggcgagaaagggcacagaggcgauacuggcgcucagggccuacccggaccaccuggcgaggauggcgaacgcggggacgacggcgaaaucggaccaagaggccugccaggggaguccggcccccgcggucuucucgggcccaaagggcccccugggaucccaggacccccuggugucagagggauggacggcccacaaggcccuaaaggcucacuuggcccacagggggaacccgggccuccugggcagcagggcacaccagguacccaggggcugccaggcccccagggggccauuggcccucauggagagaaaggaccccaaggaaaaccaggcuugccugggaugccaggcucugacggaccaccgggacauccagggaaggaagguccgccugggaccaaaggaaaucagggccccucaggaccccaggggccucuuggcuacccuggcccaagaggagugaagggugucgaugggauucggggacugaaagggcauaaaggcgagaagggcgaggauggauuuccgggguucaagggugauaucggcgugaaaggggauagaggagaggugggcgugccuggguccaggggagaagacggcccagaaggcccaaaaggaaggacaggacccacgggugacccgggaccaccaggccuuaugggcgaaaagggaaagcucggggugcccggccucccaggguacccugggcggcagggaccuaagggcagccuuggguuucccggguucccuggugccucgggggaaaagggagcccgggggcuguccggaaaaucgggcccuagaggcgagagggggccaacagggccgaggggacagcgggguccacguggggcaacaggcaagagcggcgccaaaggcacuuccgggggagacggaccucauggaccaccuggcgaaaggggacugccuggcccccagggacccaacggguuuccugguccuaaggguccuccggggccuccugggaaggauggacugccuggacaccccgggcagcgaggagaggugggguuucagggcaagacuggaccgccaggaccaccagguguuguggguccucagggagcugcuggagaaacugguccaaugggggagcgugggcaccccgggcccccuggcccccccggcgagcaggggcucccaggcacagccggaaaagaggggacuaaaggggacccaggaccucccggggcacccgggaaagacggccccgccggacuucgcggcuucccaggggagagaggucugccuggaacagccggugggcccggacucaaagggaacgaaggcccaagcggcccaccuggacccgccggcucacccggcgagaggggggcggcuggcagugggggucccauaggcccuccugguagaccaggcccccagggcccucccggggccgcaggugagaagggagugccaggagagaagggaccuauuggucccaccggacgggauggaguacagggacccgugggguuacccggcccugcaggcccccccggugucgccggcgaggacggcgacaaaggcgaaguaggagauccuggccagaagggaacuaaagguaacaaaggagagcacggcccacccgggccaccagguccuaucggaccugugggccagccgggcgccgccggggccgauggagagccuggggcacgcggcccccaaggucacuucggcgcaaagggugaugagggaacccguggcuuuaaugguccuccaggcccuaucgguuugcagggacugccggggccgagcggcgaaaagggggagacgggugacgugggaccaauggguccaccugggccuccaggacccagaggaccagcuggcccuaacggugcagauggaccacaggguccuccuggcgguguuggcaaccuuggacccccuggugagaagggagagcccggugagucaggguccccaggaauacagggcgaaccuggaguuaaagggccacgaggggaacgaggugaaaaaggagaaucuggccagccaggagaaccaggaccaccaggucccaaggggccgacuggcgacgauggcccaaaggguaacccuggcccugugggcuuccccggagacccugggccgccaggggaaggaggcccccgagggcaggacggggccaaaggcgaccgaggagaagacggggagccuggucagcccgggagcccgggcccuacgggggagaacgggccaccaggcccuuuaggcaagcgcgguccagccggcucaccgggaagcgaggggcggcagggggguaaaggcgcuaagggggauccuggugcuauuggcgccccugggaaaacuggacccgucggcccagcuggcccugcaggcaagccaggaccagauggccuucgaggauugccaggaucuguuggccagcagggucgcccaggcgcaacaggucaggcaggcccuccugggccugugggcccucccgguuugccuggccuaaggggcgacgcaggagccaagggggagaagggacauccgggucucaucggccugauagggcccccaggugagcagggagaaaaaggggauagaggccuuccuggaccucaaggcagcccgggacagaaaggggaaaugggcauuccgggggccuccggucccaucgggccagggggcccaccaggcuugccaggccccgcaggaccaaaaggagcaaagggugccacuggucccggcggaccuaaaggcgaaaagggggugcaagggccccccggccacccaggcccgccaggggaagucauucaaccacugcccauccagaugccaaagaagacacggcgaucagucgauggaagucgccuuaugcaggaagacgaggcaaucccaaccggaggcgcuccaggaucucccggcgggcuggaggagaucuucggcucccuggacucauuaagggaggagaucgagcagaugagacggcccaccggcacccaggauuccccugcuagaacaugucaagaucuuaaauuaugucaucccgaauuaccagacggcgaguauugggucgaccccaaccaagguugugcuagagaugcguucagaguguucuguaacuucacagccggcggagaaaccugugucacuccgcgcgacgauguaacucaauucaguuauguagauuccgagggguccccuguggggguaguccaacuuacuuucuuacgccucuugaguguguccgcccaccaggaugucuccuacccuugcuccggagccgcccgggauggaccacugaggcugcgcggagccaacgaggaugaacucucucccgaaacuucuccuuacguaaaagaguuucgggacggcugccagacucagcagggcaggacuguccuggaagugaggaccccaguucuugagcaacucccgguguuggaugcuagcuucucagaucucggugcuccuccuaggcguggcggaguacuccugggacccgucuguuuuaugggauag

SEQ ID NO: 232789 - RNA, 4953 nt, Artificial Sequence
  derived and/or modified sequence
auggagcgcuguucaaggugucaccgcuuguuacuucucuugccucuggugcucggccucagcgccgcgccagguugggcuggggcuccucccguagauguuuugagagcccuuagguucccuagucugcccgacggggugagacgugcuaaaggaauaugcccugccgauguugccuaucgagucgcucgcccugcucaguuguccgcgccuacacggcagcuauuuccgggagguuuuccaaaagauuucagccugcuuacagugguuagaacucguccagggcugcaagccccccuacucacgcucuacuccgcccaagggguccgacagcugggccucgaguuaggaagacccguucgcuuucucuaugaagaucagaccggccggccccaaccucccagucaaccaguguuucgggggcucucacuggcugauggaaaauggcaucgagucgcuguggcugucaaagggcaaaguguaacccucaucgucgauugcaagaaaagggugacccgcccacugccacggucggcacgucccgugcucgauacccacgguguaaucaucuucggcgcaaggauauuagacgaggagguguucgaaggugaugugcaggaacuggcaaucgugccaggagugcaggcggcuuaugaauccugugagcagaaagagcuggaaugcgagggagggcaaagagaacggccgcagaaucagcaaccucaucgagcacaacggaguccccagcaacagcccaguagauuacaccggccacaaaaccaggaaccccagucucaggacccaacuccuggugaggaagaagagauccuggagagcucucuguuaccaccucuagaggaggcagcgcacggaccuagaggacuuaagggcgaaaagggggagcccgcugugcucgaaccggguaugcugguugaaggccccccuggcccagaaggccccgcgggacuuauugggccccccggaauccaggggaacccaggaccagucggugaucccggagagagaggacccccaggucgcgcugguuugccggggucugauggcgcgccuggaccaccuggcacuucuuuaaugcuucccuucagauucgguuccggcgguggagauaaaggcccggugguggcugcccaggaggcacaggcccaggccauucuccagcaggcgcgacuugcuuugagggguccucccggaccuaugggauacacuggucguccuggaccccuggggcagccaggcucuccaggucucaaaggagaaagcggcgacuuggguccucaaggcccaagaggaccacaggggcuuacaggcccuccagguaaagcuggaagacgaggccgugccggagcagauggggcucgugguaugcccggagauccaggggucaaaggggaucgcggauucgauggcuugccuggcuuaccgggagaaaagggccaccggggggacacaggcgcucagggacugccaggacccccaggagaggauggggaaaggggggacgacggugagauuggaccaagaggccugccaggggaaagcggcccacgaggucuucugggaccuaaaggaccuccagggauccccggaccaccaggggugcgcggaauggacggaccucagggcccaaagggcucauuaggaccacaaggugagcccggaccucccggacagcaggguacccccgguacacaaggccuuccugguccccagggugccaucggcccucacggggagaaaggaccucaaggaaagccaggacugccagggaugccagggagugaugggccacccgggcauccgggcaaggaaggcccaccugggacgaagggaaaccagggcccuucuggaccgcaaggcccacuggguuacccaggcccaagaggagugaagggaguggauggcauuaggggucugaaggggcacaaaggggaaaagggggaggacgguuuuccagguuucaagggugauaucgggguuaaaggugauaggggagaaguaggcgugccagggagcaggggagaagauggacccgaagguccuaaaggccggaccggcccuacaggcgaucccggaccuccggggcucaugggagaaaaagggaaauugggaguccccggacuaccaggauauccuggacgacagggaccaaaagggucacucggguuucccggguuucccggcgcaaguggcgagaaaggggccaggggccugagcgguaaaaguggcccuaggggcgagagaggacccaccggaccaagagggcagagggggccaagaggcgccacugggaaaucgggggcuaagggaacgucuggaggagacggaccucacgguccuccuggagagagaggcuugccagggccucaaggccccaacggcuuuccuggcccuaaagguccuccaggaccuccuggcaaagacggucugcccggccaccccggacagagaggugaaguuggguuccaagguaagacugguccccccgggcccccuggagugguggguccacaaggcgcugcgggcgaaacuggccccaugggcgagcgaggacaccccgggccaccuggcccuccaggcgaacagggccugccagggaccgcgggaaaagagggaaccaagggugaccccggccccccuggugcaccgggcaaggauggcccugcaggcuugcguggguuuccaggcgagcgaggucuacccgggaccgcugguggacccggccugaaggguaacgaagguccaucggggccaccgggcccggcagguaguccgggggagaggggagccgcaggaagcgggggucccauuggacccccugggcgcccaggaccucagggaccuccaggagccgcaggcgagaaaggaguucccggugaaaaaggcccuauuggacccacaggacgggacggugugcaagggcccgugggccugccugggcccgcuggcccaccaggaguggcaggagaagacggcgauaaaggugaagugggagacccgggucagaagggaacaaaggggaauaaaggagagcacgggccgccugggccaccgggcccuaucggaccagugggacaacccggagcagcaggugcggauggcgaaccaggggcucgaggcccacaaggucacuucggcgcuaagggagaugaagguacccggggauuuaacgggccccccgguccgaucggcuuacaggggcugccugguccaagcggcgaaaaaggggaaacaggagaugugggccccauggggccccccggcccaccuggaccacgcgguccggcgggaccaaacggagcagacggaccacaagggccaccugguggcgucggaaacuuagggcccccaggggagaaaggugaaccaggggaguccgguucccccgguauccagggagagccaggcgugaaaggcccccgcggugaacggggugagaaaggcgagagcgggcagccuggagagccaggaccuccaggcccuaaagggccuacuggcgacgaugggccaaagggaaauccugguccagugggauuccccggggauccaggcccuccuggugagggcgggccacgaggacaggauggagcgaaaggagacaggggggaagacggggaaccgggccagcccggcucgcccggacccacaggcgaaaaugguccacccggaccuuuggguaaacguggucccgcagguaguccagguucagaagguaggcagggaggaaagggcgcuaaaggggauccuggcgcgauuggugcgccugggaagacagggcccguaggacccgccgguccagccggaaaacccggccccgacggacuucgcgguuugccagggagcgugggacagcaaggucgcccuggugcuacagggcaagccgggccccccggacccguugggcccccuggccuuccgggguugagaggagaugcaggagccaagggcgaaaaggggcauccgggauugauuggccugauaggaccuccaggagagcagggggaaaagggugacagaggccuuccagggccccaaggcucccccggucagaagggcgaaaugggaaucccuggcgcuuccggaccaauaggacccggaggcccuccuggccucccaggcccugcaggcccaaagggcgcaaaaggagcuaccggcccaggcggaccuaagggcgaaaagggugugcagggacccccaggacauccaggacccccgggugaaguaauucagccccuccccauucagaugccaaagaaaacacggcggucuguggauggaagucgacugaugcaggaagaugaggcuauacccaccggaggcgccccuggaucaccaggaggccuugaggaaauuuucgggucccucgauagucugcgcgaggagauagaacagaugagacggcccaccggaacacaggacagcccagcccgaacuugccaagaucuaaaacuaugccaccccgagcugcccgauggcgaauacuggguugaccccaaucaaggaugugcucgagacgcuuuuagggucuucugcaauuuuaccgcugggggggaaaccugcgugacacccagagaugacgucacccaguucucauaugucgacagugaaggaaguccggucgguguggugcagcuuaccuuccucagauuauuauccguuagcgcacaucaagacguuucuuaucccugcucaggcgcugcccgagacggaccacucaggcucaggggugccaacgaagaugaacugucucccgagaccucuccguacguuaaggaguuccgggaugggugccaaacucaacagggacgaacagucuuggaagucagaacaccggucuuagaacaacugcccguauuagacgcuucuuuuucagaucugggggccccuccucgccgcgguggcgugcuucugggaccagugugcuucaugggauag

SEQ ID NO: 232790 - RNA, 4968 nt, Artificial Sequence
  derived and/or modified sequence
auggaaaggugcucccgaugccauaggcuuuuacuguugcugccacuuguacugggauuaagugcugcacccgguugggcuggcgccccacccgucgaugucuuaagggcacugagauucccuucuuugccagaugguguccgccgugccaaaggaaucugucccgcugauguggcuuaucgcguggcuaggccagcacagcucucagccccuacucgccaacuguuccccgggggauucccgaaggauuuuucccuguugacugucguaagaacacgaccaggacuacaggcgccucuuuuaacccuuuauucugcucagggcguucgucagcuuggcuuggaacuuggcaggccuguacgcuuccuguaugaagaccagaccggccgcccucaaccccccucucaaccugucuuucgagggcugucacuugcagacggaaaguggcaucgagucgcuguggccguaaaagggcaaagugucacucugaucguggacuguaagaagcggguuacucgaccucugccucggucagcaagaccugugcuagauacucacggcgucauuauuuuuggggcacguauccuugaugaggagguguuugaaggggauguucaggagcuugccaucguuccuggaguucaagcugccuacgaaucaugcgaacaaaaggagcucgagugugaggggggucaacgagagcguccacagaaucagcagccucaccgagcccaacgaucaccacaacaacaaccuagccgccuccacagaccccaaaaccaggaaccucagagccagccaacagagucacucuacuacgacuacgaacccccuuacuacgauguaaugacgacagguacaacuccagacuaccaggcagcacacggaccacgcggccugaaaggagagaagggagaaccugcuguucuugaaccaggaauguugguggaaggccccccugggcccgagggaccugccggacuuaucggcccaccuggaauacaagggaaccccggaccagucggggaucccggagagcggggucccccggguagagccgggcugccaggguccgacggcgcgcccggcccgcccggaacaagcuuaaugcucccuuucagauucgguagcggggguggugauaaaggaccuguuguagcugcgcaagaggcccaagcccaggcgauauuacagcaagccaggcuggccuuaagaggaccgccagggccuaugggauacacgggcaggccuggcccacuggggcaaccggggucaccaggcuuaaagggagagucaggugaucuaggcccacagggcccgagggguccccagggauugacaggaccaccuggaaaagcagguagaagggggagagcuggugccgauggagccagagggaugcccggugaccccggcgugaagggggaucgagguuuugauggacugccaggacugcccggggagaagggucacagaggugacaccggggcacagggacucccaggucccccaggagaagauggcgagcguggcgaugauggcgaaauagguccuaggggacuucccggugagaguggcccacggggucuucuugggccaaaggggccuccagggauucccggcccuccgggugugcgcgguauggauggaccucaaggccccaagggcucccuuggcccccagggggagcccggaccucccggacagcaagguacaccuggcacucagggccugcccgguccccagggagccauaggaccgcacggcgagaaaggaccacagggaaaacccgggcucccggggaugccaggcagcgauggcccuccagggcacccugggaaggagggaccaccaggcacgaaaggaaaucaaggaccuagcggcccgcaaggcccccugggguaccccggcccaaggggaguaaagggugucgacggcauuagaggccugaagggacauaagggagagaagggagaagauggcuuucccggauucaaaggcgacaucggagugaagggcgacagaggcgaagucggggugcccggaaguagaggagaggacgggccggaggggccaaagggcaggaccgguccaacuggagauccuggccccccuggacugaugggcgagaaaggcaagcucggcgucccaggccuuccgggcuacccaggcagacagggucccaaaggcagccugggguuccccggauuuccuggagcuaguggcgagaaaggagcaagaggucucucagguaaaagugggccaagaggagagcgcggaccuacaggcccccgcggacaaagagguccaaggggugcuacggggaaaaguggggcaaaggggaccagugguggggacggcccacauggaccuccuggcgagcggggccugccaggcccacagggacccaauggauuucccgggcccaaggggccuccaggaccucccggcaaggacggccugccaggucaccccggacagcgaggggaggugggauuccagggcaaaaccggaccuccaggaccuccaggagucgugggaccccagggagcugcaggagagacugguccuaugggcgagcgugggcacccaggaccccccggucccccaggagagcaaggacugcccggaacagcuggcaaggaggggacgaaaggugacccagggccucccggagcgccgggcaaagauggacccgccgggcuucgcggguucccaggcgaaagaggacuaccggguacagcgggagggcccggacucaaaggcaacgagggaccuucuggacccccuggaccagcaggaagcccuggggagagaggggcugcaggaagugguggcccaauuggccccccuggucgacccggcccacaaggcccuccgggcgcggccggagagaagggcgugccaggagaaaagggaccuaucgguccuacagguagagaugggguucaggguccgguggggcugccaggucccgcugguccaccaggaguggcaggagaggacggcgacaagggagaagugggagacccaggacagaaaggcaccaagggcaauaagggcgagcacggaccaccuggaccgccuggaccuaucggccccgugggacagcccggagcagcuggcgcggacggggaaccaggagcaaggggcccccagggccacuucggggccaaaggggaugaagguacacguggguucaacggaccaccagggccaaucggccugcaggguuugccgggacccucuggcgagaagggcgaaacuggggacgugggaccaaugggaccccccggcccuccaggaccccgaggaccggcugguccuaauggcgcagacggcccucaaggcccuccgggaggcgugggaaaucuggggccgccuggcgagaagggggaacccggggagagcgggagcccaggcauacagggagaaccaggagugaagggaccaaggggcgaaaggggggagaagggugaguccgggcagccaggcgagccuggaccuccggggccuaagggaccuacuggagaugacgggcccaagggaaauccaggaccggucggauuuccuggcgauccaggcccuccuggggaaggaggacccaggggucaagacggagccaaaggggaccggggugaagacggugaaccuggacaaccuggaucccccggaccuacuggagagaaugguccaccuggcccacuggggaagcguggccccgcaggcucacccggaagcgaaggaaggcaagggggaaaaggugccaaaggggacccuggagcuauuggcgccccagggaagaccgggcccgugggacccgcaggaccagcuggcaaacccggaccagauggccugaggggucuuccagggagugugggacaacaggggcgacccggagccacuggacaagccggcccaccaggccccgucgguccaccuggucugcccggacugcgaggggacgcaggcgcaaagggagagaagggucauccagggcugauaggucucauuggaccaccuggcgaacagggggagaaaggagaccgcggucuuccaggcccacagggaagccccggacagaaaggagagaugggcauccccggggcaucuggacccaucggucccggagguccucccggccuccccggcccugcuggaccaaaaggagcgaagggcgcuacaggaccaggcgggccuaaaggcgagaaaggaguucagggaccuccuggccauccgggcccccccggcgaggucauucagccccucccaauucagaugccuaagaaaaccagaagaagcguggauggcucacgccugaugcaagaagacgaagcuauucccaccggcggugccccuggauccccagguggucuagaagaaauuuucgggaguuuggauagccugcgcgaagagaucgaacagaugcgucguccaacuggaacccaggacaguccagccaggacgugccaagauuuaaaacugugucaucccgaauuacccgacggagaguauuggguugauccaaaccaggggugugcaagagaugccuucagaguguuuugcaacuuuacugccggaggagaaacaugcguuacuccccgugaugauguuacccaauucucuuaugucgacuccgaagggagcccuguuggaguuguacagcucaccuuucuucgccuccuaucugucagcgcgcaccaggacgugagcuauccuuguucaggcgcugcccgcgacggcccccuacgccugagaggcgccaaugaggaugaacuuucaccugaaacaagcccauaugugaaggaguuucgggacggaugucaaacucagcagggucguaccguacuggaagucagaacaccaguucuagaacaguuaccagucuuggaugcaaguuuuucugaucugggcgccccaccucggcgcgguggugugcuuuuaggaccagucugcuuuaugggguag

SEQ ID NO: 232791 - RNA, 5031 nt, Artificial Sequence
  derived and/or modified sequence
auggagagguguagcaggugucauaggcuguuauuacucuuaccuuuaguccucggccugucagcugccccaggcugggcgggagcccccccugucgauguguugcgugcucugagguucccaagcuugccugacggugugcggcgggccaaaggaauaugcccagccgacguugccuacagaguagccaggccugcccaacuguccgccccuacccgccagcuauuuccuggagguuuucccaaagauuuuagucuuuuaacuguggucagaacccgccccggacuccaggccccacuucugacucucuacuccgcacagggagugagacaacuugggcuagagcucggcaggcccgucagguuccuguaugaagaccaaaccggacgaccacagccaccuucccagcccgucuuuagaggauugucuuuggcagaugggaaauggcaucgugucgcagucgcaguuaagggccagucugucacccugauaguugauuguaaaaagagaguaacacguccccugccacggagcgccaggccgguucuagauacccauggugugauuauuuucggagcaagaauccuggacgaggagguuuucgaaggggaugugcaggagcuagcaauugugccuggagugcaggccgcuuacgagagcugcgaacaaaaagaguuggaaugcgaaggaggacaacgcgagagaccacagaaucaacaaccacacagagcccagagaucuccucaacagcagcccucccgcuugcauaggccucagaaccaggagccccagagucaaccaacggagucccuauacuacgacuacgagccacccuacuacgaugugaugaccacaggaaccacacccgacuaccaggauccaaccccaggggaagaggaggaaauucuggaaucaagucugcuccccccucucgaggaagccgcccacggcccccguggauugaagggugaaaaaggggaaccagccgugcucgaaccugguaugcuuguagaaggaccaccuggaccugaaggaccugcuggacuaauuggucccccgggaauccaagguaaccccggccccgugggggacccuggcgaacguggccccccaggucgggccgggcuuccuggcuccgacggcgcaccugguccucccggaacuucccugaugcucccguuucgcuucggauccggugggggggauaaaggaccagucgucgcugcucaggaggcacaggcacaggcuauccugcaacaggcucggcuggcacuucgcggcccaccuggaccuaugggauacaccggacgaccuggaccucuuggucagccugguaguccgggacucaaaggcgaaagcggggaucuggguccucaggggccucgggguccgcagggacuaaccgguccaccugguaaagccggcagacgugggagagccggcgccgacggcgcaaggggaaugccgggggaccccggugugaagggugaucguggauuugaugggcuaccuggacugcccggggaaaaggggcaccguggagauacaggcgcgcagggccugccggggcccccuggggaggauggggaacggggcgacgauggagagauaggaccuaggggucucccaggggagagcgggccucggggacugcuuggaccaaagggaccaccgggcauucccggaccacccggcguucgaggaauggacggcccgcagggaccaaagggaagcuuaggcccucagggggagccaggaccaccgggacagcaaggcaccccaggcacccaaggcuugccaggcccgcagggagccauuggcccucacggagaaaagggaccacagggcaagccuggacugccagggaugcccggaucugacggaccucccggacauccagggaaggagggaccaccaggcacuaaagggaaucagggccccaguggaccccagggcccccuaggguaccccggucccagaggggugaagggcguugaugggaucagaggguugaaagggcacaagggagaaaaaggggaggaugguuucccaggauuuaagggcgacaucggcgucaaaggcgacagaggggaggucggaguuccuggcagccgcggagaagacgggccagaggggccaaaaggaagaacagguccuacaggcgauccaggaccaccaggccugaugggagaaaagggaaagcucggcgugcccggauugccgggcuaccccggcaggcagggaccgaagggaagcuugggguucccuggauuuccaggggcguccggagagaaaggggcucgcggccugagcggcaagaguggaccucguggggaacggggaccgacuggaccucgggggcagcgcgguccuagaggcgcaaccgggaagagcggcgccaaaggcacuuccgguggcgauggaccccauggcccgccaggagagagaggauugccugguccacagggcccaaauggauucccuggcccuaaggguccaccugggccacccggcaaagauggacugccuggucaucccggccagcgaggggaaguaggauuucaggguaaaacuggaccuccaggcccacccggcgucguugggccucagggugccgccggggaaacuggcccgaugggugagagaggacacccgggcccgcccggaccccccggagaacaaggacuacccgguaccgccggcaaagaggguacuaaaggagacccgggaccuccuggagcuccuggaaaggacggaccagccggcuugagagguuuuccaggugaacgcggccugccuggaacugcuggugguccgggacucaaaggaaaugaaggaccguccgggccacccggaccugcgggauccccuggcgagagaggcgcugcagggucaggcgggccgauugggcccccuggcagacccgguccucagggcccucccggugccgcaggagagaagggggugccaggugagaaaggucccauuggaccuacugggcgcgaugguguccaaggacccgugggacucccgggacccgcaggaccccccggcguggcaggugaagauggugacaagggcgagguaggcgacccuggucagaaagggacaaaggggaacaaaggggagcacgggccccccggucccccugggccuaucgggccggucggucagccgggugcagcuggagcagacggcgagccaggugccagagggccucaaggacacuuuggugcaaaaggagaugaggggacacgagguuucaauggaccacccggcccaaucggacuccagggccucccugggccaagcggagagaagggagagacaggcgauguuggaccuaugggucccccugguccgccaggaccccgcgguccugccggaccuaacggagcggauggaccucaggguccuccagggggagucgguaaccucgguccccccggcgagaaaggcgagcccggugaaucugggaguccaggcauccagggcgaaccaggcgugaaggguccucguggugaaagaggggaaaagggugagucuggucaaccaggagaaccggguccaccugguccaaaaggucccacuggggaugaugggccaaagggcaauccuggcccuguugguuuucccggugaucccgguccgccuggagaaggagggcccagaggccaggauggggccaaaggagacagaggcgaagauggagagccagggcagcccgggaguccaggcccaacaggugaaaacggaccgccaggaccacuaggaaagcgcgguccugcgggcagcccggguucagaggguagacaggggggcaagggagcaaaaggcgauccaggggcuauuggggcaccugggaaaacaggucccgucgguccggccggcccugccgggaagcccgguccagauggacuuaggggccugccuggcucaguaggacagcagggucguccaggcgcuaccggccaagccggucccccaggaccaguggggcccccuggacucccaggcuugaggggugaugcaggcgcaaagggggaaaaaggccaucccggacugauuggauuaauuggucccccaggggaacagggggaaaagggugaucgcggccugcccggcccacaagguucucccggucagaaaggagagaugggaaucccuggcgcuucuggcccaaucggucccggaggcccuccaggucuuccgggccccgcagguccaaagggcgccaagggcgcaaccggaccaggaggaccuaaaggagagaaaggagugcaagggccacccggccacccuggcccccccggcgaagucauccagccacugccuauacagaugcccaagaaaacccgccgcuccguggacggcucgcgccucaugcaggaagaugaggccaucccaacuggaggggcccccgguagcccagguggcuuagaagaaauuuuuggaaguuuggauucacucagagaagagaucgagcagaugcgccgcccuacaggcacacaggacagccccgcucguacuugucaggacuugaaacucugucacccugaguugccagauggggaguauuggguugacccuaaucaaggcugugcccgggacgcuuuccgaguuuuuuguaauuuuaccgcuggaggcgagacuugcgugacuccaagagacgaugugacccaguuuuccuaugucgacagugaagggucaccaguaggaguaguccagcuuacauuccuacgccuccugucaguaagcgcucaccaagaugucuccuauccuugcuccggugccgcuagggacgguccccugcgguugagaggagccaaugaagaugagcugucccccgaaacgucuccauaugucaaagaguuccgagacggaugucagacccagcagggucguacgguacuggagguuagaacgccaguucuggagcaauugccuguguuagaugccagcuuuagugauuugggggccccuccacgccgugguggggugcuccuggguccuguguguuuuauggguuag

SEQ ID NO: 232792 - RNA, 4953 nt, Artificial Sequence
  derived and/or modified sequence
auggaacguugcucccgaugucaucgacugcuucuacuguugccucugguauuaggccucucugccgccccagguugggccggcgcaccccccguggacguucugcgagcucucagauuuccuucccucccugacggagugagacgggcuaaagggauuugucccgcagacguggccuaucgagucgcacggccagcucaguuguccgccccuacucgacagcuuuuuccggggggcuuuccuaaagacuuuagccugcugacagugguuagaacucgaccuggccuccaggcuccucugcugacacuguauagcgcacagggcguccgucaacuuggccuggaacugggccggccugugagguuucuuuacgaagaucagaccgguaggccacaaccuccaucacagcccguauuccgcgguuuaucacuggcugauggcaaauggcaucgcguugcaguggcagugaagggacagagcguuacacugauuguagauuguaagaaacgagugacgagaccccucccacgcagugcuaggccaguacucgauacgcacggcguuaucaucuuuggcgcccgaauucuggacgaggaaguguuugagggggauguucaagaguuagccaucguuccuggcgugcaggccgccuaugagucgugcgaacagaaggagcuggaaugugaaggcggacagagagaacggccacagaaccagcagccucauagggcacagaggaguccacaacaacaacccuccagauugcaccgaccucaaaaucaagagccgcaaagucaggauccaaccccgggugaggaagaagaaauccuggagucaaguuugcugcccccccuggaggaggcugcgcaugguccacgaggccugaagggugaaaagggggaaccggccguucucgaaccuggcaugcuuguagaggggccaccuggccccgaggggcccgcaggacugaucggaccacccgguauccaaggaaauccugguccagugggggauccuggugaaagaggcccucccggcagagcaggguuaccgggcuccgauggcgcucccggcccuccugguacaucacuuaugcugccuuuccgguucgguucggguggaggggacaaggggcccguagucgccgcccaggaggcucaagcccaggcuauacuccagcaggcaagacuggcccuuaggggaccacccggcccaaugggguacaccggacgccccggcccuuugggccagccugggagcccuggacugaagggggaaaguggcgauuuggguccacaggggccaagggguccccagggauuaacaggcccaccagguaaggccggaaggcgcggacgagccggagcugacggggcucgggggaugcccggcgaucccgguguaaagggagaucgcggauuugacggguugccaggccuucccggggaaaagggucacagaggggauaccggugcgcaaggucucccaggcccuccaggagaagacggagaacgcggagacgauggagagauaggaccucguggguuaccuggugaauccggcccaagaggauugcucggacccaagggcccaccaggcauuccaggaccuccuggggucagaggaauggacggaccucaaggcccuaaaggaagccugggcccccagggcgagccaggccccccaggacagcagggcaccccaggcacucaaggucugcccgguccucagggcgcaauaggaccucacggcgagaagggaccacaggggaaacccggccuaccugguaugcccggcucugauggccccccaggacaccccggaaaggagggcccaccugguacuaaaggaaaucagggaccaagcggcccacaggggccacuggguuaccccgggccacgaggaguuaaaggcguugauggaauccgagggcuaaaagggcacaagggcgaaaagggcgaagauggauuucccgguuucaaaggcgauauuggggugaaaggcgaucggggcgaagugggcgugccagggaguagaggcgaggacggcccagaggggcccaaaggucgcacaggcccaacuggcgauccugguccucccggucugaugggggagaaaggcaaacucggcgugccaggauugcccggguacccuggacgucaggguccaaaaggaagucugggauuucccggcuucccaggugccaguggcgaaaaaggagcgagaggcuuaucggggaaaucaggcccccgaggcgaaaggggaccaacuggcccaaggggccaaagaggcccgcggggcgcaacagggaagaguggagccaaggguacaucuggaggugaugggccacacggacccccuggugaacgaggacucccagggccacagggaccuaacggauuuccuggcccuaaaggaccccccggacccccagggaaggacggguuacccggacaccccgggcaacguggugaggucggcuuucagggcaagaccgguccgccuggcccacccggcguugucgggccucaaggcgcagcuggugagacagggccaaugggugagaggggucaccccgggccuccagggccuccaggugagcaaggccugccaggaacugccgguaaagaaggaaccaaaggcgauccagggcccccaggggcucccgggaaagacggaccugcaggacuccggggcuucccaggagagcgagguuuacccgguaccgccgggggaccaggacugaagggaaaugagggaccaaguggacccccugggccggccgguucucccggagaaagaggggcugcgggcuccgguggaccaauuggccccccaggccggccaggaccgcagggaccccccggagccgcaggggagaagggugugccuggagaaaagggaccgauagggccgacuggacgggaugguguucagggcccagugggacugcccggcccugccgggccaccaggugucgcaggagaagauggggacaagggcgaagucggcgacccaggacagaaaggaaccaaagguaacaaaggggaacauggcccgcccggcccacccggacccauuggaccugugggccagcccggggccgccggugccgacggcgaaccgggagcacgcggaccucagggucauuucggggcuaaaggcgaugaggguacaagaggauuuaacggcccccccgggccuauuggucugcagggauuaccaggacccuccggagagaaaggagaaacuggagacguugggccaauggggcccccaggcccaccagguccccgcgggccagcuggaccuaacggggcagacggcccacaggggccuccaggaggcgugggaaacuuggggccaccaggugaaaagggagaaccaggggaaagcgggagcccuggcauccaaggugagccaggcguaaaggggccgcguggcgagcgaggagagaagggugaaucaggacagcccggggaaccgggucccccuggaccuaaaggaccgacuggggacgaugggccgaaaggaaauccuggcccggugggauuccccggagauccaggaccuccaggugagggcgggccuagggggcaggauggcgcgaagggggauaggggagaagacggcgaaccuggacagccgggaucccccggaccaacaggagaaaaugggccccccggaccacucggaaagcgcggccccgccggcucuccagguagugaaggacgucaaggaggcaaaggagcuaaaggcgacccuggagcgauuggggccccuggaaaaacuggaccggugggccccgccgguccagccggcaagccagggccagaugggcugcggggacuuccugguagcguggggcaacagggcaggccuggagccacugggcaggcggggccccccggcccggucgguccucccggccuccccgggcugaggggugaugcuggagcaaaaggagaaaaaggacauccaggacugaucggccuuaucggcccacccggggaacaaggcgagaaaggcgacagaggacugcccggaccacaaggaagccccggucagaaaggagagauggguaucccgggcgcgagcggacccauaggcccuggaggcccuccuggccugccaggucccgcuggcccuaaaggugcuaaaggcgcaaccgggcccgguggaccaaagggcgagaaagggguacagggcccgccagggcacccuggcccuccuggagaagucauccagcccuugccgauucagaugccaaaaaagacccgcagaagcguugauggcucacggcucaugcaggaagaugaggcaauaccuacuggcggcgcccccggaagcccaggaggccuggaagaaauauuuggaucacuggauaguuugcgagaagagaucgagcagaugcgaagacccacagguacacaggacagccccgcccguacaugucaggaucuuaaacucugccacccugaacugccugauggagaauauugggucgauccaaaucaaggcugcgcucgggaugcauuuagaguauucuguaauuuuacugccggcggcgaaacuugugugacaccaagggacgacgugacucaguucagcuauguggauucagaggggucucccgucggcgugguucaauugacuuuccugcgccuguugucgguaagcgcccaucaagauguguccuauccaugcagcggggccgcaagagauggcccauugaggcugaggggggcuaacgaggaugagcuaaguccugaaaccucaccguaugucaaagaguuccgcgauggcugucagacccaacaaggaaggacaguacuagaaguuaggacccccgugcuggaacaguuaccagugcuggacgcuagcuuuuccgaccucggugcuccuccuagacguggcggcgugcugcuaggccccguuugcuuuaugggcuag

SEQ ID NO: 232793 - RNA, 5031 nt, Artificial Sequence
  derived and/or modified sequence
auggagcgcuguagccgcugccaccgccucuuacuucugcugccccugguucugggccugucggcggcaccugggugggcaggugcucccccaguggaugugcugcgagccuugcgcuucccaagcuugccugacggaguucgaagagcaaagggaaucugucccgcugauguggcuuacagaguggcccgaccugcccaguuaagcgcuccuacucgccaauuauuccccggagguuuucccaaggacuuuucuuuacugacggucguacgcacuaggccuggucuccaagcccccuuauuaacccucuauagcgcccaaggcguuagacagcugggccuugaacuugggaggccuguucguuuccucuacgaagaucagacgggacguccacagccaccuagccagccaguguuuaggggcuuaagucucgcugacggcaaguggcacagagucgcuguagcuguaaagggccaguccgucacacucaucguggauuguaaaaagcggguaacgagaccauugccacggagugccaggcccguacuggauacacauggagucaucauuuuuggcgcccggauccuggacgaagaagucuuugagggagauguucaagagcuugccauuguaccaggaguacaggccgcauaugagucuugcgagcagaaggaauuagaaugcgagggcgggcaaagagaaaggccacagaaccagcagccacauagggcucagagguccccccagcagcagcccagucgacuucaccgcccacagaaucaagaaccccagagccagccuacagaaucucuuuacuacgauuauaagccccccuauuaugaugugaugacaacaggaaccacaccagauuaccaggaucccacacccggugaagaagaagaaauccuggaaaguucacuucugccaccacuugaggaagcugcucacggacccagaggccuuaagggugaaaaaggcgagccagccguuuuggagccugguaugcuuguggaggggccuccugggcccgaaggacccgcaggacucaucggaccaccagggauccaaggcaaucccggaccugucggagauccaggagaacgaggaccccccgggcgggcgggcuuaccugguuccgacggagcgccaggucccccgggaacuagccugaugcugcccuucagauucgggaguggugggggugauaagggcccgguaguggcugcccaggaggcacaagcccaggcaauuuugcaacaggcgcgacuugcgcucaggggucccccaggccccauggguuacaccgggcgacccggaccucugggacaacccggcagccccggccucaagggggagagcggcgaccuaggaccgcaggggccaaggggaccacaggggcucacugguccuccagggaaagccggacgacguggacgagcuggugccgacggggcucggggaaugccuggggacccugguguaaaaggcgauagagguuuugauggauuaccaggacugccaggagaaaaaggccaucggggggauacaggagcucaaggacucccugguccgccaggcgaggacggggaacggggagacgacggagaaaucggcccgaggggccuaccuggggaaagcgguccaagaggccuguugggcccaaaggguccacccgggaucccugggccccccggcguaagagggauggacgguccgcagggacccaaaggcucauuaggaccacagggcgaaccgggcccaccaggacagcagggcacucccggaacacagggacucccaggaccgcagggagcaauugggccccauggggaaaagggaccgcagggaaaaccaggauuacccgggaugccaggcagcgacggaccgccaggacauccagguaaagagggucccccaggaaccaaaggaaaucagggucccucaggaccacaggggccucugggguauccaggcccacggggcgucaaaggaguagacgggauccgaggacugaaaggccacaaaggugagaaaggcgaggauggcuucccaggguuuaaaggcgacaucggcguuaaaggagacagaggcgaagugggagugccggggagcaggggcgaagauggaccggagggacccaaaggucgcacuggcccgacgggggacccagggcccccagguuuaaugggagaaaagggcaagcucggugugcccggacuuccaggcuacccuggcagacaaggcccuaaaggaucacucgguuuuccuggcuuuccaggggcuagcggcgaaaagggagccaggggucugucaggcaaguccggcccucguggugaacgcggacccacaggcccacgcggacaacggggaccacgcggcgccaccggcaaaucgggggcuaagggcacuagcggcggagauggaccucacggacccccuggugagaggggccucccaggcccacagggaccuaauggcuuucccggcccaaaaggcccgccuggcccuccaggcaaagauggccuucccggacaucccggacagcgcggggaagugggguuucaaggaaaaacaggcccuccuggaccgcccgggguuguagggccucaaggcgccgcgggagagaccggccccaugggcgaacguggccauccaggcccuccuggcccacccggagagcagggacucccaggaacagcggggaaagagggcacaaagggcgaccccggaccuccaggcgcaccaggcaaagauggcccugccgggcuucguggguuucccggagagcgcggguuaccaggaaccgccggcggucccggguugaagggcaaugaaggaccgagcggcccaccugguccagccggauccccuggcgagcguggcgcagccggaagcgggggaccgauaggaccuccggggcgaccagguccccaggggccacccggagccgcaggagaaaaaggagugccuggcgaaaaggggccaaucggcccgacugggcgggaugguguucagggaccggugggucucccaggaccagcaggcccaccaggcguggccggagaggauggagacaagggcgaagucggagauccaggccagaaaggcaccaaagguaacaagggagaacauggaccaccagggccaccuggucccauaggccccgucgggcagccuggugccgcgggggccgacggcgaacccggagcgagaggaccgcaggggcauuuuggcgccaagggugaugagggaacacgaggcuucaauggaccuccaggacccauaggacuccaagggcugccaggaccuagcggcgaaaagggugagacaggggacgugggcccaaugggaccuccagggcccccuggaccucgaggcccugcaggccccaauggcgcggauggaccucaggguccuccgggaggcguuggcaaccuugggccacccggagagaagggcgaaccuggggagagcgggagcccaggcauccaaggagagcccggagugaaaggcccgcgcggggaacgcggagagaaaggcgaaucaggacagccaggagaacccggaccuccaggccccaaaggacccaccggugaugacggccccaaggggaauccuggaccagugggcuuuccaggcgacccuggcccacccggugaggggggaccucgggggcaggauggagcgaaaggggauagaggcgaagacggcgagccugggcagcccgguucuccuggaccuacuggcgagaacggcccgcccggaccucuggggaagaggggcccugcuggcucuccaggaucggaaggaaggcagggcgguaaaggagcaaagggggacccuggagcgaucggagcaccaggaaagacgggucccgugggucccgcaggaccagcaggcaaaccugguccagauggcuuaaggggucuuccagggagcgucgggcagcaaggccggccaggagcaacuggccaggcagguccucccggucccguuggacccccaggccugccaggguugcgcggcgaugcaggagcaaaaggcgagaagggacauccagguuuaauagggcugaucggccccccaggggaacagggugagaaaggagaucgaggccuaccgggaccccaaggaagcccagggcaaaagggcgaaauggggauccccggagccaguggaccuauuggaccuggcggcccaccagggcugccagguccugccggccccaaaggagcgaagggggccacgggacccggaggacccaagggcgaaaaagggguucaaggaccuccaggacaucccggccccccgggcgaagugauccagccucuaccaauccaaaugcccaaaaaaacaagaagauccguggaugggagucgucuuaugcaggaggaugaagcaauccccaccgguggugcuccugguucuccaggcggccuggaagaaauuuuuggcucacuugauagcuuacgcgaagaaauugagcaaaugagacgucccaccggaacucaggauucacccgcccggacuugccaagacuugaagcucugccauccugaacugccggauggggaauacuggguggaccccaaccaaggcugcgcucgcgaugcuuuccgagucuuuuguaauuuuacugccggaggugaaacuugcguuacuccaagggaugaugucacgcaguucagcuauguagauagugaaggcucuccaguuggcguugugcaacugaccuucuugaggcuuuuaagcgucucugcucaucaggacgugagcuauccuuguucgggugccgcacgugacgguccucuucgucuuagaggagcaaaugaagaugaacucucuccugagaccuccccauauguuaaggaguuucgugauggcugccagacccagcaaggaaggacuguucuggaagugcggaccccagugcucgagcaguugccggugcucgaugcuucauuuucugauuugggcgcaccaccuagacgaggcggagugcuauuagguccagugugcuuuaugggguag

SEQ ID NO: 232794 - RNA, 4968 nt, Artificial Sequence
  derived and/or modified sequence
auggagcgcuguucucggugucaucgucugcuucuacuucuaccucugguuuuaggccuaagugccgcaccgggcugggccggcgcgccacccguggacguguugagagcacuccguuuuccuucacugccagaugggguccgacgggccaaggggauuugcccagcugacguggcauaucgaguugcaagacccgcccagcuauccgcgccuacucgccagcuauuccccggcgguuuuccgaaagauuuuagucuccuuacagugguucgaacgagaccugggcuucaagccccacuacugacccuuuacucagcucagggcguacgacagcugggguuggaauugggaagacccguccguuuucuguaugaggaucagaccggaaggccccagccucccagccagccagucuuuaggggacuaagccuugcggacggcaaauggcaucgaguggcuguggcagucaaaggccaguccguaacgcuuauuguugauuguaaaaagagagugacuagaccacugccacgcuccgccagaccaguccuugacacacacggcgugauuaucuuuggagcucggauccuagaugaagagguuuuugagggugauguucaagaauuagccauuguucccggaguccaagcagcuuacgagaguugugagcaaaaagagcuggagugugaaggcgggcagagagaacgcccucaaaaccaacagccucacagagcccaacgauccccccagcagcaacccucucgccugcaccguccucagaaucaagagccccagucgcagccaacagagucacuauacuacgauuacaagcccccuuauuaugaugugaugacaacuggcacuacuccugauuaucaggcugcccacggacccagaggucucaagggagagaaaggcgagccugccguguuggagccgggcaugcucguggagggcccuccggguccagaggguccagcagguuuaauuggaccuccuggaauacaagggaacccuggcccuguuggcgaccccggcgaaaggggaccaccaggccgugcaggauuaccaggcagcgauggagcaccuggaccacccggaaccucccugauguugcccuuccgcuuugguuccggcgguggcgacaaaggaccugugguggcugcccaggaagcacaggcacaggcuauucugcagcaagcucgcuuagcuuugaggggaccaccaggaccuaugggguauaccggaagaccuggaccucugggacaacccggcuccccuggccucaagggagaaucaggagaucuugggccgcaggggccacggggaccacaaggucuaaccgggccaccuggcaaagccgguagacggggcagagcuggcgcugacggggccagggggaugcccggcgauccaggcgugaaaggcgacagaggguucgacggguugccuggacuaccuggggagaagggccaucgcggagacaccggugcacagggacucccagguccgcccggugaggacggagaaagaggcgacgacggggaaauuggacccagaggccuccccggugaguccggacccaggggguuacuaggcccaaaaggcccacccggcaucccagggccuccuggcguucgaggaauggacggcccccaaggaccaaaaggaagcuugggaccacagggagaaccgggcccaccgggacagcagggcacccccgggacacagggacugccuggcccccagggagcgauuggcccccacggcgaaaaggguccccagggaaagccaggcuugccaggcaugccugggucagacgggccuccaggccauccugggaaagagggaccucccggaacuaaggggaaccaggggccuucgggcccacaggggccguugggauaccccgggccaagaggagugaaaggaguagacggcaucagaggauuaaagggccacaaaggggagaagggcgaggacggguuuccgggcuucaaaggcgauaucggggugaagggggauagaggcgaaguaggaguccccgggucgaggggggaagacggcccugagggaccaaaaggccgaacgggcccaaccggugaucccggaccucccggucugaugggagaaaagggcaaauuaggggugccaggacugcccgguuauccugggagacagggacccaaaggaucacugggcuucccgggguuccccggcgcauccggagaaaaaggggcccgcggccuuucugguaaauccgggccuaggggugaacgaggaccuaccgggcccagagggcagagagggccaagaggggcaacuggaaagaguggcgcgaagggcacaaguggaggugaugggccacacggaccaccgggcgaaagggguuuaccagguccacaggggcccaaugguuucccagggccaaaaggaccuccugggccaccuggaaaggacggacugccaggccacccaggacaaagaggugaaguaggauuucagggcaaaaccggcccaccugguccaccgggggugguggggccccaaggugccgccggcgaaacaggaccaaugggcgaaaggggucauccuggcccacccgggccacccggugaacagggacuaccaggaaccgcaggaaaggaaggaacuaagggggaucccgggccacccggggcucccggcaaagauggaccagccggcuugagaggguucccgggugagcgcggccugcccggaaccgcuggaggcccaggacucaaaggcaacgaagggcccagcggaccgcccggaccagcaggaagcccuggagaaagaggcgcagccgggucuggcggccccauaggaccuccugguagacccggaccucaaggcccaccgggugcugcaggggagaaaggaguaccaggagaaaaagggccaaucggaccuaccggcagagauggagugcaagggcccgugggacucccaggcccagcuggaccgccuggcguggccggagaagacggugauaagggcgaagucggcgaucccggccagaaaggaacuaaggguaacaagggugagcaugguccucccggcccgcccggcccuauuggaccaguagggcagccaggcgcagcaggugccgacggcgaacccggugcucgaggaccccagggacauuucggcgcaaagggagaugaaggcacuaggggcuucaaugguccaccaggaccaauugggcuacagggccucccugguccuagcggagaaaagggugagacuggcgaugucggaccuaugggcccccccggcccaccaggcccuagaggcccagcuggaccuaacggugccgacggcccucaaggcccacccggaggcguggggaaccucggcccuccgggcgaaaagggggagcccggggagaguggaagucccgggauucagggcgagcccggugucaaaggacccaggggggagcgaggagaaaaaggcgagucaggacagccaggagagcccggaccucccggaccuaaaggcccuaccggagaugauggacccaaggggaauccuggacccguaggcuucccaggcgaccccggaccacccggagaaggcggacccaggggucaagauggugccaaaggcgaucgcggcgaggauggugaacccggucagccuggaagcccagggcccaccggcgagaacgguccccccgguccccuugggaaacggggcccugcagguuccccuggaagugagggccgccagggcgguaaaggggcaaagggcgauccuggagcaauuggagcacccggaaagacagggcccgugggaccugccggacccgccggcaaaccaggcccagauggacugagaggucuucccggaucugugggacaacaaggacggcccggagcgacugggcaagccgggcccccagggccugucggaccucccgggcucccagggcuuagaggagacgcuggugcaaaaggcgaaaaaggccaucccggucugaucgggcugauagggcccccaggcgagcagggggagaaaggagaucgcggccucccagggccucagggaagcccagggcagaaaggagaaaugggaauuccaggagcauccgguccaaucgggccaggcggcccccccggucucccagguccagcugguccuaaaggcgcuaagggagccacaggcccagggggaccuaagggcgaaaaaggcguucagggacccccuggccauccuggccccccuggggaggucauacaacccuugccgauacagaugcccaagaagacacgccgcucgguggauggcaguaggcuaaugcaggaagaugaagcuauuccuacagggggagccccaggcucaccaggagggcuugaagaaauauuuggcucacuagacagucugagagaagaaauugagcaaaugagaagaccuaccgggacccaggauuccccagccaggacuugucaagaccuaaagcugugccaccccgaacuccccgauggagaguacuggguagacccaaaccaaggaugcgcccgggacgcauucagaguuuuuuguaauuucaccgccggcggcgagacuuguguaacaccuagggacgacguuacccaauuuagcuauguggacagcgaaggauccccugugggagucgugcaguugacauuuuugcgcuugcucuccguuucagcccaccaagacgucagcuaccccuguucaggagcagccagggacgguccauuacgccugagaggugcaaacgaggacgagcuauccccugagaccucucccuacgugaaagaguuucgugauggaugucaaacacagcaagggagaacaguucucgagguccgcacaccugugcuagaacaacugccaguccuagaugcaagcuuuucugacuugggggcccccccacgaaggggcggcgugcuacucggccccgucugcuuuauggguuag

SEQ ID NO: 232795 - protein, 2490 aa, Artificial Sequence
  derived and/or modified sequence
MHVSLAEALEVRGGPLQEEEIWAVLNQSAESLQELFRKVSLADPAALGFIISPWSLLLLPSGSVSFTDENISNQDLRAFTAPEVLQNQSLTSLSDVEKIHIYSLGMTLYWGADYEVPQSQPIKLGDHLNSILLGMCEDVIYARVSVRTVLDACSAHIRNSNCAPSFSYVKHLVKLVLGNLSGTDQLSCNSEQKPDRSQAIRDRLRGKGLPTGRSSTSDVLDIQKPPLSHQTFLNKGLSKSMGFLSIKDTQDENYFKDILSDNSGREDSENTFSPYQFKTSGPEKKPIPGIDVLSKKKIWASSMDLLCTADRDFSSGETATYRRCHPEAVTVRTSTTPRKKEARYSDGSIALDIFGPQKMDPIYHTRELPTSSAISSALDRIRERQKKLQVLREAMNVEEPVRRYKTYHGDVFSTSSESPSIISSESDFRQVRRSEASKRFESSSGLPGVDETLSQGQSQRPSRQYETPFEGNLINQEIMLKRQEEELMQLQAKMALRQSRLSLYPGDTIKASMLDITRDPLREIALETAMTQRKLRNFFGPEFVKMTIEPFISLDLPRSILTKKGKNEDNRRKVNIMLLNGQRLELTCDTKTICKDVFDMVVAHIGLVEHHLFALATLKDNEYFFVDPDLKLTKVAPEGWKEEPKKKTKATVNFTLFFRIKFFMDDVSLIQHTLTCHQYYLQLRKDILEERMHCDDETSLLLASLALQAEYGDYQPEVHGVSYFRMEHYLPARVMEKLDLSYIKEELPKLHNTYVGASEKETELEFLKVCQRLTEYGVHFHRVHPEKKSQTGILLGVCSKGVLVFEVHNGVRTLVLRFPWRETKKISFSKKKITLQNTSDGIKHGFQTDNSKICQYLLHLCSYQHKFQLQMRARQSNQDAQDIERASFRSLNLQAESVRGFNMGRAISTGSLASSTLNKLAVRPLSVQAEILKRLSCSELSLYQPLQNSSKEKNDKASWEEKPREMSKSYHDLSQASLYPHRKNVIVNMEPPPQTVAELVGKPSHQMSRSDAESLAGVTKLNNSKSVASLNRSPERRKHESDSSSIEDPGQAYVLGMTMHSSGNSSSQVPLKENDVLHKRWSIVSSPEREITLVNLKKDAKYGLGFQIIGGEKMGRLDLGIFISSVAPGGPADLDGCLKPGDRLISVNSVSLEGVSHHAAIEILQNAPEDVTLVISQPKEKISKVPSTPVHLTNEMKNYMKKSSYMQDSAIDSSSKDHHWSRGTLRHISENSFGPSGGLREGSLSSQDSRTESASLSQSQVNGFFASHLGDQTWQESQHGSPSPSVISKATEKETFTDSNQSKTKKPGISDVTDYSDRGDSDMDEATYSSSQDHQTPKQESSSSVNTSNKMNFKTFSSSPPKPGDIFEVELAKNDNSLGISVTVLFDKGGVNTSVRHGGIYVKAVIPQGAAESDGRIHKGDRVLAVNGVSLEGATHKQAVETLRNTGQVVHLLLEKGQSPTSKEHVPVTPQCTLSDQNAQGQGPEKVKKTTQVKDYSFVTEENTFEVKLFKNSSGLGFSFSREDNLIPEQINASIVRVKKLFPGQPAAESGKIDVGDVILKVNGASLKGLSQQEVISALRGTAPEVFLLLCRPPPGVLPEIDTALLTPLQSPAQVLPNSSKDSSQPSCVEQSTSSDENEMSDKSKKQCKSPSRRDSYSDSSGSGEDDLVTAPANISNSTWSSALHQTLSNMVSQAQSHHEAPKSQEDTICTMFYYPQKIPNKPEFEDSNPSPLPPDMAPGQSYQPQSESASSSSMDKYHIHHISEPTRQENWTPLKNDLENHLEDFELEVELLITLIKSEKGSLGFTVTKGNQRIGCYVHDVIQDPAKSDGRLKPGDRLIKVNDTDVTNMTHTDAVNLLRAASKTVRLVIGRVLELPRIPMLPHLLPDITLTCNKEELGFSLCGGHDSLYQVVYISDINPRSVAAIEGNLQLLDVIHYVNGVSTQGMTLEEVNRALDMSLPSLVLKATRNDLPVVPSSKRSAVSAPKSTKGNGSYSVGSCSQPALTPNDSFSTVAGEEINEISYPKGKCSTYQIKGSPNLTLPKESYIQEDDIYDDSQEAEVIQSLLDVVDEEAQNLLNENNAAGYSCGPGTLKMNGKLSEERTEDTDCDGSPLPEYFTEATKMNGCEEYCEEKVKSESLIQKPQEKKTDDDEITWGNDELPIERTNHEDSDKDHSFLTNDELAVLPVVKVLPSGKYTGANLKSVIRVLRGLLDQGIPSKELENLQELKPLDQCLIGQTKENRRKNRYKNILPYDATRVPLGDEGGYINASFIKIPVGKEEFVYIACQGPLPTTVGDFWQMIWEQKSTVIAMMTQEVEGEKIKCQRYWPNILGKTTMVSNRLRLALVRMQQLKGFVVRAMTLEDIQTREVRHISHLNFTAWPDHDTPSQPDDLLTFISYMRHIHRSGPIITHCSAGIGRSGTLICIDVVLGLISQDLDFDISDLVRCMRLQRHGMVQTEDQYIFCYQVILYVLTRLQAEEEQKQQPQLLK

SEQ ID NO: 232796 - protein, 2157 aa, Artificial Sequence
  derived and/or modified sequence
MSDRSGPTAKGKDGKKYSSLNLFDTYKGKSLEIQKPAVAPRHGLQSLGKVAIARRMPPPANLPSLKAENKGNDPNVSLVPKDGTGWASKQEQSDPKSSDASTAQPPESQPLPASQTPASNQPKRPPAAPENTPLVPSGVKSWAQASVTHGAHGDGGRASSLLSRFSREEFPTLQAAGDQDKAAKERESAEQSSGPGPSLRPQNSTTWRDGGGRGPDELEGPDSKLHHGHDPRGGLQPSGPPQFPPYRGMMPPFMYPPYLPFPPPYGPQGPYRYPTPDGPSRFPRVAGPRGSGPPMRLVEPVGRPSILKEDNLKEFDQLDQENDDGWAGAHEEVDYTEKLKFSDEEDGRDSDEEGAEGHRDSQSASGEERPPEADGKKGNSPNSEPPTPKTAWAETSRPPETEPGPPAPKPPLPPPHRGPAGNWGPPGDYPDRGGPPCKPPAPEDEDEAWRQRRKQSSSEISLAVERARRRREEEERRMQEERRAACAEKLKRLDEKFGAPDKRLKAEPAAPPAAPSTPAPPPAVPKELPAPPAPPPASAPTPETEPEEPAQAPPAQSTPTPGVAAAPTLVSGGGSTSSTSSGSFEASPVEPQLPSKEGPEPPEEVPPPTTPPVPKVEPKGDGIGPTRQPPSQGLGYPKYQKSLPPRFQRQQQEQLLKQQQQHQWQQHQQGSAPPTPVPPSPPQPVTLGAVPAPQAPPPPPKALYPGALGRPPPMPPMNFDPRWMMIPPYVDPRLLQGRPPLDFYPPGVHPSGLVPRERSDSGGSSSEPFDRHAPAMLRERGTPPVDPKLAWVGDVFTATPAEPRPLTSPLRQAADEDDKGMRSETPPVPPPPPYLASYPGFPENGAPGPPISRFPLEEPGPRPLPWPPGSDEVAKIQTPPPKKEPPKEETAQLTGPEAGRKPARGVGSGGQGPPPPRRESRTETRWGPRPGSSRRGIPPEEPGAPPRRAGPIKKPPPPTKVEELPPKPLEQGDETPKPPKPDPLKITKGKLGGPKETPPNGNLSPAPRLRRDYSYERVGPTSCRGRGRGEYFARGRGFRGTYGGRGRGARSREFRSYREFRGDDGRGGGTGGPNHPPAPRGRTASETRSEGSEYEEIPKRRRQRGSETGSETHESDLAPSDKEAPTPKEGTLTQVPLAPPPPGAPPSPAPARFTARGGRVFTPRGVPSRRGRGGGRPPPQVCPGWSPPAKSLAPKKPPTGPLPPSKEPLKEKLIPGPLSPVARGGSNGGSNVGMEDGERPRRRRHGRAQQQDKPPRFRRLKQERENAARGSEGKPSLTLPASAPGPEEALTTVTVAPAPRRAAAKSPDLSNQNSDQANEEWETASESSDFTSERRGDKEAPPPVLLTPKAVGTPGGGGGGAVPGISAMSRGDLSQRAKDLSKRSFSSQRPGMERQNRRPGPGGKAGSSGSSSGGGGGGPGGRTGPGRGDKRSWPSPKNRSRPPEERPPGLPLPPPPPSSSAVFRLDQVIHSNPAGIQQALAQLSSRQGSVTAPGGHPRHKPGLPQAPQGPSPRPPTRYEPQRVNSGLSSDPHFEEPGPMVRGVGGTPRDSAGVSPFPPKRRERPPRKPELLQEESLPPPHSSGFLGSKPEGPGPQAESRDTGTEALTPHIWNRLHTATSRKSYRPSSMEPWMEPLSPFEDVAGTEMSQSDSGVDLSGDSQVSSGPCSQRSSPDGGLKGAAEGPPKRPGGSSPLNAVPCEGPPGSEPPRRPPPAPHDGDRKELPREQPLPPGPIGTERSQRTDRGTEPGPIRPSHRPGPPVQFGTSDKDSDLRLVVGDSLKAEKELTASVTEAIPVSRDWELLPSAAASAEPQSKNLDSGHCVPEPSSSGQRLYPEVFYGSAGPSSSQISGGAMDSQLHPNSGGFRPGTPSLHPYRSQPLYLPPGPAPPSALLSGLALKGQFLDFSTMQATELGKLPAGGVLYPPPSFLYSPAFCPSPLPDTSLLQVRQDLPSPSDFYSTPLQPGGQSGFLPSGAPAQQMLLPMVDSQLPVVNFGSLPPAPPPAPPPLSLLPVGPALQPPSLAVRPPPAPATRVLPSPARPFPASLGRAELHPVELKPFQDYQKLSSNLGGPGSSRTPPTGRSFSGLNSRLKATPSTYSGVFRTQRVDLYQQASPPDALRWIPKPWERTGPPPREGPSRRAEEPGSRGDKEPGLPPPR

SEQ ID NO: 232797 - protein, 1382 aa, Artificial Sequence
  derived and/or modified sequence
MLRERGTPPVDPKLAWVGDVFTATPAEPRPLTSPLRQAADEDDKGMRSETPPVPPPPPYLASYPGFPENGAPGPPISRFPLEEPGPRPLPWPPGSDEVAKIQTPPPKKEPPKEETAQLTGPEAGRKPARGVGSGGQGPPPPRRESRTETRWGPRPGSSRRGIPPEEPGAPPRRAGPIKKPPPPTKVEELPPKPLEQGDETPKPPKPDPLKITKGKLGGPKETPPNGNLSPAPRLRRDYSYERVGPTSCRGRGRGEYFARGRGFRGTYGGRGRGARSREFRSYREFRGDDGRGGGTGGPNHPPAPRGRTASETRSEGSEYEEIPKRRRQRGSETGSETHESDLAPSDKEAPTPKEGTLTQVPLAPPPPGAPPSPAPARFTARGGRVFTPRGVPSRRGRGGGRPPPQVCPGWSPPAKSLAPKKPPTGPLPPSKEPLKEKLIPGPLSPVARGGSNGGSNVGMEDGERPRRRRHGRAQQQDKPPRFRRLKQERENAARGSEGKPSLTLPASAPGPEEALTTVTVAPAPRRAAAKSPDLSNQNSDQANEEWETASESSDFTSERRGDKEAPPPVLLTPKAVGTPGGGGGGAVPGISAMSRGDLSQRAKDLSKRSFSSQRPGMERQNRRPGPGGKAGSSGSSSGGGGGGPGGRTGPGRGDKRSWPSPKNRSRPPEERPPGLPLPPPPPSSSAVFRLDQVIHSNPAGIQQALAQLSSRQGSVTAPGGHPRHKPGLPQAPQGPSPRPPTRYEPQRVNSGLSSDPHFEEPGPMVRGVGGTPRDSAGVSPFPPKRRERPPRKPELLQEESLPPPHSSGFLGSKPEGPGPQAESRDTGTEALTPHIWNRLHTATSRKSYRPSSMEPWMEPLSPFEDVAGTEMSQSDSGVDLSGDSQVSSGPCSQRSSPDGGLKGAAEGPPKRPGGSSPLNAVPCEGPPGSEPPRRPPPAPHDGDRKELPREQPLPPGPIGTERSQRTDRGTEPGPIRPSHRPGPPVQFGTSDKDSDLRLVVGDSLKAEKELTASVTEAIPVSRDWELLPSAAASAEPQSKNLDSGHCVPEPSSSGQRLYPEVFYGSAGPSSSQISGGAMDSQLHPNSGGFRPGTPSLHPYRSQPLYLPPGPAPPSALLSGLALKGQFLDFSTMQATELGKLPAGGVLYPPPSFLYSPAFCPSPLPDTSLLQVRQDLPSPSDFYSTPLQPGGQSGFLPSGAPAQQMLLPMVDSQLPVVNFGSLPPAPPPAPPPLSLLPVGPALQPPSLAVRPPPAPATRVLPSPARPFPASLGRAELHPVELKPFQDYQKLSSNLGGPGSSRTPPTGRSFSGLNSRLKATPSTYSGVFRTQRVDLYQQASPPDALRWIPKPWERTGPPPREGPSRRAEEPGSRGDKEPGLPPPR

SEQ ID NO: 232798 - protein, 2157 aa, Artificial Sequence
  derived and/or modified sequence
MSDRSGPTAKGKDGKKYSSLNLFDTYKGKSLEIQKPAVAPRHGLQSLGKVAIARRMPPPANLPSLKAENKGNDPNVSLVPKDGTGWASKQEQSDPKSSDASTAQPPESQPLPASQTPASNQPKRPPAAPENTPLVPSGVKSWAQASVTHGAHGDGGRASSLLSRFSREEFPTLQAAGDQDKAAKERESAEQSSGPGPSLRPQNSTTWRDGGGRGPDELEGPDSKLHHGHDPRGGLQPSGPPQFPPYRGMMPPFMYPPYLPFPPPYGPQGPYRYPTPDGPSRFPRVAGPRGSGPPMRLVEPVGRPSILKEDNLKEFDQLDQENDDGWAGAHEEVDYTEKLKFSDEEDGRDSDEEGAEGHRDSQSASGEERPPEADGKKGNSPNSEPPTPKTAWAETSRPPETEPGPPAPKPPLPPPHRGPAGNWGPPGDYPDRGGPPCKPPAPEDEDEAWRQRRKQSSSEISLAVERARRRREEEERRMQEERRAACAEKLKRLDEKFGAPDKRLKAEPAAPPAAPSTPAPPPAVPKELPAPPAPPPASAPTPETEPEEPAQAPPAQSTPTPGVAAAPTLVSGGGSTSSTSSGSFEASPVEPQLPSKEGPEPPEEVPPPTTPPVPKVEPKGDGIGPTRQPPSQGLGYPKYQKSLPPRFQRQQQEQLLKQQQQHQWQQHQQGSAPPTPVPPSPPQPVTLGAVPAPQAPPPPPKALYPGALGRPPPMPPMNFDPRWMMIPPYVDPRLLQGRPPLDFYPPGVHPSGLVPRERSDSGGSSSEPFDRHAPAMLRERGTPPVDPKLAWVGDVFTATPAEPRPLTSPLRQAADEDDKGMRSETPPVPPPPPYLASYPGFPENGAPGPPISRFPLEEPGPRPLPWPPGSDEVAKIQTPPPKKEPPKEETAQLTGPEAGRKPARGVGSGGQGPPPPRRESRTETRWGPRPGSSRRGIPPEEPGAPPRRAGPIKKPPPPTKVEELPPKPLEQGDETPKPPKPDPLKITKGKLGGPKETPPNGNLSPAPRLRRDYSYERVGPTSCRGRGRGEYFARGRGFRGTYGGRGRGARSREFRSYREFRGDDGRGGGTGGPNHPPAPRGRTASETRSEGSEYEEIPKRRRQRGSETGSETHESDLAPSDKEAPTPKEGTLTQVPLAPPPPGAPPSPAPARFTARGGRVFTPRGVPSRRGRGGGRPPPQVCPGWSPPAKSLAPKKPPTGPLPPSKEPLKEKLIPGPLSPVARGGSNGGSNVGMEDGERPRRRRHGRAQQQDKPPRFRRLKQERENAARGSEGKPSLTLPASAPGPEEALTTVTVAPAPRRAAAKSPDLSNQNSDQANEEWETASESSDFTSERRGDKEAPPPVLLTPKAVGTPGGGGGGAVPGISAMSRGDLSQRAKDLSKRSFSSQRPGMERQNRRPGPGGKAGSSGSSSGGGGGGPGGRTGPGRGDKRSWPSPKNRSRPPEERPPGLPLPPPPPSSSAVFRLDQVIHSNPAGIQQALAQLSSRQGSVTAPGGHPRHKPGLPQAPQGPSPRPPTRYEPQRVNSGLSSDPHFEEPGPMVRGVGGTPRDSAGVSPFPPKRRERPPRKPELLQEESLPPPHSSGFLGSKPEGPGPQAESRDTGTEALTPHIWNRLHTATSRKSYRPSSMEPWMEPLSPFEDVAGTEMSQSDSGVDLSGDSQVSSGPCSQRSSPDGGLKGAAEGPPKRPGGSSPLNAVPCEGPPGSEPPRRPPPAPHDGDRKELPREQPLPPGPIGTERSQRTDRGTEPGPIRPSHRPGPPVQFGTSDKDSDLRLVVGDSLKAEKELTASVTEAIPVSRDWELLPSAAASAEPQSKNLDSGHCVPEPSSSGQRLYPEVFYGSAGPSSSQISGGAMDSQLHPNSGGFRPGTPSLHPYRSQPLYLPPGPAPPSALLSGVALKGQFLDFSTMQATELGKLPAGGVLYPPPSFLYSPAFCPSPLPDTSLLQVRQDLPSPSDFYSTPLQPGGQSGFLPSGAPAQQMLLPMVDSQLPVVNFGSLPPAPPPAPPPLSLLPVGPALQPPSLAVRPPPAPATRVLPSPARPFPASLGRAELHPVELKPFQDYQKLSSNLGGPGSSRTPPTGRSFSGLNSRLKATPSTYSGVFRTQRVDLYQQASPPDALRWIPKPWERTGPPPREGPSRRAEEPGSRGDKEPGLPPPR

SEQ ID NO: 232799 - protein, 2138 aa, Artificial Sequence
  derived and/or modified sequence
MSDRSGPTAKGKDGKKYSSLNLFDTYKGKSLEIQKPAVAPRHGLQSLGKVAIARRMPPPANLPSLKAENKGNDPNVSLVPKDGTGWASKQEQSDPKSSDASTAQPPESQPLPASQTPASNQPKRPPAAPENTPLVPSGVKSWAQASVTHGAHGDGGRASSLLSRFSREEFPTLQAAGDQDKAAKERESAEQSSGPGPSLRPQNSTTWRDGGGRGPDELEGPDSKLHHGHDPRGGLQPSGPPQFPPYRGMMPPFMYPPYLPFPPPYGPQGPYRYPTPDGPSRFPRVAGPRGSGPPMRLVEPVGRPSILKEDNLKEFDQLDQENDDGWAGAHEEVDYTEKLKFSDEEDGRDSDEEGAEGHRDSQSASGEERPPEADGKKGNSPNSEPPTPKTAWAETSRPPETEPGPPAPKPPLPPPGDYPDRGGPPCKPPAPEDEDEAWRQRRKQSSSEISLAVERARRRREEEERRMQEERRAACAEKLKRLDEKFGAPDKRLKAEPAAPPAAPSTPAPPPAVPKELPAPPAPPPASAPTPETEPEEPAQAPPAQSTPTPGVAAAPTLVSGGGSTSSTSSGSFEASPVEPQLPSKEGPEPPEEVPPPTTPPVPKVEPKGDGIGPTRQPPSQGLGYPKYQKSLPPRFQRQQQEQLLKQQQQHQWQQHQQGSAPPTPVPPSPPQPVTLGAVPAPQAPPPPPKALYPGALGRPPPMPPMNFDPRWMMIPPYVDPRLLQGRPPLDFYPPGVHPSGLVPRERSDSGGSSSEPFDRHAPAMLRERGTPPVDPKLAWVGDVFTATPAEPRPLTSPLRQAADEDDKGMRSETPPVPPPPPYLASYPGFPENGAPGPPISRFPLEEPGPRPLPWPPGSDEVAKIQTPPPKKEPPKEETAQLTGPEAGRKPARGVGSGGQGPPPPRRESRTETRWGPRPGSSRRGIPPEEPGAPPRRAGPIKKPPPPTKVEELPPKPLEQGDETPKPPKPDPLKITKGKLGGPKETPPNGNLSPAPRLRRDYSYERVGPTSCRGRGRGEYFARGRGFRGTYGGRGRGAAGNSAVTESFEEMMGVEVGQGDQTTLLLPEAALPARHGARVQSMRKSPSGAGSGAQKQAARPMRVIWLLQTRRLPHPRREHSPRSRSPTTRSPTFPAPARFTPGVGESSLPEGISPGPRRREPPQVCPGWSPPAKSLAPKKPPTGPLPPSKEPLKEKLIPGPLSPVARGGSNGGSNVGMEDGERPRRRRHGRAQQQDKPPRFRRLKQERENAARGSEGKPSLTLPASAPGPEEALTTVTVAPAPRRAAAKSPDLSNQNSDQANEEWETASESSDFTSERRGDKEAPPPVLLTPKAVGTPGGGGGGAVPGISAMSRGDLSQRAKDLSKRSFSSQRPGMERQNRRPGPGGKAGSSGSSSGGGGGGPGGRTGPGRGDKRSWPSPKNRSRPPEERPPGLPLPPPPPSSSAVFRLDQVIHSNPAGIQQALAQLSSRQGSVTAPGGHPRHKPGLPQAPQGPSPRPPTRYEPQRVNSGLSSDPHFEEPGPMVRGVGGTPRDSAGVSPFPPKRRERPPRKPELLQEESLPPPHSSGFLGSKPEGPGPQAESRDTGTEALTPHIWNRLHTATSRKSYRPSSMEPWMEPLSPFEDVAGTEMSQSDSGVDLSGDSQVSSGPCSQRSSPDGGLKGAAEGPPKRPGGSSPLNAVPCEGPPGSEPPRRPPPAPHDGDRKELPREQPLPPGPIGTERSQRTDRGTEPGPIRPSHRPGPPVQFGTSDKDSDLRLVVGDSLKAEKELTASVTEAIPVSRDWELLPSAAASAEPQSKNLDSGHCVPEPSSSGQRLYPEVFYGSAGPSSSQISGGHGLSITSKQWRRPGTPSLHPYRSQPLYLPPGPAPPSALLSGLALKGQFLDFSTMQATELGKLPAGGVLYPPPSFLYSPAFCPSPLPDTSLLQVRQDLPSPSDFYSTPLQPGGQSGFLPSGAPAQQMLLPMVDSQLPVVNFGSLPPAPPPAPPPLSLLPVGPALQPPSLAVRPPPAPATRVLPSPARPFPASLGRAELHPVELKPFQDYQKLSSNLGGPGSSRTPPTGRSFSGLNSRLKATPSTYSGVFRTQRVDLYQQASPPDALRWIPKPWERTGPPPREGPSRRAEEPGSRGDKEPGLPPPR

SEQ ID NO: 232800 - protein, 2138 aa, Artificial Sequence
  derived and/or modified sequence
MSDRSGPTAKGKDGKKYSSLNLFDTYKGKSLEIQKPAVAPRHGLQSLGKVAIARRMPPPANLPSLKAENKGNDPNVSLVPKDGTGWASKQEQSDPKSSDASTAQPPESQPLPASQTPASNQPKRPPAAPENTPLVPSGVKSWAQASVTHGAHGDGGRASSLLSRFSREEFPTLQAAGDQDKAAKERESAEQSSGPGPSLRPQNSTTWRDGGGRGPDELEGPDSKLHHGHDPRGGLQPSGPPQFPPYRGMMPPFMYPPYLPFPPPYGPQGPYRYPTPDGPSRFPRVAGPRGSGPPMRLVEPVGRPSILKEDNLKEFDQLDQENDDGWAGAHEEVDYTEKLKFSDEEDGRDSDEEGAEGHRDSQSASGEERPPEADGKKGNSPNSEPPTPKTAWAETSRPPETEPGPPAPKPPLPPPGDYPDRGGPPCKPPAPEDEDEAWRQRRKQSSSEISLAVERARRRREEEERRMQEERRAACAEKLKRLDEKFGAPDKRLKAEPAAPPAAPSTPAPPPAVPKELPAPPAPPPASAPTPETEPEEPAQAPPAQSTPTPGVAAAPTLVSGGGSTSSTSSGSFEASPVEPQLPSKEGPEPPEEVPPPTTPPVPKVEPKGDGIGPTRQPPSQGLGYPKYQKSLPPRFQRQQQEQLLKQQQQHQWQQHQQGSAPPTPVPPSPPQPVTLGAVPAPQAPPPPPKALYPGALGRPPPMPPMNFDPRWMMIPPYVDPRLLQGRPPLDFYPPGVHPSGLVPRERSDSGGSSSEPFDRHAPAMLRERGTPPVDPKLAWVGDVFTATPAEPRPLTSPLRQAADEDDKGMRSETPPVPPPPPYLASYPGFPENGAPGPPISRFPLEEPGPRPLPWPPGSDEVAKIQTPPPKKEPPKEETAQLTGPEAGRKPARGVGSGGQGPPPPRRESRTETRWGPRPGSSRRGIPPEEPGAPPRRAGPIKKPPPPTKVEELPPKPLEQGDETPKPPKPDPLKITKGKLGGPKETPPNGNLSPAPRLRRDYSYERVGPTSCRGRGRGEYFARGRGFRGTYGGRGRGAAGNSAVTESFEEMMGVEVGQGDQTTLLLPEAALPARHGARVQSMRKSPSGAGSGAQKQAARPMRVIWLLQTRRLPHPRREHSPRSRSPTTRSPTFPAPARFTPGVGESSLPEGISPGPRRREPPQVCPGWSPPAKSLAPKKPPTGPLPPSKEPLKEKLIPGPLSPVARGGSNGGSNVGMEDGERPRRRRHGRAQQQDKPPRFRRLKQERENAARGSEGKPSLTLPASAPGPEEALTTVTVAPAPRRAAAKSPDLSNQNSDQANEEWETASESSDFTSERRGDKEAPPPVLLTPKAVGTPGGGGGGAVPGISAMSRGDLSQRAKDLSKRSFSSQRPGMERQNRRPGPGGKAGSSGSSSGGGGGGPGGRTGPGRGDKRSWPSPKNRSRPPEERPPGLPLPPPPPSSSAVFRLDQVIHSNPAGIQQALAQLSSRQGSVTAPGGHPRHKPGLPQAPQGPSPRPPTRYEPQRVNSGLSSDPHFEEPGPMVRGVGGTPRDSAGVSPFPPKRRERPPRKPELLQEESLPPPHSSGFLGSKPEGPGPQAESRDTGTEALTPHIWNRLHTATSRKSYRPSSMEPWMEPLSPFEDVAGTEMSQSDSGVDLSGDSQVSSGPCSQRSSPDGGLKGAAEGPPKRPGGSSPLNAVPCEGPPGSEPPRRPPPAPHDGDRKELPREQPLPPGPIGTERSQRTDRGTEPGPIRPSHRPGPPVQFGTSDKDSDLRLVVGDSLKAEKELTASVTEAIPVSRDWELLPSAAASAEPQSKNLDSGHCVPEPSSSGQRLYPEVFYGSAGPSSSQISGGHGLSITSKQWRRPGTPSLHPYRSQPLYLPPGPAPPSALLSGVALKGQFLDFSTMQATELGKLPAGGVLYPPPSFLYSPAFCPSPLPDTSLLQVRQDLPSPSDFYSTPLQPGGQSGFLPSGAPAQQMLLPMVDSQLPVVNFGSLPPAPPPAPPPLSLLPVGPALQPPSLAVRPPPAPATRVLPSPARPFPASLGRAELHPVELKPFQDYQKLSSNLGGPGSSRTPPTGRSFSGLNSRLKATPSTYSGVFRTQRVDLYQQASPPDALRWIPKPWERTGPPPREGPSRRAEEPGSRGDKEPGLPPPR

SEQ ID NO: 232801 - DNA, 6474 bp, Artificial Sequence
  derived and/or modified sequence
atgagtgaccgcagcgggcctacagcgaagggcaaggacggcaaaaaatattcatctcttaacctgttcgatacgtacaaaggaaaatctctggaaatccagaaacccgcagtcgctccaaggcatggcctgcagagccttggaaaagtggcaatcgcgaggaggatgccaccacccgctaatctgccctccctgaaagcagagaataagggaaacgatccgaatgtttcactcgttccaaaggacggcacgggatgggctagcaagcaggagcaaagtgaccccaagtctagcgacgccagcacagcgcagccaccggaaagccagcccctgccagcgtcccagacccccgcctcaaatcagccgaagcgtccacccgctgccccagagaacaccccactggtgccatcaggagtgaagagctgggcacaggcctccgtgacgcacggcgctcacggggatggcgggcgtgcatcctcgttgctgtcacggttcagtagagaagaattccccacactccaggcagcaggcgatcaggataaagctgcaaaggaaagagagtctgccgagcagagttccggaccaggcccctcccttcggcctcaaaattcaacaacttggagagatggagggggacgcggcccagacgaactggaaggtcctgactccaagctgcaccatggacacgaccctcggggcggattacaaccctcaggcccaccacaattccccccttaccgcggcatgatgcccccatttatgtacccaccttacctgccgttcccgcccccatacggccctcagggcccgtacagataccccacacctgatggcccatctcgattccctagagtcgcggggccccggggcagtgggccccctatgcgcctggtggaaccagtcgggcggccatccatactgaaagaggataatctgaaggaattcgaccagctggatcaggagaatgatgatgggtgggccggtgcccacgaggaggttgattacacagagaagctgaaatttagtgatgaagaggacggaagagactccgatgaagaaggtgcagaaggccatcgagactcacagagtgcctctggcgaagagagacctccagaggctgatggtaagaagggcaactccccaaacagtgagccacccaccccaaagacagcatgggctgaaacaagcagacctccagagaccgagcctgggccaccggcccccaagcccccgctcccccctcctcatcggggaccagccgggaattggggccctccaggcgactatccagatcgcggcgggcctccctgcaaacctcccgctcctgaagatgaggatgaagcctggcgccagagacgaaaacagtcatcgtcggaaatcagcctcgctgtcgaacgcgctcgccggcgccgcgaggaggaggaaaggagaatgcaggaggagcgcagagcggcttgcgctgagaagctgaagcgcctcgacgaaaagttcggcgcccctgacaaacggctgaaagccgagccagccgcccctcccgctgccccctctacacctgcccctccgccggccgtgcccaaagagctgcctgccccacctgccccccccccagcctcagctcctacaccagagaccgagccggaagagccggctcaggcaccgccggcccagtcgacccccactcccggcgtagctgccgcacctaccttagtcagcggaggaggtagcacatcctccacaagctcgggatcgtttgaagctagtccggtggagccccaacttccatctaaggagggccctgagccacctgaggaagtgcccccacccacaacaccgcccgtccctaaagtagagccgaagggggacggcattggtccgacacgacagcctccttcacagggacttggttaccccaaatatcagaaatcgctgcccccacgttttcaacgtcaacagcaagagcagctacttaaacaacagcagcagcaccaatggcagcaacatcagcaaggctccgccccccccacccccgtgcccccttccccaccccagcccgtgaccctaggggccgttcccgctccacaggctcccccccccccacccaaagctctctaccccggcgccctggggagacctcctcctatgcctcccatgaacttcgatcctaggtggatgatgatccctccttatgtcgatccacgcctgctgcagggtcgaccgccattagatttttacccgccaggcgtgcacccttcaggcctcgtcccacgcgaacgtagcgatagcggcggatccagcagtgagcctttcgatcgacacgccccagcaatgttacgggagagggggacgcccccggtggacccaaaacttgcatgggtcggtgacgtgtttactgcgacacccgcggagccaagacccttaacctccccattacggcaggccgccgacgaggacgataaggggatgagaagcgagactcctccggtgcccccgcctccgccttacctggctagctatcctggcttccccgagaatggcgccccaggaccacccattagcagattccctttggaggagccagggccccgccctctaccatggccacccggatctgatgaggtcgctaagatccaaaccccaccgccaaaaaaagaaccacctaaagaggaaacagcccagctgaccggacccgaagcaggcaggaagcctgccagaggcgtaggctctggagggcagggtccacccccaccacgaagggaatcgaggacggagaccagatgggggcccagacccggctcctcacgtcgggggatccctcctgaggagcccggtgcccccccgcggagggcggggccaatcaagaagccacctccacctactaaagtcgaggagttgcctcccaagccactggagcagggggatgagacccctaagccgcctaaaccagatccactcaaaatcacaaagggaaagctgggcggtccgaaagaaactccgcctaatggcaatctcagccccgccccaaggctgcggcgtgattattcatacgagcgcgtggggccaacctcatgtcgcggtaggggtcgcggggagtatttcgcacggggtaggggttttcgcgggacctacggagggaggggtcgtggggcacggtctagggaattccgatcctatagagagttccgaggcgacgatggccggggaggcgggaccggtgggcccaaccacccacccgcccctcgagggcgtactgcatccgaaacgcgatccgagggatctgagtatgaggagatacccaagaggcggaggcaaagagggagtgagactgggtcggaaacccacgagtcagacctagcaccgtcagacaaggaggcccctaccccgaaggaaggaacgctgacccaagttccacttgctcctccccctcccggagctccaccttccccagcaccagcccgcttcacagcacggggcggcagggtgtttactcctagaggtgtcccgtcacgaagggggagaggtggcggaaggcctcctcctcaggtctgtcctgggtggtctcccccagcaaaaagtcttgctcccaagaagcccccaacgggccctttgccaccgagtaaggagccacttaaggaaaaattgattcctggtcctctctctccagtcgcaagaggtggctcaaatggtggcagcaacgttggtatggaagacggcgaaaggcctcgacgtaggcgtcacgggcgcgcccagcagcaagataagccccccaggttcagacgtctcaagcaggagcgggagaatgcagcccgtgggagcgaggggaagccatctctgaccttgcctgcgagcgcaccaggaccagaggaggccttgacgaccgtgacagtggctcctgccccccggagagctgccgctaagagtcctgacttgtccaatcagaatagtgaccaagccaacgaggaatgggagactgcgtcagagtcctccgatttcacttccgagcgcagaggagataaggaagcacctccaccagttctgctgactcccaaagcagtaggcacacccgggggaggcggagggggggccgtaccgggcatatcagccatgagccgcggtgacctatctcaaagggctaaggatctgtccaagagatccttttcatcccagcggcccggaatggagagacaaaatcggcgtccaggccctggaggaaaagcaggatcatctgggtctagtagtggtggcggtggtggtggaccaggcggccgcacgggacctgggaggggcgataaacggtcttggccttctccaaaaaaccggtcacgtccccctgaagagcggccccccggattaccactgccaccacctcctccctcctcctccgcggtcttccgccttgaccaggtgattcactccaaccccgccggcatacaacaggctctggctcagctctccagccgacaggggtccgtgaccgcccctggaggtcatccccggcataagccgggcctgccgcaggcaccacaagggccaagccctcgtcctccgacacggtatgaacctcagagggttaactccgggctgtccagtgacccgcatttcgaggagccaggccctatggtgagaggtgtggggggaacacccagagacagtgcgggggtgagtccctttccaccaaagcgcagggaacgccctcccaggaagcccgaactgctgcaggaggagagcctgcctccaccccattcttccggctttctgggctcaaagcctgaaggccctggcccccaggctgaatccagggatacgggaacagaggcgcttacaccccacatctggaaccgtctgcacacagccacatccagaaagagctacaggccaagttcgatggagccttggatggagccactcagtccgttcgaggatgtcgcaggcacagaaatgagtcagagtgacagtggtgtcgacctctctggagactctcaggtatccagtggaccatgcagtcagagatcatcccctgacggagggctaaagggcgcggctgaaggaccccccaaaagaccaggcggaagctctccactaaacgccgtcccttgtgaggggccacctggatcagagccacctcgccggcctccccccgcaccccatgatggtgacaggaaggagctgcctagggagcagcctctgccaccagggcctatcgggacggagcgatcgcagcgcactgatcggggtacggagccgggacctattcgaccctcccatagaccaggaccacctgtgcagttcggaactagtgacaaagatagcgacctcagattggttgtgggtgacagcctgaaggcagaaaaagagttaactgccagcgtgactgaggccatccctgtgtcacgggactgggagctgcttccatccgctgcggcctcagctgaaccccaatctaaaaatcttgattccggtcattgcgtgcccgaaccctcttcgtcaggacaaagactctacccagaagtcttttacggctcagctggcccctcgagcagccaaatatcaggaggcgcaatggactcccagcttcaccctaacagtggcgggtttcgccctggcaccccttcactgcacccatatcgatctcaaccactctatctgccacctggtcccgcgcctccaagtgccctgctgagcggcctggcccttaaaggacaattcctcgattttagcacaatgcaggccaccgagctgggaaagctgccagcgggcggtgttctgtatcctcctccaagtttcctgtattcacctgcattctgccctagcccgctcccagacacctctctcctgcaggttcgccaggacctccccagtccttccgacttctattcaacgcccttgcaacccggtgggcaatcaggttttttaccttccggcgctcctgcacagcagatgctacttcccatggtcgacagtcagctgccagttgtaaacttcgggtcgctgcctccagccccccccccggcacctccaccgctgtcactgcttcctgtcggcccagccctccaacctccttctctcgctgtccggcccccacccgcacccgcgacgagagtcttaccgtctcctgcccgaccctttccagcctccctggggcgcgctgagctgcacccagttgagttgaaaccctttcaggactaccaaaagctgtcttcaaatcttggaggtccgggatcctctaggaccccccctactggccggtcgtttagtggcctcaattctcgcctgaaggctacacccagtacttactccggagtcttccgaacccaaagagttgacctctatcaacaggcatctcccccagatgccctaaggtggatcccaaaaccttgggagcgtactggcccgccccctcgggagggcccctcaaggagagccgaggaacctggttcaagaggagacaaggagccgggacttccgccccctaggtag

SEQ ID NO: 232802 - DNA, 4149 bp, Artificial Sequence
  derived and/or modified sequence
atgctgcgcgagcggggtacccctcctgtggatcccaagcttgcctgggtgggagatgtgtttaccgccaccccggccgaaccccgcccactaacatcccccttgagacaggcagccgatgaggatgacaaaggcatgcggtctgaaaccccccctgttccccctcctcccccatacctggccagctacccaggttttccagaaaatggcgcccctggccctcctatctcacgctttccgctcgaggaacctgggccccgaccactgccttggcctccaggttccgacgaagtggctaagatccaaacccccccaccaaaaaaggagccccctaaagaagaaacagcccaactgacaggtccggaggctggaaggaaacctgctagaggcgtggggtccgggggccaaggtcctccaccgccccggcgcgagagtcgaacagaaaccaggtggggcccccggcccgggtcatcgaggaggggtatacctcccgaggagcccggagctccgccaaggcgcgcaggacccataaaaaagccacctccaccaacaaaggtggaagaactgccacctaaacccttagaacagggtgacgagaccccaaaaccacctaagccagatccccttaagatcaccaaggggaagctgggaggtcccaaagaaaccccccccaacggcaatctaagtccagcacctagactgcgaagagactatagctacgagcgggtaggacccacctcgtgcagagggcgtggtcggggggaatatttcgcccgcggacgcggattccgtggtacttacggcggacgtgggcggggggccagatcccgagaattccgttcatatcgtgagtttcggggcgacgatggaagaggcgggggcaccggcggccccaaccacccccccgctcctaggggccggactgcctccgaaactagatccgagggcagcgagtacgaggaaattccaaagaggagacggcagcggggatcagaaaccggcagtgagacacacgaaagtgatctggcaccttctgacaaagaagctccaactcctaaagaagggacgctgacacaggtgccactggcccctccaccaccaggggcccctcccagtcccgcaccagccaggtttaccgctagaggaggtcgggtgtttactcccaggggagtaccatcacgacgaggacgtggcggagggagacccccaccacaggtttgccccggatggtcccctcccgctaaaagtttggccccaaagaagcctcctaccggccccctgccgccgtccaaggagcctctcaaggaaaaactgattcccggacctctcagcccagtcgcccgggggggtagcaatggagggtccaacgtgggcatggaagatggggagcggcctcggcggcgacggcacgggagggcacaacagcaggataaacccccaaggttccgtcgcttaaagcaggagagagagaatgctgccaggggatccgaaggaaaacccagccttacactccccgccagcgctcccggacccgaagaagctttaactacggtcaccgtcgcccccgccccgagaagagcagccgcaaagagccccgacctgagcaaccagaattcggatcaggccaacgaagaatgggaaacagcgagcgaatcctcagacttcactagcgaaagaaggggcgacaaagaggcacctccccccgtgctgcttactcccaaggccgtggggacacctggaggcgggggggggggagcagtgcctggaatcagcgcaatgagtcgtggggacctgagccaaagggctaaagacctcagcaaaaggagcttctccagccagagacctgggatggagcgacagaacagaagacctggtcctggcgggaaagcaggaagttccggctccagttccggagggggcggagggggtcccggcggccgaaccggacccggcaggggagacaagcgatcttggccctcgcccaagaatcggagtcgcccacccgaagaaagacccccaggtctgcccctccctccaccaccaccttctagcagtgcagtttttaggctggaccaagttattcactccaatccagctggaatccagcaggccctcgcccagctgtccagtagacagggcagtgtcaccgctcctggagggcacccacgccataaacccgggcttccccaggcccctcagggtccttccccacgacctcccacgagatacgagccacaacgggtaaatagcggactttcatccgatccccactttgaggagcctggtccaatggtgagaggagttggagggacccccagggattctgcaggtgtcagcccttttccccccaagagaagagagcgccccccaaggaaacccgaattgcttcaggaggaatctctgccgccacctcacagctctgggttcttagggagcaagcccgagggaccaggcccacaagcagagtctcgcgatacgggtaccgaagctctaaccccccatatttggaacaggctgcatactgctacatcacgtaagagctatagacccagtagcatggaaccatggatggagccccttagcccctttgaagatgtagccggaacagagatgagccaaagtgatagcggggttgacctgtctggcgattctcaggtctctagcggtccctgctctcagcgcagctctccagatggcgggctcaagggtgctgctgaggggccacccaagaggcctggtggcagctccccactgaacgccgtcccatgcgagggccctcctggtagtgagccaccgcggcgcccccctcccgcccctcatgacggggatcgtaaggagctccctagggaacagcccttgccccctggccccattgggacagaacgctcacagcgcactgacagaggcactgaacctggacccattcgcccgtcacacagaccaggcccaccagtgcagtttggcacatctgataaggattctgatttgcggctcgtggtgggtgatagcctgaaggctgagaaggagctgactgcttctgtaaccgaagctattcccgtttctagagattgggagctgctgccttctgctgccgcatccgctgagcctcaatccaaaaacctcgacagtggccattgtgtccctgagccctcctcttcagggcaacgcctgtatcccgaagtgttctatggaagcgctggccccagctcaagccagatatctggtggcgccatggattctcagttacaccctaattcaggcggctttcgcccgggcacaccttcactgcacccttaccgaagccaaccactgtatctgcctcctgggccggctcccccgtccgctcttctgagcgggctggctctcaagggccagttcttggatttcagtaccatgcaggctaccgagcttggcaagctgcccgctggtggagtgctctacccgccaccgtcttttctctattcacctgccttttgccctagccccttaccagataccagtctgttgcaggtgagacaagacctaccttcgccttccgacttctactcaactccgctccaaccaggcgggcaatctggcttcctcccgtcaggggctcctgctcagcaaatgttgctgccaatggtggattctcaactgccagtcgtaaacttcgggtcactgccccctgcccctccccccgctccaccaccactgagcttgctgccagtggggcctgccttacagcccccttctctggccgtccgccccccaccggctcctgcaacgagggtgctcccgtcccctgcccgaccattcccagcctcactaggccgtgctgagttgcatcccgtagagctcaagccgtttcaggattatcaaaagctgtcctctaacctcggtggccctggaagctcccgaactccccccactggacgcagtttcagtggcctgaatagccggctgaaagccaccccatctacttactctggagtattccgcacacagcgcgttgacctgtaccagcaagcgtcccctccagacgccctgagatggatccccaaaccttgggaaagaactggtcctcccccccgggaagggccatctcgacgggccgaagaacccggaagcaggggagacaaggagcccgggctccctccacctcggtag

SEQ ID NO: 232803 - DNA, 6474 bp, Artificial Sequence
  derived and/or modified sequence
atgtccgaccgctccggacccacagccaaaggcaaagatggaaagaaatatagctcactgaatctctttgatacatacaagggcaaatctttagaaattcagaagccagctgtggcaccacggcacgggctgcagtcgctaggaaaagtggccattgctagaaggatgccaccccccgctaacctgccaagcctgaaagcggagaacaaaggaaacgaccccaatgtgagtttggtccctaaggacggcacgggctgggcctcaaaacaggagcaaagcgaccctaaaagctccgatgcttcaactgcgcagccacccgaatcccaaccactgcccgcatcgcaaacaccagcatctaaccagcctaagcgtcctcccgcagcccctgagaatactccactcgtgccttcaggcgtgaaatcatgggcacaggctagcgtaactcatggagcccatggcgatggaggccgggcctcctctctcctgtcccgattctcgagagaagagtttcctacattgcaggccgccggagaccaggataaagctgcgaaagagcgcgaatcagcggaacagtcaagcggaccggggcctagcttgagacctcagaatagtacaacgtggagggacggcgggggccgcggtcctgacgagctcgagggccctgacagtaaattacaccacggccacgacccacggggtggtcttcagccctctggcccgcctcagtttccaccttatagagggatgatgccacccttcatgtatcctccatatttgcccttcccccctccttacgggccacaggggccataccgctaccccacccccgatgggcctagtcgtttccctagagtcgctggaccccgcgggagcgggcccccgatgcgtctcgtggagcctgtagggcgccctagcattctgaaggaagacaatctgaaggaattcgatcaactggatcaagagaacgacgatggctgggccggagcccacgaggaggttgactataccgaaaagttaaaattttccgacgaagaggacggccgggactctgacgaagagggtgctgaaggacatagggactcgcagtcagcatccggagaagagcggcctcctgaggctgatggcaagaaaggaaactccccaaacagtgagcctcctacgccaaaaacggcctgggccgaaacgtcacggccaccagaaacggagcccggtccgccggctcctaaacctcccctacccccacctcacaggggccctgcgggaaactggggtccaccaggcgattatcccgaccgagggggtccaccttgtaagcctcccgcccctgaagacgaagatgaagcatggcgccagcggcgcaaacaatctagcagcgagatcagcttggcagttgaacgtgcccgtcggcggagggaagaagaggagaggaggatgcaggaagaaaggcgcgctgcctgcgccgagaagttgaagcgcctagacgaaaaattcggagctcctgataaaagattgaaagcagagcctgcggcccctcccgccgccccaagtactccagcgcctccgcctgctgtgccaaaagagctgccagcaccgcccgccccaccccctgcttccgccccaaccccggaaacagaacccgaggaaccggcccaagctccaccggcacagtcgacgcctacccctggggtggcggctgccccaacgttggttagcggcggagggagtacatcgagtaccagttccgggagcttcgaagccagccccgtggagccacagcttccatccaaggagggccctgagcccccagaggaagtgcctccccccactacacctcctgttccaaaggtcgagccaaagggagacggtataggcccaaccagacaacccccaagccaaggattgggctaccccaaatatcagaaaagcttacccccacgcttccagagacaacaacaagaacagcttttaaagcagcagcagcaacaccagtggcaacagcaccaacagggaagcgcccctccaacacctgtccctccaagcccaccgcaaccagtgactctgggagccgtccccgctccacaggcgccccccccaccaccaaaagccttgtatcctggggctcttgggagacctccccctatgccacctatgaacttcgatcctagatggatgatgattcctccttacgtcgatcctcggctgctccaggggcggccacctcttgacttctatcccccaggcgtacatccctccggtctcgtgcctagggagcggtccgattctggaggcagctccagtgaaccgttcgaccggcatgcgccagccatgctgcgtgagagaggaactccgcctgtcgatccaaagcttgcctgggtcggcgacgtgttcactgctaccccagctgaacctcggcccctgacgagtcctctcaggcaggccgctgatgaggatgacaaaggaatgcggtcagaaaccccacctgttccacctcctcctccgtatctcgcctcttaccctggattcccagagaatggagcaccaggccctccgatcagcagattccccctggaagaacccggaccacgacccctgccctggcctcctgggagcgacgaggttgccaagatccagacaccacccccgaagaaggaaccccctaaagaggaaacagcccagctcactggccccgaggcagggcgcaagccagcacggggcgtgggcagtggcggtcagggcccacctcctcccagaagggagtccagaacagaaacacggtgggggcctaggccggggagttctcggcgaggaattccgcctgaagagcccggagctcccccccgccgggccggccccatcaagaaacctcccccaccaacgaaggtggaagagctgcccccaaagccactcgagcagggcgatgaaacccctaagcctcctaagcctgaccccctgaagattacgaagggaaagctgggcggacctaaggagactccaccaaatgggaacctctcccccgccccccgtttacgccgtgactattcttacgagcgggtgggtcccacaagttgtaggggcaggggccggggtgaatatttcgctcgcggcagggggttccggggcacctacgggggcaggggacgtggcgcacgatctcgcgaatttagaagctaccgagaattccgcggggatgatggccggggcgggggaacagggggtccaaatcatcctcctgcacctaggggccggactgccagcgagacccgatccgagggctctgagtatgaagagatacctaagcggcggagacagcgtggctcagaaactggctccgagactcacgagtccgatttagccccctctgacaaggaagcacccacacccaaggagggcaccctcacccaagtgcccctggcccccccccccccaggggcacccccctctccggccccagctcgtttcacagctaggggcggccgtgtgtttaccccacgcggggtaccgtccaggcgcggcagaggaggaggcagaccacctcctcaagtatgtcccggctggtcacctcccgctaagagcctggccccaaagaaacctcccaccgggcccttaccaccctccaaagagcctctgaaggaaaagcttatcccaggacccttgtctccagttgccaggggcggaagcaatggtggctctaatgtcggaatggaagatggtgagaggcctcggagacgccgacatggcagggcgcagcaacaagataagcctcctcgctttagaagactaaaacaggagcgcgagaacgcagcccggggcagtgagggtaaaccatcgctgacattgcccgcatcagcccctggacctgaggaagccttgacaaccgtgacagtcgccccagcccctagacgcgcggctgccaaatcaccagacctgagtaatcaaaattccgaccaggccaatgaggagtgggaaactgcgagcgaatctagtgatttcacgtcggaacgccggggggataaagaagctccccctcccgtcctgcttactccaaaagcagtgggtacacccggcggaggaggagggggcgccgtgcctggcatttccgctatgtcaagaggggacctctctcaaagagccaaagatctatccaagaggagcttttcatctcagcgtcccggcatggaaaggcagaatagacgtccgggccctggcgggaaggcaggctccagtggctccagctctgggggcggtggcggaggtccaggaggtcggaccggacctgggagaggcgacaagcggagttggccatctcctaaaaatagaagtagaccacccgaggagaggccacctggcctccccctcccccctccccccccttccagctccgcggtgtttcgcctggatcaagtaatacacagcaacccagccgggattcagcaggcactcgcacaattgagtagtaggcagggttccgtaacagccccaggaggacatcctcggcataagcccgggttaccccaggcccctcagggaccctctccccggcctcctacacggtatgaacctcagcgggtgaattctggtctgagctccgatcctcattttgaagaaccaggtcctatggttcgtggagtgggcggcactccccgcgattcagctggtgtgtcgccatttcccccaaagcggcgtgagcggccaccacgaaagcccgagctcctgcaagaagagagcttaccgcctccgcactcatccggcttcctcggatctaagccagagggaccaggaccccaggccgagagccgagacactggcaccgaggccctgaccccccacatttggaacaggcttcacacggccacttctcgaaagtcatatagaccctcatcaatggaaccatggatggagcctctgagtccattcgaggacgttgccggaactgaaatgagccagtccgacagcggtgtagacctttctggtgattctcaggtgtctagcgggccttgttcacaaaggtccagtcccgacggcggtcttaagggtgcagccgagggacctccaaagcgccccggcggaagctcaccacttaatgcagtgccttgtgagggaccccctggctccgaacccccccggagacccccccccgccccgcacgacggcgacagaaaggaattgccacgagaacagccgctgcccccaggccctattggaacagaacgctcccagcggactgaccgaggtacagaaccggggcccataagacctagtcacaggcctggacccccagtgcaatttggcactagtgataaggacagcgacttgagactcgtcgtaggggatagtctgaaggcagagaaagaactcaccgcaagcgtaactgaggccatccctgtctctcgggactgggagctccttcccagtgcggccgcctcagccgagccacaatcgaaaaacttggatagcggccactgcgtcccagaaccgagctccagtggtcagcgtctgtaccctgaggtgttctacggttccgctgggccaagctcctcccaaataagtggcggggccatggatagccagctacatcccaatagtggcgggttccgacccggtacgccatccttacacccttaccgatcacaaccactgtaccttcctcctggccccgcaccccccagcgcactgctcagcggtttggctcttaaaggacaattcctcgatttctccaccatgcaggccacggaactaggtaagttgccagccggcggggtcctctatccacccccgtcctttctatatagcccagccttctgcccgagcccgctgccggacacaagtttgttacaggtcagacaagatctaccatcccccagtgacttctattccactcctttgcagcctggcggccagtccggattcttgccctcaggagctccagcacaacagatgctcctccccatggtggattcacagctcccggtcgtaaactttggatctttaccaccggcaccaccacccgctccccccccgttaagcctgttgccggtgggcccagcactccagcctccgtccctggcagtgcgcccgcctccagcccctgccacccgcgttttgccttctcctgccaggccttttcccgcctcgctggggcgcgccgagcttcaccccgtcgagcttaagccttttcaggattaccagaaactgagcagcaatctgggtggccctgggtcgtcaagaaccccacccaccggacgatctttctctgggttgaactctcgcctcaaggctactccgtcgacctactcaggagtattccgaacccagcgagtcgacttgtatcaacaagcatctccgcccgacgccctgcggtggattccgaaaccttgggagcgcacaggccctccacccagggagggaccctctaggcgcgcagaagaaccaggatcacgaggcgacaaagaaccgggcctcccccccccccgctag

SEQ ID NO: 232804 - DNA, 6450 bp, Artificial Sequence
  derived and/or modified sequence
atgtcagatcgctcagggcctacagcgaagggtaaggacggaaagaaatacagctcactcaatctattcgacacatataagggaaaaagcctcgaaattcagaaaccagccgtggcccctaggcatggtctgcagagtctgggtaaggtcgcgatcgcgaggcggatgccacctcccgcaaatcttccctcactcaaagccgaaaacaagggaaatgaccctaacgtgagcctagtgcctaaagacggcacgggctgggcttccaagcaggaacaatccgaccccaagtctagtgacgcctctactgcccaaccacctgaaagccagcctctgccggcttctcaaacccccgcttccaaccaaccaaagcgaccccctgctgcaccagaaaataccccactggtgccctctggcgtgaagagctgggcacaggccagcgtcacccacggagcacatggggacgggggtcgcgccagttcgctgttgagcagattttcccgcgaggagtttcccaccctccaggccgcgggggaccaggacaaagccgctaaagagagggaatctgcagaacaatccagcggtcctggcccaagtctgagacctcagaactctacaacttggagggacggcggtggccgaggacccgacgaattggaagggcccgattccaagctgcaccacggacacgacccccggggaggactgcaaccaagtgggccacctcaattccccccctaccgggggatgatgcccccttttatgtatccaccgtacttgccgtttccaccaccgtacggccctcagggcccctatagatacccaactcctgatggcccaagtagattccctcgagtagccgggcccaggggcagtgggccgccaatgagacttgtcgaacctgtaggaaggcccagcatactgaaggaggacaacctcaaggagtttgatcagctggaccaggaaaacgacgacgggtgggccggtgctcatgaggaggtcgattacaccgagaagcttaagttctctgatgaggaagacggtcgagactccgatgaagagggcgccgagggtcatagagattcgcaaagcgcatctggtgaagaacgccctcctgaggccgacggcaagaaggggaatagcccaaattcggagcccccaacacctaaaactgcctgggcggagacatccaggcccccagaaaccgaacccggcccccccgcccccaagccgcctctgccaccacctcaccgggggcccgcgggaaattggggaccgcctggtgattatcctgacagaggtggacccccctgcaagccaccggccccagaggacgaggatgaagcttggaggcagagaaggaagcagtctagtagtgaaatctctctcgcagttgagagggccagacggagacgggaagaggaggagcgtcgcatgcaagaagaaaggcgggccgcatgcgcagaaaagttgaaaagactggatgagaaattcggcgcgcccgataaaaggttgaaagccgagcctgctgcccctcctgccgcccccagcacaccagccccgccgcctgcggttccaaaagaactacccgcacccccagcacctccaccagcgagcgcacctactccagaaacagaaccagaggaacccgcccaggcccctccagctcagagcacacctacgcctggtgtcgcagcggcccctacgctggtgagcggcggcggatctaccagcagtacaagctcgggcagcttcgaggcctcaccagttgaaccacaactacctagtaaagagggcccagagccgcctgaagaagtgcccccccctacaacaccaccagtgcctaaggtagagccaaagggtgacggcatcggtcccacaagacagcctcctagccagggccttggctatcctaagtaccagaagtctctcccgccaagattccagcgtcaacaacaggagcaactcctcaagcagcagcagcagcatcaatggcagcagcaccagcagggaagcgccccacccacaccagtcccccccagtccgcctcaaccagttacactaggagctgttccagctccacaggcacccccccctcccccaaaagcattatacccaggagcactcggcaggcctccaccaatgccgcctatgaacttcgatccgaggtggatgatgattcctccctatgtagacccaagactgctgcagggtcgcccccccttagacttttacccaccgggggtgcacccaagtggccttgtgccaagggagcgcagcgatagcggcgggtcatcgtctgagcccttcgataggcacgcacccgctatgcttagggaaagagggacacctccagtggatcctaaactcgcttgggtgggggacgtatttacagccacccccgcggaaccccgccccctgacctccccattgaggcaagccgcagatgaggatgacaaaggaatgcgtagtgagacgcctcctgtgccaccgcctcctccttatctggcatcttatcctggcttccccgaaaacggggccccaggcccccctatttccaggtttccactggaggagccaggcccccgtcccctgccttggcctcccggatccgacgaagtggccaaaattcagacgccaccgcccaaaaaggagcctcccaaagaagagacagcacagctgacggggccagaggcaggtcggaaaccagccaggggagtcggctccgggggacaaggaccacccccacccagacgggagagccgcacggaaactagatgggggcccaggccaggatcctcccggaggggcatcccacccgaagaacctggcgcccctccaagaagggccggaccaattaaaaagcctccacctccgactaaggtggaagagttgcctccaaaacctctcgagcaaggtgacgaaactccaaaacccccaaagccagaccccctgaagataaccaaaggcaagcttggcggccctaaagagacacctcctaacggcaacctgtcgcccgcaccgaggctgagaagggactactcttatgagagagtgggaccaacttcgtgtcggggacggggacgcggcgaatacttcgccagaggccgcggatttcggggcacttatggaggtcggggtagaggtgcggcaggcaatagtgcagttaccgaatcatttgaagagatgatgggggtcgaggtaggacagggcgaccagacgaccctgctgttaccagaggcggccctccctgcacgccatggagcccgggtccagagcatgcggaagtcaccatcaggcgccgggtccggtgcccagaaacaagctgctagaccaatgagagtcatttggctgctgcagactagaaggctgccccacccccggcgagagcacagcccgagatccagatccccgacaactaggagccccacatttcctgctcccgcccggtttacacctggcgtgggggagtcatcactcccagaaggcatttctccagggcctcgacggcgggagccacctcaggtgtgccccggatggagccctccagctaaatccctggctcccaaaaagccacccaccggacctctcccccctagcaaagaacccctgaaggagaaactaattcccggaccactctcacctgtggccaggggaggcagcaacggagggtcaaacgttggtatggaggatggagagagacctcgtaggaggaggcacggtcgcgctcagcaacaggataaaccaccccgttttaggcgtctcaaacaggagcgtgagaatgcagcccgtggctccgaaggaaagccatccctgactttgccagcatctgccccaggccccgaagaggccttgaccaccgttaccgtagctcccgcaccgcgcagggccgccgccaaaagcccagacctgtccaaccagaatagcgatcaagccaatgaggagtgggagaccgcctcagagagctctgattttactagcgaaagacgaggcgacaaagaagccccccctcccgtcctgcttaccccaaaggcggttggaacgcctggtggcggcggcgggggggccgtccccgggatctccgcaatgtcaaggggcgatctcagccagagagccaaggatctgagcaagaggtccttttctagccagaggccaggtatggaacggcagaacaggcggccaggcccgggaggcaaggccggatcaagcgggagctctagtggtggaggcggaggtggacccggaggccgcacagggccaggccgcggcgataaacgttcctggccttcacccaagaacaggtcccggccccctgaggaacggcctcccggactgccactgccaccaccaccccctagcagctccgccgtttttcgattggatcaggtgatccactccaatccagctggtatccagcaggccctggcacagttgtctagccggcaggggagtgtcacagctccgggcggccatccaagacataagcctggcctgccacaagccccacaggggcctagcccgaggcccccgactcggtacgagccacagcgtgtcaactctggcttatcttcagatccgcactttgaagagcctgggcccatggtcaggggagtcggcggaacccctagagattcggctggggtcagccccttccctccaaaacgcagagagaggccgcctcgcaaacctgagctgctgcaggaagagagcttgccaccaccacattcttccggctttttaggctcaaaacctgaaggccctggaccccaagcggagagccgagataccggaacagaggctctgactccacacatttggaatcgtctacacaccgctaccagccgcaaatcttataggccaagctctatggaaccttggatggagcccttgtcacctttcgaagacgttgccggcacagagatgagtcagtcagactcgggcgtcgacctgtccggcgacagccaagtgtcgtcaggaccttgctcccaacggtcttcaccagacggcggacttaaaggtgccgctgagggaccacccaagcggccaggaggttcttctccactgaatgccgtgccatgcgagggacctccgggttcagagccgcccaggcgtcctccacccgcccctcacgatggagacaggaaggagctgcccagggaacagccgctcccgcctgggcccattgggactgaaaggagccagcggacggatcggggtaccgaacccgggcccatcaggccatctcacaggccagggcctccagtgcagttcggcaccagtgacaaagattctgacctgcgtctggttgtgggggacagtctgaaagccgaaaaggaactgacggcttctgttactgaggctattccggtctctagggattgggagctgctgccttctgcagccgcctcagcagagccgcagagcaaaaatcttgactccggacattgcgttcctgagccctcatctagcggccaaagattataccccgaggtgttctacgggtccgccggccccagcagcagtcagatttccggtgggcatggactgtccatcacttccaaacagtggcgtagacccggcactccttccctgcatccttacagaagccagcctctttatctgccacctggtccggctccaccatcagccctgctctcgggactggcgcttaaaggtcaatttttagattttagtacaatgcaggccaccgaactaggaaaattgcccgcagggggtgtattgtatcctccgcccagctttctttactctccagccttctgcccttctcctcttcccgacacttctctgttacaggtaagacaggacctgccttcccctagcgacttttactcaaccccacttcaacccggaggccaatctgggtttctcccctctggagctcccgctcagcagatgctgctgcccatggtggatagccagttaccagtggtaaatttcggaagcctaccacccgcacctcctcccgctccccccccactgagtctactgccagttggaccggcgcttcaaccacccagcctggccgtccgaccaccccccgcccccgccacgcgggtccttcccagtccagcccgccccttcccagccagtctgggccgggccgaactacaccccgttgagcttaaaccattccaggattatcagaagctctccagcaacctagggggtcctgggagttctcgcactcctccgactggaaggagcttctccgggctcaattcgagactcaaagccacaccctccacatacagtggggtctttcgcactcagcgcgttgatctgtatcagcaggcctctccccctgatgccctgaggtggatcccaaagccttgggaaaggaccgggcctcccccaagagaagggcccagtagaagggctgaagagccgggctctcggggagataaagagcctggactgccaccaccaaggtag

SEQ ID NO: 232805 - DNA, 6417 bp, Artificial Sequence
  derived and/or modified sequence
atgagtgaccgtagcggcccgacagccaaggggaaggacggtaaaaaatacagctcccttaatttgtttgatacatataagggaaagagtctggaaatccaaaagccagctgtcgctcctcggcacggcctgcagtctcttggaaaggtagctatcgcccgccggatgccacctccggccaacttgccatctctgaaggctgagaataagggcaatgaccccaacgttagtctcgtgccaaaagatggcactggctgggcctccaagcaggaacagtcagacccaaagtcctccgacgccagcaccgctcaacctcctgagtcacagccactgccggcctcccagactcctgcctcaaatcagccaaaaaggcccccagccgcccctgagaacaccccgctagttccttccggcgtcaaatcttgggctcaggcatccgtaacacatggggcccacggtgacggcgggcgcgcctctagccttctttcccgtttttctcgggaagagtttcctactctacaggcagctggagatcaagataaagctgccaaggagagagaatcagcggaacagtcttccgggcccggaccaagcttgcggccgcagaacagtactacatggcgggacggcggggggcggggtccggacgaactagaaggcccagatagcaagctgcaccacggacacgatccccgcggtggtctacagccaagcggtcccccccaattccccccttacaggggcatgatgccccccttcatgtatccgccttaccttcccttccctccgccgtacggacctcagggcccataccggtaccctacccctgatggaccgagcaggttcccaagagtagctgggccccgaggctccggtcctcctatgcgtctcgtcgaacctgtgggccggccaagtatactcaaggaggacaatctgaaagagtttgaccagctggaccaggagaatgacgatggatgggccggcgcccacgaggaagtagattatactgagaagctcaaattctctgacgaggaggacgggcgcgattccgacgaggagggggccgaaggccatcgagactcacaatccgcatcaggtgaggagcgtcctccggaggctgacggaaaaaaaggaaactctcccaactcagaaccacccacacccaagaccgcttgggctgaaacttcccggcccccggagacagaaccaggtccacccgctcccaagccacccctgcccccacccggggattatccggaccggggagggccaccctgtaagccacccgctccggaagatgaggatgaagcttggagacaaagaagaaaacaatcatcttcagagatatccctggcggtcgagcgagcacgccggcgtcgagaggaggaggaacgccggatgcaggaagaaagacgggctgcttgtgcggagaagcttaagcggttggacgagaaatttggtgctccggacaaacgcctgaaggcagaaccggcagcacccccagcagccccatccacacccgcacccccaccagccgttcctaaggaattgccagccccaccagccccaccccccgcaagcgcccctacgccagagactgagcccgaggaaccggcccaggccccccccgcacagtctacaccaacccctggtgtggcggccgcaccgacgctggtatcaggcggcgggtcgaccagcagcacaagctcaggctcatttgaggccagtcctgtcgaaccacagttgccgtccaaagaaggaccagagccacccgaagaggtccctccacccacaaccccaccagtgcctaaggtcgagcccaaaggagacggcattgggcccacccgacagcctccttctcagggcttaggctaccccaagtaccagaagagcctgcctccacgctttcagagacagcagcaagagcagctactaaagcaacagcagcagcatcaatggcagcagcatcaacaaggttcagctccgcccacacctgttccaccgtcacctccgcagccggtgacactgggcgccgtccccgctccccaggctcctccccccccccctaaggccctataccccggcgcgctggggagaccaccccctatgcctcccatgaatttcgaccctcgttggatgatgatacccccatacgttgatcctcgcctactacagggacgtccgcccctcgatttttatccccctggtgttcatccctccggccttgtgccccgtgaacgctctgattctggaggatcttcgagcgaaccatttgatcgccatgcacccgccatgcttagagagcgtggaacgcccccagtagatcctaagttagcttgggtcggagacgtgttcacagctacacccgccgagcctaggcccttgacatcacctcttcgacaagcggctgacgaggatgacaagggaatgagatctgaaaccccacccgttccccctccccctccatacttggcaagctatcccggctttcccgaaaacggcgctccaggacctcctatctccaggttccctcttgaagagccaggccctcgccccctgccatggcccccgggcagcgatgaagtggccaagatacagacacccccccccaagaaggaacctccgaaggaggagacagcccagctcaccgggcccgaagcgggtagaaagccagccaggggggtaggctctggcggtcaggggcccccccccccaaggagagagagcagaaccgagactcgctggggtcccaggcccggcagttctagacgggggattcctcccgaagagcccggcgctcctccgcgcagggccgggccaattaaaaaaccccccccaccgaccaaagtcgaagaactccccccaaagcccttggagcagggcgatgagacacctaagccgccaaaacccgatcccttgaaaataaccaaaggaaagctgggtggccctaaggagacgccccccaatgggaacctctcacccgcccctaggctccggcgagattactcttatgaacgggtgggacctaccagctgtcgaggacggggtagaggtgagtacttcgcacgtgggcggggctttcgaggtacctacggggggcgcgggcggggggccgccggcaatagcgccgtcaccgagagctttgaagagatgatgggcgtggaggtcggccagggtgatcagaccacgctgttattaccggaagccgccctgccggcacgtcacggggcaagggtccaatctatgcgcaaatctcctagtggcgccggctctggggcacagaaacaggccgcccgtcctatgagagtgatctggctgttgcagactcgccggctgcctcatccaaggagagagcacagcccaagaagcagatcaccaaccactaggtcacccactttcccagcccccgcacgttttacaccaggtgtgggcgagagctcactgccagaagggatcagccctggccctcgccgcagagaacccccacaagtgtgtcccggctggtctccccccgcaaaatcgctcgcccccaagaagccacctaccggacctctccctccttccaaagagcctctgaaggagaaacttattcccgggccactctcccctgtagccagaggtggatcgaatgggggttctaacgttggaatggaagacggggaaagacccaggagaagaaggcacgggcgcgctcagcagcaggacaagccccctagatttcgccgcctgaaacaggagagagagaatgcggctagaggttccgagggtaagccgagcctgacactccctgctagcgcacccggtccagaagaagcactgacaactgtgaccgtcgccccagccccccgaagggcagctgctaaatctccagacctgagtaaccaaaatagcgaccaggcaaatgaagaatgggagactgccagcgagtcctctgacttcacatccgagcgacggggggataaagaggcccctcccccagttcttctcacccctaaggcagtaggaactcccggtggcgggggcggtggggctgttcctggaatcagtgctatgtcccgaggtgacctcagccagagagcaaaggatctaagcaagcggagcttctcaagtcagagacccgggatggagcgtcagaatagacgtcccggcccggggggaaaggccggatcatcgggaagttctagcggggggggtggcggcggtcctggcggtcggactggacccggccgcggagataagcgatcctggccctcaccaaaaaatagatcacgccctcccgaagaacggcctcccggcctgccactccctccgcccccaccgtcatctagcgcggttttccggctggaccaggtgattcacagtaacccggctggtattcagcaagcccttgcccagttaagcagtcgccagggctccgtgacggccccaggcgggcatccccgacacaaaccaggcctgccacaggcaccacagggtccatcacctcggcccccaaccagatacgagccacagcgggtgaatagcgggctctcttctgatcctcactttgaggagccaggccctatggtaagaggagtcggcggtacgcccagagatagcgccggggtttctcccttccctcctaagcggagagagcgaccacccaggaaaccagaactgctgcaggaagaatctcttccccccccccattcatcgggattcttgggatcaaagccagagggaccagggccacaggcggaatctcgcgatacaggaacagaggcgctcacacctcatatctggaaccgactgcacactgctacgtccaggaagtcttataggccctcaagcatggagccttggatggagcccctttcccccttcgaggacgtcgctggaacagagatgtctcagagcgatagcggagttgacctgagcggagacagccaggtaagctcaggcccttgttcccaacgctcatcccccgacggcggtctgaagggtgcagccgaagggcccccaaaacggcctggcgggagtagccccctcaatgccgttccctgcgaagggccacccggctccgagccccccagacgacctccccccgcaccgcatgacggagatcggaaagagttacctagagaacaacccttgccgccaggacccataggaaccgagcgatcacagaggaccgacagggggaccgagcctggcccaattcgcccctcccaccgtccgggacctcccgtacagttcggcacgtcagataaagatagcgatctccgcctcgttgtgggagatagtctgaaggctgagaaggagctgaccgcatcggtgaccgaagcgataccggtatcccgagactgggagctgctgccgtccgcagcagctagtgccgagccccaaagcaagaacctggacagcggccattgcgttcctgaacctagcagtagcgggcaaagactttatcctgaggtgttctacggcagtgctggcccctcgtccagccaaattagcggagggcatggcttaagcattacctcaaaacagtggcggaggccagggacaccctccctgcacccttacagaagccagcctctctatctgccacccggaccggccccgcccagcgcgctgctgtcaggtctcgccctgaagggtcagttcctggacttctccacgatgcaggctacagagcttgggaaactccccgctggcggcgtgctctacccccctcccagcttcttgtactcccccgccttttgcccgagtcctctgccggatactagcctgctgcaggtacggcaggacctgccatccccttctgatttttacagcacaccgctacagcctggcggacagagcggctttttaccctctggcgccccagcacagcagatgttgctccctatggtcgattcccagttgcccgtggtgaatttcggttctctccccccggccccacccccagctccgcccccactatctcttctgcccgtagggcctgccctccagcctccatccctggctgtgagacctcccccggcccctgccaccagggtcttaccctccccagccagaccgttcccagctagtctggggcgggccgaactacacccggttgagttaaagcctttccaggattatcagaagctttctagcaacctaggcgggccggggagttccaggacccctcctacgggacgcagctttagtggcctgaattctaggctcaaggctactccatctacttattcaggggtcttcagaacccaacgcgtcgacctgtaccagcaggcttcccctccagatgcactccggtggatcccaaaaccatgggagcggacaggcccaccgcctagagaagggccgtcccgacgggcggaagaacccggctcgcgcggagacaaggaaccaggcctgccacccccacgctag

SEQ ID NO: 232806 - DNA, 6474 bp, Artificial Sequence
  derived and/or modified sequence
atgtctgacagaagtggccccacagccaagggcaaggatggcaagaagtacagcagcctgaacctgtttgacacctacaagggcaagagcctggagatccagaagccagctgtggcccccaggcatggcctgcagagcctgggcaaggtggccatcgcccggaggatgcctcctccagccaacctgcccagcctgaaggccgagaacaagggaaatgaccccaacgtgtccctggtgcccaaggatggcaccggctgggccagcaagcaggagcagagcgaccccaagagcagtgatgccagcacagcccagcccccagagagccagcccctgcctgccagccagaccccagccagcaaccagcccaagaggcctcctgctgcccctgagaacacccccctggtgcccagcggcgtgaagtcctgggcccaggcctctgtgacccatggagcccatggagatggcggccgggccagcagcctgctgagccgcttcagccgggaggagttccccaccctgcaggccgccggggaccaggacaaggccgccaaggagcgggagagcgctgagcagagcagcggccctggccccagcctgcggccccagaacagcaccacctggagagatggcggcggccggggcccagatgagctggagggccctgacagcaagctgcaccacggccatgacccccggggcggcctgcagcccagcggccccccccagttccccccctaccggggcatgatgccacccttcatgtacccaccctacctgcccttccccccaccctacggcccccagggcccctaccgctaccccaccccagatggccccagccgcttcccccgggtggccggcccccggggcagcggcccccccatgaggctggtggagcctgtgggccggcccagcatcctgaaggaggacaacctgaaggagtttgaccagctggaccaggagaatgatgatggctgggccggggcccacgaggaggtggactacacagagaagctgaagttcagtgatgaagaagatggccgggacagtgatgaggagggcgctgagggccaccgggacagccagagcgccagcggggaggagcggcccccagaggctgatggcaagaagggcaacagccccaacagcgagccccccacccccaagacagcctgggccgagaccagccggcccccagagacagagcccggccccccagcccccaagccacccctgcccccaccccaccggggccctgctggcaactggggccccccaggggactacccagacagaggaggccccccctgcaagcccccagccccagaagatgaagatgaggcctggaggcagaggaggaagcagagcagcagcgagatcagcctggccgtggagcgggccaggagaagaagagaggaggaggagaggaggatgcaggaggagcggcgggccgcctgtgccgagaagctgaagaggctggatgagaagtttggagccccagacaagaggctgaaggccgagcctgctgcccctcctgctgcccccagcaccccagcccctcctcctgctgtgcccaaggagctgcctgcccccccagcccctcctccagccagcgcccccaccccagagacagagcctgaggagcccgcccaggcccccccagcccagagcacccccaccccaggagtggccgccgcccccaccctggtgtctgggggcggcagcaccagcagcaccagcagcggcagctttgaggccagccctgtggagccccagctgcccagcaaggagggccctgagcccccagaggaggtgcccccacccaccaccccacctgtgcccaaggtggagcccaagggagatggcatcggccccacccggcagccccccagccagggcctgggctaccccaagtaccagaagagcctgcccccacgcttccagaggcagcagcaggagcagctgctgaagcagcagcagcagcaccagtggcagcagcaccagcagggcagcgccccacccacccctgtgccccccagccccccccagcctgtgaccctgggcgctgtgcctgccccccaggcccctcctcctccacccaaggccctgtacccaggggccctgggccggcccccacccatgccacccatgaactttgacccccgctggatgatgatccccccctacgtggacccccggctgctgcagggccggccccccctggacttctacccacctggggtgcaccccagcggcctggtgccccgggagaggagtgacagcggcggcagcagcagcgagccctttgacagacatgccccagccatgctgcgggagcggggcaccccacctgtggaccccaagctggcctgggtgggagatgtgttcaccgccaccccagctgagccccggcccctgaccagccccctgcggcaggccgcagatgaagatgacaagggcatgaggtctgagaccccacctgtgcccccacctccaccctacctggccagctacccaggcttcccagaaaatggagcccctggcccccccatcagccgcttccccctggaggagcccggcccccggcccctgccctggcccccaggcagtgatgaggtggccaagatccagaccccaccacccaagaaggagccccccaaggaggagacagcccagctgaccggccctgaggccggcaggaagccagcccggggcgtgggcagcggcggccagggccccccacctccaagaagagagagcaggacagagacccgctggggcccccggcccggcagcagccggcggggcatccccccagaggagcccggggcccccccaagaagagctggccccatcaagaagcccccaccacccaccaaggtggaggagctgccccccaagcccctggagcagggagatgagacccccaagccacccaagccagaccccctgaagatcaccaagggcaagctgggcggccccaaggagaccccacccaacggcaacctgagccctgccccccggctgcggcgggactacagctatgagcgggtgggccccaccagctgccggggccggggccgcggggagtactttgcccggggccggggcttccggggcacctacggcggccggggccgcggggcccggagccgggagttccgcagctaccgggagttcagaggagatgatggccggggcggcggcaccggcggccccaaccaccccccagccccccggggccgcacagccagcgagaccaggtctgagggctctgaatatgaggagatccccaagagaagacggcagaggggcagcgagaccggcagcgagacccatgaaagtgacctggcccccagcgacaaggaggcccccacccccaaggagggcaccctgacccaggtgcccctggcccctcctcctcctggggccccacccagccctgccccagcccgcttcaccgcccggggcggccgggtcttcaccccccggggcgtgcccagcagaagaggccggggcggcggccggcccccaccccaggtgtgccccggctggagccccccagccaagagcctggcccccaagaagcccccaacaggccccctgccccccagcaaggagcccctgaaggagaagctgatccctggccccctgagccctgtggcccggggcggcagcaatggaggcagcaatgtgggcatggaggatggagagcggcccaggagaagaagacatggccgggcccagcagcaggacaagccaccccgcttccggcggctgaagcaggagagagaaaatgctgcccggggcagcgagggcaagcccagcctgaccctgcctgccagcgcccctggccctgaggaggccctgaccaccgtgacagtggccccagccccccggcgggctgctgccaagagcccagacctgagcaaccagaacagcgaccaggccaatgaggagtgggagacagccagcgagagcagtgacttcaccagcgagcggcggggggacaaggaggcccctcctcctgtgctgctgacccccaaggctgtgggcacccctgggggcggcggcggcggcgctgtgcccggcatcagcgccatgagcagaggagacctgagccagagggccaaggacctgagcaagaggagcttcagcagccagaggcctggcatggagcggcagaacagaagacctggccctgggggcaaggccggcagcagcggcagcagcagcggcggcggcggcggcggccctgggggccgcactggacctggccgcggggacaagaggtcctggcccagccccaagaacagaagccggcccccagaggagaggcctcctggcctgcccctgcccccacctccacccagcagcagcgctgtgttccggctggaccaggtgatccacagcaacccagctggcatccagcaggccctggcccagctgagcagccggcagggctctgtgacagcccctgggggccaccccaggcacaagccaggcctgccccaggccccccagggccccagcccccggccccccaccaggtatgagccccagagggtgaacagcggcctgagcagtgacccccactttgaggagcccggccccatggtgcggggcgtgggcggcaccccccgggacagcgctggggtgagccccttcccccccaagaggcgggagcggccccccaggaagccagagctgctgcaggaggagagcctgcccccaccccacagcagcggcttcctgggcagcaagccagagggccctggcccccaggccgagagccgggacacaggaacagaggccctgaccccccacatctggaaccggctgcacacagccaccagcaggaagagctaccggcccagctccatggagccctggatggagcccctgagcccctttgaagatgtggccggcacagagatgagccagagcgacagcggcgtggacctgagcggggacagccaggtgagcagcggcccctgcagccagaggagcagcccagatggcggcctgaagggagctgctgagggcccccccaagaggcctgggggcagcagccccctgaatgctgtgccctgtgagggccccccaggcagcgagcccccccggcggcccccaccagcccctcatgatggagacaggaaggagctgccccgggagcagcccctgcccccaggccccatcggcacagagaggagccagaggacagaccggggcacagagcccggccccatccggcccagccaccggcccggcccccctgtgcagtttggcaccagtgacaaggacagcgacctgcggctggtggtgggggacagcctgaaggccgagaaggagctgacagcctctgtgacagaggccatccctgtgtcccgggactgggagctgctgcccagcgctgctgccagcgctgagccccagagcaagaacctggacagcggccactgtgtgcctgagcccagcagcagcggccagaggctgtacccagaggtgttctacggcagcgctggccccagcagcagccagatctctggaggagccatggacagccagctgcaccccaacagcggcggcttccggcccggcacccccagcctgcacccctaccgcagccagcccctgtacctgcccccaggccctgcccctccttctgccctgctgagcggcctggccctgaagggccagttcctggacttcagcaccatgcaggccacagagctgggcaagctgcctgctggaggagtgctgtaccccccacccagcttcctgtacagccctgccttctgccccagccccctgcctgacaccagcctgctgcaggtgcggcaggacctgcccagccccagcgacttctacagcacccccctgcagcccggcggccagagcggcttcctgcccagcggggccccagcccagcagatgctgctgcccatggtggacagccagctgcctgtggtgaactttggcagcctgcccccagcccctcctccagcccccccacccctgagcctgctgcctgtgggccctgccctgcagccccccagcctggccgtgcggcccccaccagccccagccaccagggtgctgcccagccctgcccggcccttccctgccagcctgggccgggcagagctgcaccctgtggagctgaagcccttccaggactaccagaagctgagcagcaacctgggcggccctggcagcagcaggaccccacccaccggccgctccttcagcggcctgaacagccggctgaaggccacccccagcacctacagcggggtcttccgcacccagagggtggacctgtaccagcaggccagccccccagatgccctgcgctggatccccaagccctgggagaggacaggccccccaccccgggagggccccagccggcgggcagaggagcccggcagcagaggagacaaggagcccggcctgcccccaccaagatag

SEQ ID NO: 232807 - DNA, 4149 bp, Artificial Sequence
  derived and/or modified sequence
atgctgcgggagcggggcaccccacctgtggaccccaagctggcctgggtgggagatgtgttcaccgccaccccagctgagccccggcccctgaccagccccctgcggcaggccgcagatgaagatgacaagggcatgaggtctgagaccccacctgtgcccccacctccaccctacctggccagctacccaggcttcccagaaaatggagcccctggcccccccatcagccgcttccccctggaggagcccggcccccggcccctgccctggcccccaggcagtgatgaggtggccaagatccagaccccaccacccaagaaggagccccccaaggaggagacagcccagctgactggacctgaggccggcaggaagccagcccggggcgtgggcagcggcggccagggccccccaccaccccggcgggagagcaggacagagacccgctggggccccaggcctggcagcagcagaagaggcatccccccagaggagcccggggccccaccccggcgggccggccccatcaagaagcccccaccacccaccaaggtggaggagctgccccccaagcccctggagcagggagatgagacccccaagccacccaagccagaccccctgaagatcaccaagggcaagctgggcggccccaaggagaccccaccaaatggaaacctgagccctgccccccggctgcggcgggactacagctatgaaagagtgggccccaccagctgccggggccggggccgcggggagtactttgcccggggccggggcttccggggcacctatggaggccggggccgcggggcccggagccgggagttccgcagctaccgggagttcagaggagatgatggccggggcggcggcactggaggccccaaccaccccccagccccccggggccgcacagccagcgagaccaggtctgagggctctgaatatgaggagatccccaagagaagacggcagaggggcagcgagactggaagtgagacccatgaaagtgacctggcccccagcgacaaggaggcccccacccccaaggagggcaccctgacccaggtgcccctggcccctcctcctcctggggccccacccagccctgccccagcccgcttcaccgcccggggcggccgggtcttcaccccccggggcgtgcccagccggcggggccggggcggcggccggcccccaccccaggtgtgccccggctggagccccccagccaagagcctggcccccaagaagccacccaccggccccctgccccccagcaaggagcccctgaaggagaagctgatccctggccccctgagccctgtggcccggggcggcagcaatggaggcagcaatgtgggcatggaggatggagagcggcccaggagaagaagacatggccgggcccagcagcaggacaagcccccacgcttccggcggctgaagcaggagcgggagaatgctgcccggggcagcgagggcaagcccagcctgaccctgcctgccagcgcccctggccctgaggaggccctgaccaccgtgacagtggccccagcccccaggagagctgctgccaagagcccagacctgagcaaccagaacagcgaccaggccaatgaggagtgggagacagccagcgagagcagtgacttcaccagcgagaggagaggagacaaggaggcccctcctcctgtgctgctgacccccaaggctgtgggcaccccaggcggcggcggcggcggcgctgtgcccggcatcagcgccatgagcagaggagacctgagccagagggccaaggacctgagcaagaggagcttcagcagccagaggcctggcatggagcggcagaacagaagacctggccctgggggcaaggccggcagcagcggcagcagcagcggcggcggcggcggcggccctgggggccgcacaggccctggccgcggggacaagaggtcctggcccagccccaagaacagaagcaggcctcctgaggagcggcccccaggcctgcccctgcccccacctccacccagcagcagcgctgtgttccggctggaccaggtgatccacagcaacccagctggcatccagcaggccctggcccagctgagcagccggcagggctctgtgacagcccctgggggccaccccaggcacaagccaggcctgccccaggccccccagggccccagccccaggcctcccaccaggtatgagccccagagggtgaacagcggcctgagcagtgacccccactttgaggagcccggccccatggtgcggggcgtgggcggcaccccccgggacagcgctggggtgagccccttcccccccaagagaagagagaggcctcccaggaagccagagctgctgcaggaggagagcctgcccccaccccacagcagcggcttcctgggcagcaagccagagggccctggcccccaggccgagagccgggacaccggcacagaggccctgaccccccacatctggaaccggctgcacacagccaccagcaggaagagctaccggcccagctccatggagccctggatggagcccctgagcccctttgaagatgtggccggcacagagatgagccagagcgacagcggcgtggacctgagcggggacagccaggtgagcagcggcccctgcagccagaggagcagcccagatggcggcctgaagggagctgctgagggcccccccaagaggcctgggggcagcagccccctgaatgctgtgccctgtgagggccccccaggcagcgagcccccaagaagacctcctccagcccctcatgatggagacaggaaggagctgccccgggagcagcccctgcccccaggccccatcggcacagagaggagccagaggacagaccggggcacagagcccggccccatccggcccagccacaggcctggcccccctgtgcagtttggcaccagtgacaaggacagcgacctgcggctggtggtgggggacagcctgaaggccgagaaggagctgacagcctctgtgacagaggccatccctgtgtcccgggactgggagctgctgcccagcgctgctgccagcgctgagccccagagcaagaacctggacagcggccactgtgtgcctgagcccagcagcagcggccagaggctgtacccagaggtgttctacggcagcgctggccccagcagcagccagatcagcggcggggccatggacagccagctgcaccccaacagcggcggcttccggcccggcacccccagcctgcacccctaccgcagccagcccctgtacctgcccccaggccctgccccacccagcgccctgctgagcggcctggccctgaagggccagttcctggacttcagcaccatgcaggccacagagctgggcaagctgcctgctgggggcgtgctgtacccacctccttccttcctgtacagccctgccttctgccccagccccctgcctgacaccagcctgctgcaggtgcggcaggacctgcccagccccagcgacttctacagcacccccctgcagcccggcggccagagcggcttcctgcccagcggggccccagcccagcagatgctgctgcccatggtggacagccagctgcctgtggtgaactttggcagcctgcccccagcccctcctccagcccccccacccctgagcctgctgcctgtgggccctgccctgcagccccccagcctggccgtgcggcccccaccagccccagccaccagggtgctgcccagccctgcccggcccttccctgccagcctgggccgggcagagctgcaccctgtggagctgaagcccttccaggactaccagaagctgagcagcaacctgggcggccctggcagcagcaggaccccacccaccggccgctccttcagcggcctgaacagccggctgaaggccacccccagcacctacagcggggtcttccgcacccagagggtggacctgtaccagcaggccagccccccagatgccctgcgctggatccccaagccctgggagaggactggacctccaccccgggagggccccagcagaagagctgaggagcccggcagcagaggagacaaggagcccggcctgcccccacccaggtag

SEQ ID NO: 232808 - DNA, 6450 bp, Artificial Sequence
  derived and/or modified sequence
atgtctgacagaagtggccccacagccaagggcaaggatggcaagaagtacagcagcctgaacctgtttgacacctacaagggcaagagcctggagatccagaagccagctgtggcccccaggcatggcctgcagagcctgggcaaggtggccatcgcccggaggatgcctcctccagccaacctgcccagcctgaaggccgagaacaagggaaatgaccccaacgtgtccctggtgcccaaggatggcaccggctgggccagcaagcaggagcagagcgaccccaagagcagtgatgccagcacagcccagcccccagagagccagcccctgcctgccagccagaccccagccagcaaccagcccaagaggcctcctgctgcccctgagaacacccccctggtgcccagcggcgtgaagtcctgggcccaggcctctgtgacccatggagcccatggagatggcggccgggccagcagcctgctgagccgcttcagccgggaggagttccccaccctgcaggccgccggggaccaggacaaggccgccaaggagcgggagagcgctgagcagagcagcggccctggccccagcctgcggccccagaacagcaccacctggagagatggcggcggccggggcccagatgagctggagggccctgacagcaagctgcaccacggccatgacccccggggcggcctgcagcccagcggccccccccagttccccccctaccggggcatgatgccacccttcatgtacccaccctacctgcccttccccccaccctacggcccccagggcccctaccgctaccccaccccagatggccccagccgcttcccccgggtggccggcccccggggcagcggcccccccatgaggctggtggagcctgtgggccggcccagcatcctgaaggaggacaacctgaaggagtttgaccagctggaccaggagaatgatgatggctgggccggggcccacgaggaggtggactacacagagaagctgaagttcagtgatgaagaagatggccgggacagtgatgaggagggcgctgagggccaccgggacagccagagcgccagcggggaggagcggcccccagaggctgatggcaagaagggcaacagccccaacagcgagccccccacccccaagacagcctgggccgagaccagccggcccccagagacagagcccggccccccagcccccaagccacccctgcccccaccccaccggggccctgctggcaactggggccccccaggggactacccagacagaggaggccccccctgcaagcccccagccccagaagatgaagatgaggcctggaggcagaggaggaagcagagcagcagcgagatcagcctggccgtggagcgggccaggagaagaagagaggaggaggagaggaggatgcaggaggagcggcgggccgcctgtgccgagaagctgaagaggctggatgagaagtttggagccccagacaagaggctgaaggccgagcctgctgcccctcctgctgcccccagcaccccagcccctcctcctgctgtgcccaaggagctgcctgcccccccagcccctcctccagccagcgcccccaccccagagacagagcctgaggagcccgcccaggcccccccagcccagagcacccccaccccaggagtggccgccgcccccaccctggtgtctgggggcggcagcaccagcagcaccagcagcggcagctttgaggccagccctgtggagccccagctgcccagcaaggagggccctgagcccccagaggaggtgcccccacccaccaccccacctgtgcccaaggtggagcccaagggagatggcatcggccccacccggcagccccccagccagggcctgggctaccccaagtaccagaagagcctgcccccacgcttccagaggcagcagcaggagcagctgctgaagcagcagcagcagcaccagtggcagcagcaccagcagggcagcgccccacccacccctgtgccccccagccccccccagcctgtgaccctgggcgctgtgcctgccccccaggcccctcctcctccacccaaggccctgtacccaggggccctgggccggcccccacccatgccacccatgaactttgacccccgctggatgatgatccccccctacgtggacccccggctgctgcagggccggccccccctggacttctacccacctggggtgcaccccagcggcctggtgccccgggagaggagtgacagcggcggcagcagcagcgagccctttgacagacatgccccagccatgctgcgggagcggggcaccccacctgtggaccccaagctggcctgggtgggagatgtgttcaccgccaccccagctgagccccggcccctgaccagccccctgcggcaggccgcagatgaagatgacaagggcatgaggtctgagaccccacctgtgcccccacctccaccctacctggccagctacccaggcttcccagaaaatggagcccctggcccccccatcagccgcttccccctggaggagcccggcccccggcccctgccctggcccccaggcagtgatgaggtggccaagatccagaccccaccacccaagaaggagccccccaaggaggagacagcccagctgaccggccctgaggccggcaggaagccagcccggggcgtgggcagcggcggccagggccccccacctccaagaagagagagcaggacagagacccgctggggcccccggcccggcagcagccggcggggcatccccccagaggagcccggggcccccccaagaagagctggccccatcaagaagcccccaccacccaccaaggtggaggagctgccccccaagcccctggagcagggagatgagacccccaagccacccaagccagaccccctgaagatcaccaagggcaagctgggcggccccaaggagaccccacccaacggcaacctgagccctgccccccggctgcggcgggactacagctatgagcgggtgggccccaccagctgccggggccggggccgcggggagtactttgcccggggccggggcttccggggcacctacggcggccggggcagaggagctgctggcaacagcgctgtgacagagagctttgaggagatgatgggcgtggaggtgggccagggcgaccagaccaccctgctgctgcctgaggccgccctgcctgcccggcacggggcccgggtgcagagcatgaggaagagccccagcggggccggcagcggggcccagaagcaggccgcccggcccatgagggtcatctggctgctgcagacccggcggctgccccacccccggcgggagcacagccccaggagccgcagccccaccaccaggagccccaccttccctgccccagcccgcttcaccccaggagtgggggagagcagcctgcctgagggcatcagccctggccccaggagaagagagcccccccaggtgtgccccggctggagccccccagccaagagcctggcccccaagaagcccccaacaggccccctgccccccagcaaggagcccctgaaggagaagctgatccctggccccctgagccctgtggcccggggcggcagcaatggaggcagcaatgtgggcatggaggatggagagcggcccaggagaagaagacatggccgggcccagcagcaggacaagccaccccgcttccggcggctgaagcaggagagagaaaatgctgcccggggcagcgagggcaagcccagcctgaccctgcctgccagcgcccctggccctgaggaggccctgaccaccgtgacagtggccccagccccccggcgggctgctgccaagagcccagacctgagcaaccagaacagcgaccaggccaatgaggagtgggagacagccagcgagagcagtgacttcaccagcgagcggcggggggacaaggaggcccctcctcctgtgctgctgacccccaaggctgtgggcacccctgggggcggcggcggcggcgctgtgcccggcatcagcgccatgagcagaggagacctgagccagagggccaaggacctgagcaagaggagcttcagcagccagaggcctggcatggagcggcagaacagaagacctggccctgggggcaaggccggcagcagcggcagcagcagcggcggcggcggcggcggccctgggggccgcactggacctggccgcggggacaagaggtcctggcccagccccaagaacagaagccggcccccagaggagaggcctcctggcctgcccctgcccccacctccacccagcagcagcgctgtgttccggctggaccaggtgatccacagcaacccagctggcatccagcaggccctggcccagctgagcagccggcagggctctgtgacagcccctgggggccaccccaggcacaagccaggcctgccccaggccccccagggccccagcccccggccccccaccaggtatgagccccagagggtgaacagcggcctgagcagtgacccccactttgaggagcccggccccatggtgcggggcgtgggcggcaccccccgggacagcgctggggtgagccccttcccccccaagaggcgggagcggccccccaggaagccagagctgctgcaggaggagagcctgcccccaccccacagcagcggcttcctgggcagcaagccagagggccctggcccccaggccgagagccgggacacaggaacagaggccctgaccccccacatctggaaccggctgcacacagccaccagcaggaagagctaccggcccagctccatggagccctggatggagcccctgagcccctttgaagatgtggccggcacagagatgagccagagcgacagcggcgtggacctgagcggggacagccaggtgagcagcggcccctgcagccagaggagcagcccagatggcggcctgaagggagctgctgagggcccccccaagaggcctgggggcagcagccccctgaatgctgtgccctgtgagggccccccaggcagcgagcccccccggcggcccccaccagcccctcatgatggagacaggaaggagctgccccgggagcagcccctgcccccaggccccatcggcacagagaggagccagaggacagaccggggcacagagcccggccccatccggcccagccaccggcccggcccccctgtgcagtttggcaccagtgacaaggacagcgacctgcggctggtggtgggggacagcctgaaggccgagaaggagctgacagcctctgtgacagaggccatccctgtgtcccgggactgggagctgctgcccagcgctgctgccagcgctgagccccagagcaagaacctggacagcggccactgtgtgcctgagcccagcagcagcggccagaggctgtacccagaggtgttctacggcagcgctggccccagcagcagccagatcagcggcggccacggcctgagcatcaccagcaagcagtggaggcggcccggcacccccagcctgcacccctaccgcagccagcccctgtacctgcccccaggccctgcccctccttctgccctgctgagcggcctggccctgaagggccagttcctggacttcagcaccatgcaggccacagagctgggcaagctgcctgctggaggagtgctgtaccccccacccagcttcctgtacagccctgccttctgccccagccccctgcctgacaccagcctgctgcaggtgcggcaggacctgcccagccccagcgacttctacagcacccccctgcagcccggcggccagagcggcttcctgcccagcggggccccagcccagcagatgctgctgcccatggtggacagccagctgcctgtggtgaactttggcagcctgcccccagcccctcctccagcccccccacccctgagcctgctgcctgtgggccctgccctgcagccccccagcctggccgtgcggcccccaccagccccagccaccagggtgctgcccagccctgcccggcccttccctgccagcctgggccgggcagagctgcaccctgtggagctgaagcccttccaggactaccagaagctgagcagcaacctgggcggccctggcagcagcaggaccccacccaccggccgctccttcagcggcctgaacagccggctgaaggccacccccagcacctacagcggggtcttccgcacccagagggtggacctgtaccagcaggccagccccccagatgccctgcgctggatccccaagccctgggagaggacaggccccccaccccgggagggccccagccggcgggcagaggagcccggcagcagaggagacaaggagcccggcctgcccccaccaagatag

SEQ ID NO: 232809 - DNA, 6417 bp, Artificial Sequence
  derived and/or modified sequence
atgtctgacagaagtggccccacagccaagggcaaggatggcaagaagtacagcagcctgaacctgtttgacacctacaagggcaagagcctggagatccagaagccagctgtggcccccaggcatggcctgcagagcctgggcaaggtggccatcgcccggaggatgcctcctccagccaacctgcccagcctgaaggccgagaacaagggaaatgaccccaacgtgtccctggtgcccaaggatggcaccggctgggccagcaagcaggagcagagcgaccccaagagcagtgatgccagcacagcccagcccccagagagccagcccctgcctgccagccagaccccagccagcaaccagcccaagaggcctcctgctgcccctgagaacacccccctggtgcccagcggcgtgaagtcctgggcccaggcctctgtgacccatggagcccatggagatggcggccgggccagcagcctgctgagccgcttcagccgggaggagttccccaccctgcaggccgccggggaccaggacaaggccgccaaggagcgggagagcgctgagcagagcagcggccctggccccagcctgcggccccagaacagcaccacctggagagatggcggcggccggggcccagatgagctggagggccctgacagcaagctgcaccacggccatgacccccggggcggcctgcagcccagcggccccccccagttccccccctaccggggcatgatgccacccttcatgtacccaccctacctgcccttccccccaccctacggcccccagggcccctaccgctaccccaccccagatggccccagccgcttcccccgggtggccggcccccggggcagcggcccccccatgaggctggtggagcctgtgggccggcccagcatcctgaaggaggacaacctgaaggagtttgaccagctggaccaggagaatgatgatggctgggccggggcccacgaggaggtggactacacagagaagctgaagttcagtgatgaagaagatggccgggacagtgatgaggagggcgctgagggccaccgggacagccagagcgccagcggggaggagcggcccccagaggctgatggcaagaagggcaacagccccaacagcgagccccccacccccaagacagcctgggccgagaccagccggcccccagagacagagcccggccccccagcccccaagccacccctgcccccacctggggactacccagaccggggcggccccccctgcaagcccccagccccagaagatgaagatgaggcctggaggcagaggaggaagcagagcagcagcgagatcagcctggccgtggagcgggccaggagaagaagagaggaggaggagaggaggatgcaggaggagaggagagctgcctgtgccgagaagctgaagaggctggatgagaagtttggagccccagacaagaggctgaaggccgagcctgctgcccccccagctgcccccagcaccccagcccctcctcctgctgtgcccaaggagctgcctgcccccccagcccctcctccagccagcgcccccaccccagagacagagcctgaggagcccgcccaggcccccccagcccagagcacccccaccccaggagtggccgccgcccccaccctggtgtctgggggcggcagcaccagcagcaccagcagcggcagctttgaggccagccctgtggagccccagctgcccagcaaggagggccctgagcccccagaggaggtgcccccacccaccaccccacctgtgcccaaggtggagcccaagggagatggcatcggccccacccggcagccccccagccagggcctgggctaccccaagtaccagaagagcctgcccccacgcttccagaggcagcagcaggagcagctgctgaagcagcagcagcagcaccagtggcagcagcaccagcagggcagcgccccacccacccctgtgccccccagccccccccagcctgtgaccctgggcgctgtgcctgccccccaggcccctcctcctccacccaaggccctgtacccaggggccctgggccggcccccacccatgccacccatgaactttgacccccgctggatgatgatccccccctacgtggacccccggctgctgcagggccggccccccctggacttctacccacctggggtgcaccccagcggcctggtgccccgggagaggagtgacagcggcggcagcagcagcgagccctttgacagacatgccccagccatgctgcgggagcggggcaccccacctgtggaccccaagctggcctgggtgggagatgtgttcaccgccaccccagctgagccccggcccctgaccagccccctgcggcaggccgcagatgaagatgacaagggcatgaggtctgagaccccacctgtgcccccacctccaccctacctggccagctacccaggcttcccagaaaatggagcccctggcccccccatcagccgcttccccctggaggagcccggcccccggcccctgccctggcccccaggcagtgatgaggtggccaagatccagaccccaccacccaagaaggagccccccaaggaggagacagcccagctgactggacctgaggccggcaggaagccagcccggggcgtgggcagcggcggccagggccccccaccaccccggcgggagagcaggacagagacccgctggggccccaggcctggcagcagcagaagaggcatccccccagaggagcccggggccccaccccggcgggccggccccatcaagaagcccccaccacccaccaaggtggaggagctgccccccaagcccctggagcagggagatgagacccccaagccacccaagccagaccccctgaagatcaccaagggcaagctgggcggccccaaggagaccccaccaaatggaaacctgagccctgccccccggctgcggcgggactacagctatgaaagagtgggccccaccagctgccggggccggggccgcggggagtactttgcccggggccggggcttccggggcacctatggaggccggggccgcggggctgctggcaacagcgctgtgacagagagctttgaggagatgatgggcgtggaggtgggccagggcgaccagaccaccctgctgctgcctgaggccgccctgcctgcccggcatggagcccgggtgcagagcatgaggaagagccccagcggggccggcagcggggcccagaagcaggccgcccggcccatgagggtcatctggctgctgcagacccggcggctgccccacccccggcgggagcacagccccaggagccgcagccccaccaccaggagccccaccttccctgccccagcccgcttcaccccaggagtgggggagagcagcctgcctgagggcatcagccctggcccccggcggcgggagcccccccaggtgtgccccggctggagccccccagccaagagcctggcccccaagaagccacccaccggccccctgccccccagcaaggagcccctgaaggagaagctgatccctggccccctgagccctgtggcccggggcggcagcaatggaggcagcaatgtgggcatggaggatggagagcggcccaggagaagaagacatggccgggcccagcagcaggacaagcccccacgcttccggcggctgaagcaggagcgggagaatgctgcccggggcagcgagggcaagcccagcctgaccctgcctgccagcgcccctggccctgaggaggccctgaccaccgtgacagtggccccagcccccaggagagctgctgccaagagcccagacctgagcaaccagaacagcgaccaggccaatgaggagtgggagacagccagcgagagcagtgacttcaccagcgagaggagaggagacaaggaggcccctcctcctgtgctgctgacccccaaggctgtgggcaccccaggcggcggcggcggcggcgctgtgcccggcatcagcgccatgagcagaggagacctgagccagagggccaaggacctgagcaagaggagcttcagcagccagaggcctggcatggagcggcagaacagaagacctggccctgggggcaaggccggcagcagcggcagcagcagcggcggcggcggcggcggccctgggggccgcacaggccctggccgcggggacaagaggtcctggcccagccccaagaacagaagcaggcctcctgaggagcggcccccaggcctgcccctgcccccacctccacccagcagcagcgctgtgttccggctggaccaggtgatccacagcaacccagctggcatccagcaggccctggcccagctgagcagccggcagggctctgtgacagcccctgggggccaccccaggcacaagccaggcctgccccaggccccccagggccccagccccaggcctcccaccaggtatgagccccagagggtgaacagcggcctgagcagtgacccccactttgaggagcccggccccatggtgcggggcgtgggcggcaccccccgggacagcgctggggtgagccccttcccccccaagagaagagagaggcctcccaggaagccagagctgctgcaggaggagagcctgcccccaccccacagcagcggcttcctgggcagcaagccagagggccctggcccccaggccgagagccgggacaccggcacagaggccctgaccccccacatctggaaccggctgcacacagccaccagcaggaagagctaccggcccagctccatggagccctggatggagcccctgagcccctttgaagatgtggccggcacagagatgagccagagcgacagcggcgtggacctgagcggggacagccaggtgagcagcggcccctgcagccagaggagcagcccagatggcggcctgaagggagctgctgagggcccccccaagaggcctgggggcagcagccccctgaatgctgtgccctgtgagggccccccaggcagcgagcccccaagaagacctcctccagcccctcatgatggagacaggaaggagctgccccgggagcagcccctgcccccaggccccatcggcacagagaggagccagaggacagaccggggcacagagcccggccccatccggcccagccacaggcctggcccccctgtgcagtttggcaccagtgacaaggacagcgacctgcggctggtggtgggggacagcctgaaggccgagaaggagctgacagcctctgtgacagaggccatccctgtgtcccgggactgggagctgctgcccagcgctgctgccagcgctgagccccagagcaagaacctggacagcggccactgtgtgcctgagcccagcagcagcggccagaggctgtacccagaggtgttctacggcagcgctggccccagcagcagccagatcagcggcggccacggcctgagcatcaccagcaagcagtggaggaggcctggcacccccagcctgcacccctaccgcagccagcccctgtacctgcccccaggccctgccccacccagcgccctgctgagcggcctggccctgaagggccagttcctggacttcagcaccatgcaggccacagagctgggcaagctgcctgctgggggcgtgctgtacccacctccttccttcctgtacagccctgccttctgccccagccccctgcctgacaccagcctgctgcaggtgcggcaggacctgcccagccccagcgacttctacagcacccccctgcagcccggcggccagagcggcttcctgcccagcggggccccagcccagcagatgctgctgcccatggtggacagccagctgcctgtggtgaactttggcagcctgcccccagcccctcctccagcccccccacccctgagcctgctgcctgtgggccctgccctgcagccccccagcctggccgtgcggcccccaccagccccagccaccagggtgctgcccagccctgcccggcccttccctgccagcctgggccgggcagagctgcaccctgtggagctgaagcccttccaggactaccagaagctgagcagcaacctgggcggccctggcagcagcaggaccccacccaccggccgctccttcagcggcctgaacagccggctgaaggccacccccagcacctacagcggggtcttccgcacccagagggtggacctgtaccagcaggccagccccccagatgccctgcgctggatccccaagccctgggagaggactggacctccaccccgggagggccccagcagaagagctgaggagcccggcagcagaggagacaaggagcccggcctgcccccacccaggtag

SEQ ID NO: 232810 - DNA, 6474 bp, Artificial Sequence
  derived and/or modified sequence
atgagcgaccggagcggccccaccgccaagggcaaggacggcaagaaatattcctccctgaacttgttcgatacatacaaagggaagtctctggaaatccagaagcccgctgtggctccacggcacggcctgcagagcctgggcaaggtggcaattgcccggaggatgccgcctcctgccaacctccctagtttgaaggccgagaataaaggaaatgaccctaatgtctcattggttcctaaggatggtacgggatgggcctctaaacaggagcagtccgaccctaagtcaagtgacgcaagtaccgcacaacctcccgaatctcagcctctccccgcttcacagacccctgccagtaaccagcctaagcgtcccccggccgcacccgagaacaccccactcgtgcccagtggggttaaatcttgggcgcaggctagtgtgactcacggggcccacggtgacggcgggagggcatctagcctgctgtcccggttctctagggaggaatttccaaccctccaggcggctggcgatcaggacaaggccgcgaaagagcgtgaatctgccgagcagtcttcaggtccaggaccctccctcagacctcagaattccacaacatggcgggatggcggcgggcgcggccctgatgagctagagggacccgactcgaagctccatcacggccatgacccacggggcggcttgcagccctccggacctcctcaattccctccttacagaggtatgatgcctcccttcatgtatccgccctacttgccatttcctccaccctatgggccacaaggcccctataggtacccaactcctgacggtccatcccgcttcccgcgggtcgctggcccccgtggctctggcccaccgatgcgccttgttgaacccgttggccgaccatcaattctgaaggaagataatctcaaggagtttgatcaactggatcaggaaaacgacgacggctgggctggggctcacgaggaggtggactacacagagaaactcaaattttctgatgaggaggacggacgggattctgacgaggaaggggccgaaggtcatcgcgactcccagtccgcctctggagaggagaggccaccagaagcggatgggaagaagggcaattctcctaactccgagccaccaactcccaagaccgcatgggctgagacatctaggcctcccgaaactgagcctggcccccctgctcctaaaccgccattgcctcctccccacaggggccccgccggaaattggggcccacccggggattacccggatcggggtggtcctccatgcaagccacccgcacctgaagacgaagacgaagcgtggagacagaggagaaaacagagctcttcggaaatctctctggctgtggaaagggcccgcaggcgccgagaagaggaggaacgtagaatgcaggaagagcgccgtgcagcttgtgcggagaaactaaaacgcctcgacgagaagtttggagctcccgataaacgcctgaaggctgaaccagcagcccctcccgctgcaccgtccaccccagcccctcctccagctgtgccaaaagaattacctgcccctcctgcccctccccccgcatccgccccgaccccagagaccgagccagaggaaccagctcaggcacccccggcccagtctactccaacgccaggcgtggctgccgccccgactctggtaagtggcgggggttcaacatcttcaacgtcttcaggctctttcgaggcctccccggttgaaccccagctcccctccaaagagggccctgagcctccagaggaagtcccaccgcctacaactccccctgtgccaaaggttgagccaaagggcgacgggataggcccaacacggcaaccccccagtcagggactgggataccccaagtaccagaaaagtctgcctcctaggttccagcgtcagcagcaggagcagttactcaaacaacagcagcaacaccagtggcagcagcaccagcaggggagtgctcctcctacacccgtgccaccttcccccccccagccggttacacttggggccgtgcctgccccccaggccccaccacccccaccaaaagccctataccccggggcacttggccgccctcctcccatgcctcccatgaatttcgacccgcgatggatgatgattccaccctacgtggatcccagactgttgcagggacgtcccccactagatttctaccctcccggagtacaccctagtggcttagttccaagagaacgatcagattccggtgggtcctcttcagaaccctttgacagacacgcccctgctatgcttcgcgaaagaggaaccccaccagtggatcccaagctggcctgggttggggatgtgttcacagccacacccgccgaaccacgtccgctcacatccccattgaggcaggccgctgatgaggacgacaaggggatgagaagcgaaaccccaccagtgccaccgccacctccatatctggcatcgtatccagggtttccggagaacggagcaccaggccccccgatttcccgcttccccctcgaggaacccggtccgcggcctctcccatggcctcctgggtcagatgaggtggcgaagatacagacaccaccccccaaaaaagagccccccaaggaagaaaccgcgcagctgactggcccagaggccggacgcaagcccgccaggggagttgggtcgggcggacaaggccctccgccaccaaggagggagagccgcacggaaacccgatggggccctcgaccgggcagcagccgcagaggaattccacctgaagaacccggtgccccgcccagacgcgcaggcccgataaaaaaaccacccccccctacaaaggtggaggagcttccccctaaaccccttgagcagggtgacgaaacaccaaaaccccccaagcctgaccctttaaaaataactaaaggaaagctgggaggccccaaagagacaccacccaacggcaacctgtcacccgcccctcgcctgagacgcgactatagttacgaaagagttgggcctactagttgcagaggaaggggccgcggagagtattttgccaggggccggggcttccgcggaacttatggcgggcgcggcaggggggctcgatcacgcgagtttagaagctaccgcgagttccggggggacgacggcagagggggagggaccggaggaccgaatcacccacccgcccccagaggacggaccgctagcgagacacgatcagaggggagtgagtatgaagaaattcccaaacgacgcaggcagagaggaagtgaaactggatcagagacccatgaaagcgacctagccccctcagataaggaagcacctacccccaaagagggcacacttactcaggtgcccttagcgccgccaccaccaggtgcaccaccatctcctgcccccgctcgcttcacagcacggggcggtagagtgttcaccccccggggggtgccttccagacgcggccggggaggaggtcgccctcctcctcaggtgtgtcctggctggtcacctccagccaaaagcttagccccaaaaaaaccccccaccggccctctgcctcccagcaaggaaccgctcaaggagaaactgattcctgggcctctgtcccccgtcgctagaggcggttctaatggcggtagcaacgttggcatggaggacggcgaacgccctagacggagacgccatggccgcgcgcagcaacaggacaaacccccgcgctttcgtcgactgaaacaggagagagaaaatgccgctcggggctcagaaggtaaaccctctctcacactgcctgcctccgcccccggccctgaagaagccctcacaactgttaccgtggccccagctccccggcgggctgcagccaagagtcctgatctgagtaatcaaaacagcgaccaggctaacgaagagtgggaaaccgcgtcagagtcttccgattttacttccgagcgacgcggcgataaagaagcaccacctccagtgcttcttacacctaaggcagtggggacacccggcggaggtggcggaggcgctgtgcccggaatctccgctatgtcccggggtgatctctcccagagggctaaagacctctcaaaacgctcgttctctagccaacggccaggtatggagaggcagaatcgaagaccaggacccggaggtaaagccgggagttctggctcttcctccggtggcgggggtggaggccccggggggcgtacagggcccggccgcggggataagcgctcttggcctagccccaagaaccggtcacggccccccgaggagagaccccccggcctccctctccctccccctcccccctctagttccgcagtgtttcgactggatcaggtgattcattccaatccagcgggcatccaacaggcgttggcacaactttcttcacgccagggcagcgtgactgcgcccggtgggcatccgaggcacaaacccggcctgcctcaggccccacagggaccgtcgccgcgccccccaacaagatacgagccacaacgcgtgaactctggccttagttctgacccacacttcgaggaacctggacccatggtgagaggcgtggggggcaccccacgggactcagccggtgtgtcccctttccccccaaagaggagggaaaggccccccagaaagcctgaacttctccaggaagagagcctccctcccccccactcaagtggcttcctcggcagcaagccagaggggcctgggccccaagctgagtcacgggataccgggactgaagcccttactccccatatctggaaccggctgcataccgctacctcgaggaagtcttacaggccctcaagcatggaaccttggatggagcccctgagcccattcgaggatgttgccgggaccgaaatgagccagagtgattctggagtggacttgagtggagactctcaagtgagttcaggcccgtgttcccagagatcaagccccgatgggggattgaagggcgccgcggagggacccccaaagagacctggagggtcttctcccctaaatgccgtgccatgtgaggggccgccaggttcagaaccccctcgtagaccccctcctgccccgcacgatggtgatagaaaggagctgccgcgagagcagcctctcccacccggacctataggcacagaaagatctcagagaacagacaggggcacggagccaggacccatcagaccctcccacagacctgggccccccgtccagtttggaaccagtgacaaggactccgatctaaggctcgtagtgggcgattcattgaaagccgagaaggaactcacagcctccgtgactgaggcaattcccgttagccgagattgggaactgttgccatctgcggctgcctcagcggaaccacagtcaaagaacttggactccggccactgcgtccccgagccatcttcttcaggacagaggttatatcccgaggtcttttatggttcggcaggaccaagtagctctcagatcagtggaggagcgatggattcccagctgcatccgaatagcggggggtttagacctggtacccccagtctgcacccatatagaagtcaaccactgtatctcccccccggtccagctccaccatcagccctgctgtctggactggccttaaaaggacagtttctcgatttctcaactatgcaagcgacagaactggggaaactcccagccggaggcgttttatatcccccacccagtttcctatactcccccgcattttgtcccagtccgctgccagatacatccctcttgcaggtccgccaggacctccccagtcctagcgatttctatagcactcccctccagcccggaggccagtccggtttcctgcctagtggagcgcccgcacagcaaatgctcctgcctatggttgactctcaacttcctgttgtcaattttggaagcttaccccctgctccccctccagccccgcccccactctcccttctgcctgtaggacccgcactgcagcctccatccctcgccgtgagaccaccgccagctccagccaccagggtgcttccttctccggcaagacccttccccgcaagcctcgggagagctgaactgcatcccgtcgaactgaaaccctttcaagactaccaaaagctgtccagtaatctgggtgggcccggctcaagccgtacacccccaaccgggcggagcttttctggtctgaatagcaggttgaaagctaccccctctacgtacagcggggtgttcagaacacagcgtgtagacctgtatcaacaggccagtcctccagatgctctgcgctggatcccgaaaccctgggagaggaccggccctccgccccgagaaggtccttcacgacgagctgaggagcctggctcccggggggataaagagccgggccttcctcctcctcgatag

SEQ ID NO: 232811 - DNA, 4149 bp, Artificial Sequence
  derived and/or modified sequence
atgctgcgggagcggggcaccccccccgtggaccccaagctggcctgggtgggagacgtattcacggccacacccgctgagcctcgccccctgacttcacccctgcgccaggctgccgatgaggacgataagggtatgcgctctgagacccccccggttcccccacctccgccttatcttgcctcctaccctggctttcctgagaacggtgctccaggtccaccaatcagcagattcccactggaggagcctggcccaaggcccttgccatggcctccagggtctgatgaagtggccaaaatccagacacccccaccaaaaaaggagcctccaaaagaggagacagcacaactaacgggacccgaggccggccgcaagcccgccagaggtgtcgggtccggaggccagggtccacctccccctagacgggagagtcgaaccgaaacacgttggggcccacgtccaggcagttcccgacgcggcatcccaccagaagagccaggggctccacctcgcagggcaggtccaataaaaaagccaccacctccaacaaaggtggaggagctgccacccaaaccccttgagcagggtgacgaaacccctaagccaccgaaacctgatcctctgaaaataacaaaggggaagttgggtggtcccaaagagacaccacctaacggtaacctgagtcctgcccccagattgcgtcgcgattatagctacgaaagagtgggtcccactagttgtaggggtagaggacgaggagaatacttcgccaggggacgcggcttcagaggaacgtacggcgggagaggccgcggggcccggagcagagagttccgatcctaccgcgagttccggggagatgacggacgtggaggaggcaccgggggacctaatcacccgccagcccctcgcgggcgtaccgcgtctgaaacccgaagcgaagggtccgaatacgaggagataccaaagagaaggcgccagcggggttccgagactggttccgaaactcacgagtccgatctggcaccttcagacaaggaagcgccaacaccaaaagaggggacgctgacccaggtcccgctcgccccgcctcctcctggcgcgcctccatcaccggcccccgcccggtttacagccaggggaggtcgagtcttcacgccgcgcggtgtgccatcacgcagggggagaggtggcggcagaccccctcctcaggtgtgtcctggctggagtccacccgcaaagagcctggctccaaaaaagccccctacgggtccactgccacccagcaaggaacctctgaaagagaaactgattcctggtcccctgtctccggtggcacgagggggttccaatggcggatcaaacgttggtatggaggacggcgagaggcctaggcgccggcgccatgggcgggcacaacagcaagacaaacctccccgctttcgaagactgaagcaggagcgagaaaacgcagcacgcggtagtgaaggcaagccttcactgactctgcctgcttcagctcccggtccggaggaggccctcacaactgtaaccgtggcccccgcccctcggcgtgccgccgctaagtcacctgatttaagcaatcagaactcagatcaggcaaatgaggagtgggagacggcctcggagagttctgacttcacatctgaacgtagaggcgataaggaagcaccacctcccgtgctcctgaccccaaaggcagtggggacccctggggggggaggcggaggggccgtgccgggcatatccgccatgtcccggggcgacctgagtcaacgggccaaagatttaagtaaacggagcttcagctcgcagagacccggcatggaacggcaaaaccgcaggccaggcccaggtggaaaagccggcagctctgggagcagcagcggcggcggcgggggcggcccgggcgggagaactggacctggccgcggagacaagaggtcatggcctagccccaaaaacaggtcccgaccccccgaggaacggcccccaggtctgcccctcccacctcctccccccagctccagtgctgtatttagattagatcaagtgattcactctaatcctgcaggcattcagcaggccctggcccagctgtccagccgacagggcagcgtaaccgccccggggggtcaccccaggcataagcctggtctaccacaggctccccaggggccatcccccagaccaccgacccgctacgaaccacaacgcgtaaatagcggcctgtctagcgaccctcacttcgaagagcccggaccaatggtgaggggagtgggtggaacccccagggactccgcgggcgttagcccattcccaccgaagcgccgcgaacgtccaccaaggaagcccgaactcctgcaggaggagtccctaccgccaccccacagttccggattcctcgggtcaaaacctgagggacccggtccacaggcggagtcccgggacacaggcaccgaggcccttactccccatatttggaacagattgcacactgccacctcccgcaaaagttatcgccccagttcaatggagccttggatggaacctctctcacccttcgaagacgtcgccgggactgaaatgtctcagtccgactcaggtgtagatttgtcaggggactcccaggtctcaagcggcccttgttcccagagatcttcgcccgatggtgggctcaagggggccgcagagggcccacctaagcgtccggggggctcttccccgctaaacgccgttccctgcgaaggccctcctggaagtgagcccccccgcagaccgcctcccgcaccccatgatggtgacaggaaggaacttccccgggaacaacccctcccgcctgggcccatcggcacggaacggtctcagcgaacagacaggggcacggaacccggccccattcgaccatcacatagacctgggccgccagtccagtttggaacatccgacaaagattccgatcttaggctggtggttggagacagtctgaaggctgagaaggagcttaccgccagcgtgaccgaggccatcccagtcagccgggactgggagttgttaccatctgcagcggcctccgctgagccccagtccaaaaacctggattccggtcattgtgtccccgagccgtcttcctccggccaaaggctatatcctgaagtgttctacggtagtgctgggcctagcagcagtcaaattagcgggggagcgatggacagtcagctgcatcctaattctggaggctttcgtccaggcacaccttcgttacatccttacagatcgcaacctttatatctaccacccgggccggctcctccaagcgctctcttgtccggtctggctcttaagggacagtttctggatttttccacgatgcaggcaaccgagctgggaaaactgcccgccgggggagtcttatatccacctcccagctttctgtactccccagcattctgtccttctccattgccagacacttctcttctccaggtgcggcaggacctgcccagcccttcggacttctactctactccactacaacctggaggccagtccgggtttctgcccagcggcgcacccgctcagcagatgttgctgccaatggtcgacagccagttgccagtggtgaacttcggttctctgccaccggctccgcccccagcacccccaccactcagtctgctgcccgtaggtcctgctcttcagccaccgagcttggctgtacgaccccctccggctcctgcaactagggttctgccatcgcctgcacgaccattcccggccagtctcggacgcgccgaactgcacccagttgaactcaaaccctttcaagactaccagaagctcagctccaatctgggagggcccggctcatccaggacccctcctactggccgcagcttctcagggttaaatagccgattaaaggccactccgtcaacttactcgggcgtgtttcgcacacagagggttgacttgtatcagcaggcaagtccccctgatgctcttaggtggatccctaagccatgggagaggacgggcccgccccctagggaaggaccatctcgccgcgccgaggagcctggatcacgaggagacaaggagccaggtctgcctcctccccggtag

SEQ ID NO: 232812 - DNA, 6474 bp, Artificial Sequence
  derived and/or modified sequence
atgagcgaccggagcggccccaccgccaagggcaaggacggcaagaagtacagttccctcaacctgttcgacacttacaagggaaaatccctcgaaattcagaagccagccgtagcaccgcgtcacggccttcaatcgctgggcaaggtggcgatcgcccgccggatgcccccacctgccaacctgccttctctgaaggccgaaaacaaggggaacgacccgaatgtgagcttggtgcctaaggatggcaccggctgggcgtcaaagcaggaacagagcgatccgaagtcaagtgacgccagtaccgcccagccacccgagagtcagcctttgcctgcgtctcaaacccccgctagcaatcagcccaagagaccccccgcagcaccggaaaacactccgcttgtccctagcggagtcaaaagttgggcacaggccagcgtaactcatggagcccacggagatgggggaagagcaagcagccttctgtcccggttttctcgggaagagttccctaccctgcaggccgcgggcgaccaggataaagcggctaaggaaagagagtccgccgagcagtccagcggaccagggcctagccttcgccctcagaacagcaccacttggagggatgggggaggacgcggccctgatgagcttgagggtcctgatagtaagttgcatcacgggcacgaccccagaggggggttgcaacccagcggccctcctcaatttcctccatatagggggatgatgccccccttcatgtatccgccatatttaccgttcccacctccctacggcccacagggaccataccggtacccaacgcctgacggcccgagtcggtttccccgagtagccgggccgcgtggttccggcccgccaatgcgcctcgtggagccggttggccggccctcaattcttaaggaagacaatctgaaagagttcgaccagttggaccaggagaatgatgacggttgggctggcgcacacgaggaagtcgattacactgagaaactcaaattttccgatgaggaagacgggcgggattcggacgaggagggagcagagggacatcgcgacagccaatcagcaagtggggaggagcgacctcctgaagctgacggtaagaagggcaactctccaaatagtgagcccccaactccaaaaactgcttgggcggaaacatcccgcccgccagaaacagagccaggacccccagccccaaaaccccccttgccaccaccacatcgcggaccggcaggcaactggggccctccaggggattatcccgaccggggtggtcccccatgcaagcctccggcgcccgaggatgaagatgaggcctggcgccagcggcggaaacagtccagcagcgagatctctctcgccgtggagagagcacgccggaggcgtgaagaggaggaaagaaggatgcaggaagaacgacgggcggcgtgcgcagagaaacttaagagattggacgaaaagttcggcgcccctgacaaaagactgaaagcagagcccgcagctccaccagctgcaccttctacaccagcccctcctccagctgtccctaaggaactgcctgcgcctcctgcacccccccctgctagtgctccgactccggagaccgagcctgaggaacccgcccaggcgccaccagcacagtccacaccgacacctggcgtcgccgctgcaccaaccttggtaagtggagggggctcaactagttcaacttcctccgggtccttcgaagcctcacccgtggaaccacaactccccagcaaagaagggccagagccccccgaggaagtgcctcccccgactaccccccccgtgcccaaagtggagcccaagggtgatggtatcgggcctactcgccagcctccatcacaagggctagggtaccccaaataccagaaaagcctaccaccaaggttccagaggcagcaacaggaacagctccttaagcagcaacagcagcatcagtggcaacagcaccagcaaggatcagcacctccaactccagtcccacccagccccccacagccagtgaccctgggggccgttccagccccacaggcaccaccaccgccacccaaggccctgtatcccggagccctggggaggccacctcctatgccccccatgaacttcgaccccaggtggatgatgatacccccctatgttgatccccggctgctgcagggtcggccccctctggatttttacccgcccggggtgcatccctcagggttggtgccccgtgaacgaagtgactctgggggttcatcctccgaacctttcgacagacacgcacccgccatgcttagggagagaggtacgccaccagtggatcccaagctggcgtgggtgggagatgtgttcaccgccaccccagctgagcctaggcccctaacttcgccgttaagacaggcggcagacgaagacgataaaggcatgcggagcgaaacgccacccgtgcctccccctcccccttatctagcttcataccctggatttccagagaatggagcaccagggcctcctatcagtagattcccactggaggagcctggtcccagacctctcccttggcctcccggctcggacgaggtggccaaaatccagacaccacccccgaaaaaggaaccacctaaggaggagactgctcagctgacaggacccgaggctggtcgtaagccggccaggggagtgggcagcggagggcagggaccaccccctccccgtagagagagcaggacggagactagatggggaccccggccaggatcctcgcgaaggggtatccctcccgaagaacccggggcacctcccagacgggccggccctattaaaaagccaccccctccaaccaaagtggaagaactgccgccaaagccactggagcaaggcgatgagacccctaagcctccgaagcccgatccgctgaagataacaaagggaaaactgggcggaccaaaggagacccctcccaatggaaatttatcccccgcccccagactgaggcgagattatagctatgaacgagtggggcctacttcatgtaggggacgtggccgcggagagtacttcgcccgggggaggggcttcagagggacatatggtggccgcggccgaggagcgcgctcgcgagagtttcggtcgtacagagaattccgaggcgatgacggcaggggagggggcaccggagggccaaaccatccaccagccccccggggaagaacggcctccgagacccgatcagaaggttctgagtacgaagagatccccaaaagaagaaggcagcgtggctccgagactgggtcagaaacccacgaatcagatttggcaccatctgataaggaggcccctactcctaaggaggggaccctgacccaagtccccttggcacccccccccccaggtgcccctccatctcccgcgcccgcaaggtttactgcacgtggggggagggtgtttacaccccgtggcgtaccttccagacggggaagaggaggcgggcgacctccaccccaagtgtgtcctggatggtcgcctcccgccaagagcttggcccccaagaagccccctacagggcctctccctccgagtaaagagccactgaaggaaaagcttatccctgggccgctgtctccggtcgcccgcggggggtctaacggaggctcgaatgttgggatggaagatggcgaaagaccacgccggcggcgacatggaagggcccagcagcaggacaagccaccccggttccgccggctgaagcaggagagagaaaatgcagctcggggctcagaaggcaagccctcccttacactccccgcttctgcacctggtccggaggaagccttgacaaccgttacggtggccccagccccccgcagagctgcagcaaagagtccagatctgagtaatcaaaacagcgaccaagcaaatgaggagtgggagacagcaagcgaaagctccgatttcacctctgagcggaggggcgacaaggaggcgccccctcccgtgctgttgacaccaaaggccgtaggtacgccaggcggcggggggggtggagcggtacccggcataagtgctatgtcccgaggcgatctgagccagagagccaaagatctatccaaacgatccttttcaagccagcgacctggtatggaaagacagaacaggcggcctggacccggggggaaagctggctcctcaggcagctcctccggcgggggaggcggggggccaggagggcgaaccggcccaggtcgtggcgataaaaggtcatggccatcccccaaaaaccgatccagaccacctgaagagaggcctcccggactgcccctgcctcccccccccccttcctctagtgcggtatttcgccttgatcaagtgattcatagtaaccccgcgggcattcagcaagcactcgcccaactctccagccgacaaggcagtgtcacggctcctgggggtcatccacggcataagcctggactccctcaggctccccaaggccctagcccaagaccacctactagatatgagccccagcgcgtaaactcaggtctgtcatccgaccctcacttcgaggaacccggccccatggtccgcggcgtaggcggaacaccccgagattcagccggagtcagcccttttccaccaaagcgacgagagcgaccccctagaaagcctgaactcctgcaggaagagtcactgccaccccctcactcgagtggtttcctggggtctaagccagaaggtccaggccctcaggctgagagtcgtgatactggaaccgaggcactgacaccacacatatggaatcgcttacacactgcaacttcaaggaagtcttatcggcctagcagcatggaaccatggatggaacccctcagtccgttcgaagatgtagcgggcacagaaatgagccaatctgatagtggagtcgacctatctggagactcacaagtgagctcgggtccctgcagccagagatctagtccggatggcggcctgaagggcgccgccgagggacccccaaagcggcctggaggcagttcaccattaaacgcagtgccgtgcgaaggcccccctgggtccgaacctcccagaaggcctccccctgcaccacacgatggtgaccgcaaagagctgcctagagaacaacctctgccccccgggcccatcggtacagaacgctcccagcgaacggaccgcggcaccgaaccaggtcctatccgccctagtcacagaccaggacctccggtccagtttggcacttcagataaagatagcgatcttcgcctagtggtgggggatagcttgaaggctgaaaaggagctgactgcttcggtgacggaagccatacccgtctctcgggactgggagctgctgccatccgccgccgcaagcgcagagccccagtccaagaacctcgactccggccactgtgtgccagaaccctctagttccggccagagactgtatcctgaagttttttacggctcagcagggccatcttcttcgcagatctccggaggggctatggactcacagctccacccaaacagcggaggctttaggccaggcacaccatcccttcatccttatcgttctcagccactgtacctgcctcctgggcctgctcctccgtcagcgctgctgtcgggactggccctgaaaggccagtttctcgactttagcactatgcaggccactgaactgggcaaactgcctgctgggggcgtcctgtatccccctccctccttcctgtactctccagctttttgcccaagccccttgcctgatacatctttactgcaggtccgccaggatcttccctccccaagtgacttctacagcacccctctgcagccggggggccaatctggcttcctaccctctggagcgccagctcaacagatgttactccctatggtcgactcacagctgcccgtcgtcaacttcggaagccttccccccgctcccccgcccgctcccccccccctgtctttacttcccgttggccctgcactccagccccctagtctcgcagtgcgtcctccaccggcacccgccactagagtgttgcctagccccgcccgaccgtttccagcctccctaggtcgcgcagagctccaccctgtggagctgaaaccatttcaggattatcaaaagctgtctagcaatctgggcgggcctggttcaagtagaacacctcccaccggcaggtccttctccggactgaacagccgcctgaaagcaactccctccacttatagtggagtatttcggacgcagcgcgtggacctgtaccagcaggcatctccccctgatgccctgcggtggatcccaaaaccatgggaacggaccgggcctccacctcgagaaggaccatcaagacgagctgaagagccaggctctcgtggagataaagaaccagggctgccgcccccacgttag

SEQ ID NO: 232813 - DNA, 6450 bp, Artificial Sequence
  derived and/or modified sequence
atgagcgaccggagcggccccaccgccaagggcaaggacggcaagaaatatagtagccttaacctgttcgacacctataaaggtaagtcactcgaaatccagaaacctgccgttgcaccaaggcacgggctgcagtcactggggaaagttgctatcgcgagaaggatgccaccgcctgcaaaccttccttcccttaaagccgaaaacaaaggcaatgatcctaatgtctcgctggtccctaaggacggtacagggtgggccagtaaacaagaacagtctgaccccaaaagctctgacgccagtaccgcccaacctcctgaatcccagcccctcccagcctcccaaactccagcctccaaccaaccaaagagacccccagcagcaccagaaaatacgcctctcgtgccatcaggagttaagagttgggcccaggctagcgtgacacacggcgcccatggtgacggtggtcgagccagttctctcctcagtaggtttagcagagaagagtttcccactttgcaggcggccggggatcaggataaggcggctaaggagcgcgagagcgccgagcagtcgtccgggcctggcccaagcctgaggccacagaatagcaccacttggcgggatggcggaggtagaggccctgatgaactcgaagggccggactctaagctgcaccatggccacgacccgagaggtggcctacagccaagcggtccccctcagtttcccccatataggggaatgatgccgccttttatgtacccaccatatcttccattccctcctccatatgggcctcaagggccgtaccgctacccaactcctgacggaccatctagatttcccagagtcgccgggccacgtggctctggtcctcccatgaggcttgtggagccagtagggcggccctctattctaaaggaagacaatcttaaggagttcgaccagttagatcaggagaatgatgacgggtgggcaggtgctcacgaggaagtagattacaccgagaaactgaaattttctgatgaggaggacggtcgtgactctgacgaggaaggcgctgaagggcatcgggattcacagtccgcgtccggggaggaaagacctcctgaggctgacgggaagaaaggaaattctcccaacagcgagcccccgaccccgaaaaccgcttgggctgaaacaagtcgccccccagagaccgagccaggacccccggcccccaagccgccgcttcctcctccccatcggggtccagccgggaattggggccctcctggagattatccggaccgtggagggcccccctgcaaaccccccgccccggaggacgaggatgaggcatggcgccaaagaaggaagcagtccagctccgaaatttccctggcagtggagagagcacgccgaagaagggaggaagaggagcggcgaatgcaggaggagcgcagagcagcatgcgcagagaagctcaagagactcgacgaaaaattcggtgcgcccgacaagaggctgaaagcagaacccgctgcacctcccgccgcccccagtacacccgctccgcccccagcggtgccaaaagagctgcctgccccacctgccccaccccccgcctccgctcccacacccgaaacagagcccgaagagcccgcacaggcgcctcctgctcagagtacccctaccccaggcgtggcggcagctccgacccttgtgagcggaggaggctccacctcctctaccagctctggatcatttgaggcctcacccgtggaaccccaattaccatccaaagaggggcccgagccaccagaggaggtgccacctcctacaactccccctgttcctaaggttgaacccaaaggcgacggcatcggaccaaccagacagcctcccagccagggcttgggttatccgaaataccagaagagcctgcctcctcggtttcaacgacaacaacaggaacagttgctcaaacagcagcagcagcatcagtggcaacagcaccagcaggggtctgcaccccctacccctgtgccaccctcgcctccacagccggtgactctgggagctgtaccggctccacaagctccccccccgccaccaaaagcactctaccccggtgccctgggcagacccccccccatgcccccaatgaacttcgacccccgttggatgatgatacccccgtacgttgatccccgcctccttcaaggtaggccccccctggatttttatcctccgggcgtccacccttccggactggtaccacgtgaacgctccgacagcggagggtcatcaagcgaaccttttgacaggcacgcccctgcgatgttacgtgagcgcggcactccacccgtggaccctaagctcgcgtgggttggcgacgtgttcactgcaactcccgccgagccccgaccattaacatctcccctaagacaggccgcggatgaagacgacaaaggcatgcgcagtgagacaccccccgtccctccacctcccccctatctggcttcctacccgggcttcccagagaacggcgccccaggcccacccatcagtagattccccttggaagaacccggtcctaggcctctcccttggccaccgggttccgacgaagtcgccaaaatccaaacccctcccccaaaaaaggaaccccccaaggaagaaaccgctcaactcacagggcccgaagccggtaggaagcccgcacgcggtgtgggctctggcggtcagggaccccctcccccgcggagggagagcagaacagagactagatggggtcccaggcctgggagttcacgtcgcggaatcccccccgaggaaccaggagctccgcccagacgggcaggccccattaagaaacctcctccgcctaccaaagtggaagaattgcccccaaagcctctagaacagggagacgagacgcccaaaccccctaagccggatccgctaaagattacaaagggaaagttgggcgggcctaaagagacccccccgaacgggaacctgagccccgccccacgccttagacgcgactattcgtacgagcgcgttggacccacatcctgtcgggggcggggccgaggcgagtatttcgccaggggaagaggcttccgcggtacctatggaggacggggacgtggcgcggccggaaacagcgcggtgactgagagctttgaagaaatgatgggtgtagaggtgggccagggtgatcagacaacccttctgctgccggaggctgccttgccagcgagacacggagcaagagtgcagagtatgaggaagtccccttccggcgcaggaagcggagcccaaaaacaggctgcacgaccaatgcgggtgatttggttgttgcagacccgcagactgccccatcctcgtagggagcatagcccgaggtcccgcagtccgacaactagatcacccaccttcccggcaccagccaggtttactcccggcgtgggggagtcctcactgccagaaggtatcagcccaggaccaagacggagagaacctccacaggtgtgcccaggctggtcacccccggcaaagtctctggcccccaaaaagcctccaaccggacctcttccgccttctaaagaaccactgaaagaaaaactgattcccggcccattatcccccgtagctcgtggcggctctaacggagggtcgaatgtcggcatggaggatggcgaacggccccgcagacgccggcacgggagggcccagcagcaggacaagccccctaggttcagacgactaaaacaggaaagggagaacgccgctaggggatcagaaggaaaaccatccctgaccctccctgcgtccgcacctggccccgaagaggcactcacaacagtgacggtggcccccgcacccaggcgtgcagcagctaagagcccagacctgagtaatcaaaattccgatcaggctaatgaggagtgggagacggcaagcgaatcatctgattttacttcagagcgtaggggggacaaggaggcgccccccccagtcttactcacccccaaggcagtggggactcctggcggcggaggcggcggagccgtgccaggcatcagcgcaatgtcaagaggagacctgagccagagagccaaggatttaagtaaaagatcttttagcagccagcgccctgggatggagagacagaaccgccgcccaggaccgggagggaaggccgggagcagcggctcgtcatctggagggggcggtggggggcccgggggtcgtacaggaccgggacgcggcgataaaagatcgtggccctctccaaaaaaccgatccaggcctcccgaagagcgaccgccaggcctcccgctccctccaccacctcccagtagttctgccgtgttccgactcgaccaggttatccacagcaaccctgctggcattcaacaggccttggctcagctctcatcgcggcagggatctgtgaccgctcccggcggacacccaagacacaaaccaggcctgcctcaggcaccgcaaggccccagccccaggccgcccacgagatacgaaccccaaagagtgaacagcggcctgagtagcgacccgcactttgaagaacctgggcctatggttcgcggtgtcggcggcacaccaagagatagtgccggcgtgagtccctttccccccaaaaggagagaacggccccccagaaagccagaattgctccaagaggagagtctgcctccaccacactcatctggattccttggctccaagcccgagggtcccgggccacaggctgagtctcgcgatactggcacagaggcattaacccctcatatatggaatcgacttcataccgctacatccagaaaatcttatcgcccttcctctatggagccttggatggagcctctatcccccttcgaggacgtagctggcacagaaatgagccagtctgactcgggggtagatctctctggcgactcccaggtcagcagcggcccttgttcccagcgcagtagccctgacggaggtctgaagggtgccgccgaggggccccccaaaagacctggtggatcttcacctttgaatgccgtcccttgtgaaggccccccaggcagcgagcccccaaggcgtcccccccctgcaccacacgatggtgaccgaaaggagctgccgcgggagcagcccctgccccccggtcctattggtacagaaagatcccagcgcacagatcgcgggacggagcccggacccatccgccccagtcataggcccggccccccagtgcagtttggaactagtgataaggacagtgacctacggttggtcgtaggtgactccctaaaggccgagaaagagctgaccgcaagcgtcaccgaggcgatccccgtgtctcgcgattgggagctactcccatccgctgccgccagtgccgagccacagtctaagaacctggactcaggccactgcgtgccagaaccttcgtcgagcggacagagactctatcccgaggtgttctatggctctgcagggccaagtagttcacagattagtgggggacacggcctgtccattaccagtaaacaatggcgtaggcccgggactccaagcctgcacccgtatcggtcgcagcccctttacttacctcctgggcccgcgcctcccagtgcgctgctgtcgggcctagctctcaaaggccagttcttagatttctctaccatgcaagctaccgagcttggaaagctccctgccggaggcgtcttgtatccccctccctctttcctctactcccccgccttttgtccctctccactgcctgatacctccctacttcaggtgcggcaggacctgccaagcccgtccgatttctacagcactccattgcagccggggggtcagtctggatttttgcctagtggagcccccgcccagcagatgttactccccatggtggactcccagttaccggtagttaacttcggaagccttccacctgcacctccccctgcaccacctccgctttctcttctcccagtcgggcccgcactgcagcccccttctttagcggtccgacccccacctgcccccgcgaccagggtgttgccgagccctgcgcggcctttccctgcgagtctgggcagggcggaattgcacccggtggaactcaaacctttccaggattatcagaaactgtccagcaacctgggcggacctgggagtagccggaccccacctacaggacggtccttctccggcttgaactctcgtcttaaagctaccccgagtacttacagcggggttttccgcacccagagggtggacctgtatcagcaggcaagtccgcccgacgctcttaggtggatccccaaaccctgggaacgtaccggtcccccccccagagagggcccaagcaggcgcgccgaggaacctggttccagaggggacaaggagcccggcctcccccccccccggtag

SEQ ID NO: 232814 - DNA, 6417 bp, Artificial Sequence
  derived and/or modified sequence
atgagcgaccggagcggccccaccgccaagggcaaggacggcaagaaatattcctctttgaatctgttcgatacctataagggcaaaagcttggaaatccagaagccagctgtagcgcccaggcatggtttacagtcattgggcaaggtagcaattgcaagaaggatgcctccccccgctaacctgccttccctgaaggcagagaacaaagggaacgatcccaacgtgtcactagtccctaaagatggaactggatgggccagcaagcaggaacagagtgatccgaagtccagcgacgcctcaacagcgcagccccccgagtctcaacctttgccagcctcccagacacctgcctcaaatcagcccaaaagaccgcccgccgctcctgaaaacaccccccttgtcccttccggcgtcaaaagttgggcgcaagcatcggtgacccacggagctcacggagatgggggtcgcgcctctagcctgctgagccgtttcagtagagaggaatttcctacgctccaggccgcgggggaccaagataaagcagccaaggagcgtgagtctgcagagcagagcagcggtccagggcccagcttgcgcccacaaaacagcacaacatggcgcgatggcggaggtcgggggcccgatgagctggaagggcccgactctaagttgcatcacggacatgacccgcgaggcggcctgcagcctagtggccctccccagtttccaccataccgcggaatgatgcctccctttatgtatcccccctacctcccattcccgcctccgtatggtccccaggggccatatcgataccctacaccagacgggcctagtcgctttccaagggtcgccggcccccgtggcagtggtccacctatgcggcttgtcgagcccgtcggcagaccaagcattctgaaagaagacaacctgaaagagtttgatcaattggaccaggagaacgatgacggttgggcaggtgcacatgaggaggtggactatacagaaaagctgaagttctctgacgaagaagacggcagagactccgacgaagagggggccgaaggacatagagattcccagtcagcctctggggaggagcgacccccggaggcagacggtaagaagggaaactccccaaatagcgagcctcctacccccaaaactgcttgggccgagaccagccgacctcccgagacggagccaggcccacccgccccgaagcctcccttgccccctcccggcgactacccggacagaggcggccctccctgcaaaccaccagctcctgaagatgaagatgaggcttggcggcaaagacggaaacagtcttcatctgagatttccctcgccgtcgaacgagctaggcgacgccgcgaggaggaggagcgtcgtatgcaggaagagagacgggctgcatgcgccgagaaactgaagcggctggacgagaagttcggagcacccgacaagcggctgaaggccgaaccagcggccccacccgcagctccgagtaccccagcacctccacccgctgtccctaaggaattaccagcacccccagcaccgccccctgccagcgccccaacaccagaaacagaaccagaggaacccgcccaagcccctcctgcacaatccacacccacacccggcgttgcagccgctcccactctcgtgtccggaggcgggtccacctcttcaacctcttccggatcattcgaggccagcccagttgaaccacaattgccttctaaggaggggcccgagcccccggaggaagttcctccccccacgaccccgcccgtccccaaggtggaacccaagggcgacggcatcgggcccacacggcaacctcctagtcaggggctgggctatcccaaatatcaaaaaagcttgccacctagattccagagacagcagcaagaacagttgctcaagcagcagcaacagcaccagtggcaacagcatcagcagggctccgctccacccacgcccgtccccccgagcccaccccagccggtaacccttggagccgtgccagccccacaggctcctccacctcctccaaaagcgctctaccccggagctctcggtagacctccgcccatgccacccatgaactttgatccccggtggatgatgatccctccttatgtggaccctaggctgctacaggggcggcctcctctggatttttacccacccggggtgcaccccagcgggctggtgccccgggagcggtctgatagcggcggctcctcctccgagccatttgaccggcatgcgccagcaatgttaagggagcgtggcacgcctcccgtcgaccctaagttagcctgggtcggagacgtcttcacggcaaccccagccgagccccgtccactaacgtcaccactccgacaggccgcagatgaggacgataaaggtatgcgcagtgagacccctccagtcccccctccaccgccttacctcgcttcctaccctggattccccgagaacggcgctcctgggccgcccatctctagattcccactggaagaaccagggcccagaccacttccgtggccccccgggtccgacgaggtggctaaaatccaaacaccacccccaaagaaagagcccccaaaagaggagaccgcccagctcaccggccctgaggcagggcgcaagccagcacggggcgtcggttcaggcggccagggacctcctccacctcgccgcgaatcaagaacagagacccggtggggacctcgccccggaagcagtcgaagaggaatccccccagaggagccgggggccccccctagaagggcaggtccgattaaaaagccacctcctcctacaaaagtggaggaactgccgcccaagcctctcgaacaaggcgatgaaactcccaagccaccgaaacctgatcctctaaagattacaaagggcaaattgggcgggcctaaggagaccccccctaacggcaatctctccccggctcccaggctccgccgcgactacagttacgagcgcgtcggccccaccagttgtcgaggacgcggcaggggagaatacttcgcccgcggaagaggctttcgagggacctacggcggacgcggccgtggtgctgcaggcaactccgccgttactgaatcattcgaggagatgatgggggtagaggtaggccagggggaccaaaccacgctgctgttaccagaggcggctctgcccgcaagacacggggccagggtgcagagtatgcgcaaatcccctagcggtgcaggctctggagcccagaagcaggccgccaggccaatgcgagtcatatggctactccaaaccaggcgtcttccccatccacgtagagaacacagcccgaggtcccgctccccaacaacccgctctccgacattccctgctcccgcccgttttacgcctggggtgggcgaatccagccttcctgaaggcattagtcccggcccccgtcggcgtgaaccaccacaggtttgcccaggatggtcacctcctgcaaagtcgctggccccgaagaagccgcccactggacctttgcccccatccaaagagcctctaaaagagaaattgattcccggccccttaagtcctgtggcacggggggggtcgaacgggggatcaaacgtcgggatggaagatggggaacggcccaggcgaaggcgacatggcagagcccagcaacaggacaaacctccacgcttcagaaggttgaaacaggagcgcgaaaatgctgctcgcggctcggagggtaagccatcgctaacccttcctgcttcagctccaggtcctgaggaggctctcactactgttacggtggcccctgcgccgaggcgggcggccgccaagtcccccgacctgagcaaccagaactcagaccaggcaaacgaggaatgggagactgccagcgaaagctctgactttaccagcgagcggcgaggcgacaaagaggctcctcctccagttctgctgacaccaaaagctgttggcacaccaggaggcggaggcgggggtgcagtgcctggcatctccgccatgagcagaggtgatctgagtcagcgggcaaaggacctgtcaaagcgcagtttctcctcccagcggcctggcatggagaggcagaataggcggcccggtcctggtggtaaagccgggtctagtggcagttcctcagggggtggcggggggggccccggcggcaggaccggtcctggcagaggcgataagaggagttggccatcaccgaagaatagaagccggcctcccgaagaaagacccccagggttgccgctgcctcctccaccaccctctagtagcgctgtgttcagactcgaccaggtcattcactctaaccccgctggcattcagcaggcgttagcccaactttcatccaggcagggaagtgtgactgccccaggcggccacccgcggcataagccaggactcccacaggcccctcaggggccttcgccaagacctcccacgcggtatgagccacaaagggtaaactctggcttatcctcagaccctcatttcgaagaaccagggccaatggttagaggcgtagggggcacaccgcgggattctgcaggcgtaagccctttccctccaaaacggcgggaaagaccaccccgtaaaccagaacttcttcaggaggagtctctccctcctccacacagctctggcttcctaggtagcaagcctgagggccctggacctcaggcagagtctagagacaccggcacggaagcgctaactccacacatatggaataggctacatacagcaaccagtagaaaatcttatcgcccaagtagcatggaaccctggatggaacctttatccccattcgaagatgtagcaggaaccgagatgtctcagtccgactcaggtgtcgacctctctggagatagccaagttagctccggcccctgttcccagcgatccagtcccgatggcggactgaagggggctgcggagggacctcctaagcgccccggtgggagctctccacttaatgctgtgccttgcgagggcccaccggggtctgagccccccagacgcccacctccagccccccacgatggtgaccgcaaagagctgccgcgggaacagcccctgccaccggggcctatagggaccgagcggagccagagaaccgaccgcgggactgagccagggccaatccgtccgagccataggcctggtccgccggtgcagttcggtacgagtgacaaggacagcgacttacgcctggtggtcggcgactcactgaaagctgagaaggagcttacagcaagcgtaaccgaggccatacccgtgagtcgggactgggagctgctgccctccgctgccgcatcagcggagccccagagcaaaaacctggactccgggcattgcgttccagaaccctccagctctggtcagagactgtaccctgaagtcttctatggaagcgccgggccctcctcctcgcagatttccggaggacacggtctgagtatcaccagcaagcagtggaggagacccgggacgccgtcccttcacccctacagaagccagccactctatctgcctccagggcccgcacccccctccgccctgctgtcgggactcgccttaaaaggccaattcctggattttagcactatgcaagccactgagttggggaagctccctgcaggaggcgttctttacccacccccctcttttctgtatagcccagccttctgcccatcccccttgcccgataccagcctgctccaggtccggcaggatctaccctctccttcggatttttactccacaccactgcagcctgggggtcagagcggcttccttccctccggcgccccagcccaacaaatgctgcttccgatggtcgacagtcaactccccgtcgtaaatttcgggagcttaccgcccgcccctcctccggccccacccccattatcactgctgcctgtgggccccgcactacagccgccgagcttggctgtgcgtcctccccctgctcctgccactagggttctgcccagccctgcacggccttttcctgccagtctgggccgcgccgagttgcaccccgtggagcttaagcccttccaggactatcaaaagctctcatccaacctcggtggccccggctcctctcggacaccccctactgggcggtctttttcggggctcaatagccggctaaaggcgacccccagtacatactctggagtgttcagaactcagagggttgacctttatcaacaagcatcacctcccgatgcactgaggtggattcccaagccctgggaaagaacaggccctcctccacgggaaggaccttcgcgcagagccgaagagcctgggagtcgcggtgataaggaacctggactgccccctccccggtag

SEQ ID NO: 232815 - DNA, 54 bp, Artificial Sequence
  derived and/or modified sequence
atggagaaccccagccccgccgccgccctgggcaaggccctgtgcgctttgtag

SEQ ID NO: 232816 - DNA, 6473 bp, Artificial Sequence
  derived and/or modified sequence
atgtcggatcgcagcggccctacggccaagggaaaggacggtaaaaagtattcatctctcaacttgttcgatacctataagggaaaatccctagaaatacaaaaacccgctgtggctccaaggcacggtctgcagtccctcggtaaggtcgccatcgcaaggaggatgcctccgccagccaatctgccctccctaaaggccgaaaataagggcaatgatcctaacgtttctctcgtgcccaaagatggcacagggtgggctagcaaacaggagcagtccgatcctaagtcttctgatgcctcaacagcgcaacctcctgaaagccagccactgcccgcaagccagacgcctgcctctaaccagcctaagagaccacctgccgctccagagaacacccctttggtgcctagcggtgtaaagtcatgggcccaggcgtcagtcactcacggggcacacggggatggcggaagagcctcctcattgttgagcaggttctcaagagaagaattcccgactttgcaggcagctggcgaccaggataaagccgcaaaggagcgggagtccgccgaacaatcttcaggcccaggcccatctctgcgaccccagaactctacaacatggcgtgacggcggtggacgtggacccgatgaactcgaaggaccagatagcaagcttcatcacggccatgaccctcgcggaggcctgcagcctagcgggcctcctcagtttccaccctatagaggcatgatgccacccttcatgtaccccccttacctgcctttcccccctccatacggacctcaagggccataccggtatccaacacccgacggcccttctcggtttcctagagtagctgggcctagaggatccggcccaccgatgcgccttgttgagccagtgggcagacctagcatactcaaagaagataatctgaaggagtttgaccagctggaccaggagaacgatgatgggtgggccggtgcacacgaagaggtggactacactgagaagctaaaatttagcgatgaagaagacggcagggactcggatgaagaaggcgcagagggccacagagatagtcagtcagcaagtggtgaggaaagaccacctgaggcagatggtaagaagggaaactctccaaattcggaacctcccacccctaagacagcatgggccgaaaccagtcgccctccagagactgagccaggacctcccgctcctaaaccaccactcccaccccctcacaggggtccggcagggaattggggtcccccaggcgactatcccgacagaggcggtcccccttgcaagccaccagcccctgaagacgaagatgaggcatggagacagaggcggaaacagagcagcagcgagatctcacttgctgttgaaagagccaggaggagaagagaagaagaagagcggagaatgcaggaggaaagacgagctgcctgcgctgagaagctgaagagacttgatgaaaagtttggggctcccgataaaaggctgaaagccgaacctgcagctcctcccgctgccccaagcacacccgcacccccacccgcagtgcccaaagaactcccagcaccccctgctccccctcctgccagcgcgcctactcctgaaacagaacctgaggaacccgcacaggcgccacctgctcagagcacccctacccctggcgtcgcagccgctccgacgctggtgtctggcggagggtctacttcctcaacatcttctggatcctttgaggccagtccggtggagccgcagctgccctctaaagagggacccgaacctcctgaggaggttccccctccgaccacccccccagtgcctaaggtagaaccaaagggcgacggcatcggtcctactaggcagccgcctagccagggcctgggataccctaagtaccaaaaaagtctaccacccaggttccagaggcagcaacaggagcagttgctcaaacaacagcagcagcatcagtggcaacaacaccagcaaggcagcgccccaccaacccctgtaccccctagcccgccacagcctgtgaccctgggcgctgttcccgctccccaggcccctccacctcccccaaaagcgctgtatccaggcgctctgggtaggccgcctccaatgcctccaatgaacttcgatccccgatggatgatgatcccaccctacgtagatccaaggctgctgcaggggagaccacctctggacttctacccccctggcgtccacccaagtggactggtgccgcgagagcgtagcgattctgggggatcttccagtgagcctttcgacaggcacgcaccagcaatgctgagggagcgagggacacctcccgtggatcctaaactggcctgggtaggggatgtgtttactgcaacgccagctgaacctagaccactgacttcccctctgagacaagccgcagatgaagatgataagggaatgcgcagtgagaccccacccgtaccacctccaccaccctatctggcctcttatcctggctttccagaaaatggagctcctgggccaccaatcagccggttccccctggaggagcccggacctaggccgctgccttggccccctggctctgacgaggttgccaagatccagaccccccctcctaagaaggagccccctaaggaggaaactgcccagttgaccgggcctgaagctgggagaaaaccggcacggggagtcgggtccggcggacagggccctccacctccccgtcgggaaagtcggaccgaaacccgctggggccctcgacctggaagtagccgcagaggaatccccccagaggagcctggagcacctccgcgaagagccggacccattaaaaagcccccaccaccaactaaagtcgaagaactgccccctaagcctctcgagcaaggggacgagactccgaagccgcctaaacccgatccactcaagatcactaaaggaaagttaggcggaccaaaagagacaccgcctaatggcaatctcagcccggctccaagattgagaagggactactcctatgaacgcgtcgggccaaccagctgtcgcggaaggggcaggggagagtattttgcacgcggtcggggttttcgaggcacctacgggggtcgcggaagaggtgcccgttctcgggagttccgatcctatagggaatttcggggagatgacggtaggggcggaggtacgggaggccctaatcaccctcccgcaccacgcggaagaaccgcctctgaaacgagaagcgagggcagcgagtacgaggaaattcccaagcgccgtaggcaaagagggtccgaaaccgggtccgagactcatgaatccgatctggcgccttcagataaagaggcacccactccaaaagagggaactctgactcaggtgcccctggccccaccaccaccaggagctccgccaagcccggctccggctaggttcacagcacggggaggacgggtattcactcccagaggcgtgccttctagacgcggacggggtggcggacgcccacccccacaggtgtgccccggttggtcgcctcctgcaaaatctctggctcctaagaagcctccaacaggccctttgcctcccagcaaggagccactgaaagaaaaactcattcccggaccgctcagccccgtcgcacgcggtgggagtaatgggggtagcaacgtgggtatggaggacggggagaggcccagacggcgaagacatggtagggcccaacagcaggataaaccaccacgatttcggaggctgaagcaagaaagggagaatgcggcacgcggttcagaaggaaagccaagcctgaccttacccgctagtgctccgggacctgaagaggcccttacgacggtaactgttgcccctgctccgcgtagagccgcagccaaaagcccagatctgagtaatcagaactctgaccaggctaacgaagaatgggaaaccgcatctgagtcctctgacttcactagtgaaaggagaggcgataaggaggctccccctcctgtgttgcttaccccaaaagccgttgggaccccaggaggtgggggagggggtgccgtccccggaatcagcgcaatgtctaggggggatctgagccagagagctaaggatttgtcaaaacgctctttttcttcccagcgacccggtatggaacgacaaaataggcgcccaggacccggtggcaaggcaggttcttccgggagctcgagcggtggtgggggtggcggtccgggaggccgtaccggacccggtcgtggggataaacgcagctggcccagtccgaaaaataggtcaagacctccagaagaaaggcctcccggtctgccactacctccccctcctccaagctcatccgcggtgtttcgactcgaccaggtcattcattcaaaccccgctgggatccagcaggctctcgcacagttgtccagcagacagggatctgtgacagcacccggaggccatcccagacacaagcctgggctgcctcaagcaccacagggaccatccccaagaccccctacacgctacgaaccacagagagtgaactcaggcctgagctccgatccccactttgaagagccaggacctatggtgagaggtgtgggtggtaccccaagagattctgccggtgtcagtccttttccgcctaagcggcgtgagcgccctccaaggaagccagaacttttacaggaagagagtctcccaccccctcattcctctggattcctgggctcaaaaccggaagggccaggccctcaagctgagtcccgggacaccggaactgaagctctgacacctcacatctggaaccggctacacacggcaaccagcagaaagagctaccgccctagctccatggaaccctggatggagccactgtcaccttttgaagatgttgcgggaacagaaatgagccaatctgacagcggagtggatctttcaggggattcccaggtctcttctggaccttgcagccaaaggagcagccctgatgggggtctgaaaggggctgctgagggccctccgaagcgcccaggtgggagctctccactgaatgccgtcccatgtgaggggccaccaggatcagagccaccacgaagaccacccccagcccctcacgacggtgatcggaaagaactacctcgcgagcagccgctaccccctggaccaatcggcactgagagaagccaacggaccgaccgcggaacagagcctggccctatccgaccgagccaccgaccagggccaccggtgcagttcggcacctccgacaaagattctgacttaaggctcgtagtcggcgatagccttaaagccgagaaggagcttaccgcttcagttaccgaggccatccccgtatcccgcgactgggagctcctgccttcagcagctgcttcagctgagccgcagtcgaaaaacttagattccggccactgtgtgcctgagccatcatcatcgggccagaggctgtatccagaagttttctatggttcagcaggtccaagctcttcacagatcagcggtggggctatggactctcaacttcatccgaacagcggagggttccggccagggacaccatccctgcatccttacaggagtcagccactgtatctgcctccaggcccagctccaccgtctgcactgctgtcaggcttagcgctgaaaggtcaattcctggacttcagcactatgcaggccactgagctaggaaagctccctgccggaggagttctgtatccccctccttctttcttgtacagcccggcattctgcccctcccctcttcctgatacatccttgctccaggtgagacaggatcttccgtcacccagcgacttttattccacccccctgcagccaggaggccagagcggattcctcccttcaggggctccggcacagcagatgctcctccccatggtggactctcagctccctgttgtgaatttcggctccctccctccagcacctccaccagcccctccacccctgagccttctgccagtgggacccgcactccaacctccgagccttgcagtgcggccacctccagccccagcaaccagggtcctccctagtccagcaagacctttccccgcttctctcggcagagctgaactccacccggtggaacttaagcccttccaggattatcagaagttaagttctaacttagggggaccgggaagcagtcggacccctcccactggtcgctccttttcaggcctaaacagccggctgaaggccaccccgtccacctacagcggggttttcagaacccaacgagttgacctgtaccaacaggcttcgcctccagacgcattgcgctggattcccaagccctgggagaggaccggaccgccaccaagagagggtccatcccgccgagcagaggagcccggaagtaggggcgacaaagaaccaggcctccctcctccgcgata

SEQ ID NO: 232817 - DNA, 4149 bp, Artificial Sequence
  derived and/or modified sequence
atgctgagggaacgaggcacccctccggtagaccctaaattggcttgggtaggcgacgtcttcactgccacacctgccgagccacgccctttgacgagtccattgaggcaggcggctgatgaggatgacaagggcatgagatcggagacaccgccagtgccacccccaccaccctatttggccagttaccctggatttccggagaatggtgcacccggtcctcctatttctagatttccactggaagaacctggacctcgacccttgccctggccaccaggctctgatgaggtagctaagattcaaaccccacctccaaagaaggagccacccaaggaggaaactgctcagcttacgggaccggaggcaggaaggaaaccagcccgaggagtgggctcggggggacaaggtcctccaccccctcggagggagtctaggaccgagactcgctggggaccgaggccgggttcatccaggagggggatcccaccagaggagccaggtgcacctccaaggcgcgctggtcctataaagaagccaccacctcccacaaaggtagaagagcttcccccaaagcccctggaacagggcgacgagacacctaaacccccaaagccagatccactgaaaattaccaaggggaagttagggggaccaaaggagacacctcccaacggaaatcttagccccgctcccaggctgcggcgagactactcgtatgagcgcgtgggaccaacctcatgtagagggcgaggcagaggcgagtacttcgcgcgtggcagaggattccgcggaacctatggcggtagggggaggggtgccagatctcgggaattccggtcatatagagagttccgtggcgacgacggcaggggaggcggtacaggtggccctaatcacccccctgcaccacggggacgtactgcctccgagacccggtccgaaggtagtgaatatgaggagattccgaaacgccgacggcaacggggaagtgaaacaggcagcgagacccacgagtccgatctagcccctagcgataaggaagcacccacgccaaaagaaggaactctgacacaggtacccctcgctcctcccccaccaggcgcacccccttcacccgctccagccagatttactgctcgcggaggtagagtgttcacaccaagaggcgttccttcacgccgaggcagaggtggcggacgacctccccctcaggtatgcccaggctggtcccctcccgctaaaagtctggcccctaagaagccacccaccggacctctgccaccctccaaggaacctctgaaggaaaagctgataccaggcccactgtctcctgtggccaggggtggctcaaacggcggatcaaacgttgggatggaagatggtgagaggccccgtaggcgcagacacgggagggctcaacagcaagataaaccgccacggttccgacggctgaagcaagagagggaaaacgccgctcgaggctcagagggcaagcctagcctgacactcccagctagcgcacctgggccagaagaggcgctaacgaccgtgaccgttgctcccgctcctcggagagctgctgccaaatccccggatttgtccaatcaaaattccgaccaggccaacgaagagtgggagacagccagcgaaagtagtgattttacgagcgagcgacggggagataaggaagcccctcctcccgtcctgctaacgccaaaggctgttggcactcctggcggtggcggtggaggtgcagtgcccggtatttctgctatgagccggggagatctcagccagcgggctaaggaccttagtaaacgtagctttagttcacagagaccgggtatggagagacagaacaggcgtcccggtccgggaggcaaggctggttctagcgggagttcatcaggcggaggagggggtgggccaggaggcaggactggccctgggcgtggggacaagaggagttggccctctcccaagaatcgtagtaggccacctgaggagcgtccccctggcctccctctgccacccccacccccatctagttccgccgtgttccggctggatcaggtcatccacagcaatcccgctggcatccagcaggctcttgcacagctttcttccagacaggggagcgtcactgcgcctggcggacaccctagacataaaccaggccttccacaggccccacagggaccgtcccctcgccctcccacgcgatacgaaccacagagggttaatagtgggctgagcagcgatccccacttcgaggagcccggaccaatggttcgaggcgttgggggtaccccacgcgactctgcaggagtgagtccattccctccaaaaaggcgagaacgccctcctagaaaacctgagctgctgcaggaagagtccctgccaccgcctcacagcagcggctttttaggctcaaaaccagaggggccaggacctcaggcagaatcccgggacaccgggaccgaagccctaactcctcatatctggaatcgcctgcacacggccacttccaggaagtcataccgcccatcgtccatggagccatggatggagcctctatccccattcgaggatgtggccggaacagaaatgtcacagtccgactctggtgtcgatcttagtggggactcccaggtgtctagcggaccatgcagccaacggagctctcccgacgggggtctcaagggcgctgccgaaggaccgccaaagcggccaggtggttcgagcccactgaatgcggttccatgcgagggacctcctggctcagaacccccacgcaggcctcccccagctcctcacgatggggaccggaaggaactgcctagggagcagcccctgccaccaggcccaatcgggacagagaggtctcaacgcaccgataggggcaccgaacccggtcccattcggcctagccacagacctggccctccagtacagttcggtacatctgacaaggacagtgatctgaggcttgtggtcggcgattccctcaaagctgagaaagagctgactgccagcgttacagaggcgattcccgtttctcgtgactgggagcttttgcccagtgcagccgcatccgccgaaccccagagcaagaatctggactcaggacattgtgtacccgaaccaagctcatccgggcaaaggctctaccctgaagtgttttacggttccgccggaccttcaagctctcaaatctccgggggtgccatggactcccagttgcatcccaatagtgggggattccggcctggcaccccaagcctccacccatacagatctcagcctctctatttacccccaggacctgcacccccatccgcacttcttagcggcttagccctaaaaggtcagtttttggatttttctacaatgcaggcaacagagcttggcaagctgcctgcagggggtgtgttgtatccaccgccttcatttctgtattccccggctttttgtccatccccgcttcctgacacgtcgctcctgcaggtccgacaggacctcccaagcccgagtgatttttacagcacccctctgcagcccggtggccaatccggttttcttccttcaggcgctcccgctcagcagatgctgctcccaatggtcgattcccagctgcccgttgtcaactttggctccttgccccctgctccaccaccagctccccctcccctgtccttattgccggtgggccctgccctgcagccgccaagcttggctgtgcgtccccctccagccccagccacccgggtgctgccttcgcctgccaggccatttcctgccagtctcgggagggccgagttgcatcctgtcgaactgaaaccctttcaggattaccagaagctcagttccaaccttggaggccctggtagctcccggactccacctacagggcgatcattttctgggctgaacagccgcttaaaggctaccccatccacctacagcggcgtgttcaggacccaaagggttgacctttaccagcaggcctccccccctgacgctctgagatggattccaaaaccctgggagaggacagggcctcctccacgcgagggcccttcaaggcgagctgaagagccgggaagccgaggcgacaaggagccaggcttgccccctcctcgctag

SEQ ID NO: 232818 - DNA, 6473 bp, Artificial Sequence
  derived and/or modified sequence
atgtccgacagatccggtcctacagctaagggaaaagacgggaagaagtacagcagtctgaacctgttcgacacatataagggaaagagccttgaaatccaaaaacccgcagtggctccacggcacggcctccagtccctggggaaagtcgctatcgctcgtcgcatgcccccaccagccaacctgccttcactaaaggctgaaaataaagggaacgaccctaatgtctcactcgtgcctaaagatgggactgggtgggccagcaagcaggagcagagcgatccaaagtcctctgatgcaagcactgcacagccacccgaatctcagcccctgcccgcttcccagaccccggcttctaatcagcccaagcgacctcccgctgccccagagaacacacccctggtgcccagtggcgtcaaatcctgggctcaggctagcgttactcacggagcccacggagatggagggagagccagctctctgctgtcgaggttcagtcgggaagagttcccaacattacaggcggctggcgatcaagataaggctgccaaggagcgtgaaagcgccgagcagtcctccggtcccggaccaagcctgagaccgcagaacagcactacatggcgggacggaggaggacgagggcctgacgaactggaagggcctgattctaaactgcaccacggccatgacccgcgaggagggttgcaacctagcggaccacctcaattccccccttaccgcggtatgatgcccccttttatgtatccgccatacctgccattcccaccaccttatggcccacagggcccttacagatatccgacgcctgatgggccatcccgcttccctcgcgtggccggtccgaggggctctggccctcccatgagacttgtggaacccgtcggacgcccttcaatactcaaggaagacaacttgaaggagttcgatcagcttgatcaagagaatgatgatgggtgggcaggtgcacacgaagaggtcgactataccgagaaactgaagttctcggacgaggaagacggcagggactctgacgaggaaggcgcagagggccaccgggactctcaatcagcctctggggaagagaggcctccggaggctgacggtaaaaaaggaaattcacccaattcggagccccctactcctaaaaccgcctgggccgaaacatcgaggccacccgagactgagcctggccctccagctcccaagcctccccttccaccccctcatagaggccctgccggaaactggggccctccaggtgactaccctgatcgcggagggccaccctgtaaaccgcctgctcccgaagatgaagatgaggcttggagacagaggcggaagcaaagctcaagcgaaatttcccttgcggtggaaagggctcgacgtcggagagaggaggaggaaagaagaatgcaagaggagaggagagctgcctgcgctgagaagttgaaacgtttagacgagaaattcggggcacccgacaaacgcctgaaagccgagcctgccgctccacctgccgcaccctccacgccagccccacctcccgcagtgcccaaagagctcccagcccctccggcaccaccccctgcgagcgccccaacccccgaaaccgagcccgaagaacccgcacaggctcccccagcgcagtccacaccaactcccggagtggcggcagcccctactttagtcagcgggggagggtctaccagctcaacaagctctgggagcttcgaggcaagcccggttgagccccagctccccagtaaagagggccctgagccaccagaggaagtcccaccccctacaactccgcctgtgcccaaagtggagcctaagggggacggaatcggcccaactcgtcaaccaccatcccaaggtctggggtatcccaagtaccaaaagtctttaccccctagattccagagacaacagcaggagcaactgctcaagcagcagcagcagcatcagtggcaacagcatcagcagggatctgcaccacccacgcctgtgcccccatccccaccccagccagttaccctgggggcagtcccagcccctcaggcccctcctcccccaccaaaggcgttataccccggtgcacttggacgccctcccccaatgcctcccatgaatttcgatccgcgttggatgatgattccaccgtacgtggatccccgactcctgcagggcagacctccattagacttctatccaccgggtgtacacccttccggcctggttccaagagaaaggtcagacagtggcggatcctctagcgagccgttcgacaggcatgcccctgcaatgttacgggaaaggggcactccacccgttgatccgaagcttgcctgggtgggcgatgtcttcactgccactcccgctgaaccacggcctctgacctctccactgcggcaggccgctgacgaagacgacaagggcatgagatctgagacccctcctgtacctcccccaccaccgtacctcgcatcctaccctggcttcccagagaacggagctccaggtccacctatcagcagattcccactggaggagcccggacccaggccactgccttggcctccaggcagcgatgaagttgctaagatacagaccccaccacctaagaaagaaccaccgaaagaggagacagcccaacttacaggaccagaagccggtagaaagccggcacggggtgtgggttctgggggacagggaccccctcccccacggcgtgaaagcagaaccgagaccaggtggggcccacgccctggaagttctcgccgaggaatcccacccgaggaacctggtgcccctccccgacgggcagggccaatcaaaaaaccacctccgccaactaaagtggaagagcttccccctaaaccactcgaacagggagatgagaccccgaagccccctaagcctgacccactgaaaataacaaagggcaagttaggagggcctaaggaaacccccccaaatgggaatctttcccccgctcccaggttgaggcgcgactactcctatgaaagagtgggaccaaccagctgtcggggtcgtggacgcggagaatacttcgccaggggcagggggtttcgaggtacctacggtggaagggggcgaggagcacgtagtcgagaatttaggagctatcgtgagtttaggggagacgatggaaggggtggcggtaccggaggcccaaatcaccccccagccccacgcggacgaactgcgtccgaaactcgcagtgaaggctccgagtacgaggagatcccgaaacgcaggcgccagaggggctccgagactggaagcgagactcacgagtcagacctggccccatctgacaaggaagccccaactcctaaggagggcacgctgacccaagtaccattggcgccacctccgccaggggctcctccctctcctgctcctgccaggtttacagcaagaggaggtagggtgttcacacctagaggcgtgccaagcaggcgcggtcggggtggcggacgcccaccaccccaagtctgtccaggatggagccctccggcaaagtctcttgcccctaaaaagccccctacaggcccactccctccttcaaaggaacccctaaaggagaaattaattcccggacctctcagcccagtcgcccgtgggggaagtaatggaggatctaacgtgggaatggaagatggcgagcgccctcgacgtagacgccacggtagagcccaacagcaggataagcctccccgatttcgcaggctgaaacaggagagggagaatgccgctagaggtagtgaaggaaagccctctttgacgctgcccgcatctgcgccaggtccagaagaagcccttacgaccgtgacagtggcacctgccccacgcagggcagccgctaaatcaccggacctctccaatcaaaacagtgaccaggctaacgaggaatgggagaccgcctcagaaagtagtgacttcacttctgagcgccgtggtgacaaagaagcccctcctcccgttctcctaactccgaaagctgtaggcactcccggagggggaggagggggagctgttcctggaatttcggccatgtccagaggcgatctatctcagcgagccaaggatttgtccaagcggtcttttagctcccagagaccgggtatggagcgacagaatcggagaccgggaccagggggtaaggcgggtagcagtggctcttcctccggagggggtggtggtgggccaggcggacggactggtcccggtaggggtgataagcgcagctggccatccccgaagaatcggagccgtcctcccgaggaacgcccaccaggccttccgctccccccacctcccccttcctcctctgcagtgtttaggttggatcaggtgattcatagcaaccctgcgggaattcaacaggccttggcccagttgtcttctagacagggctcggtgaccgctcccggtgggcatccaagacataaacctggattgccgcaggcaccgcagggcccttctcccaggccaccgacccgatatgagcctcagagggtgaacagcggactcagctctgacccccactttgaggagcctgggccaatggtcaggggcgtggggggaacaccccgagactccgccggagtttcaccattcccccctaagcgcagagagagaccaccaaggaaaccggaactattgcaggaggaaagccttccaccacctcactcctccggattccttggctcaaagcctgaggggccaggacctcaggccgagtccagagataccgggacagaagctttaacgcctcacatttggaatcgactgcacacagccacctcccgaaagtcctaccgaccttcatctatggaaccatggatggaaccgctgagtcccttcgaggacgtcgcaggtaccgagatgtctcagtcagacagcggcgtagatctgtctggggattcacaggtgagttctggcccatgcagccaacggtcaagtcccgatggaggcctgaaaggagctgccgagggacctcccaaaaggcctggtgggtcaagtccactgaacgccgtcccttgtgaagggcctccagggtctgaaccccctcgcaggccgcctccagccccacatgatggggatagaaaagagctgccacgtgagcagcctctgcccccaggaccaattggaacggagcggtcccagcgaactgataggggcactgaacctgggccaattcggccatctcacagaccaggcccaccagtgcagtttgggacaagtgacaaagatagcgatttacgcttggtggttggagattccctaaaggccgagaaggagctcacagcatccgtgaccgaggctatcccagtctctcgtgattgggagcttttgccgagcgcggcagcatccgccgagccccagtcaaaaaacctggactctggccattgtgttcctgagccatcatcaagtgggcagagactatatcccgaagtgttttacgggagcgcgggtcccagcagctcgcagatatccggtggagcaatggatagtcagttgcatcccaactccggcggttttcggcctggtactccatccctgcatccttatcgcagtcagccactctacctgcccccaggccctgcacctccgagcgccctgctcagcgggctggctctgaagggtcagtttttggacttcagcactatgcaagctacggagctagggaaactccctgccggtggggtgttgtacccaccaccaagcttcctgtattccccagcattttgcccaagccctctgccggacaccagccttttgcaagtcaggcaggacctgcccagcccatcagacttctactcgacacccctccaaccgggtgggcagtccgggtttctgccttcaggagcccctgcccagcagatgctgctccccatggttgattcccaattacccgtggtcaactttggctccctgccacccgctccaccccctgccccacctccactgagtctgctgcccgtcggcccagcactccagcctccatccctggcggtgcgccctccccctgctccagcaacaagagtgcttccctctcctgcccgtcctttcccagccagtttaggcagggcagaactgcaccctgttgagctgaagccttttcaggactatcaaaaattgtcaagcaacctcgggggaccaggatcatccagaaccccgccaacaggcagaagttttagcgggcttaacagcagactcaaagccacgccatctacctacagcggcgtgttcagaacccagagggtggacttatatcagcaagcctcaccacctgacgccctgaggtggatacctaagccgtgggagcgcactggtcctccacccagggagggccctagtcgcagggctgaggaacccggtagcagaggggataaagagccgggactccctcccccaaggta

SEQ ID NO: 232819 - DNA, 6449 bp, Artificial Sequence
  derived and/or modified sequence
atgtccgatcggagtggaccaactgctaagggtaaagatggaaaaaaatacagtagcctaaatctcttcgacacctacaagggaaaatcacttgagattcagaagccagccgttgctcccagacacggcttgcaaagtctggggaaggtggcaatcgcacggaggatgcccccacccgcaaatttaccgagtttgaaggctgaaaacaaaggcaatgacccaaacgtgtcactggtgccaaaggacggaacaggctgggctagtaaacaggagcagagcgatcccaagagcagcgatgcatctacagcccaaccacctgagagtcagccactccctgcgtctcagacacctgcatcaaaccagccaaaacgaccgccagcggctccagagaatacccccctggtgccttctggcgtgaaaagctgggcccaggcgagcgttacacatggagctcatggggatggtggcagggctagctcccttctgtctaggtttagtcgcgaagagtttccaactctgcaggccgcaggagaccaagataaggcagctaaggagcgcgaaagcgcagagcagtccagtggaccgggaccttccttacgtccccaaaacagtaccacttggcgggacggagggggacgcggaccagacgagctagagggccctgactcaaaactgcatcacggtcacgatccacgcggtggacttcagccatccggaccccctcagtttccaccgtacagagggatgatgcctccttttatgtatccaccttacttgcccttcccgccaccctatgggccacagggcccttaccggtatcctactcctgatggaccaagccggttccctagggtcgccggaccgagaggtagcggcccaccaatgcgcttagtcgaaccggtggggcgtcctagtatcctaaaggaagacaacctcaaggagtttgatcagctggaccaggaaaacgacgacggctgggcaggcgcacatgaggaggtcgattacactgaaaagctgaagttctccgatgaggaggatggcagagatagcgatgaagagggggcagagggacaccgtgatagtcagtctgcttccggagaggaaaggccacctgaggcagacgggaagaaagggaactccccaaacagtgagcctcctactcccaagaccgcttgggccgagacgagcagacccccagagaccgagccaggaccacctgcccctaagccacccctgccgcctccccaccgcggacccgctggcaattggggaccccctggcgactacccagatcgaggagggcctccctgcaagcctccggcacccgaggatgaagatgaggcctggcgacagaggaggaagcagtctagttcagaaatcagcctggctgtagagcgcgcacgtcgcagaagagaggaggaggagcgacgtatgcaggaggaaaggcgggctgcgtgtgccgagaagctaaagagattagacgagaagttcggtgctcctgataagcggctgaaagctgaaccggctgcccctcccgcagcccctagtacgccagcaccacctcctgccgtgccgaaggaactgcctgccccaccagcccctccaccagccagtgctcctactccggagaccgaaccggaagaacccgctcaggcccctcctgcacagagcactcccacccctggagtagcagcagctccaaccctggttagcgggggtgggtccacatcgagcaccagcagcgggagctttgaggcttccccagtggaacctcagctgccctctaaggagggccctgaacccccagaggaggtgccacccccaacgacccctccagtgcctaaagtggaaccaaagggggatggtataggaccaacaagacagccgccatcccagggactgggataccccaagtaccagaagtccctgccgcctcgtttccagcgacagcagcaagaacagctgctgaaacagcagcagcagcaccagtggcagcagcaccagcaggggagcgcgccaccaacacctgtacctccttccccgccacagccagtcacgctgggggcagttcctgcccctcaggcacccccacccccacctaaggctctataccccggagccctcggtcgtccaccaccgatgccccctatgaattttgacccgagatggatgatgatccccccttacgttgaccctcggttactccagggcaggcctcccctggatttttaccctccaggtgtgcatccgagtggtctggtgcccagagaaagatccgattccggcggtagttcaagtgaaccattcgatcgtcacgcacccgcaatgttgcgagagcgcggtacgcccccagtggatccaaagctcgcctgggtgggagatgtatttaccgctacaccagcagagcctaggcccctcactagcccccttcggcaggcagccgatgaggacgacaagggtatgcggagcgagacccctccagtacccccaccacccccatatctggcaagctatccaggcttcccagaaaacggagcccctggcccacccatttccaggttccccctcgaagaacccggaccaagacctctaccctggcccccaggttctgacgaggtggccaaaatacagacacctccaccgaaaaaagagccccctaaagaggagactgcacagctaaccgggccagaggccggaaggaaacccgcaagaggcgttgggtctggtggacaaggtccacctcctcccaggcgcgagtcccgcacagagacgaggtggggaccaaggcctggctctagtcgacggggaataccaccagaggagcccggagctccgcctcgcagagctggacccataaaaaaacctccaccccctactaaggttgaggagctccctccaaaacccctggaacagggagatgagactcctaagccgcctaagcccgaccctcttaagatcacgaaagggaaattgggagggcctaaggaaactcctccaaacggcaatctgtcccctgccccaaggttgcgaagggactacagttatgagagagtcggtcccacatcatgcagagggaggggcagaggcgaatactttgcgagaggccgaggcttccgaggcacatatggtggccgtgggcgtggagccgcagggaacagcgccgtgactgaaagctttgaagagatgatgggcgtcgaggtagggcagggcgatcagaccacccttcttctgcctgaggcagcccttccagctcgacatggagctagggtccagagcatgcgcaagagcccatcaggggcaggatctggcgctcagaagcaggccgctcggcctatgcgcgttatctggctcctgcagacgagaagactgccacacccaaggagggagcactccccaaggtcgaggtcccccaccactaggtcacccacattcccagcgccagcgagatttaccccaggcgtgggagagtccagcttgcccgaaggcatctctcccggtccccgtcggcgtgagcccccacaggtgtgccctgggtggtcacctccagcaaaatcacttgcacctaaaaagcccccaacgggacccttgccaccctctaaggagccactgaaggagaaactgatcccgggtccgctgtctcctgtggcacgagggggatccaatgggggtagcaatgtgggaatggaggacggagagaggccccgtcgcaggcggcacgggagggcccagcagcaagataagcctccaagattcagacgtctcaaacaagaacgtgaaaatgctgctcgcggttctgagggtaagcccagcttaacgctgcccgcaagcgctccaggtccagaagaggccctaaccacagtgacagtcgcccctgccccacggagagcagccgcaaagtcacctgatctatctaaccagaactccgaccaagctaatgaagaatgggaaactgcctctgagagctccgatttcacaagcgagcgcaggggcgacaaagaggcacccccaccagtcctgctgactcccaaagcggtgggcacccccggtggcggaggtggaggggctgtgccaggaatttcggctatgagccgaggcgacctcagtcagcgcgctaaggatctctccaaacgctccttcagcagccagcgaccgggaatggagcgacagaatcggaggcccggtcccggaggaaaggccggtagttctgggtcatcatccggcggtggtggaggcggaccagggggtcggaccggccctggcaggggcgataaaaggagttggccaagccctaagaaccgaagcaggcctcccgaggagagacctccaggcttaccgctgccaccacctccgccatccagctccgccgtatttcggttagaccaggtgatacacagcaaccccgctgggattcagcaagcactggctcagctgtccagtcgacaggggtctgtcacggcaccaggaggccacccgcgtcataaaccaggcttacctcaggcgcctcagggtcccagccctagacctccaacgcgatatgagcctcagagagtgaacagcgggctgtcctctgaccctcacttcgaggaaccaggcccaatggttagaggcgttggcggtacacctcgtgactccgcgggtgtttctcccttcccccctaagagacgcgaaaggcctccgcgaaaacctgagcttcttcaggaggagagtctcccacctcctcatagctccggcttcctgggcagcaaaccggaagggcctggaccacaggccgaatcacgagacactggaactgaggcactgacgccccatatctggaaccgtctacacacggcaacaagccggaagagttaccgcccatcttcaatggaaccgtggatggaacctttgagccctttcgaagatgtagccggtacagaaatgagccagagcgattcaggcgttgacctgtctggagactcccaagtctcttctgggccatgctctcagcgatcttccccagatggaggccttaagggcgctgcagagggacccccaaagcgcccaggcggaagcagcccattgaacgctgttccatgtgaaggaccaccaggaagtgagccaccgcgaagacctcctccagccccacacgacggtgatcgcaaagaacttccaagagagcagccgctgccgcctggcccaatcgggaccgagagatcccaacggaccgacagaggtactgagccaggccctatccgcccttcccatcgccctggccctccagtacagttcggcacatcagacaaagacagcgacttacgactcgtggtgggcgacagcctgaaggccgagaaggagttgacggcttcagttacggaagccatccctgtgagtagggactgggagctgctgccaagtgcggctgccagtgccgaaccacagtctaaaaacctcgatagtggtcactgtgtgcccgagcccagctcatcaggccagaggttatacccagaggtgttttacggcagcgccggaccaagttccagtcagattagcggcggtcatggcttgtcgattacttccaagcagtggcgcaggcctgggaccccatcccttcacccctatcggtcacagccactgtatttgccccctgggccagcgcctcccagtgccctattatctgggctggccctcaagggccagtttctcgactttagtactatgcaagcaaccgagctgggtaagctgcccgctggtggtgttctctatcctccgcctagctttttatattctcccgctttctgcccttcccccctccccgatacatcactcctgcaagttcggcaggacctgccctcaccttcggatttctactcaacacccctccagcccggtgggcagagcggcttcctgccctctggtgccccagcccagcaaatgctgcttcctatggtcgacagccagctgccagtggtaaactttggctcgctccctccagccccacccccagccccaccgccactgtcactgctccctgtcggtcctgcactgcagcctccctctcttgccgttaggccccctccggctccagccacgagggtgttgccaagccccgcacggccattcccagcaagcctgggccgtgcagaactgcacccagtcgagcttaagccttttcaggactaccagaagctttcatcaaatctcgggggacccggtagctctaggacaccccctaccggacgatcctttagcggactgaactcacggctgaaggctactccttcaacatattctggcgtcttccggacccagcgtgtggacctctaccagcaggcctcaccccctgatgcgttgcgctggatcccaaagccctgggaaaggactggaccaccacctagagagggcccatctcggagggcagaggagccgggttcccgcggtgataaggagcccggtttacctcccccacggta

SEQ ID NO: 232820 - DNA, 6416 bp, Artificial Sequence
  derived and/or modified sequence
atgtcagatcggtccggccctaccgcaaagggaaaggatggaaaaaaatatagctccttaaatctattcgatacctacaaaggtaaatccctggagattcagaagccggcagttgccccaaggcacggattacagtccttgggaaaagtggctatcgcaaggcggatgccacccccagccaatttgccatcgctgaaagctgagaataaggggaatgatcccaatgtctctttagtgcccaaagacggtactggttgggcatcaaagcaggagcaatctgatccaaagtcttccgacgcaagcactgcccaacccccagagtcacagccccttcccgcttcccagacacccgcatccaaccagcccaagaggccgcctgccgctccagaaaataccccccttgtgccttccggggtgaagtcatgggcccaggcttccgtgacacatggcgcacatggtgatggcggtcgggcttcatctctcctgagccgatttagccgggaggagttcccaacacttcaggcggcaggtgatcaagataaagctgcgaaggagagagagagtgcagaacaaagctctggacccggtccctctctaagaccacaaaatagcactacttggagggacggcggtggacgcggacctgatgagctcgagggcccagactctaagttgcaccatggccacgatcccagggggggactacagccctccggacccccacagttcccaccctacaggggaatgatgccaccgtttatgtatccaccctacctcccctttcctcctccttatggccctcaaggcccatatcggtaccccacacctgacggtcccagccggtttccaagggtggctggccctagagggagcgggcctccgatgaggctggtggaaccagtaggccgtccatcaattctgaaagaagacaatctgaaggagtttgaccagcttgatcaggagaacgacgatgggtgggcaggcgcacatgaagaggtcgattacacagagaaactgaaatttagcgacgaggaagacgggagggattccgacgaggaaggggcagagggtcatcgagactcccagtcggcttccggtgaagagcggcctcccgaagccgatggcaagaagggcaattccccaaattctgagccgccaacccctaagacagcctgggccgagacctcgcgcccacctgaaactgagcccggtccacccgctccaaagcccccactgccccctcccggagactatcctgataggggagggccaccatgtaaaccacccgcacctgaggacgaggatgaagcctggcgccaaaggaggaagcagagttcctccgagattagtctggccgtcgagagggcccgtcgtcggagggaggaggaggagcgaagaatgcaggaggaaagaagggccgcatgtgcggagaagttgaagcggctggatgagaaattcggcgctcccgacaaaagactaaaggccgaaccagcagcgcctcccgcagctcccagtacgccggctccgccacccgctgtgcctaaagagctgccagcccctcccgcacctcccccagcgtctgcccctacgcctgaaaccgaacccgaggaacctgcacaagcacctccagcacagagcacccctactcccggtgttgctgccgcacctacactagtgtcaggaggagggagtactagtagcacctccagtggctcattcgaagcatcccccgtcgagcctcagctgcctagcaaggaaggacctgagccaccagaagaagtgcccccacccaccaccccgcctgttccaaaggtggagcctaaaggcgacggaatagggcctaccaggcagccaccatctcagggcctgggatacccgaagtaccagaagagcctcccgccacgctttcaaaggcagcagcaggaacagctcctgaagcaacagcaacagcatcagtggcagcagcaccaacaaggcagcgcccctccaacccccgtcccaccgtcacctccacagccagttaccttgggggcagttcccgctcctcaggcacctccacctcctcctaaggccctctacccgggagcccttggacgccctccccctatgcccccaatgaattttgatcctaggtggatgatgatcccaccctatgttgacccgcgactcttgcagggacgccctcctcttgacttctatcctccaggcgtccaccctagcggcctggtgccccgagagaggagtgatagcggcggaagctcatcggaacctttcgacaggcatgcccctgccatgttacgagagcggggtacaccaccagtcgatccaaaactggcatgggttggcgacgtcttcaccgctacacccgcagagccaagaccactaaccagtcctttgaggcaggcagccgacgaggatgataaagggatgagatcggagacacctcctgtgcctcctcctccaccttatctggcctcttatccagggttccctgaaaatggggctccaggacctcctatcagccgcttccccctggaggagccagggcctcgtccactcccatggccacctggaagcgacgaggtagccaagatccaaacaccacctcctaagaaagaacccccaaaggaggaaacagcccagttgacagggcctgaggcaggaagaaagcctgccagaggagtaggtagcggtggacagggcccacctccaccaaggcgcgaatcgagaactgagaccagatgggggccaagacccggttccagtagacggggtatccctccagaagagcccggagcaccacctcgtagagccggtcccataaaaaagccacctccacctaccaaagtggaggagctgccacctaaaccgttggagcagggagatgagactcccaaacctccgaaacctgacccactgaaaatcaccaagggaaagttaggaggacccaaagagacgcccccaaatggcaacctgtctcccgcaccccgtctccgtagagattactcttacgaacgcgtgggcccaacttcctgtcgcggacggggacggggagagtacttcgccagggggagggggtttcgcggtacctatggcggtaggggacgaggagctgcaggtaactcagccgtaaccgagtctttcgaagagatgatgggcgtggaagtcgggcagggagaccagacgactctcctactgcctgaggctgcccttcctgccaggcacggggctcgggtgcaatcgatgcggaaaagtccgtccggcgcaggcagtggcgctcagaaacaggccgcacggcctatgagagtgatatggctgcttcagacgagacggctcccacacccgagaagagagcacagcccgagatctaggtcccctacgacaagatctccaacgtttccggcaccggcacgattcacccctggggtgggggaatctagccttcctgagggaatatctccaggtccacggcgtcgggaaccacctcaggtttgtccaggatggtcgccgcctgccaagtcactggcccctaagaagcctcccactggacccctgcccccttcgaaggaaccgttgaaggaaaaactcatcccgggaccgctgtctcccgtcgcccgagggggtagcaacggtgggtcaaacgtggggatggaggacggggaaagaccccgtagacggagacatggcagggctcagcaacaggacaagccacccagattccgtcggcttaagcaggagcgagaaaacgctgcgagaggtagtgaagggaaaccctccctgacactccccgcttccgccccaggacccgaagaggctttgaccacagtgacagtggcgccagcacctcgtagggctgcggctaaatctccagacctaagtaaccagaatagcgaccaagcgaatgaggagtgggagacagccagtgagagttctgattttaccagcgagcgccgtggggataaggaggctccaccaccagtcttactcacacctaaggcggttggaacgccaggaggcggaggcggaggcgcagtgccagggattagcgcaatgtctcgcggagacctgagccagagggcgaaagacctcagcaaaaggagcttttccagtcaacgccctgggatggaacgtcagaaccgcagacctggacctgggggtaaagccggttcatcaggttcaagtagtggaggcggaggtgggggacccggaggcaggacggggccagggcgtggagataagcggtcttggccttccccaaaaaacaggagcagaccccctgaggagaggcctcccggactccccctgcccccaccacctccaagcagtagtgcagtgtttcgacttgaccaggtcattcacagtaatccagcgggtattcagcaagcattggcccagttgagctccaggcagggcagcgtgaccgcccctgggggacaccccagacacaagcccggacttcctcaagctcctcagggcccatctcccaggcctcccacgaggtatgaaccccaacgggtgaatagcggtctttcatctgatccccacttcgaggagcccggaccgatggtgagaggtgtcggcggaacgcctcgagactccgccggagtctcaccctttcctcctaagcgacgggagaggccgcctcgtaagcctgaattgctgcaggaagagtcactgcctccaccccattcctccggcttcctgggctcgaaacctgaggggcctggcccacaggcggaaagccgcgatactggaacggaggccttgactccacatatttggaaccgactccatacagctacttcgcgtaagagctatcggccatcatccatggagccctggatggagcctctctccccgttcgaggacgtggccggaactgagatgtctcaatcagattctggggtggatttatcgggtgactctcaagtgtccagcggtccgtgctctcaacgatcatcccctgatggcggattgaagggtgctgcagaaggacctcctaaaaggccaggtgggtccagtcccttgaacgccgttccttgtgaaggcccacctggcagcgaaccccctcgcagacctcctcccgcaccacatgacggcgatagaaaagagcttcctagagagcagcctctgcccccagggccaataggtactgaaaggagccagagaacagaccggggaaccgaacccggtcccatcaggcccagccaccggcctggcccaccagtccaattcggaacatccgacaaggatagtgatcttaggttagtggtgggggattctttgaaggccgagaaggagctcaccgcaagcgttacagaggcaatccccgtcagccgggattgggagttgcttccctcagccgcagcctccgccgagccacaatcaaagaacctggactccggacactgtgtgccagaacccagcagctccggacagagattataccctgaagtattttacggaagcgctggaccgagtagttctcagatttcaggcggacatggcctgagcatcacttccaagcagtggcggaggccgggaactccgtcattgcacccatacagaagccagccactatacttaccgcctggccctgcacctcccagcgctctgttatccgggctggcactgaaggggcagttcctcgacttctcaacgatgcaggccaccgagctgggaaagctacccgctggaggcgtcctctacccaccgccatctttcctttacagccctgccttttgcccctcacctctgcccgacacatctctgctccaggttcgtcaagatctcccatccccttccgacttctattctactccactgcagcctggcggacagtcaggctttctgccctcgggagctccagcccagcagatgcttctccctatggtcgactcccaactgcctgtggttaactttggcagtctccctcctgcccctccccctgcccctcccccactgagtctgcttccagttggaccagctctccagccaccaagcctggcagtccggccaccccctgccccagccacgcgggttcttccctctccagccaggccattccctgcctctctgggacgggcagaattacaccccgttgagctaaaacctttccaggactaccagaagttgtcgagcaaccttggaggtcccggatctagtcggactcccccaactggaagatctttcagtggacttaatagcagactgaaggccactccctccacctactcgggagtgtttaggactcagcgggtcgacttgtaccagcaggcgtctcccccagacgcgcttagatggattcccaagccctgggagaggacaggcccaccaccgcgtgaaggacctagtcgtagggctgaggagcctggatcccgaggggataaagagcccggactgcctccccctcgtta

SEQ ID NO: 232821 - DNA, 6861 bp, Artificial Sequence
  derived and/or modified sequence
gggctcagccgcggagtgagcgagggagacgggaggagccgaacccggcgccatccgccgccatcctcccccgccccaccgccatcccgtcccggggagcccctaggcccgggtcccggatccccgcgcacccggccaggctctggcacgttttgggggaggtgcctgcaggacccaacatactcaatgagcttccagcgcaatgtccgatcgctcggggccgactgccaagggaaaggatggaaagaagtattcctcgctcaacctgtttgatacgtataagggcaagtccttagagatccagaaacccgctgttgcccctcgccatggcctgcagagtctcgggaaagttgccattgcccggcgtatgccacctccagccaaccttccaagcctgaaagccgagaacaaaggcaatgaccccaatgtctcactagtgccaaaagacggaacaggatgggcaagcaaacaggagcagtccgaccccaagagttccgatgcctcaaccgctcagccgccggaatcgcagccactgccggcttcacagacgcctgcctccaaccagccgaaacgacccccagcagcccccgagaacactcctttggttccaagcggggtaaagtcctgggcacaagccagcgtcacccatggagcacatggagatggtggaagggcatcaagcctactgtcacgattctctcgagaggaatttccgaccctgcaggcggctggcgaccaggacaaggctgccaaggaaagggagtctgccgaacagtcgtctgggcccggaccaagcctccgcccccaaaattctacaacttggagggacggaggtgggcgtggccctgatgagctggagggcccggactccaaacttcatcatggtcatgatccccggggtgggctacagccttcaggcccaccccagttccctccctaccgcggaatgatgccgcctttcatgtatcccccatatctcccgttccctccgccctatggaccccaggggccttaccgataccccactcctgatgggcccagccgttttccccgtgtggcgggcccccgaggctcagggccaccaatgcgcttagtagagcctgtgggtcgtccctctattctcaaagaggataatctcaaagagtttgatcagttggatcaggagaatgatgatggttgggcaggggcccatgaagaggttgactacactgaaaagctcaagttcagcgatgaggaagatgggcgagactctgatgaggagggtgctgagggccacagggattcccaatcagcttctggtgaggaacggccccctgaagcagatggcaaaaagggcaactcccccaacagcgaaccgcccactcctaagacggcctgggcagaaacctctcggcctccagagacagagccgggacctcctgccccaaagcctcccctacccccacctcaccggggccccgccgggaactggggcccccctggggactacccagatcgtgggggtcctccctgcaagcccccagcacctgaagatgaggatgaggcatggcggcagcgacgaaagcagtcgtcatctgagatttccctggcagtggagcgggcccggcgacggcgagaagaagaggagcggcgcatgcaagaagagcgccgggcagcctgtgctgagaagctcaagcgactcgatgaaaagtttggggcacctgacaagcggctcaaagcagagcctgctgccccacctgctgccccttctaccccagctccaccacctgcagtccctaaagaactccctgcacctccagctccacctccagcatcagccccaacaccagagacagaacctgaagagccagcacaggcccctcctgcccaatctactcctactccaggtgtggctgcggctcccactctggtgagtggtggtggcagtaccagtagcaccagcagtggcagcttcgaagccagcccagtggaaccacaactgccctcaaaagagggtcctgaaccaccagaagaggttcctcctcctaccacacccccagttccaaaggtggaacccaagggtgatgggattggtcccacccgccagccccctagtcagggcttgggctaccccaaatatcagaagtcgttgcctcctcgtttccagcggcagcagcaggagcagctcctgaagcagcagcagcagcaccagtggcagcagcatcaacagggctctgcccctcctaccccagtgcccccatcaccaccacagcctgtgaccctgggggctgtgccagctccacaggctccacccccgccccccaaggccctgtacccaggtgctctgggccggcccccacccatgcccccaatgaactttgatccccgatggatgatgattcctccttatgtggacccccggctcctccagggtcgtccccctctagacttctaccctcctggtgtgcatccctctggcctagttccccgagagcgttcagacagtgggggctcaagctcagagccatttgaccgtcatgcacctgctatgttacgggaacggggcactccaccggtggatccaaagttggcctgggtaggagatgtcttcaccgccacacccgctgaaccccgcccacttacctcacctctgcgccaggctgcggatgaggatgacaaggggatgaggagcgagactcctccagtacctcccccaccaccctatctggccagttatccaggctttcctgagaatggagcccctgggcccccaatctctcgctttcctctggaggaaccagggccccgtccactcccctggcccccaggcagtgatgaagtggccaagatacaaactccaccacccaagaaggagccccctaaggaggagactgcacagctgacggggccagaagcaggccgaaagcctgcccgcggagtcgggagtggaggccagggccccccaccaccacgcagagagagtcgcacagagacccgctggggccctcgtccagggagcagtcgtcgtggaatccctccagaggagccaggggccccaccccgccgggctgggcctataaagaaacctccaccacctacaaaagtagaagagctgcctcccaagcccctcgaacagggggatgaaacccccaaacccccaaagccagacccactcaagataaccaaggggaagctagggggccccaaggagaccccacccaatggaaatctttcccctgccccaaggcttcggagggactattcgtatgaaagagtgggtcctacctcttgccggggtcggggccgaggcgagtattttgccagagggaggggttttcgggggacctatgggggacgagggcggggagcccgaagccgggaattccgcagttaccgagagtttcgaggagatgatgggcgtggaggtgggacagggggaccaaaccaccctcctgctccccgaggccgcactgccagcgagacacggagcgagggttcagagtatgaggaaatccccaagcggcgccggcagcggggctcagaaacaggcagcgagacccatgagagtgatctggctccttcagacaaggaggctcccacacccaaggagggaacactcacccaggtccctctcgctcccccaccaccaggagccccaccttcaccagccccagcccgcttcactgcccggggtgggcgagtcttcactcccagaggggtgccatctcgccggggccgaggaggagggaggccccctcctcaagtttgcccaggctggagccctccagccaagtctctggctcccaagaaacctcccacaggccctttgccaccaagtaaggagcctttgaaagagaagttgatcccagggcctctgtcccctgtggcgcgcggaggcagcaatggaggtagcaatgtgggcatggaagatggggagcgaccccgaaggaggcgacatgggagggctcagcagcaggataaaccgcctcgtttccggaggctgaagcaggaacgggagaatgccgcaagggggtctgagggcaagccctccctaacccttccagcctccgctcctggacctgaggaggccctcacaacagtcacagtggccccagcacctcgccgggcagctgccaagtctcctgatctgtcaaaccagaactcagaccaagccaatgaggaatgggagactgcatcagagagcagtgacttcaccagtgagcgccgaggggacaaagaggcacccccaccagtactgctgacacccaaggctgtgggaactcctgggggaggtggaggtggagccgtaccaggtatttcagccatgtcccgcggagatctgagccagagagccaaggatttgagtaaacggagcttctcaagtcagcggccaggcatggaacggcagaatcggcgccctggcccagggggcaaggctggcagcagtggcagcagcagtggaggaggcggtgggggtcctggaggaaggaccgggccaggacgaggcgacaagaggagctggccctctcccaagaaccgaagtcgtcctccagaggagcgtcccccggggcttcccctgcctcccccacctcccagcagttctgctgtcttccgcctggaccaagttatccacagcaaccctgctggcatccaacaggctctggcccagcttagtagccgtcaagggagtgtaactgcaccagggggtcatccaaggcacaagcctgggcttccccaagcccctcagggcccctctcctaggcccccaacccgatacgagccccagagggtcaacagcggcctcagttctgacccccactttgaggagccggggccaatggtgagaggggtgggtgggactcctcgggactctgccggggttagtccctttccccctaaacgtcgggagcggcctcccagaaaaccagagctgctacaggaggaatctttgccacctcctcatagctctggattcttgggctctaagcctgagggcccaggccctcaggcagagtccagagatacaggcacagaggccctgacccctcacatctggaaccgtttacatactgccactagccgaaagagttaccggcccagctccatggagccttggatggagcccctgagtccttttgaggatgtggctggcacagaaatgagtcagtctgacagtggggtggacctgagtggggattctcaggtgtcatcaggtccctgcagccagcgaagttcccctgatggaggactcaagggggcagcagagggaccccccaagaggcctggaggctcctcacccctgaatgctgttccttgtgagggtccacctggctctgaacctcctaggagaccaccacctgccccccacgatggggacagaaaggagctgccccgggagcagcctctgccccctggccccattggcacagaacgatcacagcgtacagaccgaggcacagagcctggccccattcggccatcccatcgacctggtcccccagtccagtttggcactagtgacaaggactcagacttacgcctagtggtaggagacagcttgaaagcagagaaggagctaacagcatcagtcactgaggccattcctgtatcacgagactgggagctgcttcccagtgctgctgcctctgctgagccacaatccaagaacctggattctgggcactgtgtcccggagcccagctcctcaggccagcgcctgtatcctgaggttttctatggcagtgctgggccttccagttctcagatctctgggggagccatggactctcaattacatccaaacagtggaggcttccgccctgggacaccctcactgcacccttacagatcacagcccctatacctaccccccggcccagcccctccctcagcactgctctctgggttagctctcaagggccagtttctggatttctccacaatgcaagctacagagctggggaagttgccggctggaggagttctctaccctccaccttccttcctctactctccggctttctgccccagtcctttgcctgacacatcgttgcttcaggtacgccaggatctgccatccccttcggatttttattctactcctctgcagcctggtggccaaagtggctttctcccttcaggggctcctgcccagcagatgcttctacccatggtagactcacagctgcctgtggtgaactttggctccctgccgccagcaccacctcctgccccacctcccctttctctgttacctgtgggccctgctctgcagccccccagcctggctgtgcggcccccacctgctcctgctactcgggtgctgccttcacctgccaggcccttccccgctagcttggggcgagcagagctgcatccagtggaactaaagccgttccaggattatcaaaaactgagcagcaaccttgggggacctggatcatcacggactcccccaactggaaggtccttctctggcctcaattcccgtctcaaggccacgccttccacctacagtggagtcttccgcacccagcgcgtcgacctttaccagcaggcctccccaccagatgccctgcgctggatacctaagccttgggagcggacagggccgccacctcgagaagggccctcccgacgggcagaggagcctgggtcccgaggggacaaggagcctgggttgcccccaccccgctgagggagttcctcttgccccctacccccggggcttgtatatagattataaatatataagggggaaaggggtgggcggggaggggttctggggctggggcctcacttcccctcctcccccttcccctggtcccctgtccctggggctgtttgttaaaaaagagtaataaaaggatttaaaaaaaaaaa

SEQ ID NO: 232822 - DNA, 4303 bp, Artificial Sequence
  derived and/or modified sequence
ttcttcaggcctagttccccgagagcgttcagacagtgggggctcaagctcagagccatttgaccgtcatgcacctgctatgttacgggaacggggcactccaccggtggatccaaagttggcctgggtaggagatgtcttcaccgccacacccgctgaaccccgcccacttacctcacctctgcgccaggctgcggatgaggatgacaaggggatgaggagcgagactcctccagtacctcccccaccaccctatctggccagttatccaggctttcctgagaatggagcccctgggcccccaatctctcgctttcctctggaggaaccagggccccgtccactcccctggcccccaggcagtgatgaagtggccaagatacaaactccaccacccaagaaggagccccctaaggaggagactgcacagctgacggggccagaagcaggccgaaagcctgcccgcggagtcgggagtggaggccagggccccccaccaccacgcagagagagtcgcacagagacccgctggggccctcgtccagggagcagtcgtcgtggaatccctccagaggagccaggggccccaccccgccgggctgggcctataaagaaacctccaccacctacaaaagtagaagagctgcctcccaagcccctcgaacagggggatgaaacccccaaacccccaaagccagacccactcaagataaccaaggggaagctagggggccccaaggagaccccacccaatggaaatctttcccctgccccaaggcttcggagggactattcgtatgaaagagtgggtcctacctcttgccggggtcggggccgaggcgagtattttgccagagggaggggttttcgggggacctatgggggacgagggcggggagcccgaagccgggaattccgcagttaccgagagtttcgaggagatgatgggcgtggaggtgggacagggggaccaaaccaccctcctgctccccgaggccgcactgccagcgagacacggagcgagggttcagagtatgaggaaatccccaagcggcgccggcagcggggctcagaaacaggcagcgagacccatgagagtgatctggctccttcagacaaggaggctcccacacccaaggagggaacactcacccaggtccctctcgctcccccaccaccaggagccccaccttcaccagccccagcccgcttcactgcccggggtgggcgagtcttcactcccagaggggtgccatctcgccggggccgaggaggagggaggccccctcctcaagtttgcccaggctggagccctccagccaagtctctggctcccaagaaacctcccacaggccctttgccaccaagtaaggagcctttgaaagagaagttgatcccagggcctctgtcccctgtggcgcgcggaggcagcaatggaggtagcaatgtgggcatggaagatggggagcgaccccgaaggaggcgacatgggagggctcagcagcaggataaaccgcctcgtttccggaggctgaagcaggaacgggagaatgccgcaagggggtctgagggcaagccctccctaacccttccagcctccgctcctggacctgaggaggccctcacaacagtcacagtggccccagcacctcgccgggcagctgccaagtctcctgatctgtcaaaccagaactcagaccaagccaatgaggaatgggagactgcatcagagagcagtgacttcaccagtgagcgccgaggggacaaagaggcacccccaccagtactgctgacacccaaggctgtgggaactcctgggggaggtggaggtggagccgtaccaggtatttcagccatgtcccgcggagatctgagccagagagccaaggatttgagtaaacggagcttctcaagtcagcggccaggcatggaacggcagaatcggcgccctggcccagggggcaaggctggcagcagtggcagcagcagtggaggaggcggtgggggtcctggaggaaggaccgggccaggacgaggcgacaagaggagctggccctctcccaagaaccgaagtcgtcctccagaggagcgtcccccggggcttcccctgcctcccccacctcccagcagttctgctgtcttccgcctggaccaagttatccacagcaaccctgctggcatccaacaggctctggcccagcttagtagccgtcaagggagtgtaactgcaccagggggtcatccaaggcacaagcctgggcttccccaagcccctcagggcccctctcctaggcccccaacccgatacgagccccagagggtcaacagcggcctcagttctgacccccactttgaggagccggggccaatggtgagaggggtgggtgggactcctcgggactctgccggggttagtccctttccccctaaacgtcgggagcggcctcccagaaaaccagagctgctacaggaggaatctttgccacctcctcatagctctggattcttgggctctaagcctgagggcccaggccctcaggcagagtccagagatacaggcacagaggccctgacccctcacatctggaaccgtttacatactgccactagccgaaagagttaccggcccagctccatggagccttggatggagcccctgagtccttttgaggatgtggctggcacagaaatgagtcagtctgacagtggggtggacctgagtggggattctcaggtgtcatcaggtccctgcagccagcgaagttcccctgatggaggactcaagggggcagcagagggaccccccaagaggcctggaggctcctcacccctgaatgctgttccttgtgagggtccacctggctctgaacctcctaggagaccaccacctgccccccacgatggggacagaaaggagctgccccgggagcagcctctgccccctggccccattggcacagaacgatcacagcgtacagaccgaggcacagagcctggccccattcggccatcccatcgacctggtcccccagtccagtttggcactagtgacaaggactcagacttacgcctagtggtaggagacagcttgaaagcagagaaggagctaacagcatcagtcactgaggccattcctgtatcacgagactgggagctgcttcccagtgctgctgcctctgctgagccacaatccaagaacctggattctgggcactgtgtcccggagcccagctcctcaggccagcgcctgtatcctgaggttttctatggcagtgctgggccttccagttctcagatctctgggggagccatggactctcaattacatccaaacagtggaggcttccgccctgggacaccctcactgcacccttacagatcacagcccctatacctaccccccggcccagcccctccctcagcactgctctctgggttagctctcaagggccagtttctggatttctccacaatgcaagctacagagctggggaagttgccggctggaggagttctctaccctccaccttccttcctctactctccggctttctgccccagtcctttgcctgacacatcgttgcttcaggtacgccaggatctgccatccccttcggatttttattctactcctctgcagcctggtggccaaagtggctttctcccttcaggggctcctgcccagcagatgcttctacccatggtagactcacagctgcctgtggtgaactttggctccctgccgccagcaccacctcctgccccacctcccctttctctgttacctgtgggccctgctctgcagccccccagcctggctgtgcggcccccacctgctcctgctactcgggtgctgccttcacctgccaggcccttccccgctagcttggggcgagcagagctgcatccagtggaactaaagccgttccaggattatcaaaaactgagcagcaaccttgggggacctggatcatcacggactcccccaactggaaggtccttctctggcctcaattcccgtctcaaggccacgccttccacctacagtggagtcttccgcacccagcgcgtcgacctttaccagcaggcctccccaccagatgccctgcgctggatacctaagccttgggagcggacagggccgccacctcgagaagggccctcccgacgggcagaggagcctgggtcccgaggggacaaggagcctgggttgcccccaccccgctgagggagttcctcctcccccttcccctggtcccctgtccctggggctgtttgttaaaaaagagtaataaaaggattt

SEQ ID NO: 232823 - DNA, 6893 bp, Artificial Sequence
  derived and/or modified sequence
cagccgcggagtgagcgagggagacgggaggagccgaacccggcgccatccgccgccatcctcccccgccccaccgccatcccgtcccggggagcccctaggcccgggtcccggatccccgcgcacccggccaggggacagagactgagacacttgctgtctggcccacaggctctggcacgttttgggggaggtgcctgcaggacccaacatactcaatgagcttccagcgcaatgtccgatcgctcggggccgactgccaagggaaaggatggaaagaagtattcctcgctcaacctgtttgatacgtataagggcaagtccttagagatccagaaacccgctgttgcccctcgccatggcctgcagagtctcgggaaagttgccattgcccggcgtatgccacctccagccaaccttccaagcctgaaagccgagaacaaaggcaatgaccccaatgtctcactagtgccaaaagacggaacaggatgggcaagcaaacaggagcagtccgaccccaagagttccgatgcctcaaccgctcagccgccggaatcgcagccactgccggcttcacagacgcctgcctccaaccagccgaaacgacccccagcagcccccgagaacactcctttggttccaagcggggtaaagtcctgggcacaagccagcgtcacccatggagcacatggagatggtggaagggcatcaagcctactgtcacgattctctcgagaggaatttccgaccctgcaggcggctggcgaccaggacaaggctgccaaggaaagggagtctgccgaacagtcgtctgggcccggaccaagcctccgcccccaaaattctacaacttggagggacggaggtgggcgtggccctgatgagctggagggcccggactccaaacttcatcatggtcatgatccccggggtgggctacagccttcaggcccaccccagttccctccctaccgcggaatgatgccgcctttcatgtatcccccatatctcccgttccctccgccctatggaccccaggggccttaccgataccccactcctgatgggcccagccgttttccccgtgtggcgggcccccgaggctcagggccaccaatgcgcttagtagagcctgtgggtcgtccctctattctcaaagaggataatctcaaagagtttgatcagttggatcaggagaatgatgatggttgggcaggggcccatgaagaggttgactacactgaaaagctcaagttcagcgatgaggaagatgggcgagactctgatgaggagggtgctgagggccacagggattcccaatcagcttctggtgaggaacggccccctgaagcagatggcaaaaagggcaactcccccaacagcgaaccgcccactcctaagacggcctgggcagaaacctctcggcctccagagacagagccgggacctcctgccccaaagcctcccctacccccacctcaccggggccccgccgggaactggggcccccctggggactacccagatcgtgggggtcctccctgcaagcccccagcacctgaagatgaggatgaggcatggcggcagcgacgaaagcagtcgtcatctgagatttccctggcagtggagcgggcccggcgacggcgagaagaagaggagcggcgcatgcaagaagagcgccgggcagcctgtgctgagaagctcaagcgactcgatgaaaagtttggggcacctgacaagcggctcaaagcagagcctgctgccccacctgctgccccttctaccccagctccaccacctgcagtccctaaagaactccctgcacctccagctccacctccagcatcagccccaacaccagagacagaacctgaagagccagcacaggcccctcctgcccaatctactcctactccaggtgtggctgcggctcccactctggtgagtggtggtggcagtaccagtagcaccagcagtggcagcttcgaagccagcccagtggaaccacaactgccctcaaaagagggtcctgaaccaccagaagaggttcctcctcctaccacacccccagttccaaaggtggaacccaagggtgatgggattggtcccacccgccagccccctagtcagggcttgggctaccccaaatatcagaagtcgttgcctcctcgtttccagcggcagcagcaggagcagctcctgaagcagcagcagcagcaccagtggcagcagcatcaacagggctctgcccctcctaccccagtgcccccatcaccaccacagcctgtgaccctgggggctgtgccagctccacaggctccacccccgccccccaaggccctgtacccaggtgctctgggccggcccccacccatgcccccaatgaactttgatccccgatggatgatgattcctccttatgtggacccccggctcctccagggtcgtccccctctagacttctaccctcctggtgtgcatccctctggcctagttccccgagagcgttcagacagtgggggctcaagctcagagccatttgaccgtcatgcacctgctatgttacgggaacggggcactccaccggtggatccaaagttggcctgggtaggagatgtcttcaccgccacacccgctgaaccccgcccacttacctcacctctgcgccaggctgcggatgaggatgacaaggggatgaggagcgagactcctccagtacctcccccaccaccctatctggccagttatccaggctttcctgagaatggagcccctgggcccccaatctctcgctttcctctggaggaaccagggccccgtccactcccctggcccccaggcagtgatgaagtggccaagatacaaactccaccacccaagaaggagccccctaaggaggagactgcacagctgacggggccagaagcaggccgaaagcctgcccgcggagtcgggagtggaggccagggccccccaccaccacgcagagagagtcgcacagagacccgctggggccctcgtccagggagcagtcgtcgtggaatccctccagaggagccaggggccccaccccgccgggctgggcctataaagaaacctccaccacctacaaaagtagaagagctgcctcccaagcccctcgaacagggggatgaaacccccaaacccccaaagccagacccactcaagataaccaaggggaagctagggggccccaaggagaccccacccaatggaaatctttcccctgccccaaggcttcggagggactattcgtatgaaagagtgggtcctacctcttgccggggtcggggccgaggcgagtattttgccagagggaggggttttcgggggacctatgggggacgagggcggggagcccgaagccgggaattccgcagttaccgagagtttcgaggagatgatgggcgtggaggtgggacagggggaccaaaccaccctcctgctccccgaggccgcactgccagcgagacacggagcgagggttcagagtatgaggaaatccccaagcggcgccggcagcggggctcagaaacaggcagcgagacccatgagagtgatctggctccttcagacaaggaggctcccacacccaaggagggaacactcacccaggtccctctcgctcccccaccaccaggagccccaccttcaccagccccagcccgcttcactgcccggggtgggcgagtcttcactcccagaggggtgccatctcgccggggccgaggaggagggaggccccctcctcaagtttgcccaggctggagccctccagccaagtctctggctcccaagaaacctcccacaggccctttgccaccaagtaaggagcctttgaaagagaagttgatcccagggcctctgtcccctgtggcgcgcggaggcagcaatggaggtagcaatgtgggcatggaagatggggagcgaccccgaaggaggcgacatgggagggctcagcagcaggataaaccgcctcgtttccggaggctgaagcaggaacgggagaatgccgcaagggggtctgagggcaagccctccctaacccttccagcctccgctcctggacctgaggaggccctcacaacagtcacagtggccccagcacctcgccgggcagctgccaagtctcctgatctgtcaaaccagaactcagaccaagccaatgaggaatgggagactgcatcagagagcagtgacttcaccagtgagcgccgaggggacaaagaggcacccccaccagtactgctgacacccaaggctgtgggaactcctgggggaggtggaggtggagccgtaccaggtatttcagccatgtcccgcggagatctgagccagagagccaaggatttgagtaaacggagcttctcaagtcagcggccaggcatggaacggcagaatcggcgccctggcccagggggcaaggctggcagcagtggcagcagcagtggaggaggcggtgggggtcctggaggaaggaccgggccaggacgaggcgacaagaggagctggccctctcccaagaaccgaagtcgtcctccagaggagcgtcccccggggcttcccctgcctcccccacctcccagcagttctgctgtcttccgcctggaccaagttatccacagcaaccctgctggcatccaacaggctctggcccagcttagtagccgtcaagggagtgtaactgcaccagggggtcatccaaggcacaagcctgggcttccccaagcccctcagggcccctctcctaggcccccaacccgatacgagccccagagggtcaacagcggcctcagttctgacccccactttgaggagccggggccaatggtgagaggggtgggtgggactcctcgggactctgccggggttagtccctttccccctaaacgtcgggagcggcctcccagaaaaccagagctgctacaggaggaatctttgccacctcctcatagctctggattcttgggctctaagcctgagggcccaggccctcaggcagagtccagagatacaggcacagaggccctgacccctcacatctggaaccgtttacatactgccactagccgaaagagttaccggcccagctccatggagccttggatggagcccctgagtccttttgaggatgtggctggcacagaaatgagtcagtctgacagtggggtggacctgagtggggattctcaggtgtcatcaggtccctgcagccagcgaagttcccctgatggaggactcaagggggcagcagagggaccccccaagaggcctggaggctcctcacccctgaatgctgttccttgtgagggtccacctggctctgaacctcctaggagaccaccacctgccccccacgatggggacagaaaggagctgccccgggagcagcctctgccccctggccccattggcacagaacgatcacagcgtacagaccgaggcacagagcctggccccattcggccatcccatcgacctggtcccccagtccagtttggcactagtgacaaggactcagacttacgcctagtggtaggagacagcttgaaagcagagaaggagctaacagcatcagtcactgaggccattcctgtatcacgagactgggagctgcttcccagtgctgctgcctctgctgagccacaatccaagaacctggattctgggcactgtgtcccggagcccagctcctcaggccagcgcctgtatcctgaggttttctatggcagtgctgggccttccagttctcagatctctgggggagccatggactctcaattacatccaaacagtggaggcttccgccctgggacaccctcactgcacccttacagatcacagcccctatacctaccccccggcccagcccctccctcagcactgctctctgggttagctctcaagggccagtttctggatttctccacaatgcaagctacagagctggggaagttgccggctggaggagttctctaccctccaccttccttcctctactctccggctttctgccccagtcctttgcctgacacatcgttgcttcaggtacgccaggatctgccatccccttcggatttttattctactcctctgcagcctggtggccaaagtggctttctcccttcaggggctcctgcccagcagatgcttctacccatggtagactcacagctgcctgtggtgaactttggctccctgccgccagcaccacctcctgccccacctcccctttctctgttacctgtgggccctgctctgcagccccccagcctggctgtgcggcccccacctgctcctgctactcgggtgctgccttcacctgccaggcccttccccgctagcttggggcgagcagagctgcatccagtggaactaaagccgttccaggattatcaaaaactgagcagcaaccttgggggacctggatcatcacggactcccccaactggaaggtccttctctggcctcaattcccgtctcaaggccacgccttccacctacagtggagtcttccgcacccagcgcgtcgacctttaccagcaggcctccccaccagatgccctgcgctggatacctaagccttgggagcggacagggccgccacctcgagaagggccctcccgacgggcagaggagcctgggtcccgaggggacaaggagcctgggttgcccccaccccgctgagggagttcctcttgccccctacccccggggcttgtatatagattataaatatataagggggaaaggggtgggcggggaggggttctggggctggggcctcacttcccctcctcccccttcccctggtcccctgtccctggggctgtttgttaaaaaagagtaataaaaggatttaaaaaaaaaaa

SEQ ID NO: 232824 - DNA, 6873 bp, Artificial Sequence
  derived and/or modified sequence
agggggtgctcccgggggcggcggttgcccggatgggccgttagtcggggctcagccgcggagtgagcgagggagacgggaggagccgaacccggcgccatccgccgccatcctcccccgccccaccgccatcccgtcccggggagcccctaggcccgggtcccggatccccgcgcacccggccaggctctggcacgttttgggggaggtgcctgcaggacccaacatactcaatgagcttccagcgcaatgtccgatcgctcggggccgactgccaagggaaaggatggaaagaagtattcctcgctcaacctgtttgatacgtataagggcaagtccttagagatccagaaacccgctgttgcccctcgccatggcctgcagagtctcgggaaagttgccattgcccggcgtatgccacctccagccaaccttccaagcctgaaagccgagaacaaaggcaatgaccccaatgtctcactagtgccaaaagacggaacaggatgggcaagcaaacaggagcagtccgaccccaagagttccgatgcctcaaccgctcagccgccggaatcgcagccactgccggcttcacagacgcctgcctccaaccagccgaaacgacccccagcagcccccgagaacactcctttggttccaagcggggtaaagtcctgggcacaagccagcgtcacccatggagcacatggagatggtggaagggcatcaagcctactgtcacgattctctcgagaggaatttccgaccctgcaggcggctggcgaccaggacaaggctgccaaggaaagggagtctgccgaacagtcgtctgggcccggaccaagcctccgcccccaaaattctacaacttggagggacggaggtgggcgtggccctgatgagctggagggcccggactccaaacttcatcatggtcatgatccccggggtgggctacagccttcaggcccaccccagttccctccctaccgcggaatgatgccgcctttcatgtatcccccatatctcccgttccctccgccctatggaccccaggggccttaccgataccccactcctgatgggcccagccgttttccccgtgtggcgggcccccgaggctcagggccaccaatgcgcttagtagagcctgtgggtcgtccctctattctcaaagaggataatctcaaagagtttgatcagttggatcaggagaatgatgatggttgggcaggggcccatgaagaggttgactacactgaaaagctcaagttcagcgatgaggaagatgggcgagactctgatgaggagggtgctgagggccacagggattcccaatcagcttctggtgaggaacggccccctgaagcagatggcaaaaagggcaactcccccaacagcgaaccgcccactcctaagacggcctgggcagaaacctctcggcctccagagacagagccgggacctcctgccccaaagcctcccctacccccacctcaccggggccccgccgggaactggggcccccctggggactacccagatcgtgggggtcctccctgcaagcccccagcacctgaagatgaggatgaggcatggcggcagcgacgaaagcagtcgtcatctgagatttccctggcagtggagcgggcccggcgacggcgagaagaagaggagcggcgcatgcaagaagagcgccgggcagcctgtgctgagaagctcaagcgactcgatgaaaagtttggggcacctgacaagcggctcaaagcagagcctgctgccccacctgctgccccttctaccccagctccaccacctgcagtccctaaagaactccctgcacctccagctccacctccagcatcagccccaacaccagagacagaacctgaagagccagcacaggcccctcctgcccaatctactcctactccaggtgtggctgcggctcccactctggtgagtggtggtggcagtaccagtagcaccagcagtggcagcttcgaagccagcccagtggaaccacaactgccctcaaaagagggtcctgaaccaccagaagaggttcctcctcctaccacacccccagttccaaaggtggaacccaagggtgatgggattggtcccacccgccagccccctagtcagggcttgggctaccccaaatatcagaagtcgttgcctcctcgtttccagcggcagcagcaggagcagctcctgaagcagcagcagcagcaccagtggcagcagcatcaacagggctctgcccctcctaccccagtgcccccatcaccaccacagcctgtgaccctgggggctgtgccagctccacaggctccacccccgccccccaaggccctgtacccaggtgctctgggccggcccccacccatgcccccaatgaactttgatccccgatggatgatgattcctccttatgtggacccccggctcctccagggtcgtccccctctagacttctaccctcctggtgtgcatccctctggcctagttccccgagagcgttcagacagtgggggctcaagctcagagccatttgaccgtcatgcacctgctatgttacgggaacggggcactccaccggtggatccaaagttggcctgggtaggagatgtcttcaccgccacacccgctgaaccccgcccacttacctcacctctgcgccaggctgcggatgaggatgacaaggggatgaggagcgagactcctccagtacctcccccaccaccctatctggccagttatccaggctttcctgagaatggagcccctgggcccccaatctctcgctttcctctggaggaaccagggccccgtccactcccctggcccccaggcagtgatgaagtggccaagatacaaactccaccacccaagaaggagccccctaaggaggagactgcacagctgacggggccagaagcaggccgaaagcctgcccgcggagtcgggagtggaggccagggccccccaccaccacgcagagagagtcgcacagagacccgctggggccctcgtccagggagcagtcgtcgtggaatccctccagaggagccaggggccccaccccgccgggctgggcctataaagaaacctccaccacctacaaaagtagaagagctgcctcccaagcccctcgaacagggggatgaaacccccaaacccccaaagccagacccactcaagataaccaaggggaagctagggggccccaaggagaccccacccaatggaaatctttcccctgccccaaggcttcggagggactattcgtatgaaagagtgggtcctacctcttgccggggtcggggccgaggcgagtattttgccagagggaggggttttcgggggacctatgggggacgagggcggggagccgccgggaattccgcagttaccgagagtttcgaggagatgatgggcgtggaggtgggacagggggaccaaaccaccctcctgctccccgaggccgcactgccagcgagacacggagcgagggttcagagtatgaggaaatccccaagcggcgccggcagcggggctcagaaacaggcagcgagacccatgagagtgatctggctccttcagacaaggaggctcccacacccaaggagggaacactcacccaggtcccgctcccccaccaccaggagccccaccttcccagccccagcccgcttcactcccggggtgggcgagtcttcactcccagaggggatctcgccggggccgaggaggagggagcctcctcaagtttgcccaggctggagccctccagccaagtctctggctcccaagaaacctcccacaggccctttgccaccaagtaaggagcctttgaaagagaagttgatcccagggcctctgtcccctgtggcgcgcggaggcagcaatggaggtagcaatgtgggcatggaagatggggagcgaccccgaaggaggcgacatgggagggctcagcagcaggataaaccgcctcgtttccggaggctgaagcaggaacgggagaatgccgcaagggggtctgagggcaagccctccctaacccttccagcctccgctcctggacctgaggaggccctcacaacagtcacagtggccccagcacctcgccgggcagctgccaagtctcctgatctgtcaaaccagaactcagaccaagccaatgaggaatgggagactgcatcagagagcagtgacttcaccagtgagcgccgaggggacaaagaggcacccccaccagtactgctgacacccaaggctgtgggaactcctgggggaggtggaggtggagccgtaccaggtatttcagccatgtcccgcggagatctgagccagagagccaaggatttgagtaaacggagcttctcaagtcagcggccaggcatggaacggcagaatcggcgccctggcccagggggcaaggctggcagcagtggcagcagcagtggaggaggcggtgggggtcctggaggaaggaccgggccaggacgaggcgacaagaggagctggccctctcccaagaaccgaagtcgtcctccagaggagcgtcccccggggcttcccctgcctcccccacctcccagcagttctgctgtcttccgcctggaccaagttatccacagcaaccctgctggcatccaacaggctctggcccagcttagtagccgtcaagggagtgtaactgcaccagggggtcatccaaggcacaagcctgggcttccccaagcccctcagggcccctctcctaggcccccaacccgatacgagccccagagggtcaacagcggcctcagttctgacccccactttgaggagccggggccaatggtgagaggggtgggtgggactcctcgggactctgccggggttagtccctttccccctaaacgtcgggagcggcctcccagaaaaccagagctgctacaggaggaatctttgccacctcctcatagctctggattcttgggctctaagcctgagggcccaggccctcaggcagagtccagagatacaggcacagaggccctgacccctcacatctggaaccgtttacatactgccactagccgaaagagttaccggcccagctccatggagccttggatggagcccctgagtccttttgaggatgtggctggcacagaaatgagtcagtctgacagtggggtggacctgagtggggattctcaggtgtcatcaggtccctgcagccagcgaagttcccctgatggaggactcaagggggcagcagagggaccccccaagaggcctggaggctcctcacccctgaatgctgttccttgtgagggtccacctggctctgaacctcctaggagaccaccacctgccccccacgatggggacagaaaggagctgccccgggagcagcctctgccccctggccccattggcacagaacgatcacagcgtacagaccgaggcacagagcctggccccattcggccatcccatcgacctggtcccccagtccagtttggcactagtgacaaggactcagacttacgcctagtggtaggagacagcttgaaagcagagaaggagctaacagcatcagtcactgaggccattcctgtatcacgagactgggagctgcttcccagtgctgctgcctctgctgagccacaatccaagaacctggattctgggcactgtgtcccggagcccagctcctcaggccagcgcctgtatcctgaggttttctatggcagtgctgggccttccagttctcagatctctgggggacatggactctcaattacatccaaacagtggaggcgccctgggacaccctcactgcacccttacagatcacagcccctatacctaccccccggcccagcccctccctcagcactgctctctgggttagctctcaagggccagtttctggatttctccacaatgcaagctacagagctggggaagttgccggctggaggagttctctaccctccaccttccttcctctactctccggctttctgccccagtcctttgcctgacacatcgttgcttcaggtacgccaggatctgccatccccttcggatttttattctactcctctgcagcctggtggccaaagtggctttctcccttcaggggctcctgcccagcagatgcttctacccatggtagactcacagctgcctgtggtgaactttggctccctgccgccagcaccacctcctgccccacctcccctttctctgttacctgtgggccctgctctgcagccccccagcctggctgtgcggcccccacctgctcctgctactcgggtgctgccttcacctgccaggcccttccccgctagcttggggcgagcagagctgcatccagtggaactaaagccgttccaggattatcaaaaactgagcagcaaccttgggggacctggatcatcacggactcccccaactggaaggtccttctctggcctcaattcccgtctcaaggccacgccttccacctacagtggagtcttccgcacccagcgcgtcgacctttaccagcaggcctccccaccagatgccctgcgctggatacctaagccttgggagcggacagggccgccacctcgagaagggccctcccgacgggcagaggagcctgggtcccgaggggacaaggagcctgggttgcccccaccccgctgagggagttcctcttgccccctacccccggggcttgtatatagattataaatatataagggggaaaggggtgggcggggaggggttctggggctggggcctcacttcccctcctcccccttcccctggtcccctgtccctggggctgtttgttaaaaaagagtaataaaaggattt

SEQ ID NO: 232825 - DNA, 6840 bp, Artificial Sequence
  derived and/or modified sequence
agggggtgctcccgggggcggcggttgcccggatgggccgttagtcggggctcagccgcggagtgagcgagggagacgggaggagccgaacccggcgccatccgccgccatcctcccccgccccaccgccatcccgtcccggggagcccctaggcccgggtcccggatccccgcgcacccggccaggctctggcacgttttgggggaggtgcctgcaggacccaacatactcaatgagcttccagcgcaatgtccgatcgctcggggccgactgccaagggaaaggatggaaagaagtattcctcgctcaacctgtttgatacgtataagggcaagtccttagagatccagaaacccgctgttgcccctcgccatggcctgcagagtctcgggaaagttgccattgcccggcgtatgccacctccagccaaccttccaagcctgaaagccgagaacaaaggcaatgaccccaatgtctcactagtgccaaaagacggaacaggatgggcaagcaaacaggagcagtccgaccccaagagttccgatgcctcaaccgctcagccgccggaatcgcagccactgccggcttcacagacgcctgcctccaaccagccgaaacgacccccagcagcccccgagaacactcctttggttccaagcggggtaaagtcctgggcacaagccagcgtcacccatggagcacatggagatggtggaagggcatcaagcctactgtcacgattctctcgagaggaatttccgaccctgcaggcggctggcgaccaggacaaggctgccaaggaaagggagtctgccgaacagtcgtctgggcccggaccaagcctccgcccccaaaattctacaacttggagggacggaggtgggcgtggccctgatgagctggagggcccggactccaaacttcatcatggtcatgatccccggggtgggctacagccttcaggcccaccccagttccctccctaccgcggaatgatgccgcctttcatgtatcccccatatctcccgttccctccgccctatggaccccaggggccttaccgataccccactcctgatgggcccagccgttttccccgtgtggcgggcccccgaggctcagggccaccaatgcgcttagtagagcctgtgggtcgtccctctattctcaaagaggataatctcaaagagtttgatcagttggatcaggagaatgatgatggttgggcaggggcccatgaagaggttgactacactgaaaagctcaagttcagcgatgaggaagatgggcgagactctgatgaggagggtgctgagggccacagggattcccaatcagcttctggtgaggaacggccccctgaagcagatggcaaaaagggcaactcccccaacagcgaaccgcccactcctaagacggcctgggcagaaacctctcggcctccagagacagagccgggacctcctgccccaaagcctcccctacccccccctggggactacccagatcgtgggggtcctccctgcaagcccccagcacctgaagatgaggatgaggcatggcggcagcgacgaaagcagtcgtcatctgagatttccctggcagtggagcgggcccggcgacggcgagaagaagaggagcggcgcatgcaagaagagcgccgggcagcctgtgctgagaagctcaagcgactcgatgaaaagtttggggcacctgacaagcggctcaaagcagagcctgctgccccacctgctgccccttctaccccagctccaccacctgcagtccctaaagaactccctgcacctccagctccacctccagcatcagccccaacaccagagacagaacctgaagagccagcacaggcccctcctgcccaatctactcctactccaggtgtggctgcggctcccactctggtgagtggtggtggcagtaccagtagcaccagcagtggcagcttcgaagccagcccagtggaaccacaactgccctcaaaagagggtcctgaaccaccagaagaggttcctcctcctaccacacccccagttccaaaggtggaacccaagggtgatgggattggtcccacccgccagccccctagtcagggcttgggctaccccaaatatcagaagtcgttgcctcctcgtttccagcggcagcagcaggagcagctcctgaagcagcagcagcagcaccagtggcagcagcatcaacagggctctgcccctcctaccccagtgcccccatcaccaccacagcctgtgaccctgggggctgtgccagctccacaggctccacccccgccccccaaggccctgtacccaggtgctctgggccggcccccacccatgcccccaatgaactttgatccccgatggatgatgattcctccttatgtggacccccggctcctccagggtcgtccccctctagacttctaccctcctggtgtgcatccctctggcctagttccccgagagcgttcagacagtgggggctcaagctcagagccatttgaccgtcatgcacctgctatgttacgggaacggggcactccaccggtggatccaaagttggcctgggtaggagatgtcttcaccgccacacccgctgaaccccgcccacttacctcacctctgcgccaggctgcggatgaggatgacaaggggatgaggagcgagactcctccagtacctcccccaccaccctatctggccagttatccaggctttcctgagaatggagcccctgggcccccaatctctcgctttcctctggaggaaccagggccccgtccactcccctggcccccaggcagtgatgaagtggccaagatacaaactccaccacccaagaaggagccccctaaggaggagactgcacagctgacggggccagaagcaggccgaaagcctgcccgcggagtcgggagtggaggccagggccccccaccaccacgcagagagagtcgcacagagacccgctggggccctcgtccagggagcagtcgtcgtggaatccctccagaggagccaggggccccaccccgccgggctgggcctataaagaaacctccaccacctacaaaagtagaagagctgcctcccaagcccctcgaacagggggatgaaacccccaaacccccaaagccagacccactcaagataaccaaggggaagctagggggccccaaggagaccccacccaatggaaatctttcccctgccccaaggcttcggagggactattcgtatgaaagagtgggtcctacctcttgccggggtcggggccgaggcgagtattttgccagagggaggggttttcgggggacctatgggggacgagggcggggagccgccgggaattccgcagttaccgagagtttcgaggagatgatgggcgtggaggtgggacagggggaccaaaccaccctcctgctccccgaggccgcactgccagcgagacacggagcgagggttcagagtatgaggaaatccccaagcggcgccggcagcggggctcagaaacaggcagcgagacccatgagagtgatctggctccttcagacaaggaggctcccacacccaaggagggaacactcacccaggtcccgctcccccaccaccaggagccccaccttcccagccccagcccgcttcactcccggggtgggcgagtcttcactcccagaggggatctcgccggggccgaggaggagggagcctcctcaagtttgcccaggctggagccctccagccaagtctctggctcccaagaaacctcccacaggccctttgccaccaagtaaggagcctttgaaagagaagttgatcccagggcctctgtcccctgtggcgcgcggaggcagcaatggaggtagcaatgtgggcatggaagatggggagcgaccccgaaggaggcgacatgggagggctcagcagcaggataaaccgcctcgtttccggaggctgaagcaggaacgggagaatgccgcaagggggtctgagggcaagccctccctaacccttccagcctccgctcctggacctgaggaggccctcacaacagtcacagtggccccagcacctcgccgggcagctgccaagtctcctgatctgtcaaaccagaactcagaccaagccaatgaggaatgggagactgcatcagagagcagtgacttcaccagtgagcgccgaggggacaaagaggcacccccaccagtactgctgacacccaaggctgtgggaactcctgggggaggtggaggtggagccgtaccaggtatttcagccatgtcccgcggagatctgagccagagagccaaggatttgagtaaacggagcttctcaagtcagcggccaggcatggaacggcagaatcggcgccctggcccagggggcaaggctggcagcagtggcagcagcagtggaggaggcggtgggggtcctggaggaaggaccgggccaggacgaggcgacaagaggagctggccctctcccaagaaccgaagtcgtcctccagaggagcgtcccccggggcttcccctgcctcccccacctcccagcagttctgctgtcttccgcctggaccaagttatccacagcaaccctgctggcatccaacaggctctggcccagcttagtagccgtcaagggagtgtaactgcaccagggggtcatccaaggcacaagcctgggcttccccaagcccctcagggcccctctcctaggcccccaacccgatacgagccccagagggtcaacagcggcctcagttctgacccccactttgaggagccggggccaatggtgagaggggtgggtgggactcctcgggactctgccggggttagtccctttccccctaaacgtcgggagcggcctcccagaaaaccagagctgctacaggaggaatctttgccacctcctcatagctctggattcttgggctctaagcctgagggcccaggccctcaggcagagtccagagatacaggcacagaggccctgacccctcacatctggaaccgtttacatactgccactagccgaaagagttaccggcccagctccatggagccttggatggagcccctgagtccttttgaggatgtggctggcacagaaatgagtcagtctgacagtggggtggacctgagtggggattctcaggtgtcatcaggtccctgcagccagcgaagttcccctgatggaggactcaagggggcagcagagggaccccccaagaggcctggaggctcctcacccctgaatgctgttccttgtgagggtccacctggctctgaacctcctaggagaccaccacctgccccccacgatggggacagaaaggagctgccccgggagcagcctctgccccctggccccattggcacagaacgatcacagcgtacagaccgaggcacagagcctggccccattcggccatcccatcgacctggtcccccagtccagtttggcactagtgacaaggactcagacttacgcctagtggtaggagacagcttgaaagcagagaaggagctaacagcatcagtcactgaggccattcctgtatcacgagactgggagctgcttcccagtgctgctgcctctgctgagccacaatccaagaacctggattctgggcactgtgtcccggagcccagctcctcaggccagcgcctgtatcctgaggttttctatggcagtgctgggccttccagttctcagatctctgggggacatggactctcaattacatccaaacagtggaggcgccctgggacaccctcactgcacccttacagatcacagcccctatacctaccccccggcccagcccctccctcagcactgctctctgggttagctctcaagggccagtttctggatttctccacaatgcaagctacagagctggggaagttgccggctggaggagttctctaccctccaccttccttcctctactctccggctttctgccccagtcctttgcctgacacatcgttgcttcaggtacgccaggatctgccatccccttcggatttttattctactcctctgcagcctggtggccaaagtggctttctcccttcaggggctcctgcccagcagatgcttctacccatggtagactcacagctgcctgtggtgaactttggctccctgccgccagcaccacctcctgccccacctcccctttctctgttacctgtgggccctgctctgcagccccccagcctggctgtgcggcccccacctgctcctgctactcgggtgctgccttcacctgccaggcccttccccgctagcttggggcgagcagagctgcatccagtggaactaaagccgttccaggattatcaaaaactgagcagcaaccttgggggacctggatcatcacggactcccccaactggaaggtccttctctggcctcaattcccgtctcaaggccacgccttccacctacagtggagtcttccgcacccagcgcgtcgacctttaccagcaggcctccccaccagatgccctgcgctggatacctaagccttgggagcggacagggccgccacctcgagaagggccctcccgacgggcagaggagcctgggtcccgaggggacaaggagcctgggttgcccccaccccgctgagggagttcctcttgccccctacccccggggcttgtatatagattataaatatataagggggaaaggggtgggcggggaggggttctggggctggggcctcacttcccctcctcccccttcccctggtcccctgtccctggggctgtttgttaaaaaagagtaataaaaggattt

SEQ ID NO: 232826 - DNA, 6474 bp, Artificial Sequence
  derived and/or modified sequence
atgagcgacagaagcggccccaccgccaagggcaaggacggcaagaagtacagcagcctgaacctgttcgacacctacaagggcaagagcctggagatccagaagcccgccgtggcccccagacacggcctgcagagcctgggcaaggtggccatcgccagaagaatgcccccccccgccaacctgcccagcctgaaggccgagaacaagggcaacgaccccaacgtgagcctggtgcccaaggacggcaccggctgggccagcaagcaggagcagagcgaccccaagagcagcgacgccagcaccgcccagccccccgagagccagcccctgcccgccagccagacccccgccagcaaccagcccaagagaccccccgccgcccccgagaacacccccctggtgcccagcggcgtgaagagctgggcccaggccagcgtgacccacggcgcccacggcgacggcggcagagccagcagcctgctgagcagattcagcagagaggagttccccaccctgcaggccgccggcgaccaggacaaggccgccaaggagagagagagcgccgagcagagcagcggccccggccccagcctgagaccccagaacagcaccacctggagagacggcggcggcagaggccccgacgagctggagggccccgacagcaagctgcaccacggccacgaccccagaggcggcctgcagcccagcggccccccccagttccccccctacagaggcatgatgccccccttcatgtaccccccctacctgcccttcccccccccctacggcccccagggcccctacagataccccacccccgacggccccagcagattccccagagtggccggccccagaggcagcggcccccccatgagactggtggagcccgtgggcagacccagcatcctgaaggaggacaacctgaaggagttcgaccagctggaccaggagaacgacgacggctgggccggcgcccacgaggaggtggactacaccgagaagctgaagttcagcgacgaggaggacggcagagacagcgacgaggagggcgccgagggccacagagacagccagagcgccagcggcgaggagagaccccccgaggccgacggcaagaagggcaacagccccaacagcgagccccccacccccaagaccgcctgggccgagaccagcagaccccccgagaccgagcccggcccccccgcccccaagccccccctgccccccccccacagaggccccgccggcaactggggcccccccggcgactaccccgacagaggcggccccccctgcaagccccccgcccccgaggacgaggacgaggcctggagacagagaagaaagcagagcagcagcgagatcagcctggccgtggagagagccagaagaagaagagaggaggaggagagaagaatgcaggaggagagaagagccgcctgcgccgagaagctgaagagactggacgagaagttcggcgcccccgacaagagactgaaggccgagcccgccgccccccccgccgcccccagcacccccgcccccccccccgccgtgcccaaggagctgcccgccccccccgcccccccccccgccagcgcccccacccccgagaccgagcccgaggagcccgcccaggccccccccgcccagagcacccccacccccggcgtggccgccgcccccaccctggtgagcggcggcggcagcaccagcagcaccagcagcggcagcttcgaggccagccccgtggagccccagctgcccagcaaggagggccccgagccccccgaggaggtgcccccccccaccaccccccccgtgcccaaggtggagcccaagggcgacggcatcggccccaccagacagccccccagccagggcctgggctaccccaagtaccagaagagcctgccccccagattccagagacagcagcaggagcagctgctgaagcagcagcagcagcaccagtggcagcagcaccagcagggcagcgccccccccacccccgtgccccccagccccccccagcccgtgaccctgggcgccgtgcccgccccccaggcccccccccccccccccaaggccctgtaccccggcgccctgggcagacccccccccatgccccccatgaacttcgaccccagatggatgatgatccccccctacgtggaccccagactgctgcagggcagaccccccctggacttctacccccccggcgtgcaccccagcggcctggtgcccagagagagaagcgacagcggcggcagcagcagcgagcccttcgacagacacgcccccgccatgctgagagagagaggcaccccccccgtggaccccaagctggcctgggtgggcgacgtgttcaccgccacccccgccgagcccagacccctgaccagccccctgagacaggccgccgacgaggacgacaagggcatgagaagcgagaccccccccgtgccccccccccccccctacctggccagctaccccggcttccccgagaacggcgcccccggcccccccatcagcagattccccctggaggagcccggccccagacccctgccctggccccccggcagcgacgaggtggccaagatccagacccccccccccaagaaggagccccccaaggaggagaccgcccagctgaccggccccgaggccggcagaaagcccgccagaggcgtgggcagcggcggccagggcccccccccccccagaagagagagcagaaccgagaccagatggggccccagacccggcagcagcagaagaggcatcccccccgaggagcccggcgccccccccagaagagccggccccatcaagaagccccccccccccaccaaggtggaggagctgccccccaagcccctggagcagggcgacgagacccccaagccccccaagcccgaccccctgaagatcaccaagggcaagctgggcggccccaaggagaccccccccaacggcaacctgagccccgcccccagactgagaagagactacagctacgagagagtgggccccaccagctgcagaggcagaggcagaggcgagtacttcgccagaggcagaggcttcagaggcacctacggcggcagaggcagaggcgccagaagcagagagttcagaagctacagagagttcagaggcgacgacggcagaggcggcggcaccggcggccccaaccacccccccgcccccagaggcagaaccgccagcgagaccagaagcgagggcagcgagtacgaggagatccccaagagaagaagacagagaggcagcgagaccggcagcgagacccacgagagcgacctggcccccagcgacaaggaggcccccacccccaaggagggcaccctgacccaggtgcccctggccccccccccccccggcgccccccccagccccgcccccgccagattcaccgccagaggcggcagagtgttcacccccagaggcgtgcccagcagaagaggcagaggcggcggcagaccccccccccaggtgtgccccggctggagcccccccgccaagagcctggcccccaagaagccccccaccggccccctgccccccagcaaggagcccctgaaggagaagctgatccccggccccctgagccccgtggccagaggcggcagcaacggcggcagcaacgtgggcatggaggacggcgagagacccagaagaagaagacacggcagagcccagcagcaggacaagccccccagattcagaagactgaagcaggagagagagaacgccgccagaggcagcgagggcaagcccagcctgaccctgcccgccagcgcccccggccccgaggaggccctgaccaccgtgaccgtggcccccgcccccagaagagccgccgccaagagccccgacctgagcaaccagaacagcgaccaggccaacgaggagtgggagaccgccagcgagagcagcgacttcaccagcgagagaagaggcgacaaggaggcccccccccccgtgctgctgacccccaaggccgtgggcacccccggcggcggcggcggcggcgccgtgcccggcatcagcgccatgagcagaggcgacctgagccagagagccaaggacctgagcaagagaagcttcagcagccagagacccggcatggagagacagaacagaagacccggccccggcggcaaggccggcagcagcggcagcagcagcggcggcggcggcggcggccccggcggcagaaccggccccggcagaggcgacaagagaagctggcccagccccaagaacagaagcagaccccccgaggagagaccccccggcctgcccctgcccccccccccccccagcagcagcgccgtgttcagactggaccaggtgatccacagcaaccccgccggcatccagcaggccctggcccagctgagcagcagacagggcagcgtgaccgcccccggcggccaccccagacacaagcccggcctgccccaggccccccagggccccagccccagaccccccaccagatacgagccccagagagtgaacagcggcctgagcagcgacccccacttcgaggagcccggccccatggtgagaggcgtgggcggcacccccagagacagcgccggcgtgagccccttcccccccaagagaagagagagaccccccagaaagcccgagctgctgcaggaggagagcctgccccccccccacagcagcggcttcctgggcagcaagcccgagggccccggcccccaggccgagagcagagacaccggcaccgaggccctgaccccccacatctggaacagactgcacaccgccaccagcagaaagagctacagacccagcagcatggagccctggatggagcccctgagccccttcgaggacgtggccggcaccgagatgagccagagcgacagcggcgtggacctgagcggcgacagccaggtgagcagcggcccctgcagccagagaagcagccccgacggcggcctgaagggcgccgccgagggcccccccaagagacccggcggcagcagccccctgaacgccgtgccctgcgagggcccccccggcagcgagccccccagaagacccccccccgccccccacgacggcgacagaaaggagctgcccagagagcagcccctgccccccggccccatcggcaccgagagaagccagagaaccgacagaggcaccgagcccggccccatcagacccagccacagacccggcccccccgtgcagttcggcaccagcgacaaggacagcgacctgagactggtggtgggcgacagcctgaaggccgagaaggagctgaccgccagcgtgaccgaggccatccccgtgagcagagactgggagctgctgcccagcgccgccgccagcgccgagccccagagcaagaacctggacagcggccactgcgtgcccgagcccagcagcagcggccagagactgtaccccgaggtgttctacggcagcgccggccccagcagcagccagatcagcggcggcgccatggacagccagctgcaccccaacagcggcggcttcagacccggcacccccagcctgcacccctacagaagccagcccctgtacctgccccccggccccgccccccccagcgccctgctgagcggcctggccctgaagggccagttcctggacttcagcaccatgcaggccaccgagctgggcaagctgcccgccggcggcgtgctgtaccccccccccagcttcctgtacagccccgccttctgccccagccccctgcccgacaccagcctgctgcaggtgagacaggacctgcccagccccagcgacttctacagcacccccctgcagcccggcggccagagcggcttcctgcccagcggcgcccccgcccagcagatgctgctgcccatggtggacagccagctgcccgtggtgaacttcggcagcctgccccccgcccccccccccgcccccccccccctgagcctgctgcccgtgggccccgccctgcagccccccagcctggccgtgagacccccccccgcccccgccaccagagtgctgcccagccccgccagacccttccccgccagcctgggcagagccgagctgcaccccgtggagctgaagcccttccaggactaccagaagctgagcagcaacctgggcggccccggcagcagcagaaccccccccaccggcagaagcttcagcggcctgaacagcagactgaaggccacccccagcacctacagcggcgtgttcagaacccagagagtggacctgtaccagcaggccagcccccccgacgccctgagatggatccccaagccctgggagagaaccggccccccccccagagagggccccagcagaagagccgaggagcccggcagcagaggcgacaaggagcccggcctgcccccccccagatag

SEQ ID NO: 232827 - DNA, 4149 bp, Artificial Sequence
  derived and/or modified sequence
atgctgagagagagaggcaccccccccgtggaccccaagctggcctgggtgggcgacgtgttcaccgccacccccgccgagcccagacccctgaccagccccctgagacaggccgccgacgaggacgacaagggcatgagaagcgagaccccccccgtgccccccccccccccctacctggccagctaccccggcttccccgagaacggcgcccccggcccccccatcagcagattccccctggaggagcccggccccagacccctgccctggccccccggcagcgacgaggtggccaagatccagacccccccccccaagaaggagccccccaaggaggagaccgcccagctgaccggccccgaggccggcagaaagcccgccagaggcgtgggcagcggcggccagggcccccccccccccagaagagagagcagaaccgagaccagatggggccccagacccggcagcagcagaagaggcatcccccccgaggagcccggcgccccccccagaagagccggccccatcaagaagccccccccccccaccaaggtggaggagctgccccccaagcccctggagcagggcgacgagacccccaagccccccaagcccgaccccctgaagatcaccaagggcaagctgggcggccccaaggagaccccccccaacggcaacctgagccccgcccccagactgagaagagactacagctacgagagagtgggccccaccagctgcagaggcagaggcagaggcgagtacttcgccagaggcagaggcttcagaggcacctacggcggcagaggcagaggcgccagaagcagagagttcagaagctacagagagttcagaggcgacgacggcagaggcggcggcaccggcggccccaaccacccccccgcccccagaggcagaaccgccagcgagaccagaagcgagggcagcgagtacgaggagatccccaagagaagaagacagagaggcagcgagaccggcagcgagacccacgagagcgacctggcccccagcgacaaggaggcccccacccccaaggagggcaccctgacccaggtgcccctggccccccccccccccggcgccccccccagccccgcccccgccagattcaccgccagaggcggcagagtgttcacccccagaggcgtgcccagcagaagaggcagaggcggcggcagaccccccccccaggtgtgccccggctggagcccccccgccaagagcctggcccccaagaagccccccaccggccccctgccccccagcaaggagcccctgaaggagaagctgatccccggccccctgagccccgtggccagaggcggcagcaacggcggcagcaacgtgggcatggaggacggcgagagacccagaagaagaagacacggcagagcccagcagcaggacaagccccccagattcagaagactgaagcaggagagagagaacgccgccagaggcagcgagggcaagcccagcctgaccctgcccgccagcgcccccggccccgaggaggccctgaccaccgtgaccgtggcccccgcccccagaagagccgccgccaagagccccgacctgagcaaccagaacagcgaccaggccaacgaggagtgggagaccgccagcgagagcagcgacttcaccagcgagagaagaggcgacaaggaggcccccccccccgtgctgctgacccccaaggccgtgggcacccccggcggcggcggcggcggcgccgtgcccggcatcagcgccatgagcagaggcgacctgagccagagagccaaggacctgagcaagagaagcttcagcagccagagacccggcatggagagacagaacagaagacccggccccggcggcaaggccggcagcagcggcagcagcagcggcggcggcggcggcggccccggcggcagaaccggccccggcagaggcgacaagagaagctggcccagccccaagaacagaagcagaccccccgaggagagaccccccggcctgcccctgcccccccccccccccagcagcagcgccgtgttcagactggaccaggtgatccacagcaaccccgccggcatccagcaggccctggcccagctgagcagcagacagggcagcgtgaccgcccccggcggccaccccagacacaagcccggcctgccccaggccccccagggccccagccccagaccccccaccagatacgagccccagagagtgaacagcggcctgagcagcgacccccacttcgaggagcccggccccatggtgagaggcgtgggcggcacccccagagacagcgccggcgtgagccccttcccccccaagagaagagagagaccccccagaaagcccgagctgctgcaggaggagagcctgccccccccccacagcagcggcttcctgggcagcaagcccgagggccccggcccccaggccgagagcagagacaccggcaccgaggccctgaccccccacatctggaacagactgcacaccgccaccagcagaaagagctacagacccagcagcatggagccctggatggagcccctgagccccttcgaggacgtggccggcaccgagatgagccagagcgacagcggcgtggacctgagcggcgacagccaggtgagcagcggcccctgcagccagagaagcagccccgacggcggcctgaagggcgccgccgagggcccccccaagagacccggcggcagcagccccctgaacgccgtgccctgcgagggcccccccggcagcgagccccccagaagacccccccccgccccccacgacggcgacagaaaggagctgcccagagagcagcccctgccccccggccccatcggcaccgagagaagccagagaaccgacagaggcaccgagcccggccccatcagacccagccacagacccggcccccccgtgcagttcggcaccagcgacaaggacagcgacctgagactggtggtgggcgacagcctgaaggccgagaaggagctgaccgccagcgtgaccgaggccatccccgtgagcagagactgggagctgctgcccagcgccgccgccagcgccgagccccagagcaagaacctggacagcggccactgcgtgcccgagcccagcagcagcggccagagactgtaccccgaggtgttctacggcagcgccggccccagcagcagccagatcagcggcggcgccatggacagccagctgcaccccaacagcggcggcttcagacccggcacccccagcctgcacccctacagaagccagcccctgtacctgccccccggccccgccccccccagcgccctgctgagcggcctggccctgaagggccagttcctggacttcagcaccatgcaggccaccgagctgggcaagctgcccgccggcggcgtgctgtaccccccccccagcttcctgtacagccccgccttctgccccagccccctgcccgacaccagcctgctgcaggtgagacaggacctgcccagccccagcgacttctacagcacccccctgcagcccggcggccagagcggcttcctgcccagcggcgcccccgcccagcagatgctgctgcccatggtggacagccagctgcccgtggtgaacttcggcagcctgccccccgcccccccccccgcccccccccccctgagcctgctgcccgtgggccccgccctgcagccccccagcctggccgtgagacccccccccgcccccgccaccagagtgctgcccagccccgccagacccttccccgccagcctgggcagagccgagctgcaccccgtggagctgaagcccttccaggactaccagaagctgagcagcaacctgggcggccccggcagcagcagaaccccccccaccggcagaagcttcagcggcctgaacagcagactgaaggccacccccagcacctacagcggcgtgttcagaacccagagagtggacctgtaccagcaggccagcccccccgacgccctgagatggatccccaagccctgggagagaaccggccccccccccagagagggccccagcagaagagccgaggagcccggcagcagaggcgacaaggagcccggcctgcccccccccagatag

SEQ ID NO: 232828 - DNA, 6450 bp, Artificial Sequence
  derived and/or modified sequence
atgagcgacagaagcggccccaccgccaagggcaaggacggcaagaagtacagcagcctgaacctgttcgacacctacaagggcaagagcctggagatccagaagcccgccgtggcccccagacacggcctgcagagcctgggcaaggtggccatcgccagaagaatgcccccccccgccaacctgcccagcctgaaggccgagaacaagggcaacgaccccaacgtgagcctggtgcccaaggacggcaccggctgggccagcaagcaggagcagagcgaccccaagagcagcgacgccagcaccgcccagccccccgagagccagcccctgcccgccagccagacccccgccagcaaccagcccaagagaccccccgccgcccccgagaacacccccctggtgcccagcggcgtgaagagctgggcccaggccagcgtgacccacggcgcccacggcgacggcggcagagccagcagcctgctgagcagattcagcagagaggagttccccaccctgcaggccgccggcgaccaggacaaggccgccaaggagagagagagcgccgagcagagcagcggccccggccccagcctgagaccccagaacagcaccacctggagagacggcggcggcagaggccccgacgagctggagggccccgacagcaagctgcaccacggccacgaccccagaggcggcctgcagcccagcggccccccccagttccccccctacagaggcatgatgccccccttcatgtaccccccctacctgcccttcccccccccctacggcccccagggcccctacagataccccacccccgacggccccagcagattccccagagtggccggccccagaggcagcggcccccccatgagactggtggagcccgtgggcagacccagcatcctgaaggaggacaacctgaaggagttcgaccagctggaccaggagaacgacgacggctgggccggcgcccacgaggaggtggactacaccgagaagctgaagttcagcgacgaggaggacggcagagacagcgacgaggagggcgccgagggccacagagacagccagagcgccagcggcgaggagagaccccccgaggccgacggcaagaagggcaacagccccaacagcgagccccccacccccaagaccgcctgggccgagaccagcagaccccccgagaccgagcccggcccccccgcccccaagccccccctgccccccccccacagaggccccgccggcaactggggcccccccggcgactaccccgacagaggcggccccccctgcaagccccccgcccccgaggacgaggacgaggcctggagacagagaagaaagcagagcagcagcgagatcagcctggccgtggagagagccagaagaagaagagaggaggaggagagaagaatgcaggaggagagaagagccgcctgcgccgagaagctgaagagactggacgagaagttcggcgcccccgacaagagactgaaggccgagcccgccgccccccccgccgcccccagcacccccgcccccccccccgccgtgcccaaggagctgcccgccccccccgcccccccccccgccagcgcccccacccccgagaccgagcccgaggagcccgcccaggccccccccgcccagagcacccccacccccggcgtggccgccgcccccaccctggtgagcggcggcggcagcaccagcagcaccagcagcggcagcttcgaggccagccccgtggagccccagctgcccagcaaggagggccccgagccccccgaggaggtgcccccccccaccaccccccccgtgcccaaggtggagcccaagggcgacggcatcggccccaccagacagccccccagccagggcctgggctaccccaagtaccagaagagcctgccccccagattccagagacagcagcaggagcagctgctgaagcagcagcagcagcaccagtggcagcagcaccagcagggcagcgccccccccacccccgtgccccccagccccccccagcccgtgaccctgggcgccgtgcccgccccccaggcccccccccccccccccaaggccctgtaccccggcgccctgggcagacccccccccatgccccccatgaacttcgaccccagatggatgatgatccccccctacgtggaccccagactgctgcagggcagaccccccctggacttctacccccccggcgtgcaccccagcggcctggtgcccagagagagaagcgacagcggcggcagcagcagcgagcccttcgacagacacgcccccgccatgctgagagagagaggcaccccccccgtggaccccaagctggcctgggtgggcgacgtgttcaccgccacccccgccgagcccagacccctgaccagccccctgagacaggccgccgacgaggacgacaagggcatgagaagcgagaccccccccgtgccccccccccccccctacctggccagctaccccggcttccccgagaacggcgcccccggcccccccatcagcagattccccctggaggagcccggccccagacccctgccctggccccccggcagcgacgaggtggccaagatccagacccccccccccaagaaggagccccccaaggaggagaccgcccagctgaccggccccgaggccggcagaaagcccgccagaggcgtgggcagcggcggccagggcccccccccccccagaagagagagcagaaccgagaccagatggggccccagacccggcagcagcagaagaggcatcccccccgaggagcccggcgccccccccagaagagccggccccatcaagaagccccccccccccaccaaggtggaggagctgccccccaagcccctggagcagggcgacgagacccccaagccccccaagcccgaccccctgaagatcaccaagggcaagctgggcggccccaaggagaccccccccaacggcaacctgagccccgcccccagactgagaagagactacagctacgagagagtgggccccaccagctgcagaggcagaggcagaggcgagtacttcgccagaggcagaggcttcagaggcacctacggcggcagaggcagaggcgccgccggcaacagcgccgtgaccgagagcttcgaggagatgatgggcgtggaggtgggccagggcgaccagaccaccctgctgctgcccgaggccgccctgcccgccagacacggcgccagagtgcagagcatgagaaagagccccagcggcgccggcagcggcgcccagaagcaggccgccagacccatgagagtgatctggctgctgcagaccagaagactgccccaccccagaagagagcacagccccagaagcagaagccccaccaccagaagccccaccttccccgcccccgccagattcacccccggcgtgggcgagagcagcctgcccgagggcatcagccccggccccagaagaagagagcccccccaggtgtgccccggctggagcccccccgccaagagcctggcccccaagaagccccccaccggccccctgccccccagcaaggagcccctgaaggagaagctgatccccggccccctgagccccgtggccagaggcggcagcaacggcggcagcaacgtgggcatggaggacggcgagagacccagaagaagaagacacggcagagcccagcagcaggacaagccccccagattcagaagactgaagcaggagagagagaacgccgccagaggcagcgagggcaagcccagcctgaccctgcccgccagcgcccccggccccgaggaggccctgaccaccgtgaccgtggcccccgcccccagaagagccgccgccaagagccccgacctgagcaaccagaacagcgaccaggccaacgaggagtgggagaccgccagcgagagcagcgacttcaccagcgagagaagaggcgacaaggaggcccccccccccgtgctgctgacccccaaggccgtgggcacccccggcggcggcggcggcggcgccgtgcccggcatcagcgccatgagcagaggcgacctgagccagagagccaaggacctgagcaagagaagcttcagcagccagagacccggcatggagagacagaacagaagacccggccccggcggcaaggccggcagcagcggcagcagcagcggcggcggcggcggcggccccggcggcagaaccggccccggcagaggcgacaagagaagctggcccagccccaagaacagaagcagaccccccgaggagagaccccccggcctgcccctgcccccccccccccccagcagcagcgccgtgttcagactggaccaggtgatccacagcaaccccgccggcatccagcaggccctggcccagctgagcagcagacagggcagcgtgaccgcccccggcggccaccccagacacaagcccggcctgccccaggccccccagggccccagccccagaccccccaccagatacgagccccagagagtgaacagcggcctgagcagcgacccccacttcgaggagcccggccccatggtgagaggcgtgggcggcacccccagagacagcgccggcgtgagccccttcccccccaagagaagagagagaccccccagaaagcccgagctgctgcaggaggagagcctgccccccccccacagcagcggcttcctgggcagcaagcccgagggccccggcccccaggccgagagcagagacaccggcaccgaggccctgaccccccacatctggaacagactgcacaccgccaccagcagaaagagctacagacccagcagcatggagccctggatggagcccctgagccccttcgaggacgtggccggcaccgagatgagccagagcgacagcggcgtggacctgagcggcgacagccaggtgagcagcggcccctgcagccagagaagcagccccgacggcggcctgaagggcgccgccgagggcccccccaagagacccggcggcagcagccccctgaacgccgtgccctgcgagggcccccccggcagcgagccccccagaagacccccccccgccccccacgacggcgacagaaaggagctgcccagagagcagcccctgccccccggccccatcggcaccgagagaagccagagaaccgacagaggcaccgagcccggccccatcagacccagccacagacccggcccccccgtgcagttcggcaccagcgacaaggacagcgacctgagactggtggtgggcgacagcctgaaggccgagaaggagctgaccgccagcgtgaccgaggccatccccgtgagcagagactgggagctgctgcccagcgccgccgccagcgccgagccccagagcaagaacctggacagcggccactgcgtgcccgagcccagcagcagcggccagagactgtaccccgaggtgttctacggcagcgccggccccagcagcagccagatcagcggcggccacggcctgagcatcaccagcaagcagtggagaagacccggcacccccagcctgcacccctacagaagccagcccctgtacctgccccccggccccgccccccccagcgccctgctgagcggcctggccctgaagggccagttcctggacttcagcaccatgcaggccaccgagctgggcaagctgcccgccggcggcgtgctgtaccccccccccagcttcctgtacagccccgccttctgccccagccccctgcccgacaccagcctgctgcaggtgagacaggacctgcccagccccagcgacttctacagcacccccctgcagcccggcggccagagcggcttcctgcccagcggcgcccccgcccagcagatgctgctgcccatggtggacagccagctgcccgtggtgaacttcggcagcctgccccccgcccccccccccgcccccccccccctgagcctgctgcccgtgggccccgccctgcagccccccagcctggccgtgagacccccccccgcccccgccaccagagtgctgcccagccccgccagacccttccccgccagcctgggcagagccgagctgcaccccgtggagctgaagcccttccaggactaccagaagctgagcagcaacctgggcggccccggcagcagcagaaccccccccaccggcagaagcttcagcggcctgaacagcagactgaaggccacccccagcacctacagcggcgtgttcagaacccagagagtggacctgtaccagcaggccagcccccccgacgccctgagatggatccccaagccctgggagagaaccggccccccccccagagagggccccagcagaagagccgaggagcccggcagcagaggcgacaaggagcccggcctgcccccccccagatag

SEQ ID NO: 232829 - DNA, 6417 bp, Artificial Sequence
  derived and/or modified sequence
atgagcgacagaagcggccccaccgccaagggcaaggacggcaagaagtacagcagcctgaacctgttcgacacctacaagggcaagagcctggagatccagaagcccgccgtggcccccagacacggcctgcagagcctgggcaaggtggccatcgccagaagaatgcccccccccgccaacctgcccagcctgaaggccgagaacaagggcaacgaccccaacgtgagcctggtgcccaaggacggcaccggctgggccagcaagcaggagcagagcgaccccaagagcagcgacgccagcaccgcccagccccccgagagccagcccctgcccgccagccagacccccgccagcaaccagcccaagagaccccccgccgcccccgagaacacccccctggtgcccagcggcgtgaagagctgggcccaggccagcgtgacccacggcgcccacggcgacggcggcagagccagcagcctgctgagcagattcagcagagaggagttccccaccctgcaggccgccggcgaccaggacaaggccgccaaggagagagagagcgccgagcagagcagcggccccggccccagcctgagaccccagaacagcaccacctggagagacggcggcggcagaggccccgacgagctggagggccccgacagcaagctgcaccacggccacgaccccagaggcggcctgcagcccagcggccccccccagttccccccctacagaggcatgatgccccccttcatgtaccccccctacctgcccttcccccccccctacggcccccagggcccctacagataccccacccccgacggccccagcagattccccagagtggccggccccagaggcagcggcccccccatgagactggtggagcccgtgggcagacccagcatcctgaaggaggacaacctgaaggagttcgaccagctggaccaggagaacgacgacggctgggccggcgcccacgaggaggtggactacaccgagaagctgaagttcagcgacgaggaggacggcagagacagcgacgaggagggcgccgagggccacagagacagccagagcgccagcggcgaggagagaccccccgaggccgacggcaagaagggcaacagccccaacagcgagccccccacccccaagaccgcctgggccgagaccagcagaccccccgagaccgagcccggcccccccgcccccaagccccccctgcccccccccggcgactaccccgacagaggcggccccccctgcaagccccccgcccccgaggacgaggacgaggcctggagacagagaagaaagcagagcagcagcgagatcagcctggccgtggagagagccagaagaagaagagaggaggaggagagaagaatgcaggaggagagaagagccgcctgcgccgagaagctgaagagactggacgagaagttcggcgcccccgacaagagactgaaggccgagcccgccgccccccccgccgcccccagcacccccgcccccccccccgccgtgcccaaggagctgcccgccccccccgcccccccccccgccagcgcccccacccccgagaccgagcccgaggagcccgcccaggccccccccgcccagagcacccccacccccggcgtggccgccgcccccaccctggtgagcggcggcggcagcaccagcagcaccagcagcggcagcttcgaggccagccccgtggagccccagctgcccagcaaggagggccccgagccccccgaggaggtgcccccccccaccaccccccccgtgcccaaggtggagcccaagggcgacggcatcggccccaccagacagccccccagccagggcctgggctaccccaagtaccagaagagcctgccccccagattccagagacagcagcaggagcagctgctgaagcagcagcagcagcaccagtggcagcagcaccagcagggcagcgccccccccacccccgtgccccccagccccccccagcccgtgaccctgggcgccgtgcccgccccccaggcccccccccccccccccaaggccctgtaccccggcgccctgggcagacccccccccatgccccccatgaacttcgaccccagatggatgatgatccccccctacgtggaccccagactgctgcagggcagaccccccctggacttctacccccccggcgtgcaccccagcggcctggtgcccagagagagaagcgacagcggcggcagcagcagcgagcccttcgacagacacgcccccgccatgctgagagagagaggcaccccccccgtggaccccaagctggcctgggtgggcgacgtgttcaccgccacccccgccgagcccagacccctgaccagccccctgagacaggccgccgacgaggacgacaagggcatgagaagcgagaccccccccgtgccccccccccccccctacctggccagctaccccggcttccccgagaacggcgcccccggcccccccatcagcagattccccctggaggagcccggccccagacccctgccctggccccccggcagcgacgaggtggccaagatccagacccccccccccaagaaggagccccccaaggaggagaccgcccagctgaccggccccgaggccggcagaaagcccgccagaggcgtgggcagcggcggccagggcccccccccccccagaagagagagcagaaccgagaccagatggggccccagacccggcagcagcagaagaggcatcccccccgaggagcccggcgccccccccagaagagccggccccatcaagaagccccccccccccaccaaggtggaggagctgccccccaagcccctggagcagggcgacgagacccccaagccccccaagcccgaccccctgaagatcaccaagggcaagctgggcggccccaaggagaccccccccaacggcaacctgagccccgcccccagactgagaagagactacagctacgagagagtgggccccaccagctgcagaggcagaggcagaggcgagtacttcgccagaggcagaggcttcagaggcacctacggcggcagaggcagaggcgccgccggcaacagcgccgtgaccgagagcttcgaggagatgatgggcgtggaggtgggccagggcgaccagaccaccctgctgctgcccgaggccgccctgcccgccagacacggcgccagagtgcagagcatgagaaagagccccagcggcgccggcagcggcgcccagaagcaggccgccagacccatgagagtgatctggctgctgcagaccagaagactgccccaccccagaagagagcacagccccagaagcagaagccccaccaccagaagccccaccttccccgcccccgccagattcacccccggcgtgggcgagagcagcctgcccgagggcatcagccccggccccagaagaagagagcccccccaggtgtgccccggctggagcccccccgccaagagcctggcccccaagaagccccccaccggccccctgccccccagcaaggagcccctgaaggagaagctgatccccggccccctgagccccgtggccagaggcggcagcaacggcggcagcaacgtgggcatggaggacggcgagagacccagaagaagaagacacggcagagcccagcagcaggacaagccccccagattcagaagactgaagcaggagagagagaacgccgccagaggcagcgagggcaagcccagcctgaccctgcccgccagcgcccccggccccgaggaggccctgaccaccgtgaccgtggcccccgcccccagaagagccgccgccaagagccccgacctgagcaaccagaacagcgaccaggccaacgaggagtgggagaccgccagcgagagcagcgacttcaccagcgagagaagaggcgacaaggaggcccccccccccgtgctgctgacccccaaggccgtgggcacccccggcggcggcggcggcggcgccgtgcccggcatcagcgccatgagcagaggcgacctgagccagagagccaaggacctgagcaagagaagcttcagcagccagagacccggcatggagagacagaacagaagacccggccccggcggcaaggccggcagcagcggcagcagcagcggcggcggcggcggcggccccggcggcagaaccggccccggcagaggcgacaagagaagctggcccagccccaagaacagaagcagaccccccgaggagagaccccccggcctgcccctgcccccccccccccccagcagcagcgccgtgttcagactggaccaggtgatccacagcaaccccgccggcatccagcaggccctggcccagctgagcagcagacagggcagcgtgaccgcccccggcggccaccccagacacaagcccggcctgccccaggccccccagggccccagccccagaccccccaccagatacgagccccagagagtgaacagcggcctgagcagcgacccccacttcgaggagcccggccccatggtgagaggcgtgggcggcacccccagagacagcgccggcgtgagccccttcccccccaagagaagagagagaccccccagaaagcccgagctgctgcaggaggagagcctgccccccccccacagcagcggcttcctgggcagcaagcccgagggccccggcccccaggccgagagcagagacaccggcaccgaggccctgaccccccacatctggaacagactgcacaccgccaccagcagaaagagctacagacccagcagcatggagccctggatggagcccctgagccccttcgaggacgtggccggcaccgagatgagccagagcgacagcggcgtggacctgagcggcgacagccaggtgagcagcggcccctgcagccagagaagcagccccgacggcggcctgaagggcgccgccgagggcccccccaagagacccggcggcagcagccccctgaacgccgtgccctgcgagggcccccccggcagcgagccccccagaagacccccccccgccccccacgacggcgacagaaaggagctgcccagagagcagcccctgccccccggccccatcggcaccgagagaagccagagaaccgacagaggcaccgagcccggccccatcagacccagccacagacccggcccccccgtgcagttcggcaccagcgacaaggacagcgacctgagactggtggtgggcgacagcctgaaggccgagaaggagctgaccgccagcgtgaccgaggccatccccgtgagcagagactgggagctgctgcccagcgccgccgccagcgccgagccccagagcaagaacctggacagcggccactgcgtgcccgagcccagcagcagcggccagagactgtaccccgaggtgttctacggcagcgccggccccagcagcagccagatcagcggcggccacggcctgagcatcaccagcaagcagtggagaagacccggcacccccagcctgcacccctacagaagccagcccctgtacctgccccccggccccgccccccccagcgccctgctgagcggcctggccctgaagggccagttcctggacttcagcaccatgcaggccaccgagctgggcaagctgcccgccggcggcgtgctgtaccccccccccagcttcctgtacagccccgccttctgccccagccccctgcccgacaccagcctgctgcaggtgagacaggacctgcccagccccagcgacttctacagcacccccctgcagcccggcggccagagcggcttcctgcccagcggcgcccccgcccagcagatgctgctgcccatggtggacagccagctgcccgtggtgaacttcggcagcctgccccccgcccccccccccgcccccccccccctgagcctgctgcccgtgggccccgccctgcagccccccagcctggccgtgagacccccccccgcccccgccaccagagtgctgcccagccccgccagacccttccccgccagcctgggcagagccgagctgcaccccgtggagctgaagcccttccaggactaccagaagctgagcagcaacctgggcggccccggcagcagcagaaccccccccaccggcagaagcttcagcggcctgaacagcagactgaaggccacccccagcacctacagcggcgtgttcagaacccagagagtggacctgtaccagcaggccagcccccccgacgccctgagatggatccccaagccctgggagagaaccggccccccccccagagagggccccagcagaagagccgaggagcccggcagcagaggcgacaaggagcccggcctgcccccccccagatag

SEQ ID NO: 232830 - protein, 443 aa, Artificial Sequence
  derived and/or modified sequence
MRSEKEGAGGLRAAVAARGPSGREKLSALEVQFHRDSQQQEAETPPTSSSGCGGGAGKPREEKRTALSKVVIRRLPPGLTKEQLEEQLRPLPAHDYFEFFAADLSLYPHLYSRAYINFRNPDDILLFRDRFDGYIFLDSKDPEYKKFLETYCVEEEKTSANPETLLGEMEAKTRELIARRTTPLLEYIKNRKLEKQRIREEKREERRRRELEKKRLREEEKRRRREEERCKKKETDKQKKIAEKEVRIKLLKKPEKGEEPTTEKPKERGEEIDTGGGKQESCAPGAVVKARPMEGSLEEPQETSHSGSDKEHRDVERSQEQESEAQRYHVDDGRRHRAHHEPERLSRRSEDEQRWGKGPGQDRGKKGSQDSGAPGEAMERLGRAQRCDDSPAPRKERLANKDRPALQLYDPGARFRARECGGNRRICKAEGSGTGPEKREEAE

SEQ ID NO: 232831 - DNA, 1332 bp, Artificial Sequence
  derived and/or modified sequence
atgagaagcgagaaggagggcgccggcggcctgagagccgccgtggccgccagaggccccagcggcagagagaagctgagcgccctggaggtgcagttccacagagacagccagcagcaggaggccgagaccccccccaccagcagcagcggctgcggcggcggcgccggcaagcccagagaggagaagagaaccgccctgagcaaggtggtgatcagaagactgccccccggcctgaccaaggagcagctggaggagcagctgagacccctgcccgcccacgactacttcgagttcttcgccgccgacctgagcctgtacccccacctgtacagcagagcctacatcaacttcagaaaccccgacgacatcctgctgttcagagacagattcgacggctacatcttcctggacagcaaggaccccgagtacaagaagttcctggagacctactgcgtggaggaggagaagaccagcgccaaccccgagaccctgctgggcgagatggaggccaagaccagagagctgatcgccagaagaaccacccccctgctggagtacatcaagaacagaaagctggagaagcagagaatcagagaggagaagagagaggagagaagaagaagagagctggagaagaagagactgagagaggaggagaagagaagaagaagagaggaggagagatgcaagaagaaggagaccgacaagcagaagaagatcgccgagaaggaggtgagaatcaagctgctgaagaagcccgagaagggcgaggagcccaccaccgagaagcccaaggagagaggcgaggagatcgacaccggcggcggcaagcaggagagctgcgcccccggcgccgtggtgaaggccagacccatggagggcagcctggaggagccccaggagaccagccacagcggcagcgacaaggagcacagagacgtggagagaagccaggagcaggagagcgaggcccagagataccacgtggacgacggcagaagacacagagcccaccacgagcccgagagactgagcagaagaagcgaggacgagcagagatggggcaagggccccggccaggacagaggcaagaagggcagccaggacagcggcgcccccggcgaggccatggagagactgggcagagcccagagatgcgacgacagccccgcccccagaaaggagagactggccaacaaggacagacccgccctgcagctgtacgaccccggcgccagattcagagccagagagtgcggcggcaacagaagaatctgcaaggccgagggcagcggcaccggccccgagaagagagaggaggccgagtag

SEQ ID NO: 232832 - DNA, 1332 bp, Artificial Sequence
  derived and/or modified sequence
atgcgatcagaaaaggaaggagctgggggcctgagggccgccgtcgccgcccgaggacccagtggccgcgagaaattatccgccctggaggtacagttccatagggatagccagcaacaggaggctgaaaccccacccacaagctcctccggctgtggcggcggggccggcaagcctcgagaggaaaaacgtacggcactcagtaaggtcgtgattaggcgcctgccacccgggttgaccaaagagcagttggaggaacaactgagacctttgcccgcccacgattactttgaatttttcgccgctgacctgagcttgtatccccacctatatagccgcgcttatataaacttccgcaatcccgatgatatcctgctcttcagggaccgatttgacggatacatctttctggatagcaaggatcccgagtataagaagtttctagagacctattgcgtggaagaagaaaagacgtcagcaaatcctgaaaccctcctcggcgagatggaggcgaaaacccgggagttgatcgcgaggaggacgaccccattgctggagtatatcaaaaaccgcaagctcgaaaaacagcggatcagggaggagaagagggaagagcggcggcggcgtgaactggagaagaaacggctccgtgaggaggaaaaacgacgaaggagggaagaagaaagatgcaaaaagaaggaaacggacaagcaaaagaagattgctgaaaaggaggtgagaatcaaactgctgaagaagcccgagaaaggcgaggagccaaccaccgagaaaccaaaggaacgaggcgaggaaatagacacagggggcgggaaacaagaatcttgtgcccctggtgctgtagtgaaagcccgcccaatggagggatccctcgaggagccccaggaaacctctcactctgggtctgataaggagcacagagacgtggaacgttcacaggaacaggagtctgaggcccagaggtaccacgtggatgacggcaggagacatagggcacaccacgagccagaacggctaagccgccgatccgaggacgaacagcgctggggcaagggaccaggacaggacaggggaaagaaggggagccaagactccggggcaccgggggaggccatggaacgactgggcagggcgcagcgctgcgacgactctcccgcccctcgaaaggaaagactggcaaacaaagacaggccggcattgcagttgtacgatcccggcgcccgtttccgtgcccgtgaatgtgggggcaaccggcgaatatgcaaagcggagggctctggtactggcccagaaaaaagggaagaggccgagtag

SEQ ID NO: 232833 - DNA, 1332 bp, Artificial Sequence
  derived and/or modified sequence
atgaggtctgagaaggagggcgctgggggcctgcgggctgctgtggccgcccggggccccagcggccgggagaagctgagcgccctggaggtgcagttccaccgggacagccagcagcaggaggccgagaccccacccaccagcagcagcggctgcggcggcggggccggcaagccccgggaggagaagaggacagccctgagcaaggtggtgatccggcggctgcccccaggcctgaccaaggagcagctggaggagcagctgcggcccctgcctgcccatgactactttgagttctttgctgctgacctgagcctgtacccccacctgtacagccgggcctacatcaacttcagaaatccagatgacatcctgctcttccgggacagatttgatggctacatcttcctggacagcaaggaccctgagtacaagaagttcctggagacctactgtgtggaggaggagaagaccagcgccaaccctgagaccctgctgggggagatggaggccaagacccgggagctgattgcccggaggaccacccccctgctggagtacatcaagaacaggaagctggagaagcagaggatccgggaggagaagcgggaggagaggagaagaagagagctggagaagaagaggctgcgggaggaggagaagagaagaagaagagaggaggagcgctgcaagaagaaggagacagacaagcagaagaagattgctgagaaggaggtgcgcatcaagctgctgaagaagccagagaagggggaggagcccaccacagagaagcccaaggagcggggggaggagattgacaccggcggcggcaagcaggagagctgtgcccctggagctgtggtgaaggcccggcccatggagggcagcctggaggagccccaggagaccagccacagcggcagtgacaaggagcacagagatgtggagaggagccaggagcaggagagcgaggcccagcgctaccacgtggatgatggccgccgccaccgggcccaccacgagcctgagcggctgagcagaagaagtgaagatgagcagcgctggggcaaaggacctggccaggaccggggcaagaagggcagccaggacagcggggcccctggagaggccatggagcggctgggccgggcccagagatgtgatgacagccctgcccccaggaaggagcggctggccaacaaggacaggcctgccctgcagctgtatgaccccggggcccgcttccgggccagagaatgtggcggcaacagacgcatctgcaaggccgagggcagcggcaccggccctgagaagcgggaggaggccgagtag

SEQ ID NO: 232834 - DNA, 1332 bp, Artificial Sequence
  derived and/or modified sequence
atgcggagcgagaaggagggcgccggcggcctgcgggccgccgtggctgcgcggggtccctccggacgggaaaaattatctgctctggaggtccagttccatcgggacagccagcaacaggaggcagagacgccacccactagttcgagtggctgtggcgggggagcgggaaagcctagggaagagaagcggacagctctgagcaaagttgtaataagacgtttacctcccggattgactaaggagcagctggaagagcaactgcggccactccccgcccatgattattttgagttcttcgccgcggatctgtccctgtaccctcacttatattccagagcttacatcaacttccgcaatcctgatgacattcttctttttcgggatcggttcgatggctatatcttcctcgatagtaaagatcccgaatacaaaaagttcctggagacctactgtgtcgaggaagagaagacctctgcaaaccccgagacacttctaggtgagatggaagcaaaaactcgcgaactgatagcccgacgcactaccccactccttgagtatattaagaacaggaaactcgaaaagcagagaatccgtgaggaaaagagagaagagcgcaggagaagggagctggaaaagaagaggttgagagaggaggagaagcgcagaaggcgggaagaggagcggtgcaaaaagaaagaaaccgataaacaaaaaaaaatcgcggagaaagaggttcgcatcaagctgctgaagaagccggagaagggcgaagagccaacaacggagaagccgaaggagcggggtgaggagatagatacgggagggggtaagcaagagagctgcgcacctggtgccgtggtgaaagcccgcccaatggaagggagcttagaagagccgcaagagacctcccattcaggctccgacaaagaacatagggacgttgaacggtcccaggagcaagagtcagaagctcagcgctaccatgtggacgatggtaggcgtcaccgcgctcaccacgaaccagaacgcttgtctcggaggtccgaggatgaacagcgatggggcaagggtcctgggcaggataggggaaaaaaagggtcgcaggactctggcgcacctggagaggcaatggagcgcctgggaagggcccaacgttgcgacgattcacccgcgccacgaaaggagcggctggccaacaaggacagacctgccttgcagctctacgatcccggggcaagattccgtgctcgggaatgtggtggaaatcggcgcatatgtaaggctgagggttcaggaacgggccccgaaaagcgagaggaagcggaatag

SEQ ID NO: 232835 - DNA, 1332 bp, Artificial Sequence
  derived and/or modified sequence
atgcgcagcgagaaggagggagctggaggactcagggcggctgtggccgctaggggtccttccggacgagaaaaactcagtgctctcgaggtccagttccatagggactcccagcagcaggaagctgaaactccgccaacatcgagtagtggatgcggtggaggggctggcaaacccagagaggaaaaaagaaccgctctctctaaggttgttattagacgactccctcccggtcttaccaaggagcagctcgaagaacagctgaggcctctccctgcacatgattattttgaattcttcgcagcagatctgtcactctacccccatttgtatagcagagcgtatataaattttcgtaacccagacgacatcctcctgtttcgcgataggttcgacgggtacatctttctggattccaaagaccccgagtataagaagtttctggagacctactgtgtggaggaggagaagacctctgctaacccggaaacgctgctaggtgagatggaggcaaagactagagagctaatagcacgacgtaccactcccttgctggaatacatcaagaatcgtaagctggagaagcagaggatacgagaggaaaagcgggaagagcggaggaggcgcgagttggagaagaagaggctccgcgaggaagaaaagcgtagacgcagggaggaggagcggtgcaaaaagaaagaaaccgacaagcagaagaagatagccgagaaggaggtgagaatcaaacttctgaaaaaaccagaaaagggcgaggaaccgacgaccgaaaaaccgaaggagcgtggtgaagagattgataccggaggcggaaaacaggagtcctgtgcccctggcgcagtagtgaaggccaggcccatggagggttctctggaagagccgcaggagacctcacacagcggatctgacaaggagcatcgggatgtcgagcgctcccaagagcaagagagcgaagcacaacgttaccatgtggacgacggaagaaggcatcgggcacaccacgaaccagaaagactgtcccgcaggagtgaggatgaacagagatggggaaagggccctggacaggataggggaaagaagggttctcaggacagtggagcccctggagaggcgatggagcgactgggtcgcgctcaacgatgtgatgactctccggctccacggaaggaacggctcgcgaacaaggaccgacccgctttacagctgtacgacccgggagctagatttagagcccgtgagtgtggcggaaacaggagaatatgtaaggcagaaggctccggcactgggccagagaaacgtgaagaggctgagtag

SEQ ID NO: 232836 - DNA, 2235 bp, Artificial Sequence
  derived and/or modified sequence
ggagagtgcggcatgcgctcggaaaaggagggggccggaggccttcgggcggccgttgccgcgcggggcccgagcgggagggagaagctgtcggccctagaagtgcagttccaccgcgactcgcagcagcaggaggctgagacgccgccaacttcgtcctccggttgcgggggcggtgcgggcaaacctcgcgaggagaagaggacggccctgagcaaggtggtcatccgccgcctgcctccgggcctcaccaaggagcagctggaggagcagctgcgcccgctgccagcacacgactacttcgagttcttcgccgccgacctgagtctttatcctcatctctactcaagagcatacattaattttaggaatcctgatgacatccttctttttagagatcgttttgatggatatatcttccttgacagcaaagatccagaatataagaagtttttagaaacctactgtgtggaggaagagaagaccagtgccaaccctgagactctgctgggggagatggaggcgaagacaagagagctcattgctagaagaaccacacctcttttggaatatattaaaaatagaaaattagaaaagcagagaattcgagaagagaagcgagaagaacggaggaggagagagttagaaaagaaacgtttgcgggaagaggaaaaaagaagaagaagagaagaagaaagatgcaaaaaaaaagagacagataaacagaagaaaattgcagagaaagaagtaaggattaagcttcttaagaaaccagaaaagggagaggaaccaaccacagagaaaccaaaagaaagaggagaggagattgatactggaggtggcaagcaggaatcctgtgcccccggtgcagtcgtaaaagccaggcccatggaaggctcgctggaggagccccaggagacgtcacacagcggcagtgataaagagcacagggatgtggagagatctcaagaacaagaatctgaagcacaaagataccatgtggatgacggcaggaggcacagagctcaccacgagcctgaacggctttccagaaggagtgaggatgagcagagatgggggaaaggacctggccaagacagagggaagaaggggagccaggacagcggggctccgggggaggccatggagagactgggaagagcgcagaggtgtgacgacagtccagcacccagaaaagagcgactggcaaacaaggaccggccagccttgcagctgtatgatccaggagctcgcttccgagcgcgagagtgtggcggaaacaggaggatctgcaaggcagaaggttcggggactggtcctgagaagagggaagaggcagagtgagtcactgcacgcacctggcctccatggacgagcaagggcatcccagaaacgtgtaaatgaccccgagtgtgactgggaaggagaacttattccttaccaggaaactggaagctaaaaatacagagggtgacgtagaaacacgcagaaaccattctaaagaaagtagtgatcttgtattaaattgagcagaattctcacagattttaccattcctgttataaactagtatttgttgtttagccaaaacagaaaatgatttccactggacagtagaaaaatatgtgtaaaatagggaagaaagttagtattggatcagtgtgagtcctgaagcactttcagtgctgtgagaacgacatccactttgggtttcattcgtttgtaagcagaggagctgtcagtcactcgtgcttctcggtggcctctgagccatggtgtcgagtgaagagtagttcttgtttgttacaacctttgtgagtcagccatgcccgcaaagcgtgctgtgttttagtcctggtaggaatatttatcagagttcacactatataaaacccaacagcttcaactattgccctttcaacagttttgccactgaccggatagaaacggtttcagtctctggatggatgtgtttgtggtttgtaaccattacggtttaaaccatggtttaagaatttgcccaaataacagaaattttgttcgggaagggataaactagatatagcatacagagcctgtttttgagttttagatactttatttgtaaataacttaaaatagctttctgaaaccgtgcattctgtagtttcttcctttcagtgaaattgctaaatgtcaatgtatttttggcactgcgattttaaccatttattaaataaaaattttgttaaagaa

SEQ ID NO: 232837 - protein, 236 aa, Artificial Sequence
  derived and/or modified sequence
MSEAPRAETFVFLDLEATGLPSVEPEIAELSLFAVHRSSLENPEHDESGALVLPRVLDKLTLCMCPERPFTAKASEITGLSSEGLARCRKAGFDGAVVRTLQAFLSRQAGPICLVAHNGFDYDFPLLCAELRRLGARLPRDTVCLDTLPALRGLDRAHSHGTRARGRQGYSLGSLFHRYFRAEPSAAHSAEGDVHTLLLIFLHRAAELLAWADEQARGWAHIEPMYLPPDDPSLEA

SEQ ID NO: 232838 - protein, 279 aa, Artificial Sequence
  derived and/or modified sequence
MGRAGSPLPRSSWPRMDDCGSRSRCSPTLCSSLRTCYPRGNITMSEAPRAETFVFLDLEATGLPSVEPEIAELSLFAVHRSSLENPEHDESGALVLPRVLDKLTLCMCPERPFTAKASEITGLSSEGLARCRKAGFDGAVVRTLQAFLSRQAGPICLVAHNGFDYDFPLLCAELRRLGARLPRDTVCLDTLPALRGLDRAHSHGTRARGRQGYSLGSLFHRYFRAEPSAAHSAEGDVHTLLLIFLHRAAELLAWADEQARGWAHIEPMYLPPDDPSLEA

SEQ ID NO: 232839 - protein, 278 aa, Artificial Sequence
  derived and/or modified sequence
MIVAAEAVAAPRCALVGDRSGADAPRAKGHSLRTCYPRGNITMSEAPRAETFVFLDLEATGLPSVEPEIAELSLFAVHRSSLENPEHDESGALVLPRVLDKLTLCMCPERPFTAKASEITGLSSEGLARCRKAGFDGAVVRTLQAFLSRQAGPICLVAHNGFDYDFPLLCAELRRLGARLPRDTVCLDTLPALRGLDRAHSHGTRARGRQGYSLGSLFHRYFRAEPSAAHSAEGDVHTLLLIFLHRAAELLAWADEQARGWAHIEPMYLPPDDPSLEA

SEQ ID NO: 232840 - DNA, 711 bp, Artificial Sequence
  derived and/or modified sequence
atgagcgaggcccccagagccgagaccttcgtgttcctggacctggaggccaccggcctgcccagcgtggagcccgagatcgccgagctgagcctgttcgccgtgcacagaagcagcctggagaaccccgagcacgacgagagcggcgccctggtgctgcccagagtgctggacaagctgaccctgtgcatgtgccccgagagacccttcaccgccaaggccagcgagatcaccggcctgagcagcgagggcctggccagatgcagaaaggccggcttcgacggcgccgtggtgagaaccctgcaggccttcctgagcagacaggccggccccatctgcctggtggcccacaacggcttcgactacgacttccccctgctgtgcgccgagctgagaagactgggcgccagactgcccagagacaccgtgtgcctggacaccctgcccgccctgagaggcctggacagagcccacagccacggcaccagagccagaggcagacagggctacagcctgggcagcctgttccacagatacttcagagccgagcccagcgccgcccacagcgccgagggcgacgtgcacaccctgctgctgatcttcctgcacagagccgccgagctgctggcctgggccgacgagcaggccagaggctgggcccacatcgagcccatgtacctgccccccgacgaccccagcctggaggcctag

SEQ ID NO: 232841 - DNA, 711 bp, Artificial Sequence
  derived and/or modified sequence
atgagcgaagctccccgggcggagaccttcgtgtttctcgatctggaggctaccggtttgcccagcgtagagcctgaaatagcagaactcagcctgttcgctgtgcacaggtcttctctagagaaccccgaacatgatgaatccggcgcgcttgttcttccacgcgtgctggacaagctgacgctgtgtatgtgcccagagaggcctttcaccgcgaaagctagcgaaattactgggctaagttcggaaggcctggcacggtgtcgcaaggcagggtttgacggtgcagtggtcaggacgcttcaggcattcttgagtcggcaggcaggacctatatgcctcgtggcacataatgggttcgattatgattttccgctattgtgcgctgagctgagacgactgggtgccaggctaccgagggatacagtatgtctcgatacactcccagcccttcgtggtctggatcgcgcccatagccacggtacaagagcacgcggtcggcagggctattcattgggctccctgtttcaccgttatttcagagccgagcctagcgctgcccattctgccgagggtgacgtccacacactgctgctgatattcctccacagagccgccgaactgttagcttgggctgacgagcaggcaagggggtgggctcacattgagccaatgtacctcccccccgacgacccgtcccttgaggcctag

SEQ ID NO: 232842 - DNA, 711 bp, Artificial Sequence
  derived and/or modified sequence
atgtctgaggcccccagggctgagacctttgtgttcctggacctggaggccaccggcctgcccagcgtggagcctgagattgctgagctgagcctgtttgctgtgcacaggagcagcctggagaaccctgagcatgatgagagcggggccctggtgctgccccgggtgctggacaagctgaccctgtgcatgtgcccagagcggcccttcaccgccaaggccagcgagatcaccggcctgagcagcgagggcctggcccgctgcaggaaggccggctttgatggagctgtggtgaggaccctgcaggccttcctgagccggcaggccggccccatctgcctggtggcccacaacggctttgattatgacttccccctgctgtgtgccgagctgcggcggctgggcgcccggctgccccgggacacagtgtgcctggacaccctgcctgccctgcggggcctggaccgggcccacagccacggcacccgggcccggggccggcagggctacagcctgggcagcctcttccaccgctacttccgggcagagcccagcgctgcccacagcgcagaaggagatgtgcacaccctgctgctgatcttcctgcacagagctgctgagctgctggcctgggcagatgagcaggcccggggctgggcccacatcgagcccatgtacctgcccccagatgaccccagcctggaggcctag

SEQ ID NO: 232843 - DNA, 711 bp, Artificial Sequence
  derived and/or modified sequence
atgagcgaggccccccgggccgagaccttcgtgttcctggacctggaagccacaggcctcccaagtgtagaacctgagatcgcagagctgtcattattcgcggtacatcggtcctccttggaaaacccagagcacgacgagagcggtgccctggtgctgcctcgtgtcctggacaaactgaccctttgcatgtgcccagaacggcctttcacggcaaaagcgagtgagattacaggcctctccagtgagggcctggctcgttgtaggaaagcagggttcgacggagcagtggtgaggacgttgcaggctttcctgtcacggcaggcaggcccgatatgtcttgtggcacataacgggttcgactacgatttcccgctgctgtgtgccgagctgagaaggctcggcgctcggctgccccgcgatactgtttgtcttgataccttgccagctttaagagggttggaccgagcacatagtcatggcacccgagcacgaggccgtcagggctactcactgggctcactgttccatcggtattttagagccgaaccttccgccgcacactcagccgaaggggacgtccacacactgctcttaatcttcctccacagggccgcagaactattggcctgggcagacgaacaagcccgggggtgggcccatatcgaacctatgtatttgccccccgacgaccccagcctcgaggcttag

SEQ ID NO: 232844 - DNA, 711 bp, Artificial Sequence
  derived and/or modified sequence
atgtcagaagctcctcgggcagagacttttgtgtttctcgatctggaagcgaccggcctccctagcgtcgaaccagagattgccgagctgtctctgttcgccgtgcacaggagctcactggaaaacccagagcacgacgagtcaggtgctctggtgcttccccgagttttggacaagcttactctctgcatgtgtcccgaacgcccatttaccgccaaggctagtgagattacggggttaagctccgaggggctggccaggtgccgaaaagccggtttcgatggcgcagtggtccgaacactgcaggcatttttatctcggcaggccggacccatatgcttggtggcacacaatggattcgattatgactttcccttactatgcgctgagcttcgcaggctgggggctcgtctaccacgggatacagtatgtttagacacactccccgctctccgcggactggacagggcccatagccacggcacacgagccaggggacggcaagggtacagtctggggagcctgtttcataggtacttccgggcagagccttccgcggctcattctgccgaaggcgacgtgcacactcttcttctcatctttctacatcgcgcagccgaacttctggcatgggcagatgaacaggccaggggctgggctcatattgaaccaatgtatctgcctcccgacgacccttctttagaagcctag

SEQ ID NO: 232845 - DNA, 1255 bp, Artificial Sequence
  derived and/or modified sequence
caccttggtcacactccagagctcgcttcatccccacgagcggcacctgatctccagtgacggggagactgaggcctggcaaagaggacctgttgcctttgtgtaactggccccagcatgggggaggcattggccccagcatgggggaggcattgaccccaggcctgccaggcctggcagccacagcctggctaggtggaggttactgccttccgcaccactctggcttcctccccgtgcctgtgaagagctcggggcctgcttcctaatttgtaaacacggggcgtgtgtctcagtggctgtgagctagcgagggggtggcgagcgagccggctgcgcaggtcctgaggccccaggcctcattgttggccaacaggcagctgggggcgggctgcggccgctgattaaaggccgcctagagcagcctgtgtggcgacaggtgcccagaagcccaggaagccggtcagtgcccgccccagtcctcagggtttgtgcctctcgctcggacagtttgaggacttgctatccccgtgggaacatcaccatgtccgaggcaccccgggccgagacctttgtcttcctggacctggaagccactgggctccccagtgtggagcccgagattgccgagctgtccctctttgctgtccaccgctcctccctggagaacccggagcacgacgagtctggtgccctagtattgccccgggtcctggacaagctcacgctgtgcatgtgcccggagcgccccttcactgccaaggccagcgagatcaccggcctgagcagtgagggcctggcgcgatgccggaaggctggctttgatggcgccgtggtgcggacgctgcaggccttcctgagccgccaggcagggcccatctgccttgtggcccacaatggctttgattatgatttccccctgctgtgtgccgagctgcggcgcctgggtgcccgcctgccccgggacactgtctgcctggacacgctgccggccctgcggggcctggaccgcgcccacagccacggcacccgggcccggggccgccagggttacagcctcggcagcctcttccaccgctacttccgggcagagccaagcgcagcccactcagccgagggcgacgtgcacaccctgctcctgatcttcctgcaccgcgccgcagagctgctcgcctgggccgatgagcaggcccgtgggtgggcccacatcgagcccatgtacttgccgcctgatgaccccagcctggaggcctga

SEQ ID NO: 232846 - DNA, 840 bp, Artificial Sequence
  derived and/or modified sequence
atgggcagagccggcagccccctgcccagaagcagctggcccagaatggacgactgcggcagcagaagcagatgcagccccaccctgtgcagcagcctgagaacctgctaccccagaggcaacatcaccatgagcgaggcccccagagccgagaccttcgtgttcctggacctggaggccaccggcctgcccagcgtggagcccgagatcgccgagctgagcctgttcgccgtgcacagaagcagcctggagaaccccgagcacgacgagagcggcgccctggtgctgcccagagtgctggacaagctgaccctgtgcatgtgccccgagagacccttcaccgccaaggccagcgagatcaccggcctgagcagcgagggcctggccagatgcagaaaggccggcttcgacggcgccgtggtgagaaccctgcaggccttcctgagcagacaggccggccccatctgcctggtggcccacaacggcttcgactacgacttccccctgctgtgcgccgagctgagaagactgggcgccagactgcccagagacaccgtgtgcctggacaccctgcccgccctgagaggcctggacagagcccacagccacggcaccagagccagaggcagacagggctacagcctgggcagcctgttccacagatacttcagagccgagcccagcgccgcccacagcgccgagggcgacgtgcacaccctgctgctgatcttcctgcacagagccgccgagctgctggcctgggccgacgagcaggccagaggctgggcccacatcgagcccatgtacctgccccccgacgaccccagcctggaggcctag

SEQ ID NO: 232847 - DNA, 837 bp, Artificial Sequence
  derived and/or modified sequence
atgatcgtggccgccgaggccgtggccgcccccagatgcgccctggtgggcgacagaagcggcgccgacgcccccagagccaagggccacagcctgagaacctgctaccccagaggcaacatcaccatgagcgaggcccccagagccgagaccttcgtgttcctggacctggaggccaccggcctgcccagcgtggagcccgagatcgccgagctgagcctgttcgccgtgcacagaagcagcctggagaaccccgagcacgacgagagcggcgccctggtgctgcccagagtgctggacaagctgaccctgtgcatgtgccccgagagacccttcaccgccaaggccagcgagatcaccggcctgagcagcgagggcctggccagatgcagaaaggccggcttcgacggcgccgtggtgagaaccctgcaggccttcctgagcagacaggccggccccatctgcctggtggcccacaacggcttcgactacgacttccccctgctgtgcgccgagctgagaagactgggcgccagactgcccagagacaccgtgtgcctggacaccctgcccgccctgagaggcctggacagagcccacagccacggcaccagagccagaggcagacagggctacagcctgggcagcctgttccacagatacttcagagccgagcccagcgccgcccacagcgccgagggcgacgtgcacaccctgctgctgatcttcctgcacagagccgccgagctgctggcctgggccgacgagcaggccagaggctgggcccacatcgagcccatgtacctgccccccgacgaccccagcctggaggcctag

SEQ ID NO: 232848 - DNA, 711 bp, Artificial Sequence
  derived and/or modified sequence
atgtccgaagctcctagggccgaaaccttcgtatttctggacctggaggccacagggctccccagcgtcgagccagaaattgcagagctgtcactgttcgcggttcaccgcagttccctggaaaacccagaacacgacgaatccggtgcgcttgtgttgcctagggtgttggataagttgaccctttgtatgtgccccgaaaggccttttaccgccaaggcaagcgagattaccggcctgtcctcggaagggttagcgaggtgtcggaaggctgggttcgacggcgctgtcgtacgaacattgcaggcctttctctctcggcaggccggtcctatctgtctggttgctcataacggattcgactatgacttccccttgctgtgtgcggagttaagacgcctgggggcacgtctcccacgagacaccgtatgcctcgatactctccccgcactgagaggtctcgatagagcacactcccatggcaccagggctcggggacgccagggttattctctggggtccttgttccacagatacttccgggcagagccatcagcggcccatagtgccgagggagacgtccacacgctccttctgatttttctgcacagagcggctgagttgctggcttgggctgacgaacaggctcgcggctgggctcatatcgagccgatgtaccttccacccgacgacccatcactggaggcatag

SEQ ID NO: 232849 - DNA, 840 bp, Artificial Sequence
  derived and/or modified sequence
atggggagggccggttctccactgccccgttcaagttggccacggatggatgattgtgggagcagaagtcggtgtagccccaccttatgctcctctctgcgaacatgttaccccagaggaaacatcacaatgagtgaggcaccccgcgccgagacttttgtcttcctggatctggaggcaaccggactgccatccgttgaacccgagatcgcagagctgtctctgtttgctgtccaccgatcctcactcgagaatcctgaacacgatgaatctggggctcttgttcttccaagggtgttggataaactgactttgtgtatgtgtccagagagaccattcactgcaaaagcatcggagattacagggttgagctcagagggtctggcccgctgtcgaaaagccgggttcgatggagccgtcgtccgaacgctccaagcttttctatcccgccaggctggtcccatctgcctcgtcgctcacaatggattcgactacgacttcccccttctgtgcgctgaactgagaagacttggtgctcgcctgccacgggacaccgtgtgcctggatacgctgcccgcgttgaggggtttggacagggcccacagtcacgggacccgagccagggggcggcaaggatacagcttagggagtctctttcaccggtactttcgggccgaaccaagcgccgctcactcagctgagggcgacgtgcacaccctgctgctgatcttcttacaccgggccgccgagctcctcgcttgggcagacgaacaggccagaggttgggcccatatagagccaatgtatctgcctcccgatgacccatctctggaggcttag

SEQ ID NO: 232850 - DNA, 711 bp, Artificial Sequence
  derived and/or modified sequence
atgtccgaggctcctagggctgagactttcgtgttcctggatctcgaagccaccggtctgccatcagtcgaacccgagatagccgagttgtctctgttcgcagtccacagatcctccctggagaatcccgagcacgacgagagcggagccctggtactgccgagagtgctggacaagctgactttgtgcatgtgcccggagcgacccttcaccgcgaaggccagcgagataacgggtctgtcttcggaagggctggctcgctgccgcaaggcaggattcgacggcgctgtcgtgaggaccctgcaagctttcctgagccggcaggccgggcctatctgtttagtcgcccacaacgggttcgactatgatttccctctactatgtgcagagctgcgtcggttaggcgctcggctgcctcgagacaccgtgtgcctggatacgcttcccgcgctgaggggcctcgaccgagcgcacagccacgggacacgcgccaggggcagacagggctacagtctgggatcactgtttcatcggtacttccgagctgagccatcagccgctcattcggcagagggcgatgttcacacgctcctcctcattttcctgcaccgcgccgccgaactccttgcatgggcagacgagcaggccagaggctgggctcatatcgaacctatgtatttaccacccgacgatccctccttagaagcttag

SEQ ID NO: 232851 - DNA, 711 bp, Artificial Sequence
  derived and/or modified sequence
atgtctgaggctcctcgcgccgaaaccttcgtcttcctggatcttgaggcaaccgggcttccttctgtggagcctgagatcgccgaattaagtcttttcgccgtgcacaggagttctcttgagaatcccgaacatgacgaatctggagctctggtcctccctagggtgctggataagttgactttgtgtatgtgcccagaaaggccatttaccgcaaaagcaagcgaaattaccgggctgtcttctgagggtttagctagatgcagaaaggccggtttcgacggggctgtggtgcggacgctccaggccttcttgtctcgtcaggccggtcccatctgtctggtggcccacaatggcttcgattacgactttccactattgtgtgcagagctgcggcgtttaggcgcgcgcctaccaagagatacagtgtgcctggacacccttccagcccttcgggggctcgacagagcgcacagtcacggtacccgggctaggggccgtcagggatatagtctgggcagtctgttccataggtactttcgtgctgagcctagcgcagcccactccgcggagggcgacgtccacacactgctcttaatctttctgcaccgggctgcagagttgctggcctgggcagatgagcaggcaaggggatgggcccacattgagcccatgtacttgccaccagatgatccgagcctcgaagcctag

SEQ ID NO: 232852 - DNA, 840 bp, Artificial Sequence
  derived and/or modified sequence
atgggaagggctggcagtccacttccccggtccagctggccacggatggacgactgtggctccaggagccggtgctctcctactctctgttctagcctgcgaacatgttatcctagaggaaacattaccatgagtgaggccccccgcgctgaaaccttcgtgtttctcgatctcgaagcaacggggctgccttcggtggaaccggaaattgctgaattaagccttttcgccgtgcaccgctccagcctcgagaatccagaacacgatgaatccggcgccctagtgctgcctagggtactagacaagctaactctttgcatgtgccccgagagaccttttaccgcaaaggctagcgaaattactggcctctcaagtgagggtttggctaggtgccgcaaggcaggattcgacggggcagtagttcgaaccctccaggcctttctcagtcgacaggccggtccaatctgcctggtcgcacataatgggttcgattacgatttccctctcctatgcgctgaactcagacgacttggggcccgtctgcctagggatacggtgtgcttagacaccctaccggctctgcgagggctggacagggcgcactctcatgggactagggcccggggcagacagggctactctttgggcagcctgtttcataggtactttcgggcagagccgtcagcagcccatagcgctgagggagatgtgcataccctcctgctgatttttctgcatagagcagctgagctgttagcttgggccgacgaacaagcccgtggatgggcccacatagaaccaatgtatctgcccccggatgatcctagcctggaggcatag

SEQ ID NO: 232853 - DNA, 711 bp, Artificial Sequence
  derived and/or modified sequence
atgtccgaagctccacgagccgaaacattcgtatttctggaccttgaggcaaccgggttgcctagcgtggagccagaaatcgccgagctatccctgttcgccgtgcataggtctagcttggagaatcccgagcatgatgaatcgggcgccctggtcctccccagggttctggacaagcttacactgtgcatgtgccccgagcgcccctttacagctaaggcatctgagattactggactgtcttctgaggggctcgcccgatgcagaaaagccggctttgacggggccgtggtgcgcacgttacaggcgttcctgagcagacaagccgggccaatttgcctggtggcgcacaatggatttgactatgacttcccactgctgtgtgcggaactgagacgcctgggagcacgtcttccccgggacacggtgtgcttagacacgctcccagccctgagaggactggaccgggctcactcccacggcacaagggctaggggcagacagggttatagcctcggctctcttttccacaggtacttccgagccgagcccagtgcggcgcattctgccgaaggtgacgttcatacgttacttcttatcttccttcatcgggcggcggagctattggcctgggcagacgagcaggctcgggggtgggcccatattgagcccatgtacctgccgccagacgatccatccctggaggcctag

SEQ ID NO: 232854 - DNA, 840 bp, Artificial Sequence
  derived and/or modified sequence
atgggcagagccggaagcccactcccccgtagctcatggccacgaatggatgactgtggatcccgtagtcggtgtagcccaacactctgttcttcactaagaacatgttatcctcggggcaatattaccatgtccgaagcccccagagcagaaacatttgtgttcctcgacttggaggctacaggattacctagcgtggaaccagaaattgcagaattaagcctgttcgcggtgcatagatcatcactcgaaaatccagaacatgacgaatcaggggcacttgtcctcccgcgggtgctcgacaaattaacactttgcatgtgtcccgaaagacctttcacagccaaagccagcgagataaccgggctgtctagcgaagggctggctcggtgtcggaaggcaggctttgatggggcggtagtgagaaccttacaggcctttctctcccgacaggcaggacccatatgtctggtcgcacacaatgggttcgattacgatttccctctactatgtgccgagctgcgccgtttgggggcgcggctgcccagggacaccgtttgcctggatactttgccggctctcagaggcctggatcgggctcacagccacggtacacgagctcgcggaaggcagggatatagcctggggtccttgttccacaggtatttccgggcggagcctagtgccgcccatagcgcagagggtgacgtgcacacgcttctgctgatttttctgcaccgagctgccgagcttctggcatgggcagacgaacaggccagaggctgggcccacatcgaaccaatgtacttaccacctgacgacccctcactcgaggcctag

SEQ ID NO: 232855 - DNA, 837 bp, Artificial Sequence
  derived and/or modified sequence
atgatagtggctgcggaagccgtggcagcgccgaggtgcgctctcgttggggatcgctccggggcggacgcaccacgtgcaaaaggtcactctcttcggacatgttacccccgggggaacattacaatgagcgaggctcctcgggccgagacattcgtttttctcgatctggaggctacggggctgccctcggtggagcccgagattgcagaacttagcctatttgccgtgcatagatctagccttgaaaaccccgaacatgatgagagtggggctttggtcctccctcgcgtgctagacaagctcaccctatgtatgtgcccagaaagaccgtttaccgcaaaggcctctgagatcacaggcctgtcttcagagggcctggctcgatgtcggaaggccgggttcgacggtgctgttgtgaggaccctccaggcctttctttccagacaggctggaccgatctgcctggtcgctcacaacggcttcgactatgatttcccactcctctgtgcggaactgcggcgattgggagcccggctacccagggacactgtgtgcctagacactctgcctgccttacgaggactggaccgggcacacagccatggtactcgcgctcgaggccggcagggttatagcctgggcagcttgttccaccgctactttagagcagaaccttccgccgcacacagcgctgaaggcgacgttcataccctcctcctgatctttttgcatcgagctgcagagctactggcgtgggccgatgagcaggccaggggatgggcccacatcgaacctatgtatctgcccccagatgatccatcactagaggcttag

SEQ ID NO: 232856 - DNA, 840 bp, Artificial Sequence
  derived and/or modified sequence
atgggccgggccggcagccccctgcccaggagctcctggcccaggatggatgactgtggcagccgcagccgctgcagccccaccctgtgcagcagcctgcggacctgctacccccggggcaacatcaccatgtctgaggcccccagggctgagacctttgtgttcctggacctggaggccaccggcctgcccagcgtggagcctgagattgctgagctgagcctgtttgctgtgcacaggagcagcctggagaaccctgagcatgatgaaagtggggccctggtgctgccccgggtgctggacaagctgaccctgtgcatgtgcccagagcggcccttcaccgccaaggccagcgagatcaccggcctgagcagcgagggcctggcccgctgcaggaaggccggctttgatggagctgtggtgaggaccctgcaggccttcctgagccggcaggccggccccatctgcctggtggcccacaatggatttgattatgacttccccctgctgtgtgccgagctgcggcggctgggcgcccggctgccccgggacacagtgtgcctggacaccctgcctgccctgcggggcctggaccgggcccacagccacggcacccgggcccggggccggcagggctacagcctgggcagcctcttccaccgctacttccgggcagagcccagcgctgcccacagcgcagaaggagatgtgcacaccctgctgctgatcttcctgcacagagctgctgagctgctggcctgggcagatgagcaggcccggggctgggcccacatcgagcccatgtacctgcccccagatgaccccagcctggaggcctag

SEQ ID NO: 232857 - DNA, 837 bp, Artificial Sequence
  derived and/or modified sequence
atgattgtggccgctgaggccgtggccgccccccgctgtgccctggtgggggacagaagtggagcagatgccccccgggccaagggccacagcctgcggacctgctacccccggggcaacatcaccatgtctgaggcccccagggctgagacctttgtgttcctggacctggaggccaccggcctgcccagcgtggagcctgagattgctgagctgagcctgtttgctgtgcacaggagcagcctggagaaccctgagcatgatgagagcggggccctggtgctgccccgggtgctggacaagctgaccctgtgcatgtgcccagagcggcccttcaccgccaaggccagcgagatcaccggcctgagcagcgagggcctggcccgctgcaggaaggccggctttgatggagctgtggtgaggaccctgcaggccttcctgagccggcaggccggccccatctgcctggtggcccacaacggctttgattatgacttccccctgctgtgtgccgagctgcggcggctgggcgcccggctgccccgggacacagtgtgcctggacaccctgcctgccctgcggggcctggaccgggcccacagccacggcacccgggcccggggccggcagggctacagcctgggcagcctcttccaccgctacttccgggcagagcccagcgctgcccacagcgcagaaggagatgtgcacaccctgctgctgatcttcctgcacagagctgctgagctgctggcctgggcagatgagcaggcccggggctgggcccacatcgagcccatgtacctgcccccagatgaccccagcctggaggcctag

SEQ ID NO: 232858 - DNA, 711 bp, Artificial Sequence
  derived and/or modified sequence
atgagcgaggccccccgggccgagaccttcgtgttcctggacctggaagccacaggactaccttccgtcgaaccagagatagcggaattgagcctattcgccgtccaccgcagcagtctcgaaaaccctgaacacgatgagagcggtgcattagtactcccacgggtactcgataaactgaccctctgtatgtgcccagaaagaccctttaccgcaaaggcttctgagatcaccggcttgagtagcgagggtctggcgcggtgcaggaaggccggtttcgacggagccgttgtgcgaaccctgcaggcctttttatctaggcaggccggcccaatttgtctggtcgcccacaacgggtttgattacgactttcccctgctttgcgcggaactcaggcgcttaggtgccaggcttcctagggatactgtgtgccttgatacgctcccagcacttagagggctggatcgcgcccatagtcatggcactagagcccgagggcgccaggggtattcattaggctctctgttccatcggtacttccgagctgaaccctcggctgcccacagcgccgagggggacgtccatactctgctcctgatctttctacaccgcgctgcggaattactggcatgggccgatgagcaggcacgaggctgggcccacattgagccgatgtatttgcctcccgatgaccccagcttggaggcatag

SEQ ID NO: 232859 - DNA, 840 bp, Artificial Sequence
  derived and/or modified sequence
atgggccgggccggcagccccctgccccggagcagctggccccggatggacgattgcgggagtagatctcgctgttccccaacactctgctcaagtttgaggacctgttaccctcgaggcaacattacaatgtcggaggctcctcgcgccgagacctttgtgttccttgacctcgaggcgacagggctgcccagcgttgagcctgagattgctgaactgagcctgtttgccgtccatcgcagcagtctcgagaaccccgaacacgacgaaagcggcgcactggtgttgccaagggtgctggataagcttaccctgtgtatgtgtccagaaaggccattcactgcaaaggcgagcgagatcacaggtctctcctccgaaggcttggcaaggtgtaggaaggcaggcttcgatggcgccgtggtccgcactctacaggcattcctctccaggcaagcgggacctatctgtcttgtggcacataacgggttcgactacgattttcctctgctctgtgcagaactcaggcgactgggagcccgactgccaagggacaccgtatgcctcgacacactgcctgccctgaggggacttgaccgggcgcactctcacggaacccgggctcggggccgacagggttactccttgggcagcctgttccatcggtactttcgagctgaacccagtgccgctcattctgccgagggcgatgtacacactctacttttgatttttctgcaccgggcagcagagctgctggcatgggccgatgagcaggctcgcggttgggcacacatcgaaccaatgtatctgccacccgacgacccttctctggaggcttag

SEQ ID NO: 232860 - DNA, 711 bp, Artificial Sequence
  derived and/or modified sequence
atgagcgaggccccccgggccgagaccttcgtgttcctggacctggaggcaactggccttccaagcgtggagccggagatagcagagctctcattatttgccgtgcatagatctagtcttgagaatccagaacacgatgaaagcggagctcttgtcctcccacgggtactcgacaaattgactctctgtatgtgtccagagaggccttttactgcaaaggcatccgagatcactggcctcagttccgaagggttagccaggtgtaggaaagcgggcttcgatggagccgtagtccggaccctgcaggcctttctttctagacaggccggcccgatttgcctcgttgcgcataacggattcgattacgatttcccactgctgtgtgccgaactacggcgtctgggcgcccgcctgccccgggataccgtgtgtttggacactctgcctgcccttcgcggcctcgaccgcgctcattcgcacgggacgagagcccgcggccgccaaggctacagcctgggatcactgtttcatagatattttcgagccgagccatccgctgcccactccgccgaaggggacgtgcatacactacttctgatctttctgcatagagccgccgagctgctggcatgggctgatgaacaggccaggggatgggcacacatcgagcccatgtatctgccccctgatgaccccagcctggaagcctag

SEQ ID NO: 232861 - DNA, 711 bp, Artificial Sequence
  derived and/or modified sequence
atgagcgaggccccccgggccgagaccttcgtgttcctggacctggaggcaacgggcctgccttctgtcgaaccagaaattgcagagctctctctgttcgcagtgcacaggagtagcctcgaaaaccctgagcatgatgaatctggggcactcgtcctacctcgggtgcttgacaaactgacactctgcatgtgtccagaacggccctttacggcaaaggcgtcggagattaccgggttaagctcggagggactggcacgctgcagaaaagctgggttcgacggcgccgtggtgcggacattacaggctttcctgagccggcaggctggacctatttgtctggtggcacataacggctttgattacgactttcctctgctgtgcgctgagctgagacggcttggggcaaggctgccccgcgacaccgtttgcctagatacactcccagcgctcagaggcttggaccgtgcccatagtcacggcaccagagctaggggaaggcagggatactcccttggttctctttttcatcggtacttccgagcagaacccagcgctgctcacagcgccgagggagacgtccatacactgcttctcatctttctgcaccgcgcggcagaactcctggcatgggccgacgagcaggctagagggtgggcacacatagagcccatgtaccttccgccggacgacccaagccttgaggcctag

SEQ ID NO: 232862 - DNA, 840 bp, Artificial Sequence
  derived and/or modified sequence
atgggccgggccggcagccccctgccccggagcagctggccccggatggacgactgtggaagtaggtcgcgctgcagcccaacgctctgctcaagcttacgcacctgttacccccggggcaacatcaccatgtccgaggctccgcgggccgaaacttttgtgttcctggacctcgaggcaacgggtttgccatctgttgaacccgagattgctgagctgagcctgttcgctgtccaccgcagtagtcttgagaatcctgaacacgatgaaagtggtgccctcgtgttgccaagagtactggataagctcacattgtgtatgtgtccagagagaccattcacagctaaggcttcggagattacaggcttgtcctccgagggcctggctcgatgcagaaaagctggtttcgatggggccgtggtgcgcaccctgcaggcatttctgtcccggcaagctggccccatttgtcttgtcgctcataatggcttcgattacgactttcctctcctttgcgccgaattaagacggctgggcgcccgcctgccacgagacaccgtgtgcctggatactctcccggcattgagaggcttggatcgggcacactctcatgggacccgagcccggggtagacaaggctattccctcggaagtctgttccacagatatttccgcgccgaaccgtcagcagcacatagcgcagaaggtgacgtccataccctccttctgatattccttcaccgggctgctgaactgctggcatgggccgacgaacaagcccgtgggtgggctcatattgagccgatgtacctgccgccggacgacccctcactcgaagcctag

SEQ ID NO: 232863 - DNA, 711 bp, Artificial Sequence
  derived and/or modified sequence
atgagcgaggccccccgggccgagaccttcgtgttcctggacctggaagcaacaggcttacctagcgtggagccggaaattgccgaactgtccctttttgccgtacacagatccagcttggagaacccagagcacgacgagagcggagccttagtattgccgcgtgtcttggataaactgaccctctgcatgtgcccagaaaggcctttcacggccaaagcatctgaaatcaccggattgtcatctgaggggcttgctcgctgcaggaaggcaggcttcgatggggccgtggtcagaacgctgcaggctttcctttctcgacaggcaggccccatatgtctcgtggcacacaatggcttcgactacgatttcccactgctgtgcgcagaattgcggcggctcggcgcgaggcttccgcgggacacagtgtgcctggacaccttacccgcccttagaggactggatagggcccattctcatggaactagagcacgcggccgccagggttactcactcggtagtctgttccacaggtacttccgggctgaaccctcggctgctcatagtgcagaaggcgacgttcacacactactgctaatcttcctccatcgcgccgccgagctgctagcatgggctgacgaacaggcccgggggtgggcccacatcgagcctatgtatctgccacccgacgatccaagcctggaggcttag

SEQ ID NO: 232864 - DNA, 840 bp, Artificial Sequence
  derived and/or modified sequence
atgggccgggccggcagccccctgccccggagcagctggccccggatggacgactgcggatctagaagtagatgctcaccaaccctgtgttcctcgcttcgtacatgctacccacgggggaacatcacaatgtccgaggcccctagagcagaaaccttcgttttcctggatctggaggccactggcctccctagcgttgaacccgagattgccgaacttagcctgttcgctgtccaccgcagcagtcttgaaaatcctgaacatgatgagagtggtgccctcgtcttacctcgagtgctggataagctcaccctctgcatgtgccctgaacgcccttttaccgccaaagcctctgaaatcaccggcttgagctctgaggggctggccaggtgtcgcaaggccggcttcgatggtgcggttgtgcgcaccctccaggccttcctctcccgccaggcaggacccatctgtcttgtcgcacataatggctttgattacgattttccactcctctgtgccgaactacgaaggctgggtgcaaggctgccgcgggataccgtgtgcctcgacacacttccagctttacgcgggctggatcgtgcccatagccacggaacgcgcgccagaggacggcaagggtacagcctgggaagtctctttcaccggtattttcgagccgaaccctcagccgcgcactcagctgaaggtgacgtgcacacactgttgctgatcttcctgcaccgggcagcagagctgctcgcatgggccgatgagcaggcccgaggctgggcacacattgaaccgatgtacctgccacctgacgatccatccctcgaggcttag

SEQ ID NO: 232865 - DNA, 837 bp, Artificial Sequence
  derived and/or modified sequence
atgatcgtggccgccgaggccgtggccgccccccggtgcgccctggtcggagatcggagtggagcggacgcaccgagagccaaaggccattcactgaggacatgttaccctcgaggcaacatcactatgtctgaggcgcctagggcggagacttttgtgtttctcgacttggaagcaacaggcctgccaagcgttgagcccgaaattgctgagctttcgctgtttgcagtccacaggagctctctggagaatccagagcacgatgagagtggggcactcgtactgccccgggtcctggacaaactgaccctgtgtatgtgtcctgagcggccctttacggccaaggctagtgagattacagggctctcgtccgaaggcctggccaggtgtcgtaaggctgggtttgacggagccgtcgtgcgtaccctacaagccttccttagcaggcaagccggaccgatttgtctcgtcgcacacaatgggtttgactatgatttccccctgctctgtgctgagcttaggaggctgggggcaaggctgcctcgtgacaccgtctgcctcgatacactgcctgcacttagaggcctggacagggcgcactctcacggaacacgcgcccgggggcgccaggggtattcactgggctctctgttccatcggtacttcagggcagagcctagcgccgcacactctgctgaaggggacgtgcatacactgttgctgatcttcctgcacagggctgccgagttactcgcatgggctgatgagcaggctagaggatgggctcacattgagcctatgtatctccccccagatgatcccagcttggaagcatag

SEQ ID NO: 232866 - DNA, 711 bp, Artificial Sequence
  derived and/or modified sequence
atgtccgaagcaccacgggctgagacttttgtatttctggatcttgaggcaaccggtctacccagtgttgagcccgagattgcagaactatcgctgttcgccgtccacaggtcttctctggaaaaccccgagcatgatgagtccggggctctggttcttcctcgggtattggataaactgactctgtgtatgtgccctgaacggccattcacagctaaggcctcagagatcacagggttgtcctcggaaggccttgcgcgatgtcggaaagccggattcgatggggctgttgttagaacactgcaggcatttctcagtagacaggctggaccgatctgtctggtggcacacaacggattcgattatgattttcctctgctgtgtgccgagctgcgaaggctgggagcgcgtctgcctagagacaccgtgtgtttggatacactgcctgccttacgcggactcgaccgcgctcactcccacggtactagggcccgaggtcggcagggatacagcctgggtagtctctttcatcgttattttcgcgcagagccgtccgctgcacactccgcagaaggggatgtgcacacactacttctgatttttttacacagagcggctgaattactcgcctgggccgatgagcaggctcggggatgggcccatatcgagcccatgtacctgccacctgacgatcctagcctggaagcctag

SEQ ID NO: 232867 - DNA, 840 bp, Artificial Sequence
  derived and/or modified sequence
atgggcagagctggttcacccttgcccagatcctcttggccacggatggatgactgtggaagtcgttcccgctgtagcccaaccctctgttcgagtctgaggacgtgttaccccaggggaaacataaccatgtcggaggccccaagagccgagacatttgtgtttcttgacctggaagcaacaggcctcccctctgtggagcctgagatcgcggagttgagcctgttcgctgtgcacagatcaagcctcgaaaatccggaacatgacgaatctggcgctctggtcctacccagagtcctagataagctgacgctgtgcatgtgccccgagaggccgttcacagccaaagcatccgaaatcaccgggctgtcatcggaaggcctagccagatgtcggaaggcaggatttgacggggctgtggtccgaaccctccaagcgttcttatcgcgccaagccggacctatctgcctagtggcccacaatgggttcgactatgacttccctctgctgtgtgccgaactgagaaggctgggagctcggctcccaagggatactgtgtgcctggacaccctccccgcacttagggggctcgatagagcacactcacacggtacacgcgctcggggaagacaaggctattccctcggatcactgtttcaccgatacttcagggctgaaccctccgctgctcactctgccgagggtgacgttcacacactgttgctaatcttccttcatcgggctgccgagctcctcgcttgggcggacgagcaggcacggggatgggcacatatcgaacccatgtatctgccacctgatgacccgtctctagaggcatag

SEQ ID NO: 232868 - DNA, 711 bp, Artificial Sequence
  derived and/or modified sequence
atgtccgaggccccacgtgcggaaactttcgtgtttcttgatctggaagccaccggtcttccatcggtggaacccgagattgctgaactctcattatttgcagtgcacagatctagtctggaaaatccggaacatgacgaatcgggagccctcgtcctgccccgagtgttggacaaattgactctgtgcatgtgcccggaacggcctttcactgccaaggcctcagaaattaccggcctgtcaagtgaagggctggctaggtgtaggaaggctggcttcgacggcgctgtggttcggacactgcaggccttccttagcagacaggccggacccatctgcctcgtggcacacaatggctttgattacgatttcccgctcttgtgtgctgaattgagaaggttgggtgcgagactgcccagagatacagtgtgcctggacaccctgccagccctccgcggactcgatagggcacacagtcatggaactcgagcacggggacggcagggatactcactgggatcccttttccaccgctacttccgcgctgaacctagtgcagctcattccgccgaaggagacgttcacactcttctcttgatcttccttcacagggcggcagaactgctggcctgggctgacgagcaggccaggggctgggctcatattgagcctatgtatctgcctcccgatgacccctctctggaggcctag

SEQ ID NO: 232869 - DNA, 711 bp, Artificial Sequence
  derived and/or modified sequence
atgtctgaagcccctcgggcagagacctttgtctttctggacttggaagccaccggcctgccttctgttgagcccgagattgctgagttgtccctgtttgctgtccatagaagctctcttgagaatccagagcatgatgaatctggggctctggtgctgccaagggttcttgataagctgactttgtgtatgtgtcctgagcggcctttcacagcaaaggcctctgagataactgggctatctagtgaaggcttggctaggtgccgcaaagccggattcgacggcgctgtggttaggacccttcaggcgtttctctcacgccaggctggtccaatctgtctggttgcacacaatgggtttgattatgacttccccctactctgcgctgaattgaggcggctaggggcacggcttcctcgcgacacggtttgtctcgacactttaccggcactacgcggtctcgacagggcccatagtcacggaacccgggcacgagggaggcagggctattccctcgggagcttgtttcatcggtacttcagggcggagccctcagcagcccactcagccgaaggtgacgtacacacactgctcttaatttttctccacagagctgctgagttgctggcgtgggccgacgaacaggcaagagggtgggcccacatcgagcctatgtaccttccgcctgatgatccctctctggaggcttag

SEQ ID NO: 232870 - DNA, 840 bp, Artificial Sequence
  derived and/or modified sequence
atgggaagggcaggatcccccctgccaagaagctcctggccccgaatggacgattgcggtagtcgcagcaggtgttccccaactctctgcagttccttgcgtacctgttatccacgcggaaatatcactatgtccgaggcacccagagccgagacatttgtgttcctggacttggaagccacaggcctgccgagtgtggagcccgaaatcgccgagttgtccctgttcgcagtgcacagatcctcactggagaatcccgagcacgacgaaagtggcgctctagtcctccccagggtgttggacaaactgaccttgtgtatgtgccctgaacgccctttcacagccaaagcctctgaaatcactggactttcttccgagggtcttgccagatgtcggaaagccggttttgatggagccgtcgtgcggaccctccaggccttcctgtctagacaagctggtccaatatgcctggtcgctcacaacgggttcgactatgatttcccattactctgtgccgagcttaggcggcttggagctcgtctgccccgtgatacagtgtgcctggacaccttacctgccctaagagggctggatagagcacactctcatgggacacgtgccaggggcagacagggatactcgctgggcagccttttccaccgatattttagagccgaacctagcgcagcccactctgccgaaggagatgtccatactctgctgctcatcttcctccatcgggcagccgaactgctggcgtgggcggacgagcaggcaagagggtgggcccatattgaacccatgtacctccccccagatgacccgtccctagaggcatag

SEQ ID NO: 232871 - DNA, 711 bp, Artificial Sequence
  derived and/or modified sequence
atgtccgaggccccaagggccgaaacattcgtcttcctagatttggaagccactggacttcccagtgttgagcctgaaatcgccgaactttcattgtttgccgtacatcgatcatccctggagaacccagagcacgatgaatcaggcgctttggttctgccaagggttcttgacaagctcaccctgtgtatgtgccccgagagaccgtttactgcaaaggcaagcgaaattactgggctgtcttccgaggggctggctagatgtagaaaggcgggttttgacggtgcagtggtccgcacgttgcaagcttttctgtccagacaggccggtcccatctgtctggtcgcccacaacggcttcgattacgactttccgcttttgtgtgcggagctgcgtaggctgggcgctcgccttccacgcgacactgtgtgtctggatactttacctgcgctccgtggcctggaccgcgctcatagtcatggaacccgagctcgcggacggcaggggtacagtctcggatctctctttcatcggtattttagggcagagccctccgctgcgcattccgctgaaggagatgtccacacactattgttgattttccttcatagagccgcagagttacttgcttgggcggacgagcaggctcgtggctgggctcacattgaacccatgtacctcccccctgatgacccgtcactcgaagcctag

SEQ ID NO: 232872 - DNA, 840 bp, Artificial Sequence
  derived and/or modified sequence
atgggcagagcaggttcgccactccccaggtcatcttggccacggatggacgactgtggatcccgctcgcggtgttctccaaccctttgtagttcactgaggacctgttatccacggggtaacatcaccatgtctgaggcaccgagggccgaaacctttgtctttctggatctggaagccacaggattgccctcagtggaacccgagatagccgagctttccctcttcgcagttcatcgctccagtttggagaatcccgaacacgacgagtccggggcacttgttttgcccagagtgctcgacaaactcaccctgtgcatgtgtcctgaaagaccttttaccgcaaaggcctctgagatcacagggctgagcagcgagggcctggctcgctgtaggaaggctggctttgatggagctgtggtcaggaccctgcaggcctttttaagtcgccaagctggccctatttgcctggttgcccacaatggcttcgattacgacttccctttactgtgcgccgaattgcgcagactgggcgcacgactgccaagagatactgtctgcctggacaccctgccggcactgcgtggtctcgatcgcgctcactcacacggtacgagagccaggggaagacaggggtatagcctaggctccctgtttcaccggtacttcagagccgaaccctccgctgcacacagcgcggaaggagacgtgcataccctactgctcatcttcctacatcgggctgcagagcttctggcttgggcggacgagcaagcacgcggatgggcccacatcgaaccaatgtatctgccccctgatgaccccagtttagaagcttag

SEQ ID NO: 232873 - DNA, 837 bp, Artificial Sequence
  derived and/or modified sequence
atgatcgttgcagcagaggccgtagccgctccccgttgtgctttggtcggggaccggagcggcgctgatgcgcctagggccaaaggtcactctctcagaacatgctatccacgcggaaatattactatgtcggaggcccctagggcagaaacatttgtgttcctcgatttggaggctactggcctcccctccgtcgagccagaaattgccgaattgtccctctttgctgttcatcgatcgtcgttagagaacccggaacacgatgagagcggtgcccttgtcctgcccagagtcctcgacaagctgactctgtgtatgtgtccggagcggccttttacagccaaagcctcggagattacagggctttcttctgagggactcgcacgctgtagaaaggctgggttcgacggtgctgtggtccggactcttcaggcgttcctaagccgccaggctggtcccatctgcctcgtggcacacaacgggttcgactacgacttcccccttctgtgtgccgaactccgcaggctcggcgctcggctcccaagggacaccgtatgccttgacacactacctgcccttcgcggactggatcgcgctcattcccacggaacccgtgctcgcggtcggcaaggatactcgttagggagcttgtttcataggtatttcagggcagagccaagtgccgcacatagcgctgagggtgatgttcacacactcctcctgatcttcttgcatcgcgctgccgagcttttggcctgggccgatgagcaggcaaggggttgggcccatatcgagcctatgtacctcccacctgacgaccccagtctggaggcctag

SEQ ID NO: 232874 - DNA, 1864 bp, Artificial Sequence
  derived and/or modified sequence
atgggcggggcgcggctcggagcgcgaaacatggcggggcaggacgctggctgcggccgtggcggcgacgactactcagaggacgagggcgacagcagcgtgtccagggcggctgtggaggtgttcgggaagctgaaggacctaaactgccccttcctcgagggtctgtatatcacagagccaaagacaattcaggaactgctgtgcagcccctcagagtaccgcttggagatcctagagtggatgtgtacccgggtctggccctcactgcaggacaggttcagctcactgaaaggggtcccaacagaggtgaagatccaagaaatgacgaagctgggccacgagctgatgctgtgtgcgccagatgaccaggagctcctcaagggctgtgcctgcgcccagaagcagctacacttcatggaccagttgctcgataccatccggagcctgaccattgggtgctccagttgctcgagcctgatggagcacttcgaggacaccagggagaagaacgaggccttgctgggggagctcttctctagcccccacctgcagatgctcctgaatccagagtgcgacccgtggcccctggacatgcagcccctcctcaacaagcagagtgatgactggcagtgggccagtgcctctgccaagtccgaggaggaggagaagctggcggagcttgccaggcagctgcaggagagtgctgccaagttgcacgcgcttagaacggagtctacgacgacgagctgggcgagtgctgccagcgcccaggccctgacctccacccgtgcggccccatcatccaggccacgcaccagaatctgacttcctacagccaactgctgcaagtggtcatggcagttgctgacacctctgcgaaggccgtggagaccgtgaagaagcagcaaggcgagcagatctgctggggtggcagcagctccgtcatgagtctagctaccaagatgaatgaactaatggagaaatagaaagtcttcagtgatggcctacgccaaagcacaggatggggcgggcaggaagccctctcccaagatcgagttggccgaggatggatgattgtggcagcagaagccgttgcagccccacgttgtgctctagtttgaggacttgctatccccgtgggaacatcaccatgtccgaggcaccccgggccgagacctttgtcttcctggacctggaagccactgggctccccagtgtggagcccgagattgccgagctgtccctctttgctgtccaccgctcctccctggagaacccggagcacgacgagtctggtgccctagtattgccccgggtcctggacaagctcacgctgtgcatgtgcccggagcgccccttcactgccaaggccagcgagatcaccggcctgagcagtgagggcctggcgcgatgccggaaggctggctttgatggcgccgtggtgcggacgctgcaggccttcctgagccgccaggcagggcccatctgccttgtggcccacaatggctttgattatgatttccccctgctgtgtgccgagctgcggcgcctgggtgcccgcctgccccgggacactgtctgcctggacacgctgccggccctgcggggcctggaccgcgcccacagccacggcacccgggcccggggccgccagggttacagcctcggcagcctcttccaccgctacttccgggcagagccaagcgcagcccactcagccgagggcgacgtgcacaccctgctcctgatcttcctgcaccgcgccgcagagctgctcgcctgggccgatgagcaggcccgtgggtgggcccacatcgagcccatgtacttgccgcctgatgaccccagcctggaggcctga

SEQ ID NO: 232875 - DNA, 907 bp, Artificial Sequence
  derived and/or modified sequence
tggcctacgccaaagcacaggatggggcgggcaggaagccctctcccaagatcgagttggccgaggatggatgattgtggcagcagaagccgttgcagccccacgttgtgctctagtaggtgacaggagtggggctgacgctcccagagccaaaggtcacagtttgaggacttgctatccccgtgggaacatcaccatgtccgaggcaccccgggccgagacctttgtcttcctggacctggaagccactgggctccccagtgtggagcccgagattgccgagctgtccctctttgctgtccaccgctcctccctggagaacccggagcacgacgagtctggtgccctagtattgccccgggtcctggacaagctcacgctgtgcatgtgcccggagcgccccttcactgccaaggccagcgagatcaccggcctgagcagtgagggcctggcgcgatgccggaaggctggctttgatggcgccgtggtgcggacgctgcaggccttcctgagccgccaggcagggcccatctgccttgtggcccacaatggctttgattatgatttccccctgctgtgtgccgagctgcggcgcctgggtgcccgcctgccccgggacactgtctgcctggacacgctgccggccctgcggggcctggaccgcgcccacagccacggcacccgggcccggggccgccagggttacagcctcggcagcctcttccaccgctacttccgggcagagccaagcgcagcccactcagccgagggcgacgtgcacaccctgctcctgatcttcctgcaccgcgccgcagagctgctcgcctgggccgatgagcaggcccgtgggtgggcccacatcgagcccatgtacttgccgcctgatgaccccagcctggaggcctga

SEQ ID NO: 232876 - DNA, 861 bp, Artificial Sequence
  derived and/or modified sequence
tggcctacgccaaagcacaggatggggcgggcaggaagccctctcccaagatcgagttggccgaggatggatgattgtggcagcagaagccgttgcagccccacgttgtgctctagtttgaggacttgctatccccgtgggaacatcaccatgtccgaggcaccccgggccgagacctttgtcttcctggacctggaagccactgggctccccagtgtggagcccgagattgccgagctgtccctctttgctgtccaccgctcctccctggagaacccggagcacgacgagtctggtgccctagtattgccccgggtcctggacaagctcacgctgtgcatgtgcccggagcgccccttcactgccaaggccagcgagatcaccggcctgagcagtgagggcctggcgcgatgccggaaggctggctttgatggcgccgtggtgcggacgctgcaggccttcctgagccgccaggcagggcccatctgccttgtggcccacaatggctttgattatgatttccccctgctgtgtgccgagctgcggcgcctgggtgcccgcctgccccgggacactgtctgcctggacacgctgccggccctgcggggcctggaccgcgcccacagccacggcacccgggcccggggccgccagggttacagcctcggcagcctcttccaccgctacttccgggcagagccaagcgcagcccactcagccgagggcgacgtgcacaccctgctcctgatcttcctgcaccgcgccgcagagctgctcgcctgggccgatgagcaggcccgtgggtgggcccacatcgagcccatgtacttgccgcctgatgaccccagcctggaggcctga

SEQ ID NO: 232877 - protein, 1126 aa, Artificial Sequence
  derived and/or modified sequence
MEPNDSTSTAVEEPDSLEVLVKTLDSQTRTFIVGAQMNVKEFKEHIAASVSIPSEKQRLIYQGRVLQDDKKLQEYNVGGKVIHLVERAPPQTHLPSGASSGTGSASATHGGGSPPGTRGPGASVHDRNANSYVMVGTFNLPSDGSAVDVHINMEQAPIQSEPRVRLVMAQHMIRDIQTLLSRMECRGGPQPQHSQPPPQPPAVTPEPVALSSQTSEPVESEAPPREPMEAEEVEERAPAQNPELTPGPAPAGPTPAPETNAPNHPSPAEYVEVLQELQRLESRLQPFLQRYYEVLGAAATTDYNNNHEGREEDQRLINLVGESLRLLGNTFVALSDLRCNLACTPPRHLHVVRPMSHYTTPMVLQQAAIPIQINVGTTVTMTGNGTRPPPTPNAEAPPPGPGQASSVAPSSTNVESSAEGAPPPGPAPPPATSHPRVIRISHQSVEPVVMMHMNIQDSGTQPGGVPSAPTGPLGPPGHGQTLGQQVPGFPTAPTRVVIARPTPPQARPSHPGGPPVSGTLQGAGLGTNASLAQMVSGLVGQLLMQPVLVAQGTPGMAPPPAPATASASAGTTNTATTAGPAPGGPAQPPPTPQPSMADLQFSQLLGNLLGPAGPGAGGSGVASPTITVAMPGVPAFLQGMTDFLQATQTAPPPPPPPPPPPPAPEQQTMPPPGSPSGGAGSPGGLGLESLSPEFFTSVVQGVLSSLLGSLGARAGSSESIAAFIQRLSGSSNIFEPGADGALGFFGALLSLLCQNFSMVDVVMLLHGHFQPLQRLQPQLRSFFHQHYLGGQEPTPSNIRMATHTLITGLEEYVRESFSLVQVQPGVDIIRTNLEFLQEQFNSIAAHVLHCTDSGFGARLLELCNQGLFECLALNLHCLGGQQMELAAVINGRIRRMSRGVNPSLVSWLTTMMGLRLQVVLEHMPVGPDAILRYVRRVGDPPQPLPEEPMEVQGAERASPEPQRENASPAPGTTAEEAMSRGPPPAPEGGSRDEQDGASAETEPWAAAVPPEWVPIIQQDIQSQRKVKPQPPLSDAYLSGMPAKRRKTMQGEGPQLLLSEAVSRAAKAAGARPLTSPESLSRDLEAPEVQESYRQQLRSDIQKRLQEDPNYSPQRFPNAQRAFADDP

SEQ ID NO: 232878 - protein, 245 aa, Artificial Sequence
  derived and/or modified sequence
PPRHLHVVRPMSHYTTPMVLQQAAIPIQINVGTTVTMTGPAPPPATSHPRVIRISHQSVEPVVMMHMNIQDSGTQPGGVPSAPTGPLGPPGHGQTLGQQVPGFPTAPTRVVIARPTPPQARPSHPGGPPVSGTLQGAGLGTNASLAQMVSGLVGQLLMQPVLVAQGTPGMAPPPAPATASASAGTTNTATTAGPAPGGPAQPPPTPQPSMADLQFSQLLGNLLGPAGPGAGGSGVASPTITVAMP

SEQ ID NO: 232879 - protein, 1126 aa, Artificial Sequence
  derived and/or modified sequence
MEPNDSTSTAVEEPDSLEVLVKTLDSQTRTFIVGAQMNVKEFKEHIAASVSIPSEKQRLIYQGRVLQDDKKLQEYNVGGKVIHLVERAPPQTHLPSGASSGTGSASATHGGGSPPGTRGPGASVHDRNANSYVMVGTFNLPSDGSAVDVHINMEQAPIQSEPRVRLVMAQHMIRDIQTLLSRMECRGGPQPQHSQPPPQPPAVTPEPVALSSQTSEPVESEAPPREPMEAEEVEERAPAQNPELTPGPAPAGPTPAPETNAPNHPSPAEYVEVLQELQRLESRLQPFLQRYYEVLGAAATTDYNNNHEGREEDQRLINLVGESLRLLGNTFVALSDLRCNLACTPPRHLHVVRPMSHYTTPMVLQQAAIPIQINVGTTVTMTGNGTRPPPTPNAEAPPPGPGQASSVAPSSTNVESSAEGAPPPGPAPPPATSHPRVIRISHQSVEPVVMMHMNIQDSGTQPGGVPSAPTGPLGPPGHGQTLGQQVPGFPTAPTRVVIARPTPPQARPSHPGGPPVSGTLQGAGLGTNASLAQMVSGLVGQLLMQPVLVAQGTPGMAPPPAPATASASAGTTNTATTAGPAPGGPAQPPPTPQPSMADLQFSQLLGNLLGPAGPGAGGPGVASPTITVAMPGVPAFLQGMTDFLQATQTAPPPPPPPPPPPPAPEQQTMPPPGSPSGGAGSPGGLGLESLSPEFFTSVVQGVLSSLLGSLGARAGSSESIAAFIQRLSGSSNIFEPGADGALGFFGALLSLLCQNFSMVDVVMLLHGHFQPLQRLQPQLRSFFHQHYLGGQEPTPSNIRMATHTLITGLEEYVRESFSLVQVQPGVDIIRTNLEFLQEQFNSIAAHVLHCTDSGFGARLLELCNQGLFECLALNLHCLGGQQMELAAVINGRIRRMSRGVNPSLVSWLTTMMGLRLQVVLEHMPVGPDAILRYVRRVGDPPQPLPEEPMEVQGAERASPEPQRENASPAPGTTAEEAMSRGPPPAPEGGSRDEQDGASAETEPWAAAVPPEWVPIIQQDIQSQRKVKPQPPLSDAYLSGMPAKRRKTMQGEGPQLLLSEAVSRAAKAAGARPLTSPESLSRDLEAPEVQESYRQQLRSDIQKRLQEDPNYSPQRFPNAQRAFADDP

SEQ ID NO: 232880 - protein, 238 aa, Artificial Sequence
  derived and/or modified sequence
SSAEGAPPPGPAPPPATSHPRVIRISHQSVEPVVMMHMNIQGPLSLSPCPDSGTQPGGVPSAPTGPLGPPGHGQTLGQQVPGFPTAPTRVVIARPTPPQARPSHPGGPPVSGTLQGAGLGTNASLAQMVSGLVGQLLMQPVLVAQGTPGMAPPPAPATASASAGTTNTATTAGPAPGGPAQPPPTPQPSMADLQFSQLLGNLLGPAGPGAGGPGVASPTITVAMPGVPAFLQGMTDFL

SEQ ID NO: 232881 - protein, 238 aa, Artificial Sequence
  derived and/or modified sequence
SSAEGAPPPGPAPPPATSHPRVIRISHQSVEPVVMMHMNIQGPLSLSPCPDSGTQPGGVPSAPTGPLGPPGHGQTLGQQVPGFPTAPTRVVIARPTPPQARPSHPGGPPVSGTLQGAGLGTNASLAQMVSGLVGQLLMQPVLVAQGTPGMAPPPAPATASASAGTTNTATTAGPAPGGPAQPPPTPQPSMADLQFSQLLGNLLGPAGPGAGGSGVASPTITVAMPGVPAFLQGMTDFL

SEQ ID NO: 232882 - protein, 258 aa, Artificial Sequence
  derived and/or modified sequence
MEPNDSTSTAVEEPDSLEVLVKTLDSQTRTFIVGAQMNVKEFKEHIAASVSIPSEKQRLIYQGRVLQDDKKLQEYNVGGKVIHLVERAPPQTHLPSGASSGTGSASATHGGGSPPGTRGPGASVHDRNANSYVMVGTFNLPSDGSAVDVHINMEQAPIQSEPRVRLVMAQHMIRDIQTLLSRMECRGGPQPQHSQPPPQPPAVTPEPVALSSQTSEPVESEAPPREPMEAEEVEERAPAQNPELTPGPAPAGPTPAPE

SEQ ID NO: 232883 - protein, 245 aa, Artificial Sequence
  derived and/or modified sequence
PPRHLHVVRPMSHYTTPMVLQQAAIPIQINVGTTVTMTGPAPPPATSHPRVIRISHQSVEPVVMMHMNIQDSGTQPGGVPSAPTGPLGPPGHGQTLGQQVPGFPTAPTRVVIARPTPPQARPSHPGGPPVSGTLQGAGLGTNASLAQMVSGLVGQLLMQPVLVAQGTPGMAPPPAPATASASAGTTNTATTAGPAPGGPAQPPPTPQPSMADLQFSQLLGNLLGPAGPGAGGPGVASPTITVAMP

SEQ ID NO: 232884 - DNA, 3381 bp, Artificial Sequence
  derived and/or modified sequence
atggaacccaacgacagcactagcacagccgtcgaggaaccggattcattggaggtcctggttaagacactcgatagtcaaactcgcacttttatcgtaggagcacagatgaatgtcaaagagttcaaagagcacattgcagcatctgtctccattccatcggaaaaacagaggttgatctaccagggtagggtgctgcaggacgataagaaattgcaggagtacaatgttgggggtaaggtcatccacctagtcgagcgtgccccacctcagactcaccttccatccggtgccagctctggcaccggctctgcttccgccacccacggcggcggcagcccacccgggacccgcggacccggggcttctgtgcacgaccgaaacgccaactcctatgttatggtcggtactttcaatctcccgtcagatgggtccgcagtagatgtccacattaatatggagcaggcacccatccagtcagagccccgagttagattagttatggcacaacacatgatccgcgacatacagaccctcctttctcggatggaatgtcgaggggggccccaaccccaacactcacaacctccccctcagccgcccgccgtgacaccagaacccgtcgcactgagttcccagacttccgaaccagttgagtccgaggcccccccccgagagcccatggaagcagaggaagtcgaagaacgggcacccgcccagaatcctgagctaacccccggtcctgctccagccggtccaacccctgcccctgagaccaacgcccctaatcatccctctcccgccgagtatgtggaggtgcttcaggaacttcaacggctcgaatcgagacttcaaccgtttctacagcggtattacgaagtactgggggccgcggccaccaccgactataataataatcacgagggccgagaagaagatcagcgcctgattaatctcgtgggagaatccttgcgcctgcttggtaatacgttcgttgcgcttagcgatcttcggtgcaatctggcttgcacacctcctagacacctgcacgtcgtacggccgatgtcacattataccacaccgatggtcttgcagcaagccgcaattcctatccaaatcaatgtcggcacaaccgtgaccatgactggtaatggcacgaggcctccccccacccccaacgcggaggcacctccaccagggcccgggcaggcttcatctgtagcaccaagttccactaacgtcgagtcttccgccgagggggccccaccccctgggcctgctcctcccccagcaacttcacatcctagagttatcaggatttctcaccaatcagtggaaccagtcgtcatgatgcatatgaatatacaggattccggtacacaaccgggcggggtgccttccgcgcctaccggccctctaggccctccgggacacgggcagacacttggccaacaggtgcctgggtttcctacggcaccgacgagggtggtcattgcccgaccaacaccaccacaggctcgcccatcacacccgggggggccaccagtgtccggcactctccagggggccggcctgggcaccaacgcatcgcttgcccagatggtatcaggacttgtcggccagcttttaatgcagccagtactcgtggcacagggcacaccggggatggccccgccccctgcacccgctacagcatcagcctcggcgggcaccaccaatacagctaccaccgctggcccagctcccggggggccggcacagccaccccctacccctcagccttctatggcagatctacagttttctcaactgctcgggaatctattgggtccagccggccccggggccggcggttctggagtcgcttccccaaccattactgttgctatgcccggtgtaccagccttccttcagggcatgacagacttcctgcaagcaactcagacagcaccacctccccctccacctccaccaccccctccaccggcgccggaacaacaaactatgcctccccccggctcaccatctggcggcgcaggaagccctggcggcctcgggctggaaagcctttccccagagttcttcaccagtgtggtgcagggtgtattgtcttcactcctgggaagtctgggagcccgggcaggttctagtgagtctatcgccgccttcatacagcgactctccggctcttctaatatattcgagccaggagctgatggcgccctgggtttctttggggctctcctgtcactactgtgtcagaactttagtatggtggatgtggtgatgctgctgcacgggcatttccaacccctgcagcggttgcagcctcagctgcgctctttcttccaccagcactatttgggaggacaggagcccaccccgtctaacataagaatggctacacatacactcataaccggcctggaggaatacgttagagagtccttttctctcgttcaggtccagcctggtgtcgacatcatccggactaacctcgagtttctgcaggagcagttcaactcgatcgcagcccatgtcttgcattgcaccgattccgggtttggagccaggctgctggagttgtgcaatcaaggcctctttgaatgtctggctctgaatctacattgcttaggtggacagcaaatggaactggccgccgtgatcaatggacgaatcagacgcatgtcacggggcgtgaacccatctcttgtgtcttggttgaccaccatgatggggcttcgactacaggtcgtcttggaacacatgcctgttgggcctgatgccatcctccgttatgtgcgacgggtgggagatcccccccaaccgctgcccgaggagcccatggaagtgcagggggccgaaagggcgagccctgaaccccagcgtgaaaacgctagtcctgcaccaggaaccacagccgaggaagccatgtcaagaggcccgccgccagcacccgaaggcggatcgcgcgacgagcaggacggcgcctctgccgagacagaaccttgggctgcggctgtaccacccgagtgggtcccaatcatccaacaggacattcaatctcagaggaaggttaagcctcaaccacctctctccgatgcctacttatccggtatgcctgcaaagcgccgtaagaccatgcagggggagggccctcagctcttgctctccgaagcggtctccagggctgccaaggccgctggagcacggcccctgacatctcccgagagtctctcccgcgaccttgaagccccggaagtccaagaatcataccgccagcagctgcgctcagacatccaaaagaggttacaggaagaccctaactactccccccagaggttccccaatgctcaaagagccttcgctgatgatccctag

SEQ ID NO: 232885 - DNA, 3381 bp, Artificial Sequence
  derived and/or modified sequence
atggagccaaacgattcaacctccacagccgttgaggagcccgatagcctcgaggttctggttaaaactctcgattcacaaacacgaacatttatcgtgggagcacaaatgaacgtaaaggagtttaaggaacacattgctgcttctgtcagcattccatctgaaaagcaacgtttaatttaccaaggtcgggtgcttcaggacgacaagaagctgcaagagtataatgtcggaggtaaagtaatccatctggtagagcgcgccccacctcaaactcacctgccatcaggtgcaagctcaggaactggctccgcgtctgccacccatggggggggctcacctccaggcacgaggggccccggcgccagcgtgcacgatagaaacgcaaatagttacgttatggtggggacctttaacctacctagcgatggctcggcggtggacgtgcatattaacatggagcaggcacctatccaatccgagcctcgggtgcgtttggttatggcacaacacatgatccgcgatattcagaccctgcttagccggatggaatgcaggggtggacctcagccacagcatagccagccaccacctcaaccacctgccgtgacacccgaacccgtcgccctctctagccaaacctccgaacccgtagagagcgaggccccacctcgagagcctatggaagcagaggaagtcgaagaaagggcacccgctcagaacccagagcttactcctgggcccgctccagctggcccaacaccagcccccgaaacaaacgctccgaaccatcccagccccgcggagtatgtggaagttctgcaggaattacagagactggaatctagacttcagccgttccttcagcggtactatgaagtcctgggcgcagccgctaccaccgactacaataataatcatgagggccgcgaggaagaccagaggttgattaacctcgtcggagaatctcttagactcctcggaaatacatttgttgctctttcagatctccgctgtaacttggcctgcaccccacccaggcaccttcacgtggtgcggccaatgagccattacaccacccccatggtcttgcaacaggcagctatccccatccagatcaatgtgggcactaccgtgaccatgacaggcaacggtactcgccctcccccgactcctaacgctgaggcacctccacctggccctggtcaggcctcgagcgttgcaccctcgagcacaaacgtcgagtccagcgcggagggcgcgccaccaccaggccccgctccaccgcccgcgacctcccacccacgcgtgatcaggatttcccatcagtctgtcgagcccgtggtgatgatgcatatgaatattcaggatagtggtacccagcccgggggcgtgccaagtgcgcctacagggcctctgggacctccaggccacgggcaaacactgggccagcaggtgccaggctttccgaccgctcccactagggtggtgatcgctcgaccaactccgcctcaggcccgtccttcccatccaggcggcccacccgtgtcagggaccctacagggcgcaggactggggaccaacgcttcccttgcacagatggtctctggacttgtgggccagctcctcatgcagccagtgttggtcgcccaggggacaccagggatggccccacccccagctccggcgacggcgagcgcctccgcaggaacaactaacaccgctactactgcaggcccagctcctggggggcccgcacagcctccgcccaccccgcagccttctatggctgacctccagttcagccaattgttaggcaatcttcttggtcccgccggacccggcgccggcggatctggcgtagcctctcccaccatcactgtagctatgcctggagttcccgcattcctgcaggggatgaccgattttctgcaggccacccagacagcacctccaccccccccaccacctccaccccctcctcctgcacccgagcaacagaccatgcctcctcccggatcgcccagcggcggcgcggggtccccaggcggactcgggctagaaagtctgtctcctgaatttttcactagcgtggtccagggagtattatcatccttactggggtctttgggggccagagctggttcttctgaaagcattgcggcgtttatccagaggctttcaggaagctcgaatatcttcgaacctggggctgatggtgccttagggttttttggcgccctgctaagcctgctctgtcagaacttttcaatggttgacgtggtcatgctcctccatggtcacttccagcctttacagagactgcagccacagctgaggtcgttctttcaccagcactacctcggcggccaggagccaactcccagcaacatccggatggccacccacacgttaatcaccggactcgaagaatatgtgagggagagcttttcactcgtgcaggtgcagcccggtgttgacatcattcgcacaaatctggaatttttgcaagaacagttcaatagcattgccgcccacgtgttacattgcaccgatagcggatttggcgccagattgctggagctctgcaatcagggcctgtttgagtgccttgctctgaatttgcattgtctcggaggtcagcagatggagctggcagccgtaatcaacgggcgcattcgaaggatgtcccggggggtgaacccttcccttgtgagttggctcaccacgatgatgggattaagacttcaggtcgtactggaacatatgccagtgggccctgacgcaatcctgaggtacgtccgaagagtcggggatccccctcagccgctgcccgaagagccgatggaggtgcagggggccgaaagagccagcccggaacctcagcgagaaaatgcatctcccgctccggggaccaccgccgaggaggcaatgtcacgcggtccccctcctgcccccgaaggcgggtctcgcgacgaacaagacggggctagcgcggaaactgagccatgggccgctgcagttcctccggagtgggtaccaattatccagcaggatatccaatcacagaggaaggtgaagccccagccgcctctgtcagacgcctacctcagtggtatgccagctaagcggcgcaagacgatgcagggcgagggcccacagctgctcctgtctgaagccgtgtctcgagccgcaaaagctgccggcgcacggcctctgacttcccctgagagcctctcccgcgacctcgaagctcccgaagtgcaggagtcctaccggcagcagctacgctctgatatccagaaacggctacaggaggatcccaactacagcccacagcggttcccaaacgcccaacgcgcctttgccgacgacccctag

SEQ ID NO: 232886 - DNA, 3381 bp, Artificial Sequence
  derived and/or modified sequence
atggagccaaacgattctacttcgaccgctgttgaggaacctgatagtcttgaggtacttgtcaagaccctggactcacagacgagaacctttatagtcggggcccaaatgaacgttaaggaattcaaggaacatatagcagccagtgtgagcataccttctgagaagcagagactgatctatcaggggcgcgtgttgcaagatgataagaaactccaggaatataatgttggggggaaggtgattcacctggtggagagagctcctccccaaactcatctcccaagcggcgcttcttccggaacgggttctgcctcggcaactcacggcggaggcagtccgcccggcacacgcggccctggcgcgtctgtgcatgataggaatgccaattcgtacgtaatggtggggacctttaacttgccgtccgacggttcagcagttgacgtgcacatcaatatggaacaggcccctatccaatcagagccaagagtgagattggtcatggctcagcacatgatcagggacatccagactcttctcagccggatggagtgtagaggaggtcctcagccccagcatagccaaccccctcctcagcctcccgcggtgacaccagagcccgtagccctgtccagtcaaacctccgaacccgtggagagtgaagcccccccaagggagcctatggaagcggaggaggtcgaggagagggcccccgcacagaatccagaactcacccccggccctgcccccgcaggtccgacccccgcccctgagaccaacgcacccaaccacccttcacccgcggagtacgtcgaagttctgcaggagctgcagcggctcgaatccagactgcaacctttcctgcagagatactacgaagttctgggcgctgccgccacgacggactacaataataatcacgagggacgggaggaggatcaacgccttatcaatctagtgggcgaatcactccgcttgctcggcaacaccttcgtggcattgtctgacctgaggtgcaacctagcatgtactccaccacggcacttgcacgtggtgaggccaatgtcccactacactacccccatggttttgcaacaggccgcgattccaatacagataaacgttggcacaaccgtgacaatgaccggcaacgggacacgcccccctcctaccccaaacgccgaggcccccccgccgggaccgggccaggcttcatcagtggctcccagcagcaccaacgtggaatcgtctgccgaaggcgctcctcctcccggtcctgcacccccgcctgccacctcccatcccagagtgatacgtatctcacatcagagcgtggagccagtcgtgatgatgcacatgaatatccaggactcaggaacccagcccggtggggtaccttcagctcccaccgggcccttaggcccccctggtcacggtcagacgctggggcaacaggtgcccgggtttccaactgcccccacacgggtcgtaatcgcccgccccacaccaccccaggcgcgtccgtcacacccgggcggaccaccagtgagcggcactctgcagggggccggcctgggaaccaacgccagcctggcccaaatggtatcaggacttgtggggcagctgcttatgcaacctgtcctcgtagcccaggggaccccaggcatggctccccctccagcgccagcaactgcttccgccagtgcaggtaccaccaacacagctaccaccgccgggccagcccccggaggcccagcacagccaccacccacaccacagccatcaatggctgacctgcagtttagccagctgttgggaaatctcctgggacctgccggacctggcgctgggggctccggcgtggcatcccctaccatcaccgtggccatgcctggcgttcccgcattcctgcagggcatgactgactttctccaggcaactcagacagccccacctcctcctcccccacccccacccccccctcccgccccagagcagcagaccatgcctcctcctggtagtccgagcgggggcgcaggatctcccggcgggctcggactggagtccctttcgccagaattcttcacatccgtggtacaaggagtcttgagttcactgttgggatcactaggggctcgggcgggcagctcagagtcaatcgctgcttttattcagaggttatccggctcaagcaatatcttcgagccgggcgcagatggggctctaggctttttcggcgccctcctgtcccttctctgtcagaacttctccatggttgacgtggtgatgcttttgcacgggcacttccagccactccagagactgcagccacagttgaggtcattctttcaccagcattatctgggagggcaggagcccacgcctagcaacatcagaatggccacgcacacactcattacagggctggaagagtacgtgcgggagtcatttagccttgtgcaggtccaaccgggcgtggacattatcaggaccaacctcgagttcttacaggagcaattcaacagcattgctgcccacgtcctgcactgtaccgatagtggctttggggcacggctgctcgagctgtgtaatcaggggttgtttgagtgtcttgcgctgaatctccattgcctgggtggacaacaaatggagttggcagcggtgatcaacggccgcatccgccggatgagtcgcggcgtgaatcccagtctggtgtcctggctgacaaccatgatgggcttaaggctccaagttgtccttgagcacatgccggtcggccctgatgccatcctgcgatatgtacgtagagtcggcgacccaccacagccattacccgaggaacctatggaggtacagggagccgagcgcgcatcccctgaaccccagcgcgaaaacgcctctccagcgcctggcaccacagctgaagaggccatgagcagggggcctccgccagctcctgaaggagggtctagggatgagcaagacggggctagcgcggaaacagagccttgggctgcagccgtgcccccagagtgggtgccaataatccagcaggatatccagagccagagaaaagttaaacctcagccaccactgtccgacgcgtacctttcagggatgccagcaaaacgtcgaaagaccatgcagggggagggtccgcagttactgctatcagaggccgtgagcagagccgccaaggctgccggtgcccggcccctcactagtccggagagcttgtcacgtgacttggaggctccagaggttcaggagtcctacaggcagcagctgcggtccgacatccagaagaggttgcaagaagatcccaactacagcccacagcgttttccgaacgcgcagcgcgccttcgccgatgatccctag

SEQ ID NO: 232887 - DNA, 3381 bp, Artificial Sequence
  derived and/or modified sequence
atggagcccaacgactctaccagtacagccgtggaggaaccggacagcctcgaggtcctcgtgaaaactttggattcccaaacaaggacatttattgtgggagcccagatgaacgtgaaagaattcaaggagcatatcgctgcttccgtctccatacccagtgagaagcaacggcttatctaccagggtcgtgtcttacaggatgacaaaaagttacaggaatataacgtcggcggcaaggtgatccatctggtcgagagggcaccgcctcagacccatcttccttccggagcatccagcggtacaggctcagcttcggccacccatggggggggctcccctcccggtacgagaggcccaggagcgagcgtgcacgatcggaacgccaacagttatgtgatggtgggtacctttaatttgccatctgatggatctgctgtagacgtgcacataaatatggagcaggcaccgattcagtcagaacctcgagtcagactcgttatggctcagcatatgatcagagatatccagaccctcttaagtcggatggaatgtcgaggcgggccccagccccagcatagccagcccccaccccaacctcccgccgtcacacctgagcccgtggctctgtcctcccagaccagcgagccggtagagtccgaggctcccccgagggaaccaatggaggcggaggaggtagaggagagggcaccagcgcagaacccagaactgaccccaggacctgcccccgcgggacccactcccgcgccggaaactaacgcaccaaaccaccctagcccggctgaatacgtggaggttctacaagagttgcagagactggagtcccgcttgcagccattcctgcagcggtactacgaagtgctgggggccgcagctactaccgattacaataacaaccacgagggcagagaagaagatcaacgtctgatcaacctcgtcggagaatctctgcgtctcctcggtaatacatttgtggctctgtctgatcttagatgcaacctggcttgcacaccacccaggcatctccatgtcgtccgtccaatgtctcactatacgacaccaatggttctacagcaggccgctatccctatccaaatcaacgtagggacaaccgtgacaatgacaggcaacggcaccagacccccgcccaccccaaatgctgaggcgcccccgccgggaccgggacaggcttcttcggtggcgccttccagcaccaatgtggagtcaagcgcagaaggcgccccccctcctggccctgcccctcctcctgccacaagccatccccgcgtgatccgaatctctcatcagtcagtggagcccgtggtgatgatgcacatgaacattcaagactctggcacacaaccaggtggtgtcccgtccgctcccaccggtccactaggccctcccgggcatggacaaactctcggtcagcaggttcccggctttccaaccgccccgacccgcgtcgtgatcgcaaggcctacaccccctcaggcccgccccagccaccctggtggtccgcccgtgagcgggaccctacaaggtgcggggctgggtacgaatgcgagcctggcccagatggtgagcggcctggtaggacagttgcttatgcaaccagttctggttgcgcagggtactcccggcatggcacccccccccgctcctgccactgctagtgcctctgccgggactactaacacagccactacggctggccctgctcctgggggccccgcccaaccgccaccaacgcctcaacctagcatggctgacctccagttctcccagctgttagggaatcttctaggccctgcaggacctggggccgggggtcctggcgttgcttccccaaccataactgtggccatgcctggggttccagcgttcctgcaggggatgaccgactttctccaggctactcagacggctcccccccctccaccacccccacccccccctccccctgctccggagcagcaaaccatgcctccccctggaagcccgtcaggcggcgccggcagcccagggggcctgggactggaaagcctgtcccccgaattttttacgtctgtggtacagggtgttcttagtagcctgctgggctccttgggggcgcgcgctggatcttctgagagtatcgccgcattcatacaacggttgagtggtagctcaaatatcttcgagcccggagccgatggggctctgggcttttttggggctctgctgtccctgctgtgccagaactttagcatggtcgacgtggtgatgctgttacacggccacttccagcctttgcagcggctccagccacaactgagaagtttcttccatcagcactatctgggaggccaggaacctactccttctaacattaggatggcaacccataccctgatcactggcttggaggaatacgtgagagaaagttttagcctggtgcaggtacagcccggggtcgacattatccgcaccaacctggagttcctacaggaacagtttaacagcattgctgcacacgtgcttcactgcactgacagcgggttcggtgcccgcttactcgagctatgtaatcaaggtttgtttgaatgcctcgcactgaacttgcattgccttggaggccagcagatggagttggcagcggtcataaacggcaggatcagacgaatgtccaggggcgtgaatcctagcctcgtgtcatggctaaccacaatgatggggctcagattgcaggtggtgttggagcacatgcccgttggtcctgacgcaattctgcgctacgttagacgtgtcggtgaccctcctcagccactgcccgaggaacctatggaggttcagggggccgagcgagcatctcctgaacctcagcgagagaacgcatcccctgcccccggcacaacagccgaagaagcaatgtcacggggtccgccccctgctcccgaaggtggctctcgggacgagcaggatggcgcatccgccgagacggagccatgggctgctgccgtgcctcctgaatgggtccctatcatccagcaggacattcagtcccagcgcaaagtgaaaccgcagccaccactgagcgacgcctacctgtctgggatgccagctaagcggcgcaagacaatgcaaggggagggaccccagctgctcctgtccgaggccgtgagcagagcagccaaggccgctggagccagacctctcacctctcccgaatcactctcccgagacctcgaggccccggaagtccaagagtcatatcggcagcaactgcggtccgatatccagaagagactgcaggaagatcctaattatagtcctcaacgctttccgaatgcccaacgggcattcgccgacgacccctag

SEQ ID NO: 232888 - DNA, 3381 bp, Artificial Sequence
  derived and/or modified sequence
atggagccaaatgattcaacatccaccgccgtcgaagaacccgactcgttagaagtgcttgtcaaaactctggatagtcaaaccaggacatttattgttggcgcccagatgaatgtcaaagaattcaaggaacatatcgccgcatcagtatccattccttcggaaaagcagcggctgatttatcaaggtcgcgtcctgcaggacgataaaaagcttcaggagtataacgttgggggtaaggtaattcaccttgtagaacgcgcccccccacaaacccacctacctagcggtgcctccagcgggaccggatcggcttccgccacacatggaggaggttctccccctgggacccgcggcccaggcgctagcgttcacgacaggaatgccaattcatacgttatggtcggcacctttaaccttcccagcgacgggtccgcggtagatgtgcacataaacatggagcaggctccgatccaatccgagcccagggtgcggcttgtcatggcccaacatatgatcagagacatccagacactgctgtcccggatggaatgcagaggtggcccgcagccacagcactcacagcctccaccgcagcctcccgcggtgacccctgagcctgtggcgctttccagccagaccagtgaacctgtggaatccgaggccccaccaagggagcccatggaagccgaagaagtggaggagcgcgcacctgctcagaaccctgagttgacccctggccccgccccagcaggacctacaccagcaccggagacgaacgcacccaatcacccatccccagcagagtacgtcgaggtcctacaagagctgcagcgactggagagcaggctgcagcctttcctccagaggtattatgaggtcctcggcgctgcagcaacgactgattataacaacaatcatgaaggacgggaggaagatcagcggctgataaacctcgtgggcgagagcctaagactgttgggcaatacttttgtggcgttgtcagacttaaggtgtaacctagcttgcaccccccctagacacctgcacgtggtgagacccatgagccattatactaccccaatggtcctacagcaggccgccatccccattcaaattaacgtcggcaccaccgttaccatgaccggaaacgggacccgaccacccccaactcctaacgcagaggctccacccccagggcccggccaggcttccagtgtggcccccagctccactaacgtcgaatcaagtgctgagggagcgcccccacccggcccagcgccacccccagccacaagtcatcctcgtgtgatcaggatctcccaccaaagcgtcgagcccgtcgtgatgatgcatatgaacatccaagactctggcacgcagccaggtggcgtccctagcgccccaacagggcccttgggccccccaggccacggacagaccctcgggcagcaagtccccggctttcctacagccccgactcgggtggtgatagctcgcccaacccctccacaagccaggccatcacaccctgggggccctcccgtctccgggacactgcagggagcgggactgggcaccaacgcaagcctcgctcagatggtaagtggattggtggggcaattgcttatgcagcccgtgctcgttgcccaggggacccctggcatggcccccccacctgcacctgccaccgctagtgcttccgccggaactaccaacacagccaccacggcagggcccgctcccgggggccccgcccagccaccccccaccccccagcccagtatggctgacttgcagttcagccagctgctcggaaacttactaggccctgctggccccggagcgggtggccccggcgtggcttcccccaccattaccgtggccatgcctggcgtgcccgcatttctgcagggaatgaccgacttcttgcaagcgacccagaccgccccccccccccccccccctcctcctcctccacccccagcgccagaacagcaaactatgcccccacccgggtcaccatcaggcggcgctgggagccctggagggcttgggctcgagagcctgagcccagaatttttcacctccgtggttcagggagtgttatcatctctactggggtcactaggcgctagggccggatcctctgagtccattgccgcctttatccaaaggcttagtggctcgagtaacatcttcgaacccggggcagatggagcactcggtttcttcggcgcactgctgagcctgttatgtcagaattttagcatggtggacgtggtcatgctcctccacgggcactttcagccgctccaacggctgcagccccagctgaggtctttcttccaccagcactacctggggggccaggaaccaacaccatccaacatacgcatggcgactcatacactgatcaccgggctcgaagagtatgtgagagaatccttttccctagttcaggttcagcccggggtcgacatcataaggactaacttagagtttctgcaggagcaattcaacagtatagcagcacatgttctacactgtacagactccggctttggcgcgcgactcctggaattgtgcaatcaaggcctgttcgagtgcctcgctctgaacttacattgcctggggggccaacagatggagctcgccgccgtgatcaatggaagaattagacgcatgagtcggggggtgaacccaagccttgtgagctggcttacgacgatgatggggttacggctgcaggtggtgctggaacatatgcccgtgggtcccgatgcaatcttgagatatgtgaggagggtcggtgatccgccccagccactcccagaggagcccatggaagtccagggggcggaacgcgccagtccagagccacagcgcgagaacgcctcgcctgctcccgggaccacagccgaggaagcaatgagcaggggaccacctccagccccagaaggtgggagcagagatgaacaggatggcgcatccgctgagaccgagccatgggccgccgcggtgccgcctgagtgggtgcctatcatccagcaggacattcagagtcaacgcaaggtgaagccccagccacccctgtccgacgcatacctgtctgggatgccggctaagcgccgaaaaactatgcagggggaaggcccccagcttcttttatctgaagctgttagtcgggccgctaaggcggctggcgcacggcctttgactagccctgaatctttgagcagggacctagaggcccctgaggttcaggagtcataccgccaacagctccgctcagacatccagaagagactgcaggaggatccaaactattctccacagcggtttccaaatgcccagagagcctttgctgatgatccgtag

SEQ ID NO: 232889 - DNA, 3381 bp, Artificial Sequence
  derived and/or modified sequence
atggaacccaatgacagtacctcaaccgcagtggaggagccggactcactggaagtattggtaaagaccctggacagccaaacacgcacattcatcgtaggcgcccagatgaatgtgaaagaattcaaggaacatatagctgcgagcgtgagcatcccatcggagaagcagcggcttatctaccagggaagagtgctccaagatgacaagaagctgcaggagtacaacgtgggaggcaaggtgattcatttagtggagcgcgcccccccacagacccacctgccaagcggcgccagttctggaacaggctccgcctccgccacacacggtggaggctccccaccgggcactagaggtccaggtgccagcgtccacgaccgcaatgctaactcttatgtgatggtcgggacattcaacctgcccagcgatgggtcagccgtggatgtccacataaatatggagcaagcacccatacagagtgaacctagagtccgattggtgatggcccagcatatgatccgagacattcagacactactctccaggatggagtgccgcggcggtccccagccacagcacagccaaccccctccgcaaccaccagcagtcacgccagagcctgtggcgttaagcagccagacttcggaacccgtggaatcagaggcacctcctagagagccaatggaagctgaggaggtggaggagcgggccccagcacagaaccctgagttaacacccggccccgcacctgcggggcccacccctgccccggaaaccaacgctccaaaccaccccagccccgccgagtacgtggaggtgctgcaagagctgcagaggcttgagtctcgactccagccatttttgcagaggtattacgaggtcctgggcgccgctgcaaccacggattataataacaaccacgaagggcgtgaggaggatcaaagacttataaacctggttggggagagtctgcgactgctcggtaataccttcgtggcactcagcgacctgcggtgcaatctggcttgtacgcctcctcggcatttacacgttgtgcgcccaatgagccactataccactccaatggtgctccagcaggccgcgatccccatccagatcaacgtgggcacgactgtcacgatgaccggcaacggaacgagaccaccgcctacacccaatgcagaagcgcctcctcctggacccggacaggcttcatccgtcgcaccaagctcaaccaatgtggagagcagtgcagagggcgcaccaccaccggggcctgccccgccccctgccacctcacaccccagggtgatccgcattagccatcagagcgtggagcccgtggtaatgatgcacatgaacattcaggactccggaacccagccgggtggcgtgccgtcagcaccaacaggccctctgggtcccccaggacacggccaaacgctggggcaacaggttccaggctttccaacggctcccacccgggtcgtgatagcaagacctactccacctcaagctcgtccgtcacatccaggcgggccgccagtatcaggcacactgcagggagctggcctgggaaccaacgcctctctcgctcagatggtttccggactggtgggccagctgctgatgcagccagtgttagtcgcccaaggaacccccgggatggcgccgccaccagcgccggcaacggccagtgccagtgccggaactactaatacggcaacaaccgccggtccagccccaggaggccctgcacagcccccccctacacctcagcctagcatggctgacttgcagttctcccaattactgggcaatttgctcggtcccgcggggccaggcgcaggcgggcccggcgttgcctctccaaccataaccgtggctatgcctggtgtcccggcctttctgcaaggaatgaccgatttcctccaggccacccagactgcaccacccccccctcctcctccaccaccccctcctcctgcgcctgaacagcagaccatgccgcccccgggaagtccgagcgggggggccgggtcacccggggggcttggccttgagtccctgtcgccagaattttttacctcagtcgttcaaggcgtgctgagttccctgctcggctccctcggcgcacgcgccggctcctcagaaagcatcgccgcgttcatccagcgcctgagcgggtcgtctaacatatttgaacctggagccgacggcgcgcttggcttctttggggcccttttaagtctgctgtgccagaacttttccatggtcgatgtggttatgctcctgcacggccacttccagcccctccaacggctgcagccccagctgcgttcctttttccaccagcactatcttgggggccaggaacccacgccttcgaacatcaggatggctacacacacgttgattacaggactcgaggaatacgtacgcgaatctttttcattagtgcaggtgcagccaggcgtggatattattcgcacaaatcttgaatttcttcaggaacagttcaatagcatcgcggcacacgttctccactgcacggactctgggttcggggctaggctgctggaactgtgtaaccagggtctgtttgagtgcctagccttaaatttgcactgcttaggaggacagcaaatggagctggccgccgttatcaatggcagaatccgtagaatgagtcggggagtcaatccatctctggttagttggttgacgaccatgatggggctccgcttgcaagtcgtactggaacacatgcctgttgggcccgacgctatattgcggtacgtgaggagagttggtgatccaccccagcccctcccagaggaacccatggaggtccagggggcagaacgcgcgagcccagagcctcagcgtgagaatgcctcgcctgctcctggcacaacagcagaagaagccatgagccgggggcctccccccgcacccgaagggggaagccgcgacgaacaggacggggcctccgccgagactgaaccgtgggctgctgcagttccacccgaatgggtccccattatccagcaagacatacagtctcagagaaaagtaaagccacagcccccactatccgatgcctacctctctgggatgcccgccaagaggcgaaaaaccatgcagggggagggcccacagctactcctgtccgaggctgtgagccgggcagctaaggctgccggcgcccggccgctcacctccccagagtctctgtcccgagacctcgaggcacccgaagtgcaagagagctacagacaacagctacgctcagatattcagaagcggctgcaagaagaccccaattacagtcctcagagatttcctaacgcacagcgcgccttcgccgatgacccatag

SEQ ID NO: 232890 - DNA, 3381 bp, Artificial Sequence
  derived and/or modified sequence
atggagcccaacgattcgacttccacagcggtggaggagcctgattcacttgaagttctggtcaagacattggatagccagacccggacttttatagtgggtgcacagatgaatgtgaaggaattcaaagaacatatagccgcctcagtttcaattcctagcgagaagcagcgcctgatttaccagggaagagtgctacaggacgataagaagctccaggaatataatgtggggggtaaggtcattcacctggtggaacgagctccccctcaaacccacctcccaagcggcgcaagttcggggaccggttctgctagcgctacgcatggcggagggagtccccctggtacccgcggccctggcgctagtgttcacgaccggaacgccaactcatatgttatggttggaaccttcaatctgccatctgacggtagtgccgtggacgtgcacatcaacatggaacaggcacccatccagagtgagccgcgggtccggttagttatggcacagcacatgatccgggacatccaaacactgctttctcggatggaatgccgcggaggtccccagccgcaacatagtcagcctcccccacagccacctgctgtgacgcccgaacctgtggccctgtcctcccagactagtgaacccgtcgagtctgaagccccccctagagagccaatggaggccgaggaagtcgaggagcgtgcacctgcccagaatcccgaacttacacctgggcctgcaccagcgggcccgaccccagcccccgaaaccaacgcgccaaatcacccatctccagccgaatatgtagaagtccttcaggagttacaaaggctggagtcacggctgcagccgtttctgcagaggtactatgaggtgctcggggccgctgccacgacagattataataacaatcacgagggacgagaagaagaccagaggctcattaatctcgttggggagagtttgaggttgctgggtaacacttttgtggcactctcggaccttaggtgcaatctggcttgtacccccccgcggcatctgcacgtagtcaggccgatgtctcactatactactcccatggtacttcagcaggcggccatcccaatccagataaacgtgggcactacagtgactatgacaggtaatggaacaagaccgccacctacacccaatgcagaggcccctcctcccgggcccggacaggctagtagtgttgctccctcctctactaatgtggagtcgagtgccgagggggctccccccccggggccagctcccccgccggcgaccagtcaccctagggttatcaggatttcacatcaatcagtagagcccgtcgtgatgatgcacatgaacatccaggattcaggcacccagccaggaggggtgccttccgctcctactggccctctcggcccccccggacatggacagacgttaggccagcaggtcccggggttcccgaccgccccgacgagggtcgtgatagcccgtcccacccctccacaggctcgccctagccacccaggggggccgcccgtgagtggcaccctgcaaggggccggactggggacaaacgcttcattggctcagatggtatctgggctcgttggacaactactgatgcagccagtactggtggcccaagggacaccaggtatggcaccaccccccgcccctgccaccgcctccgctagcgccggaaccaccaatactgccaccacagctggacctgcacctggaggtcctgctcaaccacctccaacacctcagccgtccatggctgatctgcagttctcgcaattactggggaaccttttggggcctgccggaccgggagctggcgggccaggggtagcatcacccacaattaccgtggctatgcctggtgtgcccgctttcttgcagggaatgaccgatttcctgcaggcgacacagaccgccccccctccaccgcctccaccgccaccacctcctccagctcccgagcagcagacaatgcccccccctggaagtcctagcggaggagcgggatcaccaggcggcctggggctggagagtctctcccccgaatttttcactagtgtggtgcagggcgtcctgagttctctgcttggcagtctgggagcccgggctggctcatcggagagcatcgctgcgtttatccagagactctccgggtccagtaacatttttgagcccggtgccgacggcgctctgggcttctttggtgccctcttatcactcctgtgtcagaacttttctatggtcgacgttgtgatgctgttacacggacatttccagcctttacagagactccagccccagctccggagcttttttcaccagcattacctcggggggcaagaaccaacaccaagtaatatccggatggctacccataccctcataactggacttgaagagtacgtgagagaaagcttttcccttgttcaagtgcagccgggtgtcgatatcatccgcactaatcttgagttcttgcaggaacagtttaacagcatcgcagcgcatgtgctgcactgtactgatagcggcttcggagcaaggctgctagaactgtgtaatcaggggttgtttgagtgcttagcgctgaaccttcactgcttgggcggacagcaaatggagctggcagcggtgattaacggtagaatcaggaggatgtcacggggcgtcaatccttctttggtttcttggctcacgactatgatgggtcttagactccaggttgtgctggaacacatgccagtcggacccgacgccatcctacggtatgtgcgtcgcgtgggcgatcccccccagcctttacccgaggaacccatggaggttcagggcgccgagcgcgcctcccctgaaccccaaagagagaatgccagccctgccccaggcacaacagccgaggaggccatgtcacggggacccccccccgcccccgagggcggctcccgcgacgagcaggatggtgcgtctgctgaaacggagccatgggctgctgcagtccccccagaatgggtgcccattatacagcaggatatccagagtcagaggaaggtcaaaccacaaccacccctatccgacgcttacctgtcggggatgccagcaaaaaggcgaaaaacaatgcagggagaaggcccacagttgctgctctctgaggcagtctccagggctgctaaagctgccggtgcacgccctctgacttctccggagagtctgagcagggacttggaggcacccgaagtgcaagaatcttatcgacagcagctgcgaagtgatattcagaagagactgcaggaggatcctaactattccccacaacggtttcccaacgcccagcgggctttcgcagacgacccctag

SEQ ID NO: 232891 - DNA, 3381 bp, Artificial Sequence
  derived and/or modified sequence
atggagcccaacgattctacgagcaccgccgtagaagagcccgattccctggaagtactcgtgaaaacacttgatagtcaaacacggacattcatcgtcggcgctcagatgaacgtaaaggagttcaaagagcatatcgctgctagcgtttcaatacccagcgaaaagcagcgcctcatataccagggtcgagtgttgcaggatgataaaaagctgcaggaatataacgtgggcgggaaagttattcacctcgtagagagggcacccccacaaactcaccttccttctggcgcaagttctggaaccggttccgccagtgccacacatgggggcgggagccctccaggaactcggggccctggggcctccgtacacgacagaaacgcgaatagctatgttatggtaggaacattcaacttaccttctgatgggagtgctgttgacgttcacatcaacatggaacaggctcccatacaaagcgagcccagggtcaggctggtgatggctcaacacatgatcagggacatccagactctcctatcaagaatggagtgtcgtggaggcccccagccccagcacagccaacccccaccgcaacccccggctgtgacacctgagcctgtggctcttagtagtcaaacatcagagcccgtagagtctgaggctccgcccagggaacccatggaggccgaggaagtggaagaacgggccccagctcaaaatcccgagttgactccgggacctgctccagccggcccaacacctgcccctgaaaccaacgcccccaatcaccctagcccagctgagtatgttgaggtcctccaggaactccaaaggctggaatcgcggctccaacctttcctccagcgctactacgaggtgttaggcgcagcagcgacgaccgactataacaacaatcacgaaggacgggaagaagaccagaggctcatcaaccttgttggcgaaagtctgcgcctgctgggcaacacctttgtcgccttgtctgacttacgctgcaatctggcctgcactcctccccgccacctgcacgtcgttcggccaatgagtcactatacaacgcccatggtccttcaacaggctgctatccccatccagattaatgtcggtacaacagtcaccatgaccggaaatggcaccagaccgccaccaactccaaatgcagaggccccacctccaggacctggacaggcatcatctgtggcaccatccagtaccaacgttgagagctctgcagagggagcccctccacccgggccagctcctccgccagcaacctctcacccccgagttatacgaatcagccatcaatcagtcgagcccgtggtcatgatgcacatgaacattcaggactcgggcactcaaccggggggtgtccctagcgccccaacaggaccactgggtccccccggccatggccagacactcgggcagcaggtacctggctttcccaccgccccaacccgcgttgttatcgcacggcctactcccccgcaggcacgcccgtctcaccccggtggcccaccggtgtccggcactttgcaaggagccggattgggaaccaacgcttctcttgcacaaatggtgtcggggcttgtaggccaattactcatgcagcccgtgcttgttgctcaaggcacaccaggtatggcacctcccccagcacctgcaacagcttctgcctcagccggcactactaacaccgccactaccgctggcccagcccccgggggccccgcccagccacctcccacccctcaaccttcgatggccgacctacagttctcacagctactcggcaatctgttggggcctgcagggcccggagcaggtggtagtggcgtggcaagtccaacaatcacggtagcaatgcctggtgtgccagcatttttgcagggcatgacagactttctgcaggccacccagaccgccccgccacccccaccgccaccgccaccccctcctcccgcacccgagcaacagaccatgccaccaccgggttcccctagcgggggcgctggatcacccggcggcttagggctcgagagcctatcacccgagtttttcacatcggtggtccaaggcgttttatcctcgctgctgggatccttaggtgcacgcgccggctcctcggagtccatcgccgctttcatccagagactttctgggagcagcaacattttcgagcctggagccgacggagctctgggatttttcggcgcccttctgtctttgctgtgccagaattttagtatggtggatgtggtgatgctgctacacgggcattttcagccccttcaacgcctccagccccagcttcggagcttcttccatcagcattatctggggggccaggagcccacccctagtaacataagaatggctacgcacacactgattaccggtctcgaagagtacgttcgggagagcttctccctggtgcaggttcaacccggagtggacattatccggacgaacctcgaattcctacaggagcagtttaactccatagccgcccacgtactacattgtaccgattcaggattcggtgcgcgcttgcttgaactgtgcaaccaaggcttgttcgaatgcctcgctctgaatttgcactgcctgggcggccagcagatggaacttgccgccgtgattaacggaaggatcagacgaatgtctagaggcgtgaatccatctctagtctcctggctgaccactatgatggggttaagattacaagtggtgttagagcacatgccagtgggccctgacgccatcctaaggtacgttaggcgcgtgggggatcccccgcagccactccctgaggagccgatggaggtccagggggctgaacgggcctctcccgaaccccagagggagaacgcctcacctgcccccgggacaacagcagaggaggccatgtctagaggcccaccgcctgcccctgagggcggctctcgggatgagcaggatggagcctctgccgaaaccgagccctgggccgcagccgttcccccagaatgggtcccaatcatccaacaggatattcagtcgcagcggaaagtgaagccgcagcctccattgtcagacgcttacctgtcaggcatgcctgcaaagcgccggaaaactatgcaaggagagggccctcaactgttactctcggaagccgtgtcccgcgcagcaaaggccgccggcgctcgtccactgacaagtcctgagagcctgtccagagatctagaggcacctgaggtacaggaatcgtatagacagcagctcaggagcgatatccagaagaggctccaggaagatccaaactactcaccccaacggttccctaatgcacagagggccttcgctgatgacccctag

SEQ ID NO: 232892 - DNA, 3381 bp, Artificial Sequence
  derived and/or modified sequence
atggagcctaacgacagcacctcgacagccgtggaggagccggatagcttggaagtccttgtgaaaactctggattcacagacaaggactttcatcgtcggagcccagatgaatgtgaaggaattcaaggaacacatcgccgcctcagtgagtataccgagcgagaagcagcgtctgatttatcaagggcgtgtcctccaggatgataaaaaactgcaggagtacaacgttggagggaaagtgatccacctggttgaaagggcccccccccagactcatctgccctcaggtgcctcttcaggtaccggtagcgcaagtgccactcatggcggaggatctccccctggaactcgaggacctggagcctcggtgcatgatcgcaacgccaatagctatgttatggtgggcacatttaatctgcccagcgatggctcggccgtggacgtccacattaacatggaacaggccccaattcaatctgaacctcgtgtgcgactggtgatggctcagcacatgatcagggatattcagacgctgctatcccgtatggagtgtaggggcggcccacagccacagcactcccagccccccccgcagcctcctgcagttacaccggagcccgtggcattgtctagccagacgtccgagcctgttgagagcgaggcccctccgcgtgaacctatggaagctgaagaagttgaggagcgagctcccgcccagaacccggaactcacccctggccctgctcctgccgggcctacccccgcacccgaaaccaatgcccctaaccacccctctcccgccgagtatgtcgaggtgctccaagaattgcagagactggagtcccggctccagccatttttgcagcgatactacgaggttctgggcgccgccgcgactacagactacaataacaatcacgagggcagggaggaagaccagcgcctgatcaaccttgtgggcgagagcctgcgccttctgggtaatacatttgtggccctgtctgacctgcggtgtaatttggcttgtactccccctcgacacctacacgtcgtgagacctatgtctcactacaccacccccatggtgctgcagcaggccgccataccaatccagatcaacgtcggaactactgtgactatgaccggaaatggcacccgcccgccaccgacgcctaacgccgaggcccccccaccaggccccggacaggctagctctgtggctccttcatccacgaacgtcgagtcaagcgccgaaggagcccctcctcccggacctgcgccaccccctgcaacatcacaccctcgggtgattcgcatctcgcaccaatcagtggagccggttgtgatgatgcacatgaatatccaggattctgggacccagcccggcggggtcccatctgcccctaccgggcccctgggcccgcccggtcacggccagacactcgggcagcaggtccctgggtttcctacagcaccaacacgggtggtgattgcacgacccaccccgcctcaggcaaggcccagccacccaggtgggcctccagtgtcagggacgctgcagggggccgggttgggcactaacgcatcactggcccagatggtatccggattggtgggtcagctgttgatgcagcccgtattagtagcacagggaacaccaggaatggcacctcctccagcgccggccacagcttcagcttccgccggcactacaaataccgccaccacagccgggcccgcaccagggggcccggcccagcctccccccacaccacagcccagcatggctgacctccagttctcacagctgttaggcaatttgctcggacctgctgggcccggggcggggggatccggtgtcgccagtcccactatcactgtcgctatgccgggcgttcctgctttcctgcaaggaatgacggactttttgcaagctactcagaccgcgcccccccctccaccgccgcctcccccccctcctcccgcgccggaacagcagacaatgcctcccccaggttctccctctggtggcgcgggctccccaggcggactcggcctagaatccttgagccctgagtttttcacaagtgtggtgcagggagtgctctcatctctgctcggatcccttggcgccagagcaggttcatctgagtcaattgccgcctttatccagaggctctcaggatcgagtaacatttttgaaccaggcgccgacggggccttgggattcttcggggccctgctgagtctactgtgtcagaatttcagcatggtagatgtggttatgctgcttcacgggcactttcagcctctgcagcggcttcagccacagcttaggtccttcttccaccagcactatcttggagggcaagagcctacaccgtccaacattcgcatggccacccacaccctgattaccgggctcgaagaatatgtgagagagtcctttagcctcgtccaggtgcaaccaggagttgacatcatccgcaccaacctggaattcttgcaggagcagttcaattccatcgccgcacacgtacttcactgcactgattccggttttggggctcgcctgcttgagctgtgcaatcagggattgtttgaatgcctggcgctgaacctgcattgtttaggaggccagcagatggagctggccgccgtgattaatgggcgtattagacggatgtctcggggtgtgaaccctagtttggtctcctggctgactacaatgatgggcctgcgcctgcaggtggtcctggaacatatgcccgtcgggccagatgccatcctgcgctacgtgagacgggtcggagaccctccccaacccctgccggaggagcctatggaagtacagggtgccgagcgggcatcccccgaacctcaacgcgaaaacgcttcacctgcccccggcacaaccgcagaagaggccatgagtagagggccacccccagccccggaaggaggcagccgggacgaacaggatggggcctcggcagaaacagagccctgggccgccgcagtgcctcccgagtgggtcccaatcatccagcaggacatccaatcccaaagaaaagttaagccccagcctcctttaagcgatgcgtacctcagtgggatgcctgccaagcgtagaaaaactatgcagggtgagggcccccagctcctactgagcgaagcggtctctagagcagccaaagcggctggtgcccggcctttgacctcacctgagtctctgtcccgcgacctcgaggcccctgaagtgcaggagtcttacaggcagcagcttagatcagacatccagaaaagattacaggaagacccaaattactctccccagaggtttcctaatgcgcagagagcatttgccgatgacccctag

SEQ ID NO: 232893 - DNA, 3381 bp, Artificial Sequence
  derived and/or modified sequence
atggagcctaatgacagcacttcgacagctgtggaggaacctgactcgttagaagtgctcgtcaaaacattagactcacagacgcgtaccttcatcgtgggggcacaaatgaacgtaaaagagttcaaggagcatatagccgccagcgtctcaatcccaagtgaaaaacagcgacttatttaccagggaagagtcctgcaagacgacaagaagctgcaagagtataatgtggggggtaaagtaatccatctcgtggagcgcgcccccccgcagacccacctgccatcaggagcgagctcggggacgggctctgccagtgccacccacggtggggggtctccacctggaaccagagggcccggtgcttcggtccacgacagaaatgctaattcatatgtaatggtaggaacttttaaccttccaagcgacgggtctgccgttgatgtgcacattaatatggaacaagctccaattcagagcgagcccagggtgaggttagtcatggcacagcatatgattagggacattcagaccctgctatcacgtatggagtgcaggggcggtccacagccccagcattcccagccaccaccacagcctcccgcagtaactcccgagcctgttgcacttagtagtcagaccagtgaacctgttgaatcagaagcaccacccagagagcccatggaggccgaagaagttgaggagcgtgcaccagcacagaacccagaactgaccccaggaccggcccctgcaggacccacgccagcccccgagaccaacgcacctaatcatccgtcaccggcagaatacgtcgaggtattacaagaattgcagcgcctagagagccgcctgcagccattcctccagcgctattatgaagtgctgggggcggcagcgactacagattacaacaacaaccacgagggccgtgaggaagaccagcggctgataaacctcgtgggtgagtcattacgcttacttggaaatacatttgtagctttgtctgacctacggtgcaatctagcttgtacgccaccaagacacttgcatgttgtgaggccaatgagccactacacgaccccgatggtgttgcagcaagcagccattcctattcaaattaatgtgggcacgacagtaaccatgactggcaacgggacacgcccaccgccgactcctaatgccgaagccccacccccaggtcccggtcaggcatcttccgtcgccccctcaagcacaaacgtggagtccagcgcagaaggcgcgccaccaccagggcctgctcccccacctgccacatctcacccaagggtgatcagaatcagtcaccagagcgtggagccagtggtaatgatgcatatgaatatccaggatagcgggacccagccagggggcgtgcccagcgctcccacagggcctctcggtcccccaggccacggacagactttgggccagcaggtccctggattcccaacagctccaaccagggtggtgatcgctcgaccaaccccacctcaggctcgcccttcccaccctggtggcccacctgttagtggcactctccagggagctggcctgggaactaacgcctccctggctcagatggtctcaggccttgttggtcaactgctcatgcaaccagttttggtggcccaaggcactcccggcatggctcccccgcctgcaccggccaccgcatctgcctccgcggggactacaaacactgcaaccacagccggcccagctcctggaggacctgcacaacctcctccgacaccccagccttccatggctgacttacagttctcccagttactgggaaatctgttgggaccagccgggcctggtgctggtggtcccggagttgcttctccgactatcactgtcgctatgccgggggtgccggctttcctccaagggatgactgatttcttacaggcaacacagactgccccccccccccccccccctccacccccacccccacctgcccctgagcagcagaccatgccccccccgggttccccttctgggggagctggaagcccgggaggtctgggacttgaatccttgtctcccgagttttttacctccgtggtgcagggggttctgtcttcgctgctggggtcacttggggctcgggctggctcaagcgagtcaattgctgcatttattcagaggctttctggaagctcaaacatttttgagccaggtgccgacggggccctgggatttttcggagcactcctctcacttctgtgccaaaatttctctatggtggacgtggtaatgctgctgcatgggcactttcaacctttgcagcgcttgcagcctcagttgaggtcattttttcaccagcattatctgggaggccaggaacctacccccagcaatatccggatggctacccacacactgatcactggactggaggaatacgtaagggagtcgttttcattggttcaggtacaaccaggcgtcgatattatcaggacaaacttggagtttttgcaggagcaattcaattccattgctgcacacgtactacactgcaccgacagcggctttggcgcccgtctgcttgagctgtgcaaccaaggactatttgagtgcttagctctcaacttgcattgtctgggtggccaacagatggagctggcagcagttatcaatgggcggatcagacgcatgtcgcgaggtgtgaacccatccttggtaagttggctcacgacgatgatgggccttcgcctacaggtagtgcttgaacacatgcccgtaggccccgacgccatcctgcgttacgtgagacgggtgggagatccaccacagccacttcccgaagagcccatggaagtgcagggggccgagagagcttcaccagaaccccagagagaaaatgccagccccgccccggggaccaccgcagaggaagctatgagccggggccctccccccgccccggagggtggttctagagacgagcaagatggggcctccgccgagacggaaccctgggcagctgccgtgccgcctgaatgggtccctattattcaacaggacatccagagccagcggaaggtgaagccacagccccctctcagcgatgcctacttatctggcatgccggctaaaagacgcaagaccatgcagggggagggaccccagttgttgctaagcgaggccgtgtcccgagcagccaaagctgctggagcccgccccctcacctcccccgaatccttgagccgagacttggaagctcccgaggtgcaggagagctaccggcagcaactgcgctccgatattcaaaagcgcctgcaagaagacccaaactactccccccagcgattccccaacgcccagcgggcttttgccgatgatccatag

SEQ ID NO: 232894 - DNA, 3381 bp, Artificial Sequence
  derived and/or modified sequence
atggaaccaaatgactcgacctctacagctgtcgaagagcctgacagtctcgaagtgctggttaaaaccctggattcccagaccaggaccttcatcgtgggagctcaaatgaatgtcaaagagttcaaagaacacatcgctgctagcgtttcgattcctagtgagaagcagagattgatctaccagggccgagtcctacaggacgataagaagctgcaagagtacaatgtcggcggcaaagtgattcatctggtcgaaagagcccctccccaaacccatctgccttctggcgcatcaagcggaacaggcagcgcttccgccacccacggaggtggatcgccacccgggacacgagggcccggtgccagcgtgcatgataggaatgctaacagctacgtgatggtggggacgtttaacctgccttcggacggatctgcagtcgacgtgcatatcaatatggagcaggccccaatccagtcggagcccagggtaaggctggtgatggcccagcacatgataagggatattcagacattgctgagccgcatggaatgtagaggaggcccgcagcctcagcactctcaaccacctccacagccacccgccgtgacccccgagcccgtcgccctgtcatcacagacatctgagccggtggagtctgaagccccccccagagagcccatggaggctgaagaggtagaagaaagagcaccagcccagaaccctgagttgacgcccggcccagcacccgcagggcctacacccgccccagagactaatgcccccaaccaccccagtcccgccgaatatgttgaagtcctgcaggaacttcaaaggctggagagcaggttacaaccctttctgcagagatactacgaggtgctgggagccgcggccaccactgactataataacaatcatgaaggccgtgaagaagaccagagactgattaatctggtgggagaatcacttaggctgctcggcaacacatttgtcgccttgtccgacttaagatgtaatttagcttgtacgccgcctcgtcacctgcacgtggtccgtcctatgtcccattacaccacccctatggtcttgcagcaggccgctattcccatccagatcaatgttggcacaacagtgacaatgaccgggaacgggacccgccccccaccaacacccaacgccgaggctcctccacctggtcccggacaggcgagttcagttgccccttcctccactaacgtggaaagctccgccgagggtgctcccccacctggccctgcccccccccccgcaacaagccacccaagggtgataaggatctcccaccagagtgtagagcccgtagtaatgatgcacatgaatattcaggattctgggacgcagcctggcggcgtaccttctgccccaacaggccctctgggtcctccaggacacgggcaaacattgggtcagcaggtccccggcttccccacggcaccaaccagggtggtcatcgcacgaccaactcctcctcaggccaggccatcccatcccggcggaccgccggtatctggaactctccagggcgccggcctaggaacaaatgcctctctggctcaaatggtgtctggactggtcggacagctcctcatgcagcccgtcctggtggctcagggtacgccaggaatggccccacctcccgcccccgctacggcctcagcctcagccggtactaccaatacagcaacaaccgctggccctgcaccaggaggtccagcacagccacccccgaccccgcagccatccatggccgacctgcaattttcacaattgctcggcaatctcctggggcccgccggtcctggcgctgggggccctggagtcgcgagccctacaatcaccgtcgctatgcctggcgttcctgcattcctccagggcatgacggactttcttcaggctactcagaccgctccccccccacctcctccccccccaccacccccacccgcaccagagcagcagactatgcctccgcccggttccccaagtggaggtgcaggctcccccggcggcctgggtctcgagagcctgagccctgagtttttcactagcgtggtgcaaggcgtgctgtcgtccctgctaggctctcttggagcccgggcaggttccagcgaaagcattgctgccttcatacaacgcctcagtggatctagcaatatcttcgaaccgggcgctgacggcgcacttggtttttttggagctctgttgagcttgctgtgccagaatttttctatggtagacgtggtgatgctgttacatgggcactttcagcccctgcaaaggctccaacctcagttgcgctcttttttccatcagcactacctcggcgggcaggagccaaccccttccaatatccgaatggctactcatactctgataacaggccttgaagaatacgttcgcgaaagcttcagcctggtacaagtgcaacccggagtggacatcataaggaccaatctcgagttcctgcaggagcagttcaacagcatagccgctcatgtgttgcactgtactgacagcgggtttggggccagattgctggaactgtgtaatcagggtctgtttgaatgcctggcactgaatttgcactgccttggaggacagcagatggaacttgccgctgtgataaatggacgcatccgtcgcatgagccggggcgtgaatccttctctcgttagctggctgaccacaatgatggggcttaggctgcaggtggtcctggaacacatgccagtagggcccgatgcaatccttagatatgtccggagagttggagaccctccccagcccttgccagaggaaccaatggaggtgcagggtgccgagcgcgccagtcccgagcctcaacgggagaacgccagccccgcccctggaacaaccgctgaggaagccatgtcacgggggcctccgccagctcccgaggggggttcacgcgatgaacaggacggggcatctgctgaaaccgagccttgggctgctgcggtgccaccagagtgggtgccaataatacagcaagacatacagagtcagcgcaaggtgaaacctcagccgcctctgagcgacgcttacctctctggcatgcccgcaaaaagaagaaagaccatgcaaggcgagggtccacaactcctgctcagtgaggccgtttcaagggctgccaaagccgcaggagccaggcccctgacgtctccagaaagtctttctcgcgatctggaagccccggaagtccaggagtcatatcgccagcagctgagaagcgacattcagaagcggctgcaggaggacccaaattactccccacaacggttccccaacgcccaacgggcatttgcggatgatccatag

SEQ ID NO: 232895 - DNA, 3381 bp, Artificial Sequence
  derived and/or modified sequence
atggaacctaacgattcaacctccacagccgtggaggagcccgattcacttgaagtacttgtgaaaacattggattcgcagaccagaacattcatcgttggggctcagatgaacgtgaaggaatttaaggagcatatcgccgctagtgtgtctatcccctcagaaaagcagcgtctcatctatcagggccgcgtgctgcaagacgataagaaacttcaggagtacaatgtaggaggaaaagtgattcaccttgtagagcgggctcctcctcaaacccacctgccaagcggagcgagtagcggaaccgggagtgcctccgcgacacatggtggaggttcaccacctggcacccggggccccggggcatctgtgcatgatagaaacgctaacagttacgtgatggtgggaacgttcaacttgcccagcgacggaagcgccgtagatgtgcacatcaatatggaacaggccccaatacaatcggagcctcgggtgcgcctggtgatggcgcagcatatgattagagatattcagactctcctgagcaggatggagtgccgggggggtcctcagccgcaacactcccagccccccccacaacccccagcagtgactccagaacctgtggccctgagcagccagacatcagaacctgtagaatcagaggcccccccaagagagcctatggaggcagaagaggtggaggagcgcgcacctgcgcagaaccccgagctgaccccgggcccagccccagccgggccgacccccgcccctgagaccaacgctcccaatcatccctctcctgctgagtacgtggaagtgctccaagaattgcagcgactcgaatccaggctccagccattccttcagcgatattatgaggtacttggtgcggcggccacaactgattataacaacaaccacgaaggacgagaggaagaccagcgcttgataaacttagtgggtgaaagtctgcggctcctcggaaatacctttgttgcactgtctgacctgcgctgcaaccttgcatgcacaccacccagacacctgcacgtcgtgcgccccatgtcccattacaccacccccatggtcttacagcaagccgccattccaatccaaattaacgttgggacaactgtcacaatgacaggtaacggcacccgtccccctcctaccccgaatgccgaggctccaccaccagggccgggccaggcaagtagcgtggcacctagttctacaaatgtcgagagcagtgccgaaggggccccacctcccgggcctgctcctccgcctgcaacatcacacccaagagtgattaggatcagccaccaaagcgtcgagccagtagttatgatgcacatgaacatccaggattcaggcacccagcctggcggagtgccctctgcgcctactggccctctagggcctcctggtcatggccagacattagggcaacaggtccccgggttcccaaccgcacccactcgggtcgtgatcgccaggcctaccccgccgcaggcaaggccaagtcaccctggaggcccccccgtgtccggaaccctccagggcgccggacttggcactaacgccagtctggcacagatggtgtccgggcttgtgggacagttactaatgcagcccgttcttgtggcccagggcacgcccggcatggccccgccacccgcaccagccaccgcatccgcatccgctggcaccaccaatacagctaccacagccggacccgcgccaggcgggccagcacagccccccccaactccccaacctagcatggcggatctgcagttttcccagttgcttgggaatctgttgggacctgccggaccaggcgccggaggctcaggcgtggcaagtcccacaatcactgtagccatgcccggagttcccgcgttcttgcagggaatgactgattttcttcaggccacgcagacagccccgcccccaccacctccaccccctccacccccacctgcacccgaacagcagactatgccaccgcctggaagtccatccgggggagccggctccccaggcggcctcggtcttgagagcctcagccctgaattctttaccagcgtagtgcagggcgtgttgagctcactgctgggatctctgggagccagagcagggtcttcagagagcatagccgctttcatccagagactctctgggtcttccaatatcttcgaacctggtgccgacggagccttaggctttttcggtgcccttctgtccttgctttgccaaaacttctcaatggtggatgtagtgatgctgcttcacgggcacttccaaccacttcaaaggcttcagcctcaactcagaagtttcttccaccagcactatctgggaggccaggagcccacaccctccaacataagaatggcaacacataccctgattacaggcctagaggaatacgtaagagaatcctttagtctagtacaggtgcagcctggggtcgatattattcgaacaaacctggagtttttacaggagcaattcaattcgatcgcggctcacgtcctgcattgcaccgactcagggtttggcgcgagactgctagagttatgtaaccaggggttgtttgagtgtttggcactcaatcttcattgcctcggcggccaacaaatggaacttgctgctgtgatcaacggacggataaggaggatgtcccgaggcgtgaatccttctcttgtgtcatggcttacaaccatgatgggattgaggttacaggtggtacttgaacatatgccagtggggcctgatgcaattttacgatacgtccgacgagtcggagacccccctcagccactgcccgaggagcccatggaagtgcagggcgcggaacgggcatccccagaacctcaacgggagaatgcatctcccgcccctgggaccacagcagaagaagctatgtcacggggtcccccccctgcccctgaaggcggatccagggatgaacaggacggcgcctccgcagagaccgaaccctgggccgccgcagttcctccagagtgggttccgataatccaacaggacatccaaagccagaggaaggtgaagccccagccaccattatcagatgcctatctgtctggaatgcctgctaagcggaggaagactatgcaaggggagggccctcaactgctactgtccgaggccgtctcccgcgccgctaaagctgcgggcgctaggccacttacgagcccagagtcacttagccgggacctcgaagccccggaggttcaggaaagctatcgccagcagctcaggtctgacatccagaagcgcctgcaggaggaccccaattactctccccagagattccccaatgcgcagagagccttcgccgacgacccttag

SEQ ID NO: 232896 - DNA, 3381 bp, Artificial Sequence
  derived and/or modified sequence
atggaaccaaatgactctacttctactgccgtggaagagcccgactctctggaagtgctcgttaagacactggacagtcagacccggaccttcattgtaggcgctcagatgaacgtgaaagagtttaaggaacatattgccgcttctgttagcataccgtcagaaaaacaacggctcatctaccaaggccgagtgctccaggacgataaaaagctacaagaatacaatgttggggggaaggttattcatctcgttgaacgggcgcccccccagacccacttgcctagtggtgccagttcggggactggttccgcttcggccacacatggaggcggttctcctcctggaacacggggtccaggtgcaagtgtccacgaccggaacgccaatagctacgttatggtcggcacattcaatctaccaagtgacgggtcagctgtggacgtccacatcaacatggaacaggctccgatccagtcagagcctcgcgtgcggctcgtaatggctcagcatatgatccgcgacatccagactctcttgtctcggatggagtgtcgcggcgggccacagccacagcactcccagccacccccacaacctccggccgtcacacccgagcccgttgccctgagctcccagactagtgaaccagttgagagtgaagcccccccacgagagccaatggaagcagaagaggttgaagaaagagcccctgcccagaaccctgagctgacccccggaccagccccggccggcccaaccccggcccccgaaacaaacgcccctaaccacccctctcctgccgagtacgtggaggtcttgcaggagctgcagcgcctcgagagcagactgcagcccttcttgcaacggtactacgaggtgcttggcgcagccgccaccactgactataacaacaaccacgagggacgagaagaagatcagagactgatcaacttggttggagagtccctgagactgctgggcaataccttcgttgcgctatccgatctcaggtgtaatctggcttgcacacctccaaggcacctgcacgtggtgcgacccatgtcacattacacaacaccaatggttctacagcaggcagctatccccatccagattaacgtcgggaccactgttaccatgacagggaacggcactcgcccgccccccactcccaatgccgaggcacctcctcccggacccggccaggcaagttctgtcgcccccagttcgaccaatgtcgagagcagcgcagaaggtgcccccccacctggtccagcccctccacctgccacgtcacatccgcgagtgatcagaatttctcatcaaagtgtggagcctgtagtgatgatgcacatgaatatccaggattccggcacccaacccgggggggtcccgtctgcaccaactggcccacttgggccgcctggccacgggcagacacttggacagcaggtgcccggttttccaaccgcacctactcgcgtagtgattgccaggccaacccctccccaggccagaccttcgcatccaggcggcccacctgtatcgggcacactgcaaggtgcgggtctagggactaacgcgagcctagcccaaatggtaagcggcctggtggggcagcttctgatgcagcctgtattggtcgcccaggggacacctggaatggccccacccccagcccccgccaccgcctctgcctctgccggaactaccaacacagcaacaacagcaggcccagccccagggggacctgcccagcctccccctactccacagccaagcatggcagatttacagttttctcagttgttaggcaatctactgggacccgctggcccaggagcaggtggctccggcgtggcctcccccaccatcactgttgcgatgccaggagtgccagcttttttgcaaggaatgacagactttctccaggcgacacagactgctcctccgcccccccctcctcctccacccccgccgcccgcaccagaacagcaaactatgccacctcccggcagcccatcaggtggagcgggatctcccggcggccttggtttagagagcctgagtcctgaattctttacgagcgtcgtgcagggcgttctctcctctctgctcgggagtctgggggcgcgagccggttcctccgaatcaattgccgcattcatccagagactttccggatcctccaacatcttcgaaccgggcgctgacggagccctgggctttttcggagctttgctgagtctgctgtgtcagaattttagcatggtggacgtcgttatgctgcttcatggccacttccagcctctacagcgtttgcaaccgcaactcagaagctttttccatcaacactacctgggaggccaggaacctacccccagcaatatcagaatggcaactcacaccctcatcaccggccttgaggaatatgtccgcgagagttttagcctcgtgcaggttcagccgggcgtcgatattatccgaacgaacctggagtttcttcaggaacagtttaacagcatcgccgctcatgttctgcattgcactgattccggattcggggcccgactgctggaactgtgtaatcagggcttatttgaatgcctggcgcttaatttgcattgcctgggggggcaacaaatggaactggccgcagtaatcaatgggcgcatcaggcgtatgagcaggggcgtgaatccatcactggtgtcttggctgactaccatgatgggcttgcgattacaagttgtgttggaacatatgccagtcgggcctgacgcgatactgagatatgtgagacgagtcggggatcccccacaacctctccccgaggaaccaatggaggtgcaaggagcggaaagggcctctcccgaacctcagagagagaacgcgtctcccgccccaggaacgaccgctgaagaggccatgagccggggccccccacctgcccccgagggtggctccagagacgagcaggatggggcctcagcagagacggaaccttgggccgccgccgtgccacctgagtgggtcccgatcatccagcaggacattcaatcccagcgcaaagtgaagccccagcctcctttgagcgatgcctacctgtctggcatgcccgctaaacgtcgcaagacgatgcagggagagggcccccagcttcttctgagtgaagctgtatccagggccgcaaaagcagctggcgccaggcctctgacatctcccgagtcgctttcaagagatctggaagcaccagaggttcaggagtcgtacaggcagcagctgcgatctgatattcaaaaacggctgcaagaagatccgaactactctcctcagcggttccctaatgctcagcgcgccttcgctgacgacccctag

SEQ ID NO: 232897 - DNA, 3381 bp, Artificial Sequence
  derived and/or modified sequence
atggagccgaatgattctacatcaacagccgtggaggaaccagacagcctggaggtgctggtgaagaccctggacagccagactcgaactttcatagtgggcgcccagatgaacgttaaagagttcaaggagcacattgccgctagcgtttccataccatctgaaaaacagcggctcatttaccaaggcagagtcctacaagacgataagaagctgcaggagtacaacgtgggcggtaaggttatccacctggtggagcgtgctccgcctcaaacacatttacccagtggggccagctccgggaccggaagtgccagcgctactcatggcggtggaagccctccaggaacacgggggcctggagcctctgtacacgacaggaatgctaatagctatgttatggtgggcacatttaacctcccttcagacggatccgcggtggacgtacacatcaacatggaacaagcaccgattcagagcgaaccacgagtgcggctggtcatggcgcagcacatgatcagggatatacagaccctgctgtcgcggatggagtgcagagggggtccgcagccacagcacagccagccaccgcctcaacccccagcagttacacctgagcccgtggcactgtctagccagaccagcgaacctgtcgagtccgaggctcccccccgtgaacccatggaggcagaggaggtcgaggaacgagcccctgcacagaatcctgagcttacaccggggccggcccccgccgggcctacaccagcccctgagacaaacgcacctaaccacccaagccccgcagaatacgtcgaggtcctccaggagctgcagagactcgaatcgaggcttcagcccttcctccagagatactacgaagtgctgggcgcggcagctaccacagattataataacaaccatgagggccgcgaggaggaccagcgactcatcaatttagtcggtgagagtctgagattgcttggcaacacatttgtcgctttgtctgacctgagatgtaacttggcttgcactccgcctcgtcatttgcacgtcgtccgaccaatgtcgcactatacaacccctatggtactgcaacaagcagcaattcccatccagattaacgtcgggaccaccgtcactatgacgggtaacggaacacggccgcctccaacgcccaacgctgaggctccccctcccggtcccggacaggcctcttcagtggccccatcgagtacaaatgtggagtctagcgctgaaggcgcccctcctcctgggcccgcgcctccgcctgccactagccacccgcgagtgataaggatctcacatcagagcgtagagcccgtagtgatgatgcatatgaatatccaggactcaggcacgcagccaggcggcgtcccatccgccccaactggcccattggggccgcctggacatggccagacattaggtcaacaggtaccaggcttcccaacagctcctacaagggtggtcatcgcccgacctactccaccccaggcaaggcccagtcaccccggcggccctcccgtgtccggtaccttacagggggcgggtttaggaaccaatgcatccctagcccagatggtcagtggcctggtcggccagttgttaatgcaacctgtcctggtagcacagggcactcccgggatggctcctccccctgcccctgctacagctagcgctagtgccgggaccaccaatacagccaccactgctgggccagctccagggggtcctgcacagccgcctcccaccccgcagccctcaatggcagacttgcagttctctcagctgctgggcaatctccttggtcccgcaggtcctggagccgggggctcgggggtggcgagcccaaccatcacagtggccatgcccggcgtcccagcgtttctgcaggggatgactgatttcctccaagctacccaaaccgcacccccaccgccaccccccccaccgccgccaccgcccgcgcctgagcagcagacgatgcctccccccgggagtcctagtggtggggctggatcgccaggaggactggggctggagagcctctcacccgagttcttcacgagcgtcgtgcagggtgtgctcagcagcctgctgggcagcttaggcgctcgggcaggtagcagcgagtccattgcggccttcatacagcggttgtcgggctcctctaacatctttgagcccggggccgacggggccctcggcttctttggagcactgctgtccctgctttgccaaaatttttcgatggtcgatgtggtcatgctgctgcacgggcattttcagcccctgcagaggctccagcctcagctccggtcattttttcaccaacactatctcggcgggcaggaaccgacccctagcaacattagaatggcaacacatacactaatcacaggactggaggaatacgttagggagagcttcagtcttgtccaggtgcagcctggagttgacattatacggaccaacctggagtttctgcaagagcagttcaactctatcgccgcgcatgtgctccactgtaccgattccggattcggcgcaaggcttctcgaactgtgtaatcaggggctctttgaatgcctggccctcaaccttcactgcctgggcgggcaacaaatggagcttgctgccgtgattaacggtcggatcaggagaatgagccgtggggtgaacccatcattagtgagctggctcacgaccatgatgggcttgagactacaggtggtgctcgaacatatgccagtaggtcccgatgccattctccgctatgtaaggagggtcggcgacccccctcaacccctgccggaagagccaatggaagtgcaaggagctgagcgtgcatcccctgagccacaacgcgagaatgcgtcccccgctcccggaacaaccgcagaggaggctatgtcacgcggtccaccccctgcgcctgaaggagggtccagagacgagcaagacggggcctccgcagaaaccgaaccctgggcagcagcggtgccacctgagtgggtccctattatccagcaggacatccagtcccagcgtaaggttaaacctcagccaccactgagtgacgcctatttatcgggtatgccggccaaacggcggaagacgatgcagggagaaggaccccagctcttactgtcagaagcggtctcgcgcgccgctaaagcggcaggggctaggcctctcacatcccctgagagtctctcgagagacctggaggcccctgaagtccaggaaagctatcggcaacaactgcgctcagatatacaaaaacgattgcaggaagacccaaactattcaccccaacgttttccaaacgcacagagggcttttgcagatgacccatag

SEQ ID NO: 232898 - DNA, 3381 bp, Artificial Sequence
  derived and/or modified sequence
atggagcccaatgacagcaccagcacagctgtggaggagccagacagcctggaggtgctggtgaagaccctggacagccagaccaggaccttcatcgtgggcgcccagatgaatgtgaaggagttcaaggagcacatcgccgcctctgtgtccatccccagcgagaagcagaggctcatctaccagggccgggtgctgcaggatgacaagaagctgcaggagtacaacgtgggcggcaaggtgatccacctggtggagcgggccccaccccagacccacctgcccagcggggccagcagcggcaccggcagcgccagcgccacccatggaggcggcagccccccaggcacccggggccctggggcctctgtgcatgacagaaatgccaacagctatgtgatggtgggcaccttcaacctgcccagtgatggcagcgctgtggatgtgcacatcaacatggagcaggcccccatccagagcgagccccgggtgcggctggtgatggcccagcacatgatccgggacatccagaccctgctgagcaggatggagtgccggggcggcccccagccccagcacagccagcccccaccccagcccccagctgtgaccccagagcctgtggccctgagcagccagaccagcgagcctgtggagagcgaggccccaccccgggagcccatggaggccgaggaggtggaggagcgggccccagcccagaaccctgagctgaccccaggccctgccccagctggccccaccccagcccctgagaccaatgcccccaaccaccccagccctgcagaatatgtggaggtgctgcaggagctgcagaggctggagagccggctgcagcccttcctgcagcgctactatgaggtgctgggcgccgccgccaccacagactacaacaacaaccacgagggccgggaggaggaccagaggctcatcaacctggtgggggagagcctgcggctgctgggcaacacctttgtggccctgagtgacctgcgctgcaacctggcctgcaccccacccaggcacctgcacgtggtgcggcccatgagccactacaccacccccatggtgctgcagcaggccgccatccccatccagatcaacgtgggcaccaccgtgaccatgactggaaatggcacccggcccccacccaccccaaatgctgaggcccctcctcctggccctggccaggccagctctgtggcccccagcagcaccaacgtggagagcagcgctgagggcgcccctcctcctggccctgcccctcctccagccaccagccaccccagggtcatccgcatcagccaccagagcgtggagcctgtggtgatgatgcacatgaacatccaggacagcggcacccagcccggcggcgtgcccagcgcccccaccggccccctgggccccccaggccacggccagaccctgggccagcaggtgcccggcttccccacagcccccaccagggtggtgattgcccggcccaccccaccccaggcccggcccagccaccctgggggcccccctgtgtctggcaccctgcagggcgccggcctgggcaccaatgccagcctggcccagatggtgtctggcctggtgggccagctgctgatgcagcctgtgctggtggcccagggcaccccaggcatggcccctcctccagccccagccacagccagcgccagcgctggcaccaccaacacagccaccacagctggccctgcccctgggggccctgcccagcccccacccaccccccagcccagcatggctgacctgcagttcagccagctgctgggcaacctgctgggccctgctggccctggggccggcggcagcggcgtggccagccccaccatcaccgtggccatgcctggggtgcctgccttcctgcagggcatgacagacttcctgcaggccacccagacagcccctcctcctcctcctcctcctcctcctcctcctccagcccctgagcagcagaccatgcctcctcctggcagccccagcggcggggccggcagccctgggggcctgggcctggagagcctgagccctgagttcttcacctctgtggtgcagggcgtgctgagcagcctgctgggcagcctgggcgcccgggccggcagcagcgagagcattgctgccttcatccagaggctgagcggcagcagcaacatctttgagcccggggctgatggagccctgggcttctttggagccctgctgagcctgctgtgccagaacttctccatggtggatgtggtgatgctgctgcacggccacttccagcccctgcagaggctgcagccccagctgcgctccttcttccaccagcactacctgggcggccaggagcccacccccagcaacatccgcatggccacccacaccctcatcaccggcctggaggagtatgtgcgggagagcttcagcctggtgcaggtgcagcccggggtggacatcatccgcaccaacctggagttcctgcaggagcagttcaacagcattgctgcccacgtgctgcactgcacagattctggctttggagcccggctgctggagctgtgcaaccagggcctgtttgaatgtctggccctgaacctgcactgcctgggcggccagcagatggagctggccgctgtgatcaatggccgcatccggaggatgagcagaggagtgaaccccagcctggtgtcctggctgaccaccatgatgggcctgcggctgcaggtggtgctggagcacatgcctgtgggcccagatgccatcctgcgctacgtgagaagagtgggggaccccccccagcccctgcctgaggagcccatggaggtgcagggcgctgagcgggccagccctgagccccagcgggagaatgccagccctgcccctggcaccacagctgaggaggccatgagccggggccccccaccagcccctgagggcggcagcagagatgagcaggatggagccagcgctgagacagagccctgggccgctgctgtgcccccagagtgggtgcccatcatccagcaggacatccagagccagaggaaggtgaagccccagccccccctgagtgatgcctacctgagcggcatgcctgccaagaggaggaagaccatgcagggcgagggcccccagctgctgctgtctgaggccgtgtcccgggccgccaaggccgccggggcccggcccctgaccagccctgagagcctgagccgggacctggaggcccctgaggtgcaggagagctaccggcagcagctgcggagtgacatccagaagaggctgcaggaggaccccaactacagcccccagcgcttccccaatgcccagagggcctttgctgatgacccctag

SEQ ID NO: 232899 - DNA, 3381 bp, Artificial Sequence
  derived and/or modified sequence
atggagcccaatgacagcaccagcacagctgtggaggagccagacagcctggaggtgctggtgaagaccctggacagccagaccaggaccttcatcgtgggcgcccagatgaatgtgaaggagttcaaggagcacatcgccgcctctgtgtccatccccagcgagaagcagaggctcatctaccagggccgggtgctgcaggatgacaagaagctgcaggagtacaacgtgggcggcaaggtgatccacctggtggagcgggccccaccccagacccacctgcccagcggggccagcagcggcaccggcagcgccagcgccacccatggaggcggcagccccccaggcacccggggccctggggcctctgtgcatgacagaaatgccaacagctatgtgatggtgggcaccttcaacctgcccagtgatggcagcgctgtggatgtgcacatcaacatggagcaggcccccatccagagcgagccccgggtgcggctggtgatggcccagcacatgatccgggacatccagaccctgctgagcaggatggagtgccggggcggcccccagccccagcacagccagcccccaccccagcccccagctgtgaccccagagcctgtggccctgagcagccagaccagcgagcctgtggagagcgaggccccaccccgggagcccatggaggccgaggaggtggaggagcgggccccagcccagaaccctgagctgaccccaggccctgccccagctggccccaccccagcccctgagaccaatgcccccaaccaccccagccctgcagaatatgtggaggtgctgcaggagctgcagaggctggagagccggctgcagcccttcctgcagcgctactatgaggtgctgggcgccgccgccaccacagactacaacaacaaccacgagggccgggaggaggaccagaggctcatcaacctggtgggggagagcctgcggctgctgggcaacacctttgtggccctgagtgacctgcgctgcaacctggcctgcaccccacccaggcacctgcacgtggtgcggcccatgagccactacaccacccccatggtgctgcagcaggccgccatccccatccagatcaacgtgggcaccaccgtgaccatgactggaaatggcacccggcccccacccaccccaaatgctgaggcccctcctcctggccctggccaggccagctctgtggcccccagcagcaccaacgtggagagcagcgctgagggcgcccctcctcctggccctgcccctcctccagccaccagccaccccagggtcatccgcatcagccaccagagcgtggagcctgtggtgatgatgcacatgaacatccaggacagcggcacccagcccggcggcgtgcccagcgcccccaccggccccctgggccccccaggccacggccagaccctgggccagcaggtgcccggcttccccacagcccccaccagggtggtgattgcccggcccaccccaccccaggcccggcccagccaccctgggggcccccctgtgtctggcaccctgcagggcgccggcctgggcaccaatgccagcctggcccagatggtgtctggcctggtgggccagctgctgatgcagcctgtgctggtggcccagggcaccccaggcatggcccctcctccagccccagccacagccagcgccagcgctggcaccaccaacacagccaccacagctggccctgcccctgggggccctgcccagcccccacccaccccccagcccagcatggctgacctgcagttcagccagctgctgggcaacctgctgggccctgctggccctggggccggcggccctggggtggccagccccaccatcaccgtggccatgcctggggtgcctgccttcctgcagggcatgacagacttcctgcaggccacccagacagcccctcctcctcctcctcctcctcctcctcctcctccagcccctgagcagcagaccatgcctcctcctggcagccccagcggcggggccggcagccctgggggcctgggcctggagagcctgagccctgagttcttcacctctgtggtgcagggcgtgctgagcagcctgctgggcagcctgggcgcccgggccggcagcagcgagagcattgctgccttcatccagaggctgagcggcagcagcaacatctttgagcccggggctgatggagccctgggcttctttggagccctgctgagcctgctgtgccagaacttctccatggtggatgtggtgatgctgctgcacggccacttccagcccctgcagaggctgcagccccagctgcgctccttcttccaccagcactacctgggcggccaggagcccacccccagcaacatccgcatggccacccacaccctcatcaccggcctggaggagtatgtgcgggagagcttcagcctggtgcaggtgcagcccggggtggacatcatccgcaccaacctggagttcctgcaggagcagttcaacagcattgctgcccacgtgctgcactgcacagattctggctttggagcccggctgctggagctgtgcaaccagggcctgtttgaatgtctggccctgaacctgcactgcctgggcggccagcagatggagctggccgctgtgatcaatggccgcatccggaggatgagcagaggagtgaaccccagcctggtgtcctggctgaccaccatgatgggcctgcggctgcaggtggtgctggagcacatgcctgtgggcccagatgccatcctgcgctacgtgagaagagtgggggaccccccccagcccctgcctgaggagcccatggaggtgcagggcgctgagcgggccagccctgagccccagcgggagaatgccagccctgcccctggcaccacagctgaggaggccatgagccggggccccccaccagcccctgagggcggcagcagagatgagcaggatggagccagcgctgagacagagccctgggccgctgctgtgcccccagagtgggtgcccatcatccagcaggacatccagagccagaggaaggtgaagccccagccccccctgagtgatgcctacctgagcggcatgcctgccaagaggaggaagaccatgcagggcgagggcccccagctgctgctgtctgaggccgtgtcccgggccgccaaggccgccggggcccggcccctgaccagccctgagagcctgagccgggacctggaggcccctgaggtgcaggagagctaccggcagcagctgcggagtgacatccagaagaggctgcaggaggaccccaactacagcccccagcgcttccccaatgcccagagggcctttgctgatgacccctag

SEQ ID NO: 232900 - DNA, 3381 bp, Artificial Sequence
  derived and/or modified sequence
atggagcccaacgacagcaccagcaccgccgtggaggagcccgactctcttgaagtactggtgaaaacactggactctcagacacggacctttattgtgggtgcccaaatgaacgttaaggaattcaaggagcatattgccgcttcggtctccatcccctccgagaagcagcggctcatttatcagggacgggtgttgcaagacgataaaaagctacaggaatacaatgtaggcggcaaggtcatacacctcgttgagcgcgcgcccccccagacccatctcccttccggggcctcctccgggacggggagcgcctccgctacccatggggggggaagcccacccggcacccgagggccgggtgcgtctgttcatgatcggaacgccaactcatacgtgatggtcggaacttttaatcttccatctgatggatcagcagtcgacgtacacattaatatggaacaggcaccaattcagtctgaacctcgcgtcagactggtgatggcgcagcacatgattagagacatacagactctgttaagccggatggaatgcaggggcgggcctcagcctcagcatagccagccacctccccagcccccagctgtcactcccgagccagtcgctctgtcgtcacagaccagtgaaccagttgagtccgaggcaccgcctagagaacctatggaggcggaagaagtggaagaaagagctccggcgcagaaccctgagctcactcccggacctgccccggccgggcctactcccgctccagaaacaaacgcccctaatcacccaagtcccgctgaatacgtagaggtcctacaagagttgcagaggctggaatcaaggcttcagccatttctccagcggtattacgaggtgctgggcgctgccgctacgaccgattacaacaataatcacgaaggacgggaggaagatcagaggctcatcaatcttgttggtgaaagtctgagactgctcggaaatacctttgtggcgctgagcgacctcaggtgcaacctggcatgcacaccccctaggcacctgcacgtagtgcgacccatgagccactatactacaccaatggtattacagcaggctgccatccctatccaaattaacgtgggtacgactgtcaccatgactggaaatggcactcggccacccccaaccccaaatgccgaagcacctccgccaggtccaggccaggcctcttccgtggcaccttcctccacaaatgtggagtcttccgccgagggagcccccccacctggaccagccccaccccctgctacatcacatccccgcgttatcaggatcagtcatcagtcagtcgagcccgtggtaatgatgcatatgaacatccaagacagcggtacacagcccggcggagttccctcggcaccaaccggacccctggggccccccggccacggccagacactcggccagcaggtccccggattccccactgcccccacaagggtcgtgatcgcacggcctacccccccccaggcaagacctagccatccaggcgggccccccgtcagcggtaccctgcaaggggcagggttgggaacaaacgccagtcttgctcagatggtgagcggattggtcggtcagcttctgatgcagccggtcttggtggcccagggcacacctggaatggcaccccctccggctcctgccactgcgagcgctagcgctggtactactaacactgctactactgcgggtcctgcgcctggaggcccagctcagcctccccccactccacagccatcaatggctgacctgcaattctcccagctgctcggcaaccttcttggtcccgcgggtccaggggctggggggagcggcgtggcctcacctactatcactgtcgcgatgcccggagtgcctgcctttctccagggcatgaccgacttcctccaggcaacacagactgcacctccgcccccacccccacctccgccaccaccccccgctccagaacaacagaccatgccccctcctgggagcccatccgggggtgccgggtcaccgggtggactaggcctggagagtctgtcccctgaattcttcacttcagttgtgcaaggcgtgctctccagcctgttaggtagcctgggcgcacgggctggctcgagcgagagcattgccgccttcatccagcgccttagcggtagtagcaatatttttgaacctggagccgacggggcattgggttttttcggagcactgctgtctttgctgtgccagaatttttccatggtagatgtcgttatgttgctgcacgggcatttccagccgttgcagcggctgcagccgcagttgcgaagctttttccaccagcactatctggggggccaggagcccactccatctaatattaggatggcaacacacaccctaatcactggactcgaggagtacgtccgagaatccttctcacttgtgcaggtccagccaggagtagacattattcgaactaacctagagttcctgcaagaacagttcaatagtatcgcagcacatgtccttcattgcacagattctggcttcggcgctcggctcttggagttgtgtaatcaggggctgtttgagtgcctagcattgaacctacattgtctcggcgggcaacagatggagctcgccgcagttatcaatggcaggataagaaggatgtctagaggagtgaacccgagtctcgtgtcatggctaacaaccatgatggggttgcggctgcaggtggtgctggaacatatgccagtggggcccgacgctattctgcgctatgtgcgacgggtgggcgatccaccgcagcctctgcctgaggaaccgatggaagtccagggagccgagagagcctcacccgagccacaacgagagaatgcatcacccgcgcccggcactaccgcggaggaggctatgtcacgggggccacccccagcccctgaaggcggctcaagagatgaacaggacggggcctcagctgagacagaaccctgggccgcggccgtaccacctgagtgggtaccaataattcaacaggatatccaaagccagaggaaggttaaaccgcagcctccgctgtctgatgcatatctaagcgggatgcctgccaaacggcgcaagaccatgcaaggagagggaccgcagctgcttttgagcgaagctgtaagtagggccgccaaagcggccggagccagaccacttacctcccctgagtccttatccagggaccttgaagccccagaggtacaggagagctataggcagcagctccgatcggacatccagaagagactgcaggaagatcccaactattccccgcagaggtttcctaatgctcagagggcctttgccgacgatccctag

SEQ ID NO: 232901 - DNA, 3381 bp, Artificial Sequence
  derived and/or modified sequence
atggagcccaacgacagcaccagcaccgccgtggaggagcccgactccctcgaggtgctggttaaaaccctggatagtcagacacgcaccttcatcgtgggtgcccagatgaacgttaaagagtttaaagagcatatagcagcctctgtctcaatcccttcggagaagcagagactcatctaccagggaagagtattgcaggacgataaaaaactccaggaatacaacgtcgggggaaaggtgatccacctggtagaaagagcaccgcctcaaacccatctcccctccggagctagcagtggaacgggctcagcgagcgctacgcatgggggagggtctcctccgggtacacgaggacctggggcctcggtgcacgatagaaacgcgaattcatacgttatggtagggactttcaaccttccgagcgacggatcggcagtggacgtccatattaacatggagcaggcacctattcagtctgagccccgcgttagattagttatggcccaacacatgattcgtgatatccagacgctgctgtcacgcatggaatgccgcggaggtccccagccacagcactcccagccccctccccaacctcccgctgtcactcccgaaccagttgccctctcttcccagacttcagaaccagtggagtcggaagctccaccaagagagcctatggaggcagaagaagtggaagaacgggcacccgcccagaatcctgagcttaccccaggacccgccccagcgggtcctacaccagcgccagaaacaaacgcaccaaaccaccccagccccgcagaatacgtggaagttctccaggagctgcaaaggttagagagccggctccagccatttttgcagcgctactatgaagtgctgggtgccgccgccactactgattacaataacaaccatgaagggcgcgaggaagatcagaggctgattaatctggtgggagagtcgcttcgactccttggcaacacttttgtggccctgtccgacctgcgatgcaacctcgcgtgcacccctcccagacatctgcatgtggtaagacctatgtctcactacacgactcccatggttttgcagcaggcagccatccctatccagataaatgtggggaccacggtgacgatgaccggcaacgggacacgcccaccccctaccccaaacgccgaagccccgcctcctggaccaggccaagccagttcggtggccccctccagcacgaacgtcgaatcctccgcggagggcgccccacctcctgggcctgccccaccacccgctaccagccacccacgagtcatcaggattagccatcagagtgtcgagcccgttgttatgatgcatatgaacatacaagattctggaacgcagcccggaggagtgccctcagctcccaccggacccctagggcctcctggccacggccagacgctgggtcagcaggtgcccggtttccccacagcacccacaagggtggtgattgctcggccgacgccccctcaggccaggccaagtcaccccggtggaccgcccgttagcgggacactccagggtgcaggcttgggtacaaatgcgtccctggcccagatggtttctggtctggtcgggcagctgctcatgcagcctgttctcgttgcccagggcactcccggaatggcccctccacccgcaccagccactgcttcagcctctgccggaaccactaatacagcgacaactgctgggccagcgcccggtggtcccgcacaaccgcctccaacgcctcagcccagtatggcagacttacagtttagtcagttactggggaatcttctgggaccagcagggcccggcgcagggggctcaggtgtcgccagccctacaataacagtcgctatgcccggagtgccagccttccttcagggcatgacagatttcttgcaagctacccagacagcccctcctccaccgcctccccccccacccccccccccagcccccgagcaacaaacgatgcctccccctgggagccctagtgggggggcaggctctcctggcggcctggggctcgagagtctgagcccagaattcttcacttcagtggtgcagggcgtcctctcatcactgctcggatctttgggcgcccgcgcggggtcatctgagtctattgctgcattcatacagagactatccggatcctccaacatctttgagcctggagccgatggggcactgggatttttcggagccctgctctcactgttgtgtcagaatttcagtatggtcgacgtagtgatgctccttcacggacactttcagccgctgcaacgcctgcagccccagctgagatctttttttcatcagcactacctgggcggccaggagccaacaccgtccaacatcagaatggctacacacacgctcattacaggccttgaagagtacgtccgggagtcattcagcctggtacaggttcaacccggagtcgacataattcggacgaatctggaattcctacaggaacagttcaatagtatagcagcacatgtcctgcattgcacagactcaggatttggagcccgactactcgagctctgtaatcagggcctcttcgaatgcttggctcttaatttgcactgcctgggtggtcagcaaatggagttggcagctgtgataaatgggcgcattagaaggatgagccggggagtgaacccctcactggtcagttggttaacaaccatgatgggattgagactacaggtcgttttggagcacatgcctgtgggaccggacgcaattctacgctatgtcagaagggtcggagatccaccgcagcccttacctgaagagccaatggaggttcagggagccgagagggcttctccggagccacagagagagaacgcgagccctgcccctggcacaaccgctgaggaagccatgagtaggggccccccgcccgctcctgaagggggctcccgagacgagcaggatggggccagtgctgaaaccgaaccctgggccgccgcagtcccacctgaatgggtacccattatccagcaagatatccaatctcagagaaaggtgaagccccagcctccactgagcgacgcatacctgtctggcatgccagctaaaagacggaaaactatgcaaggcgagggacctcagttactcctcagtgaggccgtaagtcgcgcagcaaaggctgccggagcaagaccattgactagtcctgaatctctgtcgcgtgatttggaagctcccgaagttcaggagtcttacaggcagcagctgcgctcagacatccagaagcgactgcaggaggaccctaactattcaccgcagagattccccaacgcacagcgcgcatttgccgatgacccttag

SEQ ID NO: 232902 - DNA, 3381 bp, Artificial Sequence
  derived and/or modified sequence
atggagcccaacgacagcaccagcaccgccgtggaggagcccgactctctcgaagtgctcgttaagactttggatagccagaccaggactttcattgtgggtgcacaaatgaatgtcaaggagttcaaggagcacattgcagcctccgtctccatcccgagtgagaaacaaaggctcatctatcagggacgagtcttgcaggacgataagaaactccaggaatataacgtcgggggaaaggtaatccacctagtggaaagagccccccctcagacccacttgcctagtggtgcctcttctgggacgggatccgcctccgccacacatgggggcggctcacccccagggacgcgaggcccaggagccagtgtacatgacagaaacgccaactcttatgtaatggtgggcaccttcaatttaccttccgacggttccgctgtcgacgtgcacatcaacatggagcaggcccctattcagtcagagcctcgcgtccgccttgttatggcccagcacatgatcagagacatccagaccctcctttctagaatggagtgtagaggcgggccacagccccagcatagccagccacccccccagcctcccgccgtaacacccgagcccgtggctctgagctcccagacttctgagcccgtggagtccgaggcgcctcctcgagagcctatggaggctgaggaagtggaggagcgcgctccagctcagaatcctgagctgactcctgggccggcccctgccggccctacacccgccccggaaaccaacgcgcccaatcacccctcaccagcagagtacgtagaagtgctccaagaactacagcgtctagagtcacgtctgcagccgtttttacagcgctactatgaagtgctgggagccgcagccaccaccgattacaataataaccacgaaggaagggaggaggatcagaggttaatcaacctggtcggcgaatcactgagactgttgggtaatactttcgttgccctgtccgacctgaggtgtaacctggcatgcaccccacctcggcacctgcacgtagtccgcccaatgtcccactataccacacccatggtactgcagcaagccgccattcctattcagattaatgtgggaacaactgtcaccatgacaggcaacgggacccgccctcctccaacccccaacgccgaggcccctccacctggcccaggacaagcttcctcagtcgctccttcctctaccaatgtcgaatccagtgcggagggtgccccacctccaggccctgcgcctccacctgcgacatctcacccccgagttattcggatcagccaccagtcagtggaaccggtggtgatgatgcatatgaatattcaagattctggaacacaacccggcggcgtgccatctgctccgaccgggcccttgggccctcccggacatgggcagaccctggggcaacaggtgcctggattcccaacggcccctacccgcgtcgtgatcgcaagacccactcctccacaagcccgaccaagtcaccccggaggtccacctgtgagcgggacactgcaaggcgcgggactgggaacaaatgccagtttggcacaaatggtttccggtctcgtgggccagcttctgatgcagcccgttctggtagcccagggcacaccgggtatggcccccccgcctgcacccgccacagcctctgcgagtgctggaacaaccaatactgccacaaccgcgggtcctgcccctggaggccccgcgcaaccgcctcctactccccagcccagcatggcagatctacagttctcacaactcctcggcaacctcctcggccctgcaggtccaggagcaggagggtccggggttgccagtcccactattaccgtggcaatgcctggtgttcccgctttcttacaaggcatgactgacttcctgcaggcaacacagactgctcctccaccccctccccctccgccacctcccccaccggcccctgaacagcaaacgatgcctcccccagggtcccctagcggaggtgccgggtctcccggcgggcttggcttagagtcccttagccctgagtttttcacatcagtggtgcagggtgtccttagctcactgctggggagcctgggtgccagggcaggcagctccgaatctatagccgccttcatacagaggctgagtggctcctcaaacattttcgagcctggggctgatggggccctgggctttttcggtgcactgttgagcctgctttgccagaacttttcaatggtggatgtggttatgttgttgcatggccactttcagccgctgcaaaggctgcagccacagttgagaagttttttccatcagcattacttgggcgggcaagaaccaacaccttccaatatccgaatggctacccataccttgatcacaggcttagaggaatacgtgcgagaatcctttagtctggtgcaagtgcaacccggagtggacataattaggactaaccttgaattcctgcaggagcagttcaatagcatcgctgcacacgtcctccactgcacagatagcggcttcggcgcaagattgctagagttgtgcaatcaggggctctttgaatgcctcgctttaaacctgcactgccttggaggtcagcaaatggaactggccgccgtgatcaatggacgcatcaggcgcatgtctcgaggggtgaatcccagcctcgtgagctggctgactaccatgatggggctgagacttcaggtggttcttgagcacatgcctgtggggccggacgctatattgcgctatgtccgccgcgtgggcgatcccccccagcctctgcccgaagagcctatggaagtccagggtgctgagagggcaagcccagaaccccagagggagaatgcatctcccgcgcccggcaccaccgcggaggaagctatgagccggggccctcctcctgcgcctgaaggcggaagtagggatgagcaagacggcgccagtgccgagaccgagccttgggcagccgctgttccccctgagtgggtgcccattattcagcaggatattcagagccaacgtaaggtcaagccacagccaccgttaagcgacgcatacctgagtggcatgcccgctaagagacgaaagactatgcagggagaaggtccacagctgctcttgtccgaagcagtttcgagggctgctaaggctgccggggctcgacccctgaccagcccagagtctttatcccgcgatcttgaggcccccgaggtacaggagagctatcgacagcagctgcgcagcgacattcagaaaaggctgcaggaggaccctaattactcaccgcaaaggtttcccaatgctcagcgggcttttgccgacgacccctag

SEQ ID NO: 232903 - DNA, 3381 bp, Artificial Sequence
  derived and/or modified sequence
atggagcccaacgacagcaccagcaccgccgtggaggagcccgactccctggaggtgttggttaaaacactcgatagtcaaacccggacctttatcgtcggcgcacagatgaatgtcaaggaatttaaggagcacatagccgcaagcgttagtatccccagcgaaaagcagcgtctgatctatcagggtcgtgtcctgcaagacgataagaaattacaggaatacaacgtggggggtaaggtgatccaccttgtcgagagggcgccccctcagacccacttaccgagcggggctagtagcgggaccggcagcgcctctgcaacccatgggggaggcagtccaccaggcactagaggcccaggggcaagtgtacacgatagaaatgccaactcctacgtaatggttggaacattcaacttgccaagcgatggctctgcagtcgatgtgcacattaacatggagcaggctcctatccagagcgagccaagggtacgtcttgttatggcacagcatatgatccgcgatattcagacacttcttagccgaatggagtgccgggggggaccccagccacagcattcccagccccctcctcagccccctgcggtgaccccagagcctgtggcactgagctcccaaacttccgaacctgtcgagagtgaagcgccaccacgcgaacccatggaagccgaagaggtggaagaacgcgcaccagcacagaacccagaactcactccaggcccagcaccggccggtccaaccccagcacccgagaccaacgctccgaatcatccgagtcccgcagaatacgtagaagtgctccaggagttacagcggctcgagagtaggctgcagccctttctgcagcgttattatgaggtattgggcgccgccgctaccacagactataacaacaaccatgagggtcgagaggaggatcaaaggctgatcaatctcgtcggggagtctctccggctcctgggaaatactttcgtagccctgtcggacctgaggtgtaatctcgcttgcacgccgcccaggcatttacacgtagtccgccccatgagccactatactacacctatggtgctgcaacaagctgcaatacccatacaaataaatgtcggtacaactgtgaccatgaccggaaatggtactaggccacctccgacacccaacgccgaagctccacctcccgggcctgggcaggccagcagcgtggcccctagttccaccaatgtggaaagctctgccgaaggggcgccccctccgggtcctgctccacctcccgcaacaagccaccccagggtcattcgcatctcacatcagtccgtagagcctgtcgtaatgatgcacatgaatatccaagattccgggacacaacccggcggcgtcccctcagcgcctaccggacccctgggcccaccaggccacggacaaactctagggcagcaggtgcccggttttcccacagcacctacccgcgtagtgatagcccggcccactccccctcaagctagaccatctcacccggggggcccacctgttagcggcacgctgcagggggccggtctcgggacgaatgcctccctggctcagatggtgagcggcctggtaggacaactccttatgcagccagtactagtagcccagggcacacccggcatggctcccccccccgctcctgccactgcatccgccagcgctggcaccacgaacaccgcaaccaccgccggcccagccccgggcggccccgcacagcccccccccactccgcagccgtctatggctgaccttcagttcagtcagctgctggggaatctgttggggcccgccggcccaggcgcaggcggtcccggtgtcgcaagcccgacaattacagtggctatgccgggcgtgcccgccttcctgcagggaatgaccgactttctccaagccacccagaccgctccccccccacctcctcctccgccaccgcctcctccagcacccgagcagcagactatgcccccacctggctccccatcgggcggggctggttctcctggtggtctgggcttagagtcactgagccctgagtttttcacctccgtcgtgcaaggcgttctgtccagcctccttggatctctcggggcccgggctggctcctccgaatccatcgctgcgttcatccagaggctgtctggatcatcaaatatctttgagcctggagctgatggggcactaggcttctttggggctctcttgtctcttctatgccagaactttagtatggtcgacgtggtgatgctcttacacggccatttccaaccactccagaggcttcagccacagttaaggagtttcttccatcagcactatttgggcgggcaagagcctactccttccaatatccggatggcaacccatactttaattaccggcttggaggaatatgttcgggagagcttcagcctagtgcaagtccagccaggcgtggacattatccgaacaaatctggaattcctgcaggaacagtttaactctattgcagctcacgtgctccattgtaccgatagcgggttcggcgcacggctgcttgagctctgcaaccagggcctgttcgaatgcctggctctcaatctgcattgtctgggcggtcaacagatggagctcgctgccgtgatcaatggtagaattaggcgcatgagccgaggggtgaatcctagtcttgtgagctggctgaccacaatgatggggctacgcctgcaggtcgtgctcgagcatatgcccgtgggtcccgacgccatactgcgctacgtgcgcagggtcggggaccctcctcagcccttgcctgaggaaccaatggaagttcagggcgcggaacgggcttcacccgagccccagagagaaaatgcaagccccgcccccggtactaccgcagaggaagcaatgtcccgtggtcccccacccgctccagagggcggcagccgagacgagcaagacggagcttcggcagagacagagccatgggcagctgcagtgcctccggagtgggtgcccataattcaacaggacattcagagccagcgcaaggtaaaacctcagccacccctatcagacgcatatctgagcgggatgcccgctaagagaagaaagacaatgcagggggaaggtccccagttgctcctctccgaagccgtttccagggcagcgaaggccgcgggagcccgccccctgacttctccagagagtttgagcagggaccttgaagcccccgaagtgcaggaatcctaccgtcagcaactgcgctcagatattcagaaaagactgcaggaggacccaaattattctccgcagaggttccccaacgcccagagggcgttcgctgatgatccttag

SEQ ID NO: 232904 - DNA, 3381 bp, Artificial Sequence
  derived and/or modified sequence
atggagcccaacgacagcaccagcaccgccgtggaggagcccgacagcctggaggtgctggtcaagactctggacagccaaacaaggacattcattgtgggtgcccaaatgaacgtcaaggaattcaaagagcacatagccgcctctgtctcgatcccatccgaaaagcagaggctgatttatcagggtcgtgtgctccaagatgataagaagctgcaggaatacaacgtaggcgggaaggtcatacacttagtagagcgcgctccgcctcagacccacctccccagtggggccagctctgggacgggatctgcgagtgcaacacatggcggtggctccccaccagggaccagaggcccgggcgctagcgtgcacgacagaaatgcaaatagctacgtgatggtgggcacatttaacctgccctcggatggtagtgctgtggatgtgcacatcaacatggagcaagctccgatccagagcgaacctagggtccgcttagtgatggctcaacatatgataagagatatccagacactgctttctaggatggaatgtaggggcggaccgcagccacagcacagccagccccctccccagcctcccgcagtgacgcctgaacccgtcgccttgagctcacagacgtcggaaccggttgagtccgaagcccccccacgggaacctatggaagctgaggaggtggaagaacgcgctccagctcagaacccggagcttacgcccggtcctgcacccgcgggaccaacacctgctcctgagactaacgcgccaaatcatccctctcctgccgaatacgttgaggttctgcaagaactccagaggctagagagcaggctccagcctttcctgcagagatactacgaggttctgggcgcggctgccacaactgactacaataataaccatgagggtcgggaagaggaccagaggttgatcaacctggtcggcgaatctctgcgactcctggggaacaccttcgtggctctctctgacctgcgatgcaatctggcctgtactccaccacggcacctgcacgtggtgcgacctatgagccactacaccactcccatggtcctgcagcaggcagccatccccattcaaatcaatgtcgggacaactgtgacaatgacagggaacggcacacgccctcctcctactccaaacgccgaagctccaccccctggacctgggcaggcctcatcagtggccccgtcaagcaccaacgtggaaagcagtgcggaaggagccccccccccaggccctgcccctcccccagctacatctcaccccagggtgatccgcatttcacaccagagcgtggagcccgtggtcatgatgcatatgaacatccaggacagtgggacccagcccgggggagtgccaagcgccccgacaggacctctcggtcccccaggacacgggcagacattgggccaacaggtgccgggattccccaccgctcccacccgggtggtcatcgccagaccaactcctccccaggctcgaccgtcgcatcctggtgggcctcccgtctcaggcacccttcagggagccggactcggaacgaacgccagcctggcccagatggtttcaggtctggtcggccagctgctgatgcagccagtcctcgtggcccaaggaacccctggaatggccccaccccccgcccccgccacagccagcgcttctgcagggactacaaacaccgcaactacagctggccccgctccgggcggacccgcgcaaccacctcccactccccaaccctccatggccgaccttcagttttcccagctgctcggcaacctactggggccagcgggtcctggggcaggtgggccaggggtggcttcccctacaattacagtggctatgcctggcgtgccagcctttctgcagggcatgacagattttcttcaggcaacacaaaccgcgccacctccacccccaccaccgcccccccctccacccgcccccgaacagcagaccatgccgcctcctggcagcccgagtggcggtgccggcagcccgggaggactaggtctggagtcactgagccctgagttttttactagcgtggttcagggcgtgctgagctccctgctgggatcactgggcgctcgggccgggagtagcgagtcaatagccgcctttattcaacgtctgtcaggcagcagcaatatatttgagcccggggctgacggagccctgggctttttcggggccctcttgtctttgctatgtcagaacttttccatggtggacgttgtgatgctcctacacggccattttcaacccctccaaaggctccagccccaactgaggtccttcttccaccaacactacctgggcggacaggagcccacaccttccaacatccggatggcaactcacactcttatcactgggctcgaggaatacgtgagggaaagctttagcctggtgcaggtgcagccaggcgttgatattataagaaccaacctggaattcctgcaagaacaattcaacagcatcgccgcccacgttctccactgcaccgacagcgggttcggcgcgcggctgctagagctgtgcaaccagggtctgttcgagtgcctggcgctgaatcttcactgtcttggcggccagcagatggaactggcagctgtgattaatggtaggatacgacgaatgtctcgtggtgtgaacccctccctcgtgagctggttaacaacgatgatgggcttacgtctgcaggttgtgctcgagcacatgcctgtgggaccagatgctatcctgagatatgtaaggagagtgggagacccacctcaaccactgccagaggagcctatggaagtccagggtgctgagcgggcaagtccagagcctcaaagagaaaatgccagcccggctcccgggacgaccgcagaggaagcgatgagcaggggtccgccacccgcgccagaagggggttcacgagacgaacaggatggggccagcgccgagacggagccatgggcagccgccgtgccaccagagtgggtgcccatcattcagcaggatatacaaagtcagcgcaaggtgaagccacagccccctctgtccgacgcctatctgtcagggatgcccgccaaacggcgaaaaacaatgcaaggagagggcccacagctgctgctttctgaggccgtgtctcgagccgctaaagcagccggcgctcgcccactgacaagccctgaatcccttagccgggacctggaagcccccgaggtgcaagagtcatatcgccaacaattgcggagcgacattcagaagcgccttcaggaggatccaaactacagcccacagcgttttccgaacgcccagagagcgttcgcagacgatccttag

SEQ ID NO: 232905 - DNA, 3381 bp, Artificial Sequence
  derived and/or modified sequence
atggagcccaacgacagcaccagcaccgccgtggaggagcccgacagtctcgaagtactggtgaagaccctcgacagccagacgcgtacctttattgtgggcgctcaaatgaacgtcaaggaattcaaagagcacatcgccgcgtcggtgtctatacctagcgagaaacagcgactgatctaccagggccgtgtcctgcaggacgataagaaactacaggaatacaatgtgggaggaaaagttattcatctggtcgagcgggctcctcctcagacacacctacctagtggggcatcaagtggaactggctctgcaagtgcaacacacggcggtggatctcctcccggaactcgtggtccaggggcgagcgtgcatgataggaatgccaattcctatgtgatggtcggcaccttcaatcttccaagcgacgggtctgccgttgacgtccatatcaatatggaacaagccccaattcaatccgagccccgagtacgcctcgtaatggctcaacacatgatccgcgatatccagaccctcctgtctagaatggaatgtaggggtggcccccagccacagcacagccaacctcctccccagcccccagcggtgactcccgagccagtggccttaagtagccagacctcggaacccgtagaaagtgaggcgcctccccgcgagccaatggaagccgaagaggtggaggaaagggcccctgctcagaaccctgagctgacccccggccctgcccccgctggcccaacccctgctccagagacaaatgcccccaaccaccccagcccagcggagtacgttgaggtcctccaggagctgcaacggctggagtcaagactgcaacccttcctccaacggtattacgaagtcctgggggcagccgcgactacagattataataacaatcatgaaggacgtgaagaggatcagagactcatcaacttggtgggtgagtccctgcgcttactgggaaatacatttgtggctctgagcgacttacgctgtaacctggcttgcaccccgccacgccatctgcatgtggttcggcccatgagtcactacaccacaccgatggtgctgcagcaggctgcgattcccatccagatcaacgtgggcacaacagtgacaatgacagggaacggcacacgtccacctccgactccaaacgctgaggctcctcctccgggcccgggacaggctagttccgtggctccctccagtacaaatgtagagtcttccgctgaaggggctcctccgcccggtccagcacctccccccgcgacctcacacccacgtgtaatccggatttctcatcagtcagttgaaccagtggtgatgatgcacatgaacatccaggacagcgggacccaacccggcggggtgcccagtgcaccaactggacccttgggtcctcccggacacgggcagaccctggggcagcaagtgccagggtttccaactgcccccacccgagttgtgatagcccgccctactcctccccaggccagacctagtcatccaggcggcccccccgtaagcggaacactccaaggcgccgggctcggaaccaacgcttctctggcacagatggttagcggattggttgggcagcttctgatgcaacccgtgttggtggcccagggaacaccaggcatggcaccgccaccggctccagccacggcttccgccagcgctgggactacaaatacggccactactgctggacctgcccccgggggtcccgctcagcccccccctactcctcagcccagtatggcagatttgcagttttctcagctcttgggcaacctgctcggaccggcagggcccggagccgggggacctggcgttgctagccctaccattactgtggctatgcccggggttcccgcattcctgcaagggatgaccgattttcttcaggcgacacagaccgctcctccacctcctccgccaccgccaccgccaccgcccgcaccagaacaacaaaccatgcctccccccggcagccccagcggcggggccggaagcccaggcgggcttggccttgagtcgttgagccctgagtttttcaccagtgtcgtgcagggggtcctgagcagtctgctcggttcattgggggcccgggcaggctcctccgagagcatcgccgcgttcattcaaaggctctccggaagctccaatatcttcgagcccggagctgatggagcccttgggttcttcggtgctcttctttccctgctgtgtcagaattttagcatggtcgatgtcgtgatgctcctgcatggtcatttccaacctctgcagcgcctgcaaccgcagctgcggtccttcttccatcagcactatctcgggggccaggagcctactccatctaacattcgaatggctacccacacactgatcacgggcctggaggaatacgttagggagtccttcagccttgtccaagtccagccaggagtcgatatcatcaggactaacctggagtttctccaggagcaatttaacagtatcgccgcacacgttctgcactgtaccgatagtggctttggagctcgtctgttggagctttgtaatcagggcctattcgaatgcttggctctgaatcttcactgtttggggggacagcaaatggaactggcggcggtcatcaacgggcggattagaagaatgtccagaggagtaaacccgtccttagtgagctggcttacaacgatgatgggacttcggctccaagtggtgcttgaacatatgcctgtgggcccggatgccatcttacgatacgtgagacgggtgggcgaccctccccaaccattacccgaagagccaatggaggtacaaggcgccgaacgagcatccccggagccacagcgggaaaatgcatcccctgccccgggtacaaccgcagaggaagcgatgtcaaggggtcctccaccagctcctgaaggtggtagccgagacgagcaagatggcgcaagtgccgaaacggagccttgggctgctgccgtgcctcccgagtgggtgcctattatccaacaagatatccagtcacagcggaaggttaagccacagcctccactgtctgacgcctacctaagcgggatgcctgccaagcggcggaagacaatgcaaggcgaggggcctcaactactgctctctgaggccgtgtcaagggccgcaaaggcggccggggcccggccattaacctcaccagagagcctttcgcgagatctggaggcccctgaagtccaggagtcatataggcagcagctgcgttccgacattcaaaaacgcttgcaggaggatccgaactattcccctcaaagatttcccaatgcccagcgggcctttgcagacgacccctag

SEQ ID NO: 232906 - DNA, 3381 bp, Artificial Sequence
  derived and/or modified sequence
atggagcccaacgacagcaccagcaccgccgtggaggagcccgactccctggaagttttagtaaaaactctcgacagccaaacccgaacattcatagtgggcgctcaaatgaacgtgaaagagtttaaggagcatatcgccgcgagcgtttctattccctcggaaaaacagcgactgatctaccaggggcgtgtgctgcaggacgataagaagctccaggaatacaacgtgggcggcaaagttattcatctcgtggaacgtgccccaccgcagacacacctgccctccggggcatcctccggaacaggctcggccagcgctactcatggaggcgggtccccaccagggacacgcggccctggcgcttcggtccacgataggaacgccaacagttacgttatggttggcaccttcaacctgccctctgatggatcagccgttgacgttcacatcaacatggaacaggcccccattcagtctgagcctcgggtgcggctagtcatggcgcagcatatgataagggatatccaaacactgctgagccgaatggagtgccgcgggggcccccaacctcagcatagtcaacctcccccacagcccccggccgtgactccagaacctgtcgcactgtcctcccaaaccagtgaacccgtcgagtccgaagcaccccctagagagcctatggaagccgaagaggtagaggagagagctcctgcccaaaacccagagttgacccccgggcctgccccagctggacccacaccagctcctgagactaacgctcctaatcaccccagcccagctgagtacgtcgaggtgttacaggaattacaaagacttgaatcccggctgcaaccctttctacaacgatactatgaagtgctgggagctgctgctaccaccgactataacaacaaccacgaagggcgggaagaggaccagcggttaatcaacctggtgggggagtcattacgtttgctgggcaatacttttgttgccctttctgatctgcgttgcaacctggcatgtaccccaccgcgccatctacatgttgtgcgccccatgtcacactatacgacacctatggtgctgcagcaggccgctatccccatccagattaacgtcggcacaactgttaccatgactggtaatgggacccgcccccccccaacacccaacgccgaggccccccctcctggccccggccaggcttccagcgtcgcaccatcatccacaaatgttgaaagttccgccgaaggggcccccccccctgggcctgccccccctcccgcgacttcacatccacgggtcattaggatctcccatcaaagtgtagagcctgtagtcatgatgcacatgaatatccaggattcaggaacccagcctggcggcgtaccctcagctcccaccggccccttggggccacccgggcatggacagaccctgggccagcaagtgcccgggtttccaactgccccaactagagtcgtcattgcccgaccgactccgccccaagcccgtccaagtcacccaggaggccctcccgtgagcggaactttacagggcgccggcctcggaaccaatgcatcactcgcgcagatggtttctggtctagttgggcagctgctaatgcagcccgtgctcgtggctcaaggtacgcccggcatggcaccacccccggcgcccgcgacagcaagtgcgagcgctggtaccaccaacactgctaccacagctgggcctgctcccggaggtcctgcccagccaccacccactccccagcctagcatggctgatctgcagttttcccagctgctgggtaatttgctcggcccagctggacctggcgcaggcggccccggggtagcatcccccacaattaccgtggcgatgcctggcgtgcccgccttcctgcaggggatgaccgactttctacaggcgacgcagactgcaccaccgccacctcccccaccgcccccacctccgccagcccccgagcaacaaaccatgccaccacccggctctccaagcggtggggccggatccccaggggggctcggtctcgaaagcctgagtcccgagttttttacgagcgtcgtccagggagtgctgagtagcttactcgggagtctcggagctagagctggctcctctgaatcaattgcagctttcatccagcggctgagtggcagttcaaatatcttcgaacctggtgccgacggagctctcggcttttttggggctctcctgagcttgttgtgtcagaattttagcatggtcgacgttgtgatgctcttgcacggccatttccagccacttcagcggctgcagcctcaacttcgttccttcttccatcagcactatctgggaggccaggagcccaccccctccaacattcggatggcaacccacacactgattacagggctggaagaatacgtcagggagagcttctccttggtccaagtgcagccgggggtggacataatccggaccaaccttgagtttctgcaggagcagtttaatagcatcgccgcacacgtacttcactgtactgactcaggcttcggagcacgcctgctcgaactgtgcaaccagggactctttgaatgcctggccctcaacctgcactgcttggggggacagcaaatggagctcgccgcggttatcaacggaaggattcggaggatgtcaagaggagttaatccttcacttgtgagctggctcactaccatgatgggtctccgccttcaagtcgtcctggagcacatgccggtaggccctgatgccatattgaggtacgtccggagagtgggggatccaccacaacctctgcctgaagaaccaatggaggtccaaggcgccgaacgcgcaagcccggagccacagcgggagaatgcatctcccgctcccggtactaccgccgaggaggctatgtcccgaggccccccccctgcacctgaaggcggctctcgggacgagcaggatggggcctccgccgaaactgagccctgggctgccgcggtgccaccagaatgggttccaattattcagcaggatatccaaagccagagaaaggtcaaaccacagcccccgctcagcgacgcctatttgtccggcatgccagcaaaacggcgcaaaaccatgcagggagagggcccacaactcctcctcagcgaggcagtctccagagccgccaaggccgcaggtgccagacctttaacaagtcccgagagcctatcccgcgacctggaggcccccgaggtgcaagaatcatatcggcaacagctcagatcagatattcagaagaggttacaggaggaccctaattacagcccccagaggttccctaatgcccaaagagcctttgctgatgacccctag

SEQ ID NO: 232907 - DNA, 3381 bp, Artificial Sequence
  derived and/or modified sequence
atggagcccaacgacagcaccagcaccgccgtggaggagcccgactccctggaagtcctggtcaagacgcttgactcccagacgagaaccttcattgttggagcccagatgaacgtgaaggaattcaaggaacatatcgccgcaagcgtgtcgattccatctgaaaagcagcgactcatttatcaggggagagttctacaggatgataaaaaactccaggagtacaacgtggggggaaaggtaatccacctggttgagagggcaccccctcagacccaccttccttcgggagcctcatcagggaccgggagcgcaagcgccacgcacggtggggggagcccgccaggaacccgaggccccggggcaagtgttcacgaccggaatgctaatagctacgtgatggtcggaactttcaacttaccaagcgatggaagcgcagtggatgtccatatcaatatggagcaggcccctattcagagcgagcccagagtgaggctcgtgatggcccagcacatgatccgagacattcagactctgctgtctaggatggaatgtaggggtgggccacaaccacagcatagccaacccccaccccagcctccagctgtgacccccgagccagtggcgctgtcatcacagacaagtgaacccgtcgaatcagaggcaccaccacgggagcccatggaagcagaggaggtggaagagcgagccccagcccaaaacccggagctgacgccgggcccagcgcctgcaggacccacccctgcacctgagactaacgctccgaatcacccttcgccagctgagtacgtggaagtgcttcaagagctgcagcgtctggagtcacgcctccaacctttcctccagcgatattacgaggtactgggcgccgcagccacaacagattacaacaacaaccatgagggacgtgaggaagaccagcgcttaataaacctcgtgggggagtctttgaggctgctaggtaacacatttgtcgccctctccgacctccgctgtaacctggcgtgtacccccccgcgacaccttcatgtggtgcgacctatgtctcactatacaaccccaatggtcctgcagcaggctgccatccccattcagatcaacgtaggtactactgttactatgactggcaacgggacccgtccgccgcccacgccaaacgccgaagcccctcctccaggcccgggtcaggcctctagcgtggcccccagctcgaccaacgttgagagcagcgccgaaggagccccacccccaggaccagcgcctccacccgccacaagccacccacgagtcatacgaatctctcaccagtcagtagagcctgtggtaatgatgcatatgaacatacaggacagtgggacacaacctggaggggtgccttctgcccccaccggccccttggggccccccggtcatggtcagactctgggacaacaagtccccggtttccctaccgcacctactagagtcgtgattgctcggccgactccccctcaagccagaccaagccaccccggaggcccccctgtatctggcacccttcagggagcaggtctgggcactaatgcttcactcgcacaaatggtatcaggtctggtgggccagctattgatgcagcctgttttggtcgcacaggggaccccagggatggcgccacctcccgctccagcaacggcatccgcctctgctggaacgacaaataccgccactacggccggccctgcacctggtgggcctgcccagccacctccaaccccacaaccatcgatggcagacctccagttttctcaactccttggaaacttattgggccctgctggcccgggggcgggggggtctggtgtggcttcacccactattactgtcgctatgcccggggtgcccgcatttcttcagggtatgacggattttctccaggcaacacagacggccccacccccccctccaccccctcctccaccacctcccgctccggagcagcaaactatgcccccccccggatcccccagcggtggcgctggatcccccggaggactcgggctggaatcactgagcccagaatttttcacctctgtggttcagggtgtactaagtagcctcctcggtagcttgggagctagagcagggtcgagcgagagcatagcagcatttattcagcggctcagtggatcttccaatatcttcgaacccggtgccgacggggccttgggatttttcggagctcttctttctctcctgtgccagaattttagtatggtggatgtggttatgctccttcacggtcatttccagcccctgcagcgcttacagcctcagcttcgatccttcttccatcagcattacctgggtggacaggagccgactccgtccaatatcagaatggcgactcacacactgatcacaggtttggaggagtatgtgagggaaagcttctcattggtgcaggttcagccaggggtcgacattattagaactaatctggagtttctgcaggagcagttcaacagtattgcagcccatgtgctgcactgtactgactctggattcggcgcgaggctcttggagttatgcaatcagggactgtttgagtgcctggccctgaacctgcactgtctcggtgggcagcagatggaactggccgcagtgattaacggcagaatcagacgcatgagtcggggagttaatccatcgttagtgtcttggttgacgacaatgatgggcttgagactgcaggtggtgctggaacacatgccagtggggcctgatgccatccttaggtatgtgaggagggtaggcgacccccctcagccgttgccagaggagcccatggaggtgcaaggtgccgaacgtgccagcccggagcctcagagagagaatgcgtctccagcacctggaaccacggctgaggaggctatgagtagggggccgccccccgctccagagggggggagtcgggatgagcaagatggggccagcgcggaaactgagccatgggcagctgccgtacctcccgaatgggtaccaatcattcagcaggacatccaaagtcagaggaaagtcaaaccacaaccccccttgtctgacgcttacttgtctggcatgcccgccaagcggcggaaaaccatgcaaggcgagggaccccaattgttactctcagaggctgtgtcccgagcagctaaggccgccggtgccaggcctctcacatctcctgagtcgttgtcccgcgatttagaggcgccagaggtccaggagagctacagacagcaactgagatctgacatacagaaacgcctgcaggaggacccaaactatagtcctcaaagattcccgaatgcacaaagggcttttgccgacgacccttag

SEQ ID NO: 232908 - DNA, 3381 bp, Artificial Sequence
  derived and/or modified sequence
atggagcccaacgacagcaccagcaccgccgtggaggagcccgactcactggaggttctggtcaagactctcgacagccaaactagaacatttattgtgggagctcaaatgaatgtgaaagagttcaaagagcacatcgccgcaagtgtgtcaataccctcagagaaacagcgtctgatctatcagggccgagtgctccaggatgacaaaaagctgcaggagtacaatgtgggtggtaaggtgattcacctggtggagagagctcctccccagacacacctgccaagcggtgcctcgtctggcaccgggtctgcctccgcaacccacggtggggggtcccctccagggacacgaggcccgggcgcgtcagtccatgatcgaaacgcgaactcctacgtaatggtgggcaccttcaatcttccaagcgatgggagtgctgtggacgtgcatatcaacatggagcaggcccctatacagtctgaaccacgcgtgcggctagtcatggcacagcatatgattagggacattcaaactctgctaagtcgtatggagtgccgcggaggtccacagccacagcattcccagccccctccacagccccccgcggtgaccccagagcctgtggccctctcaagccagacttctgaacccgtagaatctgaggccccaccccgtgaacccatggaagctgaagaagtcgaagagcgggctcccgcccagaatcctgagctgactcccggccctgcccccgctgggccaacgcccgctccagagactaacgcccccaatcatccctctcccgcggagtacgtggaagtcctgcaggagctccagcggctggagtccagactccagccttttttgcagagatattacgaagtgctgggtgccgccgccaccacggactataacaacaatcacgagggacgcgaagaggaccaacgactgatcaatcttgtcggagagtcactccggctcctcggaaatacctttgtcgccctatccgatctgcgctgcaaccttgcttgcacccctcctaggcacctgcacgtggtgcggcccatgtctcactacacaacccctatggtgcttcagcaggccgccatcccaattcaaatcaacgtcgggacaacagtaactatgacaggcaacggcacaagaccgcctcccaccccaaatgccgaggcccctcccccgggtccaggacaggccagcagcgtcgcaccatcctctaccaatgtcgaaagttccgccgagggggcgcctccgcccggcccagctccgcctcctgctacttcacacccaagggtgatacggatatcccaccagtccgtcgagccagtggtaatgatgcatatgaacattcaggatagtggtacccagcctgggggcgtcccatctgcaccgacaggcccactgggtcctcctggccatgggcagacattagggcagcaggtgcctggatttcctacagcccctacaagggtggtaatcgctcgccccactccacctcaggcacggccctcacaccccggcgggcccccggtgagtggcacactgcagggcgccggcctagggactaatgccagcctagctcagatggtgagcggcttggttgggcagctgctgatgcagccggtactcgtagctcaaggaacgccaggcatggctccgcctccggctcccgcaactgcttcagccagcgccggcacaaccaataccgccactactgctggaccggctcctgggggacctgcacagcctccacctacaccacagcctagtatggccgatttgcagttttctcagctcctaggaaatctgctggggcccgctggcccaggtgctggaggtagcggtgtcgcctcaccgaccatcacggtggctatgcctggcgttccagcattcctgcagggcatgactgattttctgcaggcaacccagactgcaccccccccccctccacccccaccccctccacctcctgctcctgagcagcagaccatgccgccgcccgggagccccagtggcggcgcagggtcacccgggggactagggttagaatccttatcaccagaattcttcactagcgtggtccagggagttttaagcagcctgctcgggtctctgggggcccgagccggatcatctgaaagcatcgccgcattcatccaacgtctgagtgggtcttctaatatctttgagccaggggccgatggtgctcttgggttctttggcgccctcctgtctcttctttgccagaacttttccatggtcgacgtcgttatgttgctgcacggacactttcaacccctgcagagactacagcctcagctgagaagtttttttcatcaacattatctggggggacaggagcccactccctctaacatccgaatggctacccatacccttatcaccggcctggaggaatacgtgcgagagagcttcagcctcgtacaggttcagcctggggtggacatcatccgaaccaacctggagtttctccaggagcaatttaattcaatcgctgcacacgtcctccactgcaccgactccgggttcggggcccggcttctggagctgtgtaaccaggggttatttgagtgcctagcactcaatctgcactgtctcggtggccagcagatggagttggccgccgtgattaacggccgcattcgccgaatgagtaggggagtgaatccctctctggtgtcctggttgaccaccatgatgggactcaggctccaggttgttttagagcacatgccagtaggaccggacgccatactgcgatacgtgcgcagggtgggtgatccacctcaaccgctgccagaggagccaatggaagtccaaggagcagagcgggcatcccccgaaccacaacgggaaaatgcaagtccagctccgggcacaacggccgaggaagccatgtctaggggtccacccccagccccagaggggggaagtcgagacgagcaggatggtgcatctgccgaaacggagccatgggccgccgccgtgcctcctgaatgggttcccattatacaacaggacatccagagccagagaaaggtgaaaccacaaccaccactgagcgatgcctacctcagcggtatgccagcaaagcgacgtaagactatgcagggagaggggcctcagctgcttttaagcgaggctgtttcccgcgctgccaaggcagcaggtgctcgccccctgactagcccagagtccctgagccgcgacctggaagcccctgaagtacaggaaagttatcgccaacagctacggagcgatatacagaagaggctgcaggaagacccaaactactctccccagcgtttcccgaacgcacagcgggcatttgcagatgatccctag

SEQ ID NO: 232909 - DNA, 3381 bp, Artificial Sequence
  derived and/or modified sequence
atggagcccaacgacagcaccagcaccgccgtggaggagcccgactcattggaggtgctggtcaagaccttagacagccagactagaacttttatcgtgggggctcagatgaacgtgaaagaattcaaggagcatatcgccgctagtgtatccattccatcagaaaaacagcgactgatctaccagggccgggtactgcaggacgacaagaaactgcaggaatacaacgtggggggcaaggtcatacacttggtcgagcgggcccctccccagacccacctgccttctggcgctagttcgggcacaggctccgcgtctgcgactcatggtggagggagcccgccagggacgcgcgggccgggagcctcagtgcacgaccggaacgctaatagctacgttatggtcggtacctttaatttaccaagtgacggatcagccgtggatgtgcacatcaacatggaacaagcacctattcaatctgagcccagggttaggctagttatggctcagcacatgatcagagatatacagacgctcctgagtcgcatggaatgtcgggggggaccacagcctcagcacagccaaccacctccacagccccccgcagttacacctgagccagtggctctctcctctcagacgtcagagccagtggagagcgaggcccccccgcgggagcccatggaagccgaggaggtggaagaacgcgcgccagctcagaatcccgagctcaccccaggtcctgcaccagctggccccacccctgcccccgagactaatgccccaaaccacccatctcctgccgaatatgtggaagtgttgcaggaactccagcgactggaatccagattacagcccttcctgcaacgctattacgaagtgctgggggctgcagctactactgactacaacaataatcacgaggggagggaggaggatcaaagattaattaacctggttggggagtccttgaggctgctgggcaatacattcgtagccctgagtgatcttcgctgcaatctggcatgtacaccaccacgccacttacatgtcgtccgtcccatgtctcattatacaacaccgatggtcctacagcaagctgctattcctattcaaatcaacgtcgggaccacagtgacaatgactggcaatggcacaagaccacctcccaccccgaatgccgaggccccaccacctgggcccggccaggcttcttcagtggccccgtcttccactaatgtggaaagctccgctgagggcgcccccccaccaggtcccgccccacctcctgccaccagccaccctcgagtcatcagaatcagccaccagagcgtggaaccagttgtcatgatgcacatgaatatccaggattcaggtacgcagcctgggggcgtgccctcagcccccacaggcccattggggccgcccggacacgggcaaaccctgggacagcaggttcccgggtttcctaccgccccaacacgagttgtaatcgccaggcccacacccccacaagcccgacccagccacccgggcggccctccagtgtccggaactctgcagggcgccggcctcgggaccaatgcttccctggcccagatggtgtctggacttgttggccagctgctgatgcagcccgtactcgtggctcaggggacaccggggatggcacccccaccagcccccgcaaccgcctccgcctccgccgggacaactaataccgcaacgaccgcaggtccggcaccaggcggccccgctcagcccccacctacacctcaacccagcatggccgatctgcagttttcccagttacttgggaacctgctgggtcccgctgggccgggcgccggaggcccaggcgtggcaagccccacaattactgtagcgatgcccggggtgcctgccttcctgcagggcatgaccgacttcttacaggctacacagaccgcgcctccaccccctccaccacccccgcctccaccccccgcgccagaacagcagacaatgccacccccggggtctccgagcgggggcgctggctcaccaggcgggttaggcttagaatccctgtctcccgaattcttcacatctgtggtgcaaggggtgttaagtagtctgttagggagcctgggggctagggctggctcatctgaatcgatcgcagcattcatccaacgattgagcgggagcagcaacatttttgaacccggcgctgacggggcactcgggttttttggcgccctgcttagtttgctgtgccaaaacttcagtatggtcgatgtcgtgatgctgctgcacggtcattttcaacctttgcaacggctccaaccgcagcttaggtcctttttccatcagcattacctcggaggccaggaacccacaccctcaaatatacgaatggccacacataccctcatcactggcctggaggagtatgtgcgtgaaagtttttccttagtgcaggtccagcctggcgttgatatcatcagaactaacctggagttcttgcaggaacagttcaacagcatagcagcacacgtccttcactgcaccgatagcggctttggagcacgtctgctggagctgtgtaaccaggggctgtttgagtgtctagcgctcaacctgcattgtctcggcgggcaacagatggagctggccgcagtgataaatgggcggatcaggcgcatgagcagaggagtcaacccatcactggtgtcttggttgacaacaatgatgggtctgaggctccaagtggtgttagaacacatgcccgtcggaccagacgccattttgcggtatgtccgacgcgtgggagaccccccccaacctctgccagaagagccaatggaggtgcagggtgctgagcgggccagcccagagcctcagagggaaaacgcctctcctgctccgggcacaactgctgaggaggccatgagccggggtccaccgcctgcccccgaggggggctctagggacgaacaagacggagcctccgccgagacagagccctgggccgcagcagtgccaccagaatgggtgcccattattcagcaagatattcagtcccagcgaaaagtcaagccacagcctccattatctgatgcgtacctatctggaatgccagcgaaacgcaggaagaccatgcagggggaaggacctcaactcctgctgtccgaggccgtaagtagggctgcaaaagccgctggcgcaagacccttgacatcgccggagagtttgtcgcgggaccttgaggcacctgaagtacaagagagctaccgccagcagctgcgatccgacatccagaagcgactgcaagaggatcccaactatagtccacagcggttcccgaatgctcagcgcgccttcgcggacgatccctag

SEQ ID NO: 232910 - DNA, 3381 bp, Artificial Sequence
  derived and/or modified sequence
atggagcccaacgacagcaccagcaccgccgtggaggagcccgactccttagaggtgctggtgaagaccctggacagccagacgcggacgttcattgtgggagcacaaatgaacgtgaaggagtttaaagaacatattgctgcatcggtttctataccgagtgagaagcaacggctgatctaccaggggcgagtgctgcaagacgacaaaaaactgcaggagtacaatgtaggaggcaaggtgatacatctggtggaacgggccccccctcaaacgcatctgccgagcggcgcatccagcgggaccggctctgcctcggctacacacggcggtgggagccccccggggaccagggggccaggagccagcgttcatgataggaacgcgaattcgtacgttatggttggtacattcaatctaccttccgatggttcagctgtagatgtgcacattaacatggagcaggctccaatccaatctgaaccgagggtacggctggtgatggcacaacacatgattagggacatccaaaccctcctgtcaagaatggagtgcagaggagggccacaaccacaacatagccagccgccgccccagccccctgccgtaacacccgaaccagtcgctctgtcttcacagacctcagagccagttgagtccgaggctccccctagagaacctatggaggccgaagaggtcgaggagcgggcgcctgcgcaaaatcctgaactaacacctggccccgcccctgccggccccacacccgcacctgaaaccaatgcccctaaccatccctcccctgcagagtatgtggaggtccttcaggagctgcagcgactagaatctcgcctgcagccctttctgcagaggtactacgaagtgctgggcgctgcggctacaaccgattataacaacaatcacgagggacgggaggaggatcaacgcttgatcaaccttgttggggagtctctccggctcttgggaaatactttcgtggccttatccgacctcaggtgcaacctggcttgcacccccccccggcatctgcatgtggtgcgtccgatgtcacactatactacaccaatggtgcttcaacaagcagccatccctatccagatcaatgtgggcaccacagtcacaatgaccggcaacgggacaaggcctcctcccacgcccaacgctgaagctcctccccccggaccaggccaggcctctagcgtggctcctagctccaccaatgttgagtcatccgccgagggggccccccctcctggcccggccccaccccctgccacttcgcaccctagggtaatccgcataagtcaccagagtgttgaaccagtggtgatgatgcatatgaacatccaagattctggcacacagccaggtggggtaccctcagctccaactgggccactcggaccacctggacatggccagaccttggggcaacaggtgcctggctttcccaccgctcccactcgtgtcgtgatagccagacccacacctcctcaggctcgacctagccatcctggaggcccaccagttagcggcaccctgcagggtgcagggctgggcacaaacgcctccctggcccagatggtgtcaggcctcgtcggacaactgttgatgcagcccgtgttagtggctcaggggacaccaggtatggctcccccaccagctccggccactgcttcagcgtccgccggcacaaccaacaccgccacaacagcgggccccgcaccagggggacctgcccagcctcccccaacccctcagccatccatggcagatctgcagtttagtcagctcttaggaaatctactgggccctgcggggcccggcgctggcggtccgggggtggcctcgccaaccatcacagttgcaatgcccggggtaccagcattcctgcagggcatgacagacttcctccaagctacccaaacagccccaccccccccaccgcctccaccgccgccgccccccgcaccagagcagcagactatgcctcctccggggagcccaagtggaggcgcagggagcccaggggggctggggcttgagtccctctcacccgaattctttactagcgtggtgcagggagtactctcctccctgctcggctccctgggagcccgtgccgggagctcagaaagcattgccgcatttatccaaagactatctggcagcagcaacatttttgagcccggagcagatggcgccttgggattctttggagccctccttagcctcttgtgccagaatttctctatggtggacgtcgtgatgctgcttcacggccatttccaaccacttcagcgtctgcagccacagcttcgttcattttttcaccagcactacctaggtggtcaggagcccacccctagcaacatcaggatggctacccatacactcatcacggggctcgaggagtatgtgagagaatcctttagcttggtacaagttcagcctggcgttgacattattagaaccaatttagagttcttgcaagaacagttcaactctattgcggctcacgtccttcactgtaccgacagtgggttcggcgcccggcttctcgagctgtgtaaccaggggctcttcgaatgtctggcattaaatctccactgcttgggaggtcagcaaatggaactggcagcagtaattaatggccgtataagaagaatgtcaaggggggtgaacccctctttggtcagttggctgaccacaatgatgggcttgcgtctgcaggtggtattggaacatatgcctgttgggcccgacgccatattacgatacgtgagaagagtgggggatcccccgcagcctctgccagaggaacccatggaggttcagggcgcagaacgggcaagccccgaaccacagagggagaatgcctctcctgcaccaggcaccaccgctgaagaagcgatgtcaagagggcctcctcccgcaccagagggagggtccagagacgagcaggacggtgcttctgcagaaactgagccatgggccgccgctgtgccaccggaatgggtgcccatcatccaacaagatatccagtcacaacgcaaggttaaaccccagccccctctttctgacgcctatttaagcggcatgcctgccaaaaggcgcaaaacaatgcagggtgagggaccccaactgctgctctccgaggctgtcagtcgcgccgccaaagcagccggagcccgcccgttgacatctccagagtctctgtcaagggatctcgaggcccccgaagttcaagagagctacagacagcagctgcggtccgacatacagaaaagactgcaggaagatccgaattacagcccacagcgcttccccaacgctcagcgtgcgttcgcagatgacccttag

SEQ ID NO: 232911 - DNA, 3381 bp, Artificial Sequence
  derived and/or modified sequence
atggagcccaacgacagcaccagcaccgccgtggaggagcccgacagcctagaggtgctcgtcaagacgctggactctcagacccgtactttcatcgtcggcgcgcaaatgaacgtgaaggaatttaaggagcacatagcggctagtgtaagtattccctctgagaagcagaggctaatatatcaaggccgggtcctccaagacgacaagaaacttcaggagtacaatgtgggaggaaaagtaatacacctagtggaacgggctcctccccaaactcatctgccaagtggcgcgagttccggaacaggatcagccagtgcgacccacgggggtggcagtcctccaggcaccaggggcccaggggcttcagtacacgacaggaatgccaatagctatgtgatggtgggcacctttaacctgccttccgacggatctgcggttgatgtgcacataaacatggagcaagcacccatccagagcgagccaagggttcgattggtaatggcccagcatatgattagggacatacagaccctcctcagtcgtatggagtgcaggggagggccccagcctcaacactcccagcccccaccacagcctcctgcagtaactccagagccagtcgccctcagcagtcagacctctgaacccgtggaatccgaagctccgccacgggagcccatggaggctgaggaggtggaggagagggctcccgcacagaaccccgagcttacccctggcccagctccagccggtcccacccctgcccccgagaccaacgcaccgaaccacccttcacccgccgagtatgttgaggtactacaggagcttcaaagactggaatcgcgactgcagccatttctacagagatactatgaagtgctgggtgccgcagccaccactgattacaacaacaaccatgaaggcagggaagaggaccagcggttgatcaacctcgtaggggagagtctgaggcttctgggaaatacctttgtcgcgctgtcagatctgcgatgtaatctggcttgcactcccccccgtcatcttcacgtcgtgcgccctatgtctcattacacaacacccatggtactgcaacaagctgccattccaattcagatcaatgtgggcaccactgtcaccatgacgggaaacgggacacgcccccccccaactccaaatgcagaggcacccccccctggcccaggtcaggcatcttccgtagctcccagcagcactaatgtcgaaagctccgctgaaggcgccccacccccggggcctgcaccaccacccgcaactagtcaccctcgggtaatccgcatcagccaccagagcgtggaacccgttgtcatgatgcatatgaacattcaagacagcgggacccagccaggaggggtgccttctgctcctacgggtcctctcgggccgcccgggcatggccagactctcggtcaacaggtccccgggtttcctaccgcaccaactagagtcgttatcgccagaccaacacccccacaggctaggccatcccacccagggggcccccctgtctccggcacactccagggtgccggattaggcactaatgccagtcttgcccagatggttagtggcctcgtgggccaactgctcatgcagcccgtgctcgtcgcacagggaacccccggaatggcacccccaccagcgcctgcgacggcaagcgcgtccgcaggaaccaccaacaccgcgactacggccggccccgccccaggagggcccgcgcagccaccacctacccctcagcccagcatggctgatttacagttcagtcagctgctgggcaacttgctgggccctgctgggccaggagctgggggctctggtgtggcgagtccgacaattaccgtggccatgcccggcgtccccgccttcctgcaggggatgaccgatttcttgcaggccacacagactgcacctcccccaccgccgccccccccacccccacctcctgcaccggagcagcaaacgatgccacctcccggctcaccatccggcggagcagggtctcccggcggtctggggctggagagtctgtccccggagttttttaccagtgtggtacagggagtccttagtagcttacttgggagcttaggcgcgagagcaggcagtagcgagtcaatagctgcctttattcagcgtctgtctggatcaagcaatatatttgaacctggcgctgatggggcgctaggcttctttggagccctcttgagtctgctatgccaaaacttttctatggtagacgtggtgatgcttctccatggccattttcagccattgcaaaggctgcagccacagctacggtcttttttccaccagcattacctgggaggtcaggaacccacacccagcaatatacggatggcgacacataccctgatcacaggcctagaggagtacgtcagggagagtttctccctcgtgcaggtgcagccgggggtcgatataatccgcactaatctggaattcctccaggagcagttcaacagtatagcagctcacgtcttgcattgcactgattcaggattcggcgctcggctgcttgagctatgtaaccagggtctttttgaatgcttagccctaaacttacactgtctgggaggccagcagatggaactggccgctgtgattaatggccggataagacggatgagcaggggcgtgaacccgtcactggtgtcctggctgaccaccatgatgggccttcggctacaggtcgttttggagcatatgccagtcggaccagacgccatcctcaggtacgttagaagagtgggcgacccgcctcagccactgcctgaggaaccaatggaagtgcagggggccgagcgagcatccccggaaccccagagagaaaacgcttcacctgcacctggcactacagccgaggaagctatgagtcggggtcctccacccgccccggagggcggctccagggatgagcaagacggtgcatctgctgagacagaaccctgggcggctgccgtcccacccgagtgggtgcctatcattcagcaggacattcagagccagcgcaaagtgaaaccacagcctcctttgagcgatgcctacctgtccggcatgcccgctaagcgccgcaagaccatgcagggcgagggacctcagctgctcctgtccgaggctgtctcaagagctgctaaggcagctggggcccgaccactgactagtcctgagtctctgagtcgcgacctggaggcccccgaagttcaagagtcgtatcgtcagcagttgaggtccgatatacaaaagcggctgcaggaggatccaaactactcaccccagcgctttccaaacgcgcagagagccttcgccgacgacccctag

SEQ ID NO: 232912 - DNA, 3381 bp, Artificial Sequence
  derived and/or modified sequence
atggagcccaacgacagcaccagcaccgccgtggaggagcccgactcactggaagtgctagtgaaaacactagactcccagacaagaacatttattgtgggggcgcagatgaacgtgaaggagtttaaggaacacattgctgcctccgtttcaattcccagcgagaagcagaggttgatttaccaaggacgggtcctccaggatgacaaaaagctgcaggaatataacgtaggaggtaaggtgatacatctcgtggagcgagcacccccacaaacacatctaccgagtggcgccagtagtggcaccggctcagccagcgcgacgcacggggggggatctccgcctggcactcgcgggcccggcgcttcagttcatgacagaaatgctaattcctatgtcatggtcggcacctttaatctacctagcgatgggtccgcagtcgacgtacatatcaatatggagcaggcacctattcagagcgagcccagggtgaggctcgtcatggcccagcacatgataagagacatccagaccctactatccagaatggaatgtcgaggtggccctcagcctcaacattctcagcctcccccacaacccccagctgtgaccccggagcccgtggcattatcatctcagaccagtgagccggtcgagtctgaggcccctccaagagagcccatggaagctgaggaggtggaggagagagcccctgcgcagaaccctgagttgacaccgggaccagccccagccggtcctactcccgcccccgaaactaacgctcctaaccaccctagtccagcagaatatgtggaagtcctgcaggagctgcagaggcttgagtccaggctacaaccctttctgcagcgttactatgaggtacttggggctgcagcaactacagattacaataataatcacgagggccgggaggaagaccagaggttgatcaatctggtcggcgagtctctccgactgctgggcaacaccttcgtggcactatccgacctgcggtgtaacctggcctgtaccccgccacgccaccttcacgtggttcgccccatgtcccactacactacccctatggttttgcagcaggctgctattcccattcagatcaacgtgggaaccacggtgactatgaccggcaacggaactcgccctccacccactccaaacgcagaggccccacccccgggcccaggccaggcaagttctgttgcacctagctccactaacgtcgagagctcagccgagggggcaccacccccggggccagcccccccccccgcgacatctcaccccagagtcattcggattagccaccagtcggtagagcctgtggtgatgatgcacatgaacatccaggactcggggacccagccaggaggagtcccttcagcccctactggccccctgggccccccaggtcacgggcaaactctcggacaacaggttccagggttccccactgctcctaccagagttgtgatcgctcgaccgaccccaccccaagcacggcctagccacccaggtggacctccggtgagcgggacgctccagggcgcaggtctcggaactaacgccagcctcgctcagatggtgtctggtctggtagggcagctgctgatgcagcccgtgctcgtggcccaaggcacgccaggtatggcgcctcccccagccccagccactgctagcgccagcgctggaaccaccaacacggcaaccaccgccgggcccgcccccggcggtcccgcacagccgcctcccactccccagcccagcatggctgacctgcagttctcccaactcctggggaatctcctgggccccgctggtcctggggcaggaggatctggagtggcgagccccacaatcaccgtggctatgcccggagtgccagcttttttacaaggcatgacagatttcctccaggccacacagacggccccgccacccccccccccccctcccccccccccccccgcaccagagcaacagactatgccgcccccgggtagcccaagtgggggggccggatcacctggaggtttggggctggagtctttgagtcccgagttcttcacatcagtcgtgcaaggcgtcctcagcagtctcttagggagtctgggcgctagggctgggagtagtgagtctatcgccgctttcatccagagactgagcggcagttctaatatttttgaacccggcgccgatggcgctcttgggttctttggagccctgctcagcctgctgtgccaaaatttctcgatggtggatgtcgtgatgctgctccacgggcactttcagcctctgcagaggctgcagccccagttgagatccttttttcaccagcattatctcggagggcaagagcccacccccagtaacattagaatggccacgcataccctcatcacaggactcgaagagtatgtgcgagagagtttttctcttgtccaggtgcagccaggagtggacatcattagaacaaatttagaattcctacaggagcagtttaattccattgcagcacatgttctacattgcaccgacagcggctttggggcccgtttactggagttatgcaatcaggggctgttcgaatgtctggccttgaaccttcactgcctgggcggccagcagatggaactggccgcggtcattaacggtcggataagacggatgtccaggggtgtgaaccccagcttagtttcttggttaactactatgatggggctgagacttcaggtagttctcgaacacatgccagtgggcccggatgccatactgaggtacgtccggagggtgggggaccccccccagcctcttccggaggaaccgatggaagtgcagggcgctgaacgggcgtctcccgagcctcagagagaaaacgcttctccggcaccaggcacaactgccgaagaggccatgtcgagggggcccccccctgcccctgaaggtggatccagagacgaacaggatggggcctctgcagaaactgaaccctgggcagccgccgttcccccagagtgggttcccataatccagcaagatatccaatcacagcggaaggtgaaaccgcaaccacctttgagcgatgcctacctatctggcatgccggccaagagacgaaagactatgcaaggggaggggccccagctcctgttgtccgaagctgtttccagagctgcaaaggcagctggggccagaccacttaccagtcctgagtccctctcacgggacctagaagcacctgaagtgcaggagtcctaccgccagcaactccgctccgatatacagaaaagattgcaggaggacccaaactatagtccgcaaagattcccaaatgcacagagggccttcgctgacgatccatag

SEQ ID NO: 232913 - DNA, 3381 bp, Artificial Sequence
  derived and/or modified sequence
atggagcccaacgacagcaccagcaccgccgtggaggagcccgacagcctagaagttctagtaaagacactcgatagtcaaacccggacatttattgtgggagctcaaatgaacgtgaaggagttcaaggaacacatcgccgcttcagtctctatccccagtgaaaagcagcgacttatatatcagggcagagtactgcaagatgataagaaactccaggaatataatgtgggagggaaagtgatacacctggttgagcgggcaccgccccaaacccacctgcctagtggcgcttcttccggaacggggtccgcatctgcaactcatggcgggggctcaccccctggtacccggggtcccggcgcatccgtccacgacaggaatgcgaatagttatgtgatggtgggaacattcaatctcccgagcgacggcagcgctgttgacgtgcacattaacatggaacaggccccaatccaaagcgaacctagagtcagactggtcatggctcaacatatgatccgagacatccaaactctgctcagccgtatggaatgcaggggggggccacaaccacagcactctcaaccgccacctcagccgccagcagtgaccccagaacctgtggctctttcctctcagactagcgaaccagtggagtctgaagccccaccccgagaaccaatggaagccgaggaagtggaagagcgagcgccagctcagaaccccgagctgactcccggcccagcccctgcagggccaactccagccccagaaacaaatgcaccaaaccatccgtctcccgccgagtacgttgaagtactgcaggagcttcagagacttgagtcccggcttcagccctttctccaacgttattatgaagtgttgggggcggcagctaccacggattacaacaataaccatgaaggaagggaggaggaccagcggctgatcaacctagtgggtgagtccctgcggctcctcggcaatacattcgtggcactaagcgaccttaggtgtaacctggcgtgtactcctcccaggcatctccacgttgtgaggccaatgagccattataccacaccaatggtactgcagcaggctgctatccctatccagattaacgttgggactaccgttaccatgactggtaacggtacgagaccacccccaacacctaacgccgaggcaccccccccaggccctggacaggcaagtagtgtggccccaagctctaccaacgttgagtcaagcgcggagggggctccacctccgggacccgcccctccgccggcaacctcgcatccgagagttatacgaatcagtcaccagtctgtggagcccgtggtcatgatgcacatgaatattcaggattctggaactcagcccggtggagttccatccgcccctaccggcccgcttggcccccccggacatgggcaaacccttggccagcaggtgcctggattccccactgccccaaccagggtggtgatcgcccgccccactcccccacaggcacgaccatctcacccagggggccctcccgtctcaggtacactgcagggtgccggattgggtaccaatgcatctctagcccagatggtgtctggactggtgggtcagctccttatgcagccagttctcgttgcccagggaacaccggggatggctcccccaccggcaccagcgaccgcctcagccagtgcgggcaccaccaacaccgcaaccaccgctggccctgctccaggcgggcctgcccagccacctcccaccccgcagccctccatggctgatctgcagtttagtcagttgttagggaatctgctcgggcctgctgggcctggagcaggtggatcaggagtcgcatctccaactatcactgtggctatgccaggtgtgccggcattcctgcaggggatgaccgattttctgcaggctacacagactgcaccaccacctcctcctcctccccctcctcccccccctgcaccagagcaacagaccatgccccctccggggtcccccagcggtggggcaggctctccaggagggctgggcctggaatcactgtcaccagagttctttacaagcgtggttcagggcgtgctgtcatcactcctaggaagtcttggcgcacgggcggggtcatcagaatcaatcgccgcatttattcagcgactcagcggaagtagtaacatttttgaacctggggcagacggcgcactggggttcttcggcgctctgctgagcttattatgccagaatttctctatggtcgatgttgtgatgttgctgcatggccatttccaacctctccaacggctgcagccccagcttcggtcttttttccatcagcactacctggggggacaagagccaactccttctaacattcgcatggccacacacaccttaatcacggggctggaggagtatgtacgcgagtccttcagtctggtccaggtgcagcccggtgtggatattattagaaccaacctggagttcctgcaggagcagttcaattcaatcgcagcacatgtgctgcactgtaccgactcaggctttggcgctcgtcttttggaactgtgcaatcaggggctgtttgagtgtctcgccctgaatctccactgcctgggcgggcagcaaatggaactagccgccgtaatcaatgggcgaattaggcgcatgagtagaggtgtgaatccttcattggtgtcatggcttacaacaatgatggggctacgtctgcaagtggttctcgagcacatgccggtggggcctgatgctatcttgcggtacgttcgccgcgtgggcgaccccccacaacctctgcctgaagaaccaatggaggtgcaaggggccgagagggcctcccccgagccgcaacgtgaaaacgcctccccggcccctggaacaactgcagaagaggccatgtccaggggaccaccaccagcgcctgaaggggggtctagagacgagcaagatggggcctcagcagagacagaaccgtgggcagctgctgtcccgccagagtgggttccaatcattcagcaggatattcagagtcagagaaaagttaagccgcagcctcctttgagcgacgcatatctgtccggtatgccagcgaaacggagaaagactatgcagggagaggggccccagttgttactgtccgaggccgtatctagagcggccaaggctgccggcgcccgtcctctgaccagtcccgagtccttgtcccgcgatctggaagctcccgaagttcaagaaagttaccggcaacaactacgctcagacatccaaaagcgacttcaagaagatcccaactattccccccagagatttcccaatgcccagcgcgcttttgcagacgatccgtag

SEQ ID NO: 232914 - DNA, 3381 bp, Artificial Sequence
  derived and/or modified sequence
atggagcctaatgattctactagtacagcagtcgaggagccggattctctagaggtcctagtaaaaactctcgattcacagactagaacatttatcgtgggcgctcagatgaatgtaaaggaattcaaggagcacatcgccgcatccgtgtccatacctagtgagaaacaacggttgatctatcagggacgggtccttcaggatgacaagaaactccaggagtacaatgtcggcggaaaggtgatacatttggtggaaagagcaccgcctcagacccatttaccaagtggagctagctccggcacagggtccgcctcagcgacccacggaggtggcagccctccaggaacccgcggaccaggcgcatcggtacacgatcgcaatgctaacagctacgttatggttggtacttttaacctccccagcgacggtagcgccgtcgacgtgcacatcaatatggaacaagctccgatacagtctgaacctcgagtgaggttagtcatggcgcagcacatgataagagatatacaaaccctgctgagtaggatggaatgcagaggcggaccacagcctcagcatagtcagcccccacctcagccacccgctgttactccagagccagtcgcgttaagttcgcagacaagcgagcccgtcgagtccgaagcgccacctcgggaacccatggaggctgaggaggtggaggagagagcccctgcccagaaccctgagctaacaccagggcctgctcccgcagggccaacccccgcaccagaaaccaatgccccaaaccatccctctcccgctgagtacgttgaagtgctgcaggagttgcagaggctagagtcgaggctgcagccatttctgcaacgctactatgaggtgctgggagccgctgctactacagactataacaacaatcatgagggaagggaggaagaccaaagacttattaacctggtgggcgaatccttaaggctgctgggaaatacttttgttgcccttagcgatctcagatgtaacttggcttgcacaccgccaaggcatctgcatgtggttcgccctatgtcccactatactacaccgatggtgctccaacaggctgcgattccgatccagatcaatgtgggaacaacagtcacaatgacagggaacggtacccgtcctccaccaaccccaaatgctgaggctccgcctccaggccctgggcaagccagtagtgtggccccttcctcgacaaacgttgaatccagtgccgagggcgcacctcctcctgggcctgcccctcccccagccacatcccaccctcgagtgatccgtatcagtcatcagtcagttgagccagtcgttatgatgcacatgaatattcaggacagtgggactcagccaggtggagtgcccagtgcgcctactggcccactaggtcctccaggccacgggcagactttgggacagcaggtgccaggcttccctaccgcgcctacgcgagtcgtgatagcgagacctactcctccccaggccagacccagccacccgggaggaccacccgtgagtgggactctgcaaggagctggactcgggacgaatgcttctctggcccagatggttagcgggctggtcggacagctccttatgcagccagtgctcgtcgctcagggaactcccggaatggcacccccacccgctcccgctacagccagtgcctctgcaggtacaaccaacacagctaccacggcgggacccgctcccggtgggccagcgcagccgccacctacaccccaacccagcatggccgatctgcagtttagtcagttgctgggcaatttactcggtcctgctggacccggagctggtggctcaggcgtggccagccccactatcaccgtagcgatgcccggtgtgccagccttcttgcagggcatgaccgatttcctgcaggccactcagacagcaccccctcctccaccccctcctccaccgcctccccctgcacccgaacagcagacaatgccccctcctggctctccttccggcggagcgggttcccccggaggcctgggcttggagtcactgagtcccgagtttttcacctctgtggtgcagggagtgttaagttctttattaggctcactcggcgctcgcgcaggttcatccgagtccatcgcagcttttattcagcgcttatccggctcctctaacatcttcgagccgggagccgatggagctttagggttctttggggcactgctgtccctcctctgtcagaatttctctatggtggatgtggtcatgcttctgcatgggcactttcagccactccagagactgcagccacagctgcgctccttcttccaccagcattacctcggaggccaagagcccactccttcaaacatccggatggcaactcatacactgattaccgggctggaggagtacgtccgcgagagctttagcctggttcaggtgcagccaggcgtagatattatcagaacaaatctcgagttcctgcaggagcagtttaatagcattgccgcacatgtgctgcactgtactgactctggttttggcgcacgcctgctagaactctgcaatcagggtctatttgagtgccttgcactgaacctccactgtttgggagggcagcaaatggagctggccgcagtaatcaacggcaggatcagacgcatgagcagaggtgtgaatccgagcctggtctcctggctgaccacaatgatgggtcttcgattacaggtcgtcctggaacacatgccagttgggccagacgcaatactccgctatgtccgcagagtgggggaccccccacagcctctgcccgaggagcctatggaggtgcagggggcagaacgggcatctccagagccacaaagagagaatgcctcacccgcaccaggtacaaccgcagaagaggctatgagcaggggccctccgccagcccctgaaggcggatcacgggatgagcaggacggcgctagtgcggaaactgaaccctgggcagcagcagtcccgccagaatgggtgcccatcatacagcaagacatccagagccagaggaaggtgaagcctcagccaccactctccgacgcttacctatctggcatgcctgccaagcgacgcaagaccatgcagggtgagggacctcagctgctcctgtctgaagcggtttcaagagcagcaaaagccgcaggagccagaccacttacaagccctgagagcctgtctcgggatttggaggctcctgaggttcaggaaagctaccggcagcaactccgctctgacattcagaagaggctccaggaagacccaaactactccccccagcggtttccgaatgcacagagggccttcgccgatgatccctag

SEQ ID NO: 232915 - DNA, 3381 bp, Artificial Sequence
  derived and/or modified sequence
atggaacccaatgactcaaccagtaccgcagtggaagagcctgatagtttggaggtgcttgtgaagaccttagacagccagacacgaacatttatcgtgggggctcagatgaacgttaaggagttcaaggagcacattgccgcttcggttagtatcccctccgagaagcaacgcctaatatatcaagggagagtgctacaggatgacaagaaacttcaagagtacaacgtcgggggaaaagtgattcacctggttgagcgtgccccaccccaaacacacctcccttccggtgctagtagcggcaccggatctgcttccgctactcatggaggagggtcccccccaggtacacgtggacctggagcctccgtgcatgatagaaatgccaatagctacgttatggtcggtacattcaaccttcccagcgatggctccgccgtggacgtgcacattaatatggagcaggccccaatccagtctgaacctagggtgcgattggtgatggcccagcacatgataagagacattcagaccctcttaagcagaatggagtgccgaggcggacctcagcctcagcattctcaaccccctcctcaaccccctgccgttacccccgaacccgtggccctgtcatcacaaacaagtgaaccagtcgaaagtgaggcccctcctcgagagcccatggaggcagaggaagtcgaggagcgggctccagctcaaaaccctgaattaacgccgggtccagcacccgctggccctacccctgccccagaaactaatgctcctaatcatccaagtcctgcagagtacgtggaagtattgcaggagcttcagcgtctggaatccagattgcagcccttcctgcagcggtattacgaggtgttaggggcagcggcaactactgattataacaataatcacgagggaagagaggaagaccagaggttgattaatcttgtgggcgaaagcctgcggctcctaggaaatacttttgttgcactcagtgatctgcgatgcaacctggcatgtactccacccagacacctgcatgtcgtcagacccatgtcccattatacaacacctatggtactccagcaggcagccatccccatccagatcaatgtcggcacaacagtaacaatgactgggaacgggaccagacctcctcctacccctaatgctgaagcacctccaccaggccctggccaggcctcctccgtggcaccttcctctaccaacgtggagtcttccgccgagggcgctcctccacccggaccggctccacctcctgcgaccagccatcccagagtcataagaatctcgcatcagagcgtggagccggtggttatgatgcatatgaacattcaagatagcggcacacaaccaggcggagtcccgtcggcacccacaggccctctgggccctcccggacatgggcaaaccctggggcagcaggtgcccggatttcctactgcaccaactcgtgtggttattgcacggcctacaccaccacaagccaggcctagtcatccaggaggcccacctgttagtgggaccttgcaaggggcagggctcgggactaatgcctcgttggctcagatggtgtcgggactggtcggccagttgcttatgcagcccgtcctcgtcgctcagggcaccccaggcatggctcctccccctgctccagccacagcttctgcctctgctgggacaacaaacactgccacaaccgccggtcctgcacccggtggaccggcacagccgcctccaacaccccagccttcaatggctgatctgcagttctctcaactgcttggcaatctgctgggacctgctgggcctggcgctggcggtagtggcgtcgctagtcccaccataacagtcgccatgccgggagtgcccgcatttcttcaaggaatgaccgatttccttcaggcgactcagaccgcccctcctcctccccctcctccacccccaccgcctcctgctccagagcagcagacaatgccaccccctggttctcccagcggcggagccggttcacctgggggactcggccttgagtcattgtctcctgagttcttcactagcgtggtccagggcgttctctcttctctccttggatccctcggcgcaagggctggttcttctgagagtatagctgctttcatccaaaggctatcggggtcctccaacatttttgagccgggtgccgatggcgctttggggttctttggcgctttattgagcctgctctgccaaaattttagcatggttgatgtagtcatgctgctccacggacactttcagccactgcagaggctccaaccacagctgcggagcttctttcaccaacattatcttggaggacaggaacctactccatccaatatcagaatggccacccatactctgatcaccgggctggaagagtacgtgcgcgagtcattcagcctggtccaggttcagcccggagtcgatatcatacgtactaatctggaatttctgcaggagcagtttaatagcattgctgcccacgtcctgcactgcacagacagcggctttggagctcgactcttagaactttgtaaccaaggattatttgagtgtctggcccttaatctgcactgcctgggagggcaacaaatggagctagcagcagtcattaatgggcgtatcagacgcatgagcagaggagtaaacccgtcactggttagctggctcacaactatgatgggtcttagactgcaggtggttttggaacatatgccagttggaccagacgcgattctgagatacgttaggcgggtgggcgatcctccacaacctctccccgaagagccaatggaggtccagggggctgaaagggcctctccagaaccgcagcgcgagaatgccagccccgcacccggtacgaccgctgaggaagcaatgtcccggggaccgcctccagcccctgaagggggatccagggacgaacaggatggagcgagcgcagaaacggagccgtgggctgctgcagtgcccccagaatgggtgccaatcatccagcaggacattcagagccagcgcaaagtgaagccccaaccaccgttaagtgatgcttacctgtcagggatgcccgctaaacgtcggaagaccatgcaaggcgagggcccacagctgctcctgtcagaagcagtttcccgggctgccaaggctgctggagcgagacctttaacgagtcctgagagcctgagtagggacctggaggctcccgaggttcaggagtcatatcgtcaacaactgaggagtgacattcaaaaaagactgcaagaagaccctaattattctccccagcggttcccaaacgcccagcgggctttcgccgacgacccatag

SEQ ID NO: 232916 - DNA, 3381 bp, Artificial Sequence
  derived and/or modified sequence
atggaaccgaatgattccactagcaccgccgtggaagagcccgactcgctcgaggtgttagtgaaaacccttgattcgcaaactcgaaccttcatcgtgggcgcacagatgaatgttaaggaattcaaagagcacatcgcggcttccgtgtctattccaagcgagaaacagagactgatctaccaaggccgtgtcctgcaagatgataaaaagctgcaggagtataatgtcggtggaaaggtcattcaccttgtggaacgtgcgcctccccagacccatctgccttcaggcgcttccagtggcacagggtcggcctcagctacgcacggcggagggtcccctcctggaacccgagggcctggtgcttcggttcacgatagaaatgcaaatagctatgtaatggtaggaacctttaatctgcctagcgacggctccgccgttgacgtgcacatcaacatggaacaagcccctatccagtccgaacctagagtacgcctggtgatggcccagcacatgattagggacatccaaactcttctcagccgaatggagtgcaggggtggaccacagccgcaacacagccagccgccaccccaacccccagctgtcaccccagaaccggtggccctgagcagccagacatcggagcctgtggagtccgaggcgccacctcgtgaaccaatggaagccgaggaagtggaagagagggcgccagcacagaatcccgagctgacccccggaccagctccagctggcccaacaccggctcctgaaactaatgcccctaatcaccccagccccgcagagtacgtcgaggtgctgcaagaacttcagagacttgaatcccggctgcaaccctttttgcagagatactacgaggtcctgggcgcagcagctacaactgactacaacaacaatcatgagggacgcgaagaggatcagcgtctaataaacttggttggcgagagccttagattgctcggcaacacatttgtcgccctaagtgatctgcggtgcaacctcgcctgtactccacctaggcacctgcacgttgtgaggccgatgtcccattacacaacgcctatggtgctgcagcaggctgctattccgatccagatcaatgtcggcacgacagtaaccatgacaggcaacggcacacgccctcctcccacaccgaacgccgaagctccaccacccggtccaggccaagccagtagtgtagcaccgtcctctaccaacgtggagtcctctgcagaaggagcccctcccccaggacctgcccctcccccagccactagccatcctcgggttatccgcatttcgcaccaatcagttgaacctgtagtcatgatgcacatgaatatacaggatagtggaacgcagcctggcggtgtgccatctgcacccacgggaccgctggggcctccagggcacgggcagactttaggacagcaggtgccagggttccccactgcgccaacaagggtggtcattgccaggccaactccccctcaggccagaccatcgcacccgggtggtcctcccgtctctggaaccctccagggggctggactaggcaccaacgcttctcttgctcagatggtaagcggtctagtcggccaactgctgatgcagcccgttttagtggcccagggaaccccaggcatggcacctccgcctgctccggcaactgcttcagccagcgctggcaccacgaacaccgccacaacagctggacctgctcccggtggtcccgctcagccccctcctactcctcagccgagcatggccgacttgcagttcagccagctcttgggcaacttgctgggcccagcaggcccaggtgccggtggaagcggtgtggcaagccctaccattaccgtggcaatgccgggtgtgcccgctttccttcaggggatgactgacttcctgcaagctacccagaccgccccacctcctccgcctccgcctccaccgcctccccctgccccagaacaacaaaccatgccaccacccggttctccatcaggcggagcaggaagcccaggtggccttggcttggaatcattgtcccctgagttctttaccagcgtagtccagggcgtgttatcctcgttgttaggcagtcttggagcaagggcaggctcctctgagtctatcgctgcttttattcagaggctgtctggatcgtccaacatctttgagccaggtgccgatggcgctctgggattcttcggggcactcttaagcttactctgtcagaacttttccatggtcgatgtggtgatgctactgcacggccattttcagccattacagcgcttgcagccacaattgcgttctttcttccaccagcattatctgggcggtcaggagcctactcccagtaatattagaatggcaacacataccctcatcactgggctagaagaatacgttagagagtctttttccctagttcaggtgcagcccggagtggacattatccgcactaatttggagttcctgcaagagcaatttaacagtattgctgcccatgtccttcactgcacagatagcggctttggcgcacgcctgctggagctctgcaatcagggtctcttcgagtgtctagccctgaacctgcattgtcttgggggtcagcagatggagctggcagccgttatcaacgggagaatacgcagaatgtccaggggcgtgaatccgagcctagtgagttggttaacaacgatgatgggactgcggctgcaggtagtgctggagcatatgcccgtgggcccagacgccatccttagatacgtgaggcgagttggtgacccgcctcaacccctgcccgaggaacccatggaagtgcagggcgcagaacgcgctagccccgaaccccaaagggagaacgcttctcctgcacctggaacaacggcagaagaggccatgtctcggggacctcccccagcccctgagggaggtagcagagacgaacaggatggggcatctgctgagaccgaaccctgggctgcagctgtgccaccggaatgggtgcctattatccagcaagatatccagtctcaaagaaaggttaaaccacaacccccattgagcgatgcttatttaagcggaatgcccgctaagaggagaaagactatgcagggagagggaccccaactactcctatcggaggctgtgagtcgagcagccaaggctgcaggcgctcgtccgctgacctctccagagtcattgtcccgggatttggaggcgcctgaagtccaggagtcttaccggcagcagctaagatctgacattcagaaacggttacaggaggacccgaactactcccctcagcggttccccaacgcccaaagggcgttcgccgatgacccatag

SEQ ID NO: 232917 - DNA, 3381 bp, Artificial Sequence
  derived and/or modified sequence
atggaaccaaatgactccacgtcaacagctgtggaggagcccgacagtctggaggtacttgtaaagactctggactctcagacgaggacattcattgtaggggcacaaatgaacgtcaaagaattcaaggagcacatcgctgcttcagtaagcataccctctgagaaacagagactgatttaccagggaagagtgctacaggatgacaagaaactgcaagaatacaacgtgggaggtaaagtaatacatcttgtggagcgggctcccccacaaacgcacctgccatcgggggcatcgtcaggtacaggtagtgcctccgccactcacggcggaggttctccacctggcactcgtgggcctggcgctagcgtgcatgaccgcaacgccaacagttatgtcatggtcggcacatttaaccttccctccgacggtagtgcagttgacgtgcacataaacatggaacaggctcctatccagtcagaacccagggttcggctcgtgatggctcagcatatgattagggacatccagaccctgttgagtcggatggaatgccgaggcggtccccagccccagcattcccagcccccacctcaaccccctgctgtgaccccggagccagttgctctcagcagccagacttccgaaccagtcgagtccgaagctccgccacgtgaacctatggaggcagaggaagtggaagaaagggcccctgctcagaatcctgagctgaccccgggacctgctcccgcaggaccaacaccagcccctgaaactaatgcgcctaatcacccctcaccagcagagtacgtggaggtgctgcaggagctccagcgcttggagagcagactgcagccattcttgcaaaggtactacgaggtgctgggagcggctgccacaactgattacaacaataatcatgaaggcagggaagaggatcagcggctgattaacctggttggagagtccctgaggctcctcggaaatactttcgtagctctgtccgacctccgatgcaatctggcctgtacgccacccagacacctccatgtggtccggccaatgtctcactacaccacaccgatggtgctgcagcaagccgcaattccgatccaaatcaatgtcgggaccactgtgaccatgacaggaaacggaacccggccacccccaactcctaacgccgaagcccctccacctggacccggtcaggcaagctccgttgcacccagcagcactaacgtggaatcttccgccgagggggctccaccaccaggtccagcaccacctccagccacgtcacatcccagagttatccgaatctcccaccaatccgtggagcctgtcgtgatgatgcacatgaacatccaggacagtggtacccagcccggaggggttccttctgcccctaccggccctttgggcccacccggacacggacagacactcggccagcaagtacccggtttccccaccgcccctacccgggtggtgatcgcccgacccactccgcctcaggctaggcccagccaccccggagggcctccggtttcaggaaccctgcagggggcagggctcggcaccaacgcctcactagcccagatggtgagcggactggttgggcagctgctcatgcagcccgtgctcgtggcacaaggcacccccggtatggcccctccccctgcaccggcaacagcctcggcatcagccggaacaaccaacactgctaccacggcgggtccggctcccggtggccctgctcagcctccacccaccccacagccatcgatggcggacctgcagttttcacaactgctggggaatctgttgggacccgcaggacctggtgctggtggccctggcgtggcatctcccaccattacagtggccatgcccggagttccagcgttcttacagggaatgaccgatttcctgcaggcaacccagacggctcccccacccccaccaccgcctccgccaccacctcccgctccagagcagcagacgatgcctcctcccggatcccctagtggaggtgctgggagcccgggtgggctcggcctggaatctctttcacctgaatttttcacctccgtcgtccagggggtgctgtcaagcttgcttgggagtctcggagctcgcgcaggttcgtccgaatctatcgcagccttcatccagcgcttatctggatcttccaacatattcgagcccggagcggacggagcgctggggttttttggcgctttattatcgctcctgtgccaaaatttttccatggtggacgtcgtgatgctacttcatgggcactttcagccactacaaaggctccaacctcaactcagatcctttttccaccagcattatctggggggtcaggagccgacaccaagcaatatccgaatggccacacataccctgatcactggactggaggagtacgttagggagtctttctctctagtccaggtgcagccaggagtggatatcatacgcacaaaccttgaatttctgcaggagcaatttaatagcattgccgcacatgtcttacactgtaccgattccggtttcggggctagactgctcgagctctgtaaccaaggattgttcgagtgcctcgctcttaatctgcactgcctcggcggacagcaaatggagcttgcggcagttatcaacggtcgcattaggcggatgtctcgtggcgtgaatcccagcctcgtgagttggctcacgactatgatggggctgagactgcaggttgtgttagaacacatgccagtgggcccagatgcaatcttacgatacgtgcgtcgcgttggagatccacctcagccacttcccgaagagccaatggaagtgcagggtgcagagagagcctctccagagccccaaagagaaaatgcatcgccagcccctggtactactgcagaagaggccatgtcaaggggacctccccctgctccagaaggcggatcaagggatgagcaggacggcgctagtgcggaaaccgagccctgggcagccgcagtgccgccagagtgggtccccatcatccagcaagacattcagtcccagaggaaggtgaaaccacagccaccactctccgacgcctatctatccggcatgcccgctaagcgccgtaaaacgatgcagggcgaggggcctcagctgctgctgagtgaagctgttagccgcgcagcgaaggccgctggagcgcgtccgttaacctcccccgagagcctatccagagacttggaggctccggaggtgcaagaaagctatcgtcagcagctgagaagtgatattcagaagaggctccaggaggaccccaactactcaccgcagcgctttcccaacgcacaaagagccttcgctgacgatccatag

SEQ ID NO: 232918 - DNA, 3381 bp, Artificial Sequence
  derived and/or modified sequence
atggagcccaacgattccactagtaccgccgtggaagagccagactcactagaggtcctggttaaaactcttgattctcagacaagaaccttcatcgtcggtgcccagatgaacgtcaaagagtttaaggagcacatcgcggcttcagtctccatcccttcggagaagcagagattgatttatcagggacgggtgctgcaagacgacaaaaagcttcaggagtataacgtcggcggaaaagttattcacctagtggagcgcgcaccacctcagacacacctcccttcgggcgcatcttctgggaccgggagcgcatcggcaacacatgggggaggcagccctccagggacacgtgggccaggcgcaagcgtgcatgacagaaacgccaatagttatgttatggtgggaactttcaatctgccctctgatggctccgctgtcgatgtgcacattaacatggaacaggcacccattcagtctgaaccgcgagtgcgactggtgatggcccaacacatgatccgcgatatccagaccttgctcagtcggatggaatgtcgtggcggaccacaacctcagcattctcagccacccccacaaccaccagctgtgacaccagaacccgtcgctctgtcatcgcagacatccgagcccgttgaaagcgaagcccctccacgagagccaatggaagccgaagaagtcgaggaacgggcaccagcacagaaccctgagctcaccccaggccctgccccagccggtcccacacctgcccctgagactaatgctcctaaccatccgtcccccgctgagtatgtggaagtcctgcaggaactgcagcgcctcgaatccaggcttcagccctttctgcaaaggtactacgaagtgttaggtgccgctgcgacaactgactataataacaatcatgaaggcagagaggaggatcagcggctaatcaacctggtaggcgagtccctgagactcctcgggaatacttttgtggcgctgtcagacctgagatgtaatctagcttgcactccccctcggcatctgcacgtggttcgcccaatgtcacactacacaactcctatggtcctgcagcaagccgctattccaatccagataaacgtgggcactaccgtcactatgaccggcaatgggacaagacctccccctacaccaaatgcagaggctccacccccaggtcccggtcaagcgtcaagtgtagctccctctagtaccaatgtggagagttctgctgaaggcgcacctcctcctggccctgcccctccgccagccacttcacaccccagggtaataaggatatctcatcagtcggtggagcctgtggtgatgatgcacatgaacatccaggattccggaacacaacccggaggggtccctagcgctcctacagggccactggggccacctggtcatggtcagaccttgggccagcaggtgcctggctttccgacagcacccactcgggtggtgatcgcccgtcccacacctccacaagctcgccctagccatccaggtggccctccagtcagtgggacgcttcaaggagccggtcttggaaccaacgcctctctggcccaaatggtcagtggcctggttggtcagttgcttatgcagcctgtcctcgttgcccaggggacccccggaatggccccacccccagcacccgcaactgcctccgccagcgccggaaccacaaatacggctacaactgcagggcctgctccgggaggcccagctcagccaccacccactccacaaccatcgatggcggatctccagttctcgcagctgctgggcaacctactggggccagcaggtcccggagctggaggcccaggagtggcaagcccaaccatcacagtggccatgcctggagttcccgcattcctgcagggcatgacagattttctgcaggccacacaaacggcgcctccacccccaccgccacctcctccacccccacctgccccagagcagcagactatgccaccacctggaagcccgtcaggaggtgccggatcacctggagggctgggcctcgagagtctgagccctgaatttttcacttccgtggtacagggcgtactctcaagcctgttagggtccctcggggcaagagctggctcaagtgagtccattgcggcattcatccaaagactgagcgggagcagcaacattttcgaacccggtgcagacggggctcttggattcttcggggcactgctatctctgctctgccaaaatttctcgatggttgacgtggtgatgctgctacatggccactttcaacccctgcagcgtttacaaccacagcttcgatcattcttccatcagcattacctagggggacaggaaccgacaccgtccaacatcagaatggcgacacacacactgatcacaggtttagaagagtatgtacgagagtccttctccctcgtgcaggtccagcccggagtagacattataagaactaacctggagtttctccaagaacagttcaactcgattgccgctcatgtactgcactgcaccgacagtggtttcggtgccagactcttagaactctgcaaccagggcttgtttgagtgtctcgcactgaacctgcattgcctgggtggtcagcagatggaactggcagcggtcattaatggtcggattcgcaggatgtccagaggagtgaacccgtccctggtgagctggctgacaacaatgatgggcctgagactgcaggtggtcctggagcacatgcccgtggggccagacgctattctgcgctacgtgcgacgggttggtgatcccccacagcctctcccagaggagcccatggaggtacaaggcgctgaaagagcgtcccccgagccccaaagagaaaacgcatcccccgcacctgggaccacagccgaagaagccatgtcccgaggccctccacccgctcccgagggtgggagcagggatgagcaagacggcgcaagcgcggagactgagccctgggccgctgccgttccaccagagtgggtgcctatcattcagcaggacattcaatctcagcggaaggtgaagccacagcccccactgagtgatgcctatctgtcaggaatgcccgctaaaaggagaaagactatgcagggagagggaccacagctcctattatccgaggctgtctccagagccgcaaaggccgctggggcaagacctctgacgagccccgaaagcctcagtagagacctcgaggctcctgaggtgcaggaatcttaccgccagcagttgcggtcagatatccagaagaggctccaggaggacccgaattactcaccccagaggtttcccaacgcccaaagagcttttgccgacgacccatag

SEQ ID NO: 232919 - DNA, 3381 bp, Artificial Sequence
  derived and/or modified sequence
atggaaccgaatgacagtacctcaacggctgtcgaagagccggacagcctggaggtgctcgtcaaaaccctggacagccagactcgcactttcattgtgggcgcacagatgaacgtcaaagaatttaaagaacacatagctgcctccgtgtcgatccctagcgaaaagcagcggttgatctatcagggcagggtactccaggatgacaaaaaattacaggagtacaacgtggggggaaaagtgattcacttggtggaacgggctccaccgcagacccatctcccttccggggctagtagtggaactggctcagcctccgccactcacggtggaggatctcctcccggaacccgaggccctggcgcaagcgtgcatgatagaaacgccaatagctatgttatggtgggaacttttaaccttccatcggacgggagcgcagtggatgtccatataaatatggagcaagcccctattcaatcggaacctagagtacggttagtgatggcacaacatatgatccgggacatccagaccctgctcagccgcatggagtgtagagggggtcctcagccacagcactcccagccaccacctcagccccctgcggtcaccccggaacccgttgcactctcatctcagacctcggagccagttgaatccgaagctccccctcgcgaacccatggaagccgaggaggtcgaagagcgcgctccggctcagaacccagagctcaccccaggaccagcgcctgcaggcccaactccggcacccgaaactaatgccccaaaccacccctcccccgcagaatacgtcgaagtgctacaggagctacagcgcctggaatcacggttacagccattcctccaaaggtattacgaggtgctcggagcagccgcaaccacggactacaacaacaatcacgagggcagagaggaggatcagcggttgattaatctggtaggggagtcactgaggctgttgggcaacacatttgtagccctctccgatttacgctgcaacctggcatgcactccacctaggcacctgcatgtggtgcgtcctatgagccactacacaacgccaatggtcttgcagcaggcagcgatcccaatccagataaatgttggcaccaccgtgaccatgacaggtaacggcaccagaccaccccctacacccaacgccgaggcgccaccgccaggcccaggccaggcatcctctgtggctccgagtagtactaatgtggaaagctctgccgaaggcgctccccctcccggaccggcaccgccacctgctacaagtcatcctagggtcatcaggatttctcatcaatccgttgagcccgtggtgatgatgcatatgaatatccaggactccggaacacagccaggcggagtgccctctgccccaacaggtcccctcggtcctccagggcacggccagaccctgggacaacaggtaccagggttcccaaccgcccctacgagggtcgtaatcgcaagaccaactccacctcaggcccgaccaagccaccctgggggtccacctgtgagtggaacactgcagggcgcaggcctaggcacgaacgccagtctggctcagatggtgagtggcctggtgggacagctgctcatgcagcccgttctcgtggcccagggcactcccggaatggctccacctcctgcccctgccactgccagcgccagcgctggtacaacaaatacagcgacaactgcaggccctgccccaggcggacccgctcaacctcccccaactccccagccatctatggccgacttacagttctctcaactcctgggaaacctactgggacccgcaggcccaggcgctggaggcccaggtgtcgcatctcccaccataacagtcgcgatgccgggagtccccgcattcctgcagggaatgaccgatttcttgcaggccacccagaccgctccccctcctccccctccaccacctcctccccctcccgcaccagaacagcagaccatgccccctccgggtagcccctcaggcggtgccggatcccctggcggtctgggccttgagagcctgagtcctgagtttttcacttcagtggtccaaggagtgctgtcctcattgctgggatctttgggggctcgagctggatctagcgaaagtatcgcagcctttattcagcggctcagcggcagcagcaatatttttgaacccggagccgatggggctctgggattcttcggcgcactgctctcccttctttgtcagaatttttcaatggtggatgtggttatgcttttgcatggacactttcagcctctgcaaagacttcaaccacaactgagaagtttttttcatcaacactatctggggggtcaggagcccacaccctcaaacatccgtatggccactcacaccctgatcacagggttggaggaatacgtgcgcgaatctttttcgttggtgcaagtccaacctggagttgatatcatccggactaatttggaatttctccaggagcagtttaattctatcgccgctcatgtgctgcattgcaccgactccggcttcggcgcaagactgctggagctctgtaaccaaggccttttcgaatgccttgcccttaacctccattgtctgggcggacagcagatggaacttgccgctgtgattaatggacggatcaggaggatgtctagaggcgtcaatccctcacttgtgtcatggctgacaacaatgatgggactccgtctccaagttgtcctggaacatatgccggtcggccctgacgcaattctgaggtatgtgcgcagggtgggcgaccctccacagcctctgcccgaggagcccatggaggtccaaggggctgagcgagcatcacccgagccacagagagagaacgcctctcctgctcccggaacaacggctgaggaggccatgtctaggggcccaccgccagcgccagagggcggttctagagatgagcaggatggggcttctgccgagaccgagccgtgggctgccgcagtccctccagagtgggtgccaataatacaacaagatatacagagtcagaggaaggtgaagccacagccacccctctctgatgcctacctgagcggaatgcctgcaaagaggcgcaagacgatgcagggggaagggccacagctcctactgagcgaggccgtatcaagagccgcaaaggctgcgggtgcaaggcctctgacttcccccgagtccctctctagagacctggaggcgcctgaagtgcaggagtcatatagacagcagctgaggtctgatattcaaaagcgcctacaggaggacccaaactattctccgcaaagattcccaaacgctcagcgggcttttgctgacgatccatag

SEQ ID NO: 232920 - DNA, 3381 bp, Artificial Sequence
  derived and/or modified sequence
atggaaccaaacgactccacatctacggccgttgaggagcctgacagcctggaggtgctggtaaaaactctggacagccagacccggaccttcatagtcggcgcacaaatgaacgttaaagagtttaaggaacatattgctgcatctgttagtattccttctgagaagcagcgtttgatctaccaggggagagtcctccaggacgataaaaaattgcaggagtacaatgtggggggaaaagtcatacacctcgtggagagagcacctccacagacacatctgccttcgggtgcttcatccggtacaggcagtgcatctgcgacccatgggggagggagcccacctggtactcgcggtcccggtgcctctgttcacgaccgaaatgctaacagctatgtcatggtgggtactttcaatcttcccagcgacggaagtgctgtcgacgttcacatcaatatggaacaggcacctatccagagtgaaccaagggtgcggctggtgatggctcaacatatgattcgagatattcagacactgttatctaggatggagtgtcggggtggcccacagccccagcactctcagccccctcctcagcctccggctgtgacacccgagcccgtggccctgtcctcccagaccagcgagcctgtcgaaagtgaagcccctcctagagagcctatggaggcggaggaggttgaggaacgggcaccagctcagaaccccgagctcactccagggccagctcctgctgggccaactcctgcaccggaaacgaatgctccgaatcaccccagtcccgcagagtacgtcgaggtgctgcaagagctccagagacttgaaagtaggctgcagccattcctgcagagatactacgaagtgctaggtgcagctgctacaactgactacaacaacaatcatgaggggagagaagaggatcaaaggttgatcaacctggttggggagtccctgagactgctggggaatacatttgtcgcgctctctgatctgagatgtaatttagcctgcacacctcctaggcacttgcatgtagttcgccctatgtcacattacacaactcccatggtcctccagcaggccgcaattcctatccaaatcaacgttgggactacggtgacgatgactggcaacggcacacgcccacccccaacccccaatgccgaggccccaccccctggacccggtcaggcatctagcgtagcaccatcatcgacaaacgtggagtcttctgcggagggtgccccacctcctggcccagcccctcctccggctaccagtcatcctcgggttattagaatcagccatcagagcgtggagcccgtggtcatgatgcatatgaacatacaggatagtggcactcagccagggggagtccccagtgctccgacaggtcctctgggacctcccggacatggacagactttggggcagcaagtgcccggattcccaaccgccccaacacgggtcgttattgcccgacccacacctccgcaggcgagaccttctcaccccggaggccctccagtttctgggactctccagggtgcaggcctaggcacaaacgcaagcctggcccagatggtctccggtctcgttggccagttacttatgcagccggttctggttgctcagggcacccctggaatggcccctccgccagctccagcgaccgccagtgcgtcggctgggacgaccaataccgctaccactgctgggcctgcaccaggtggtcccgctcagccaccccctaccccgcaaccctccatggccgacctgcagttcagccaacttctcggaaatctgttgggtccagcgggaccaggggctggaggacccggagtcgcgtcccctactatcaccgtcgccatgccaggcgtgcccgcatttttgcaagggatgaccgattttttgcaggctacacagaccgcgcctcccccaccccctcccccaccaccacctccacctgcaccggaacagcagactatgccccctccaggttccccatccggaggggctggtagtccaggcggactcggattggaatcattgagcccagagttttttacatcagtcgttcagggagtgctgtccagtctgctgggtagtctcggcgctcgcgcaggctcgagcgagtcgatcgccgcattcatccaacggctgtctgggagctccaatatcttcgagcctggagcagacggtgcacttggatttttcggcgctctgttatccctgttgtgtcagaacttcagcatggtggacgtggttatgctgctccacggtcactttcaacctttacaacggttgcagccacagctcagatcctttttccaccaacactacctgggaggtcaagaacctaccccttctaacattagaatggctacacacaccctgattaccggattagaggaatacgtgagggaatcattctcactcgtgcaggtgcagcccggagtcgatattatccggacaaatctcgaattcctgcaggagcagttcaactccattgctgcccacgtgctgcactgcaccgatagcggctttggtgctagattgttagaactttgcaatcagggtctgtttgaatgcctcgccctgaatctgcactgcttgggcggtcagcagatggaacttgcagccgttattaacggcaggattaggagaatgagccggggtgtgaatccatcactagtgtcctggctgaccactatgatggggctgcgactccaagtcgtgttagagcacatgccagtgggccctgacgccatcctgagatacgtgcggagagtgggagatccgcctcagcctttacccgaagagccaatggaagtgcagggggctgagcgcgcatctcccgagcctcagcgcgagaatgcgtcccccgcacccggaactactgctgaggaagccatgagtcgtgggcctccacccgctcccgagggtggaagccgtgacgagcaggatggagcatccgcggaaacagagccatgggctgctgcggtacccccagaatgggtgcctataatccaacaggacattcagtcccaacgaaaggtcaaaccacagccccctctgtcagacgcgtatctttctgggatgccagccaagagacgtaagacaatgcagggggaagggccacaattgctattgagtgaagcagtctctcgggcagcgaaagctgccggtgcccgtccattgacatccccagaatccctgagccgcgacctcgaagcacctgaggtgcaagagtcctaccgccagcagctgcgcagtgacatccagaaaagactccaagaggatccaaactatagccctcagaggttcccgaacgcccaacgagcgtttgcagatgatccctag

SEQ ID NO: 232921 - DNA, 3381 bp, Artificial Sequence
  derived and/or modified sequence
atggaaccaaacgattccacctcaaccgctgtagaagagcctgattcattagaggtgctcgtaaagacactagattcgcaaacacgcacatttatcgtcggagcgcagatgaacgtgaaagagttcaaagaacatattgcagccagcgtgagtattcccagtgagaagcagcgcctaatttatcaggggagagttctgcaggatgacaagaaattgcaagagtacaacgtgggaggaaaggtgatacatctcgtagagagggcgcctcctcagacccacttgccgagcggtgcttcctccggaaccggatcagcctccgccacccacgggggaggcagtccccctggcactcggggacctggtgcctcagttcatgaccgaaatgcaaacagctacgtgatggtgggaactttcaacctgccaagcgatggctccgctgtcgacgtgcatataaatatggagcaggctcccattcaatctgagccaagggttcgcctggtgatggcgcagcatatgatcagggacattcagactcttctaagcagaatggagtgcaggggcggtccccagccacaacattcacaaccgcctcctcagccacccgcagtgacccctgagcctgtcgcgctgagcagccagacctcagagcccgtcgagtcggaagctcccccaagagaacccatggaagctgaggaggtggaggagcgcgctcccgcacagaatcccgaactgacaccgggacctgcccctgcaggcccaactccagcacctgaaaccaatgcgcctaaccacccctcacccgctgagtacgttgaggttctgcaggagctgcaacgattggaaagcaggctccagcccttcctgcagaggtattacgaggtccttggcgctgctgctactactgactataacaataaccatgagggtagggaagaagatcaaagactcataaatctcgtaggggaaagcttacgcctgttaggcaacacctttgtggcgctaagcgacctgcgatgcaacttagcctgtacgcctcctcgacatctacatgttgtgcggcctatgtcacattacactactcccatggtgctgcagcaggccgcaatccccattcagattaatgtcgggaccacagtcacaatgactggcaatggaacgaggccccctcccacaccaaacgccgaagctcctcctccaggccctggacaggcctcgtccgtggcaccatctagcactaacgtcgagtctagcgcggagggagcccctccccctgggcctgccccacctccagcaacgtcacatccacgtgtaattcggatctcgcaccagtccgtagaacctgtggtgatgatgcatatgaatatccaggactcagggactcagccagggggagtcccatccgccccaactggccctctcggccctcctggtcacggtcagactttggggcagcaagttccaggctttccgaccgcacctacacgagtggtcatcgccaggcctacacctcctcaagcccgacccagccaccctggagggcctcctgtttcagggacgctgcagggcgcagggctgggtaccaatgcttccctggctcagatggtatcaggcctcgtcgggcaattgctgatgcaacctgtgctcgtggcgcagggaacaccagggatggcacccccacctgcaccagccacggcttccgcatctgccggtactactaatactgcgaccaccgctggtccagcccctggcggacctgctcagcccccacccacccctcagccaagcatggcagatcttcagttctcccagctcctcgggaatctcttaggtcccgctggcccaggagctggaggatccggtgttgctagccccactataaccgtggccatgccaggagtgcctgccttcctgcagggtatgacagatttcctccaggcgactcaaacggcccctccgccaccacctccaccgccaccccctccccctgcccctgagcagcagaccatgccccctcccggaagcccgtccggaggtgcaggatctccagggggtttggggctggagtccctgagccccgaattcttcacctccgtcgtgcagggagtcttgagttctctgctcggctcacttggggctagggcgggtagcagcgagtcaatcgcggcttttatccagcgactttccggatcaagtaatatcttcgagcccggagcagacggcgctctcggcttttttggagcactgttatctcttctgtgccagaatttctccatggtggacgtggtcatgctgctccacggccacttccagcccttgcagagactccagccccagctacgttctttttttcatcagcattacctgggagggcaagagccgaccccctctaacatcaggatggctacccataccctaattacaggacttgaagagtatgtgagggaaagtttttctctcgtccaggtgcagcccggtgtggatatcattagaaccaacctcgagtttctgcaggaacagtttaacagcatcgcagcgcacgtgttacactgtactgacagcgggttcggcgctcgactcttggagctgtgcaaccagggcctgtttgaatgtctggcgctgaacctgcattgcctgggaggccagcaaatggaactggctgcagtcatcaatgggcgtatccgtcggatgtccagaggggtgaatccttcacttgtgagctggcttaccacaatgatggggctgcggcttcaggtggtcctggagcacatgccagtgggccctgatgcgatcctgcggtatgttcgcagggtgggggacccccctcagccactgcctgaggagcctatggaggtgcagggcgctgaacgggcttctccggaaccccaacgggaaaatgctagccctgcccctggtaccaccgctgaggaggccatgtctagaggcccacccccagctccagagggcggaagcagagacgagcaggatggtgctagcgctgaaaccgaaccatgggcagcagcagtccctccagagtgggtgcctatcatccaacaggacatccagagtcagcgaaaagttaagccccaaccccctttgtcagatgcctatctgtccggaatgccagccaagcggcgaaaaaccatgcagggggagggcccacagctgctactgtcagaagccgtgagtcgtgcggctaaagcagctggagctcggccacttacctctccagaatcactgagcagagacctagaagcaccagaagtgcaggagagttacagacagcagcttcggagcgatatccaaaagcgccttcaggaggaccccaactattctccccagcgattccctaatgcccagcgagccttcgcagatgacccctag

SEQ ID NO: 232922 - DNA, 3381 bp, Artificial Sequence
  derived and/or modified sequence
atggaacccaatgatagcacgagcactgccgtggaggagcccgatagcctggaggtactggtcaaaacattggacagccagactcggaccttcattgttggggctcaaatgaatgtaaaagagtttaaagaacatatcgctgcctctgtctctattccatctgaaaagcagcgacttatttaccaggggagggtactgcaggatgacaaaaagctgcaggagtataacgtgggaggaaaagtcatccacctggttgaacgtgcaccccctcagacccacctgccttccggagcctctagtggaacgggcagcgcctctgcgacacacggtggcggatctccccctggtaccagaggccctggtgcctctgtccatgataggaacgcaaattcatatgtgatggtcggaacatttaacctccccagcgacggaagtgccgtcgatgtgcacataaacatggaacaagcgccaattcagtccgagcctcgagtgaggctggtgatggcccagcacatgattagagacatacaaactctgctttcccgtatggaatgtagaggcggtccccagccacagcactcccagccgcctccccaacccccagctgtgacccccgagccggtggcactgtctagtcaaacttcagagccagttgaatcggaagcaccccctagggaacctatggaagccgaggaagtcgaagagcgcgctccagcccagaaccccgagctgactccgggaccggctcccgctggcccaactcctgcgcctgaaacaaacgccccaaatcatccatctcccgctgaatacgtggaagtattgcaagaactgcagcgtttggaatcaaggctgcagccttttctgcagaggtactatgaggtcctcggggcagcagctactacagactataataacaaccatgaaggcagagaggaagatcagcgactgatcaatctggtaggcgagtctcttagattattagggaacacctttgtggccctgtcagacttgcggtgtaacctggcatgtacgcccccaaggcacctgcacgtagttagacctatgtcccactataccactcccatggtgcttcaacaagcagccatccccattcagattaacgttggtaccactgtgaccatgacgggcaatggaacccggcctcctccaaccccaaatgcggaagctcctccccctgggccaggccaggcttcgtccgtcgcaccaagctccaccaacgtggagtccagcgcagaaggcgcacctcctcctggcccagccccacctccagcaaccagccacccgagggtcatcagaatctcccaccagtcagtagagcctgtggtcatgatgcatatgaatatacaagatagcggtacccaacccggaggtgttccctccgctccaaccggccctttgggacctcctggtcacggccagaccctgggccagcaggtgcctgggttcccaacagcccctacccgtgtggtgatagctcggccaacccctccccaagctaggcccagtcaccctggcggaccgcctgtcagcgggacattgcagggagccggactaggtactaatgccagcttggcccagatggtctcaggcttggtgggacagctgctcatgcagcccgtactggttgctcagggcacccccggtatggcccctccgccagcccctgcaaccgctagcgcatctgctgggaccacgaatacagccaccaccgctgggcctgcacccggaggtcccgctcagcccccacccacaccacagccgtcaatggctgacctccagtttagccagttgcttggaaatttgctcggcccagccggtccaggcgcaggaggctccggagtcgcttctcccactattacagttgcaatgcctggggttcccgcattcctgcagggcatgactgatttcctccaggcaactcagaccgccccaccccctcctccaccaccaccacctcctcctcccgctccagaacagcagaccatgcccccaccaggatccccatcaggaggggctgggtcccctggaggactcggtctcgagagcctctcccccgaattctttactagcgttgttcaaggcgttctgtcctctctcctgggcagccttggcgctagggctgggagtagcgagagcatagcagccttcatccagcgtctgtctggcagttctaacatctttgagcctggagccgatggggcactgggtttcttcggagccctgttgagcctgctctgtcagaacttctccatggtggatgtggtcatgctcttgcacggccacttccagcctcttcagcggttgcaaccacagctgcgttctttcttccaccaacactatttgggcggtcaggaacctaccccatcaaacattaggatggcgacacatacactgataacagggctggaggaatacgtgcgcgagagtttctctctggtgcaggtgcagcccggagttgatatcatcaggactaacctggagttcctgcaagaacagttcaattctatcgctgcacacgtcctgcattgtaccgactccggcttcggagctcgcctcttggagctatgtaatcagggcctgttcgaatgcctggcccttaatttgcactgtctgggtggtcagcagatggagctggctgccgtcatcaacgggcgaatccggaggatgtcaagaggcgtcaatccctcactcgtgagctggctcacaaccatgatgggactcagactccaggtcgtcttagaacatatgccagttggcccagatgccattcttagatacgtaagacgtgtcggtgaccctcctcagccactacctgaagagcctatggaagttcaaggagctgaaagggcgtctccggaacctcaaagagagaatgcctctccggcacccggtactaccgcagaggaagccatgtctcgcggtccaccccctgcacccgagggaggctccagagacgaacaagacggggcttctgcagagaccgagccatgggcggcagctgtgccacccgaatgggtgccaataatccagcaggacattcagagccaaaggaaggtgaagcctcagcctcctctgtcagacgcctacctgtctggaatgcctgcaaagagaagaaaaacaatgcagggcgagggccctcagctcctactttctgaagccgttagccgtgccgcaaaggcagctggtgcaagacccctgacttctcctgaaagcctttcccgcgacctcgaagcaccagaggttcaggaatcatatcgtcagcagctacgatcagatattcaaaagcgcttgcaagaggatccgaactactcaccccaacggtttcccaacgcacagagggcatttgcagatgatccctag

SEQ ID NO: 232923 - DNA, 3381 bp, Artificial Sequence
  derived and/or modified sequence
atggagcccaacgattcgacctctactgccgtcgaagagcctgactcactggaggtgctggtgaagactctggattctcagacgcgcaccttcatcgtgggcgctcagatgaatgtgaaggagtttaaagaacatatcgccgcatctgtatctattccgagcgagaagcagcgcctaatctatcaaggccgagtgctgcaggacgacaagaaactccaggaatataatgttggaggcaaagttatacacctggttgagcgagcgccacctcagacccatctgccgtctggagccagctctggcaccggaagtgctagtgccacacacggcggagggtcccctccaggcaccaggggaccaggtgcctctgtccacgatcgcaatgcaaacagttatgtgatggtgggcacattcaacctcccttccgatggtagcgccgtggatgtgcacataaatatggagcaggcccctatccagagtgagcccagagtgcgcttagttatggctcagcacatgatacgcgatattcaaaccctactgtcacggatggagtgccgaggtggaccgcagccacaacactcacagccacctcctcagccccctgctgtcacccccgagcctgtggctcttagtagccagacaagcgaaccagtcgaatcagaggctccacctcgcgaacccatggaagccgaggaggtcgaagaacgtgctccagcacagaatccggaacttacacccggtcccgcacccgcaggcccaaccccagcaccagaaacaaacgccccaaatcacccaagtcctgcagagtatgtggaggtgctgcaggagctgcagagactggagtctagattacaacccttcctgcagcgatactatgaggtcctgggggctgcagcgaccacagactataataataatcatgagggcagagaggaggaccagagactgatcaacctagtgggagaatcactacggctccttggcaacaccttcgtggcgctgtccgacttgaggtgtaacctcgcctgtaccccaccgcgtcatctgcacgtcgtcaggcctatgtctcactacacgactccaatggtgttgcagcaggccgctattccaatccagatcaatgttggaactacagttacgatgactggcaacggtacccgccctccccctacccccaatgctgaggccccaccaccgggtcctggccaagcatcatcagtggccccatcctcaactaacgtcgaatctagtgcagagggagcgcctcccccaggaccggctcctccccctgcaacatctcaccctcgagtcatcagaatctcacatcagtctgtggagcccgtcgttatgatgcacatgaatattcaggattcaggcactcaaccaggtggggtgcccagtgcccctactggacccctcggcccacctggacatgggcagaccctggggcagcaggtgcctgggttccctacagctccgactcgcgtggtgattgcgagacctaccccccctcaagctagaccctctcacccgggtggccctccggtatcaggaactctccagggcgcaggcctggggacaaatgcctctctcgcccagatggtttctgggctggttggccagctactgatgcagcccgtcctggtcgctcagggaacacccggaatggccccacctcccgcaccagcaaccgcttccgctagtgcagggaccacaaacaccgccaccacagcagggcctgcccctggtggccctgcgcaaccaccacctactccacagccgtccatggcggacctccagttctctcagcttcttggcaatcttttgggccctgccggacctggggcaggcggacctggagttgcgtcccccacaattacggttgccatgcctggagttccagcgtttttgcagggcatgaccgatttcttgcaggctacccagaccgccccaccccctcctcctcctccaccccctcctcctcctgccccagagcagcagaccatgcctcctcctgggagtccatccggaggggcaggcagtcctggtggtctcggcctcgaatcactcagccctgagtttttcacgtccgttgtccaaggggttctttcatcattgctgggctcactaggcgcacgagcaggatcaagtgaaagtatcgcggctttcattcagcgactgtcggggagctccaacatcttcgaacccggtgccgatggtgccttgggcttctttggggctctcctgagcttactgtgccagaacttttcaatggtggacgtagtcatgctgctacacgggcatttccagccgttgcagaggttacagccacaactgcgaagtttctttcatcagcattacctgggcggtcaagaacccaccccttcaaacatcaggatggccacgcatacccttatcactgggctggaagaatacgtcagagaaagcttttccctagttcaggtacagcctggggtggacatcatccgaacaaatcttgagtttctgcaggaacagttcaactcaattgcggctcatgtgctgcactgcacggattccgggttcggggcacggttgttggagctgtgcaaccagggcctattcgaatgtttagctttgaatctccactgtctgggtggacaacagatggaacttgcagctgtgatcaatggcagaatcaggagaatgagtagaggggtgaatccatcccttgtgtcttggctgactactatgatgggcttgcgcctacaggtcgtcctggagcacatgcccgtagggccagatgccatcctgcggtatgtacgtcgggtgggggatccacctcagccgttgccagaagagcctatggaagtccagggagccgagagggctagtcccgagccccagagagagaacgcaagccctgccccaggaactacagccgaggaggcaatgagccgtggcccaccacctgcaccagaaggcggaagccgcgacgagcaggatggagcttctgccgagacggagccgtgggcagccgctgttccaccagagtgggtgcccataatccagcaggatatacagagccaacgtaaggttaaaccacagcccccattgtcagacgcctatctgagcggaatgccagcaaagaggcggaagaccatgcagggagagggcccacagttactgctgagtgaagcagtgagcagggctgctaaagctgccggagcaagacccttgacctccccagaaagcttatccagagacctcgaagcccctgaggttcaggagagttaccggcaacaactcaggagcgatatccagaagcgcctgcaggaggaccccaactattcaccacagcggtttccaaatgctcagcgggctttcgctgatgacccttag

SEQ ID NO: 232924 - DNA, 3381 bp, Artificial Sequence
  derived and/or modified sequence
atggagcccaacgattctacgtctacggccgtcgaagagccggattcactcgaagtgctggtgaaaactctggacagtcaaactcgcacatttattgtgggtgcccagatgaatgtaaaggaattcaaggagcacattgccgcatctgtctccattcccagcgaaaagcagcgcctaatttatcagggtcgtgtgctgcaggacgacaagaagctacaagaatataacgtgggcggtaaggtcatacacctggtcgagcgcgctcctccccagacccatctgccctccggagctagcagcggaactgggagtgcaagtgctactcatggagggggatcacctccaggtaccagaggtcctggagccagtgttcatgatcggaatgccaacagctacgtgatggtagggacattcaatttgcccagcgacgggtccgcagtggacgttcacataaacatggagcaggcccctattcagagcgaaccacgggtgagattggttatggcccagcacatgattcgcgacatccagaccctgctctctagaatggagtgtcgtggcggacctcaaccccagcacagccagccgcctccccagcccccagccgttacccccgagcctgtggctttgagttcccaaacgagcgagccagtcgaaagcgaagcaccgccacgggaaccgatggaagccgaagaagttgaagagagggcccctgctcaaaatcctgagttgacccccggtccagcccctgcaggccctactcccgctcctgaaacaaacgctcctaaccatccatctccagcggagtacgtcgaggtgctccaggaattgcagcgcctggaatcccgcctgcaaccattcctgcaacggtactatgaggtgttgggagctgcggctacgactgattacaataacaaccacgagggacgggaagaagatcagcgcctgattaaccttgttggggagtccctgcgtctgttgggcaatacctttgtcgcactgagcgacctcagatgtaatctggcatgcactccgccacgccacttgcatgtggttaggcccatgagccattatacaactcccatggtgctgcagcaggcagccatcccgattcaaatcaacgtgggtactacggtgacaatgactgggaacggcacccgccctccgccaactcccaatgcggaggcacccccacctggccctgggcaggctagttccgtggcaccgtcaagtaccaacgtggagagcagcgccgagggagccccacctcctgggccagcgcctccacctgctaccagccaccctagagtgattcggatatcccaccagtccgtagaacccgtggtgatgatgcatatgaatattcaggattccggaactcaaccgggaggcgtgccctccgctccaacaggcccactgggacccccaggacatgggcaaacccttggccaacaggtgccaggcttccccactgcccctacccgggtagtgattgcacgacccactccacctcaagcccgtccatcccatcctggcggacctcccgtttcaggaaccctgcaaggggcaggcctggggaccaacgctagcttggcgcagatggtatcaggtctggtagggcaactgctaatgcagcctgtgcttgtcgctcagggaactcccggaatggctcccccacctgctcccgctacagcctctgcaagcgcaggaactaccaatacagcgacgacagctggaccagccccaggagggcctgcacagccacctccgaccccacagcctagcatggctgacctccagttcagtcagctgctgggcaacttgctcggtcccgctggccctggcgctggcggacccggagttgcttctcccacaatcactgtggctatgccaggggttcctgcattcctacaaggaatgacagatttcctgcaggccacccagactgcgccacctcctccaccccctccacctccccctcctcctgctccagaacagcaaacaatgccaccacccggatccccaagcgggggagccggatcacccggtggtttgggtctagagtcacttagcccagagttctttactagcgtcgtacagggagtcctcagctctctgcttggctctcttggcgcacgtgcaggaagctcagaatccatcgccgcttttatacagagactctctggttcaagtaacatcttcgagcccggtgccgatggggcactcggctttttcggggctcttttgtccctgttgtgtcagaatttctcaatggtcgatgtcgtcatgctgctgcacggccatttccaacctctgcaaaggctgcaaccccaattgcgtagcttttttcatcagcactacctgggaggccaggaacccacgccatccaacatccgtatggcaacccacaccctcatcacagggctggaagaatatgtccgtgaatcattctcccttgtgcaagtacagccaggagttgacattataagaactaacctcgaatttcttcaggagcagttcaatagtatcgccgcacatgtgcttcattgcactgattctggtttcggtgcccgactgcttgaactctgtaatcaaggtctctttgagtgcctcgcacttaacctgcattgcctaggtggacagcagatggagctggcagccgtaatcaatgggaggatacggagaatgtcccgaggagtgaacccgtcactcgtgagctggctaaccaccatgatgggtctgaggctgcaggtcgtgctggaacacatgccagtcgggccagatgctattctcagatacgttcgcagggttggagatcccccacagccgcttcctgaggaaccaatggaagtacaaggagcagaaagagcaagcccagagccgcagcgagagaatgcctcacccgctcccggaacaaccgctgaggaagccatgagccgcggacctcctccagctcctgagggagggtccagagatgaacaagacggtgcgagcgctgagaccgagccttgggccgcagcggtgccccctgaatgggtccctatcatccagcaggacattcagagtcagcgcaaggtcaaaccccagccacctctaagtgatgcctatctgtctggcatgccagctaagagacggaaaacaatgcaaggagaagggccacagttactcttatctgaggctgtctcacgagcggctaaggccgcaggggctaggccgcttacatctccagaatcactgagccgcgacctagaagcccctgaagtgcaggagtcttaccgccagcagttgcggtccgacattcagaaacggctgcaggaagatccaaattacagtccgcagcggttccccaacgctcagcgcgctttcgccgacgatccctag

SEQ ID NO: 232925 - DNA, 3381 bp, Artificial Sequence
  derived and/or modified sequence
atggagcctaatgatagcaccagcaccgcggttgaggaacctgactcgctcgaggtcctggtcaagaccctggatagtcagaccagaaccttcatcgttggtgctcagatgaacgtgaaagagtttaaagagcacattgctgcctctgtgtcaattccctccgagaagcaacgcctgatataccaggggagagtcttgcaagacgacaaaaagctgcaggaatataatgtagggggaaaagtcatccacctggtggagagagctccaccccaaacacatctgccaagcggtgcctcctctgggaccggcagcgcctccgcaacccatggaggtggctctccacctggcacacgcggtcctggcgctagtgtccacgacagaaatgccaactcatacgttatggtgggcacctttaaccttccatctgacgggtccgcagtggacgtgcacatcaacatggagcaggcacctattcaatctgagcccagggtccgactggtgatggcacaacacatgattcgtgatattcaaacattactttcacggatggaatgtaggggtggcccacagcctcagcactcgcaaccccctccgcagccacccgctgtgacacccgaaccggtggcccttagcagtcaaaccagcgagcctgtggagtctgaggccccaccacgggagcccatggaagcagaggaggtggaagagagggcgccagcacagaaccccgaactgacacccggtcctgccccagccggaccaacgcctgctccggaaaccaatgccccaaatcatcccagccccgcagaatacgttgaagttttacaggagctgcagaggctcgagtcgaggcttcaacccttcctgcagagatactacgaagttcttggggctgccgcaacaaccgattataacaacaaccacgaaggccgagaagaggatcaacggctcatcaacttggtgggggagtctcttcggctactgggaaatacgttcgtcgccttgagtgacttacgttgtaaccttgcgtgcacaccccctcgacatttacacgtcgtccgcccaatgtcccactacacaaccccaatggtgctgcaacaagctgctataccgatccaaatcaacgtagggaccacagtgaccatgaccgggaacggaacacgtcctcctccaacccctaatgctgaggcacctccacccggacctggccaagctagttctgtcgcaccatcctcaaccaacgttgaatctagcgccgagggcgctcccccacctggaccagcaccgccaccggctacttcacaccccagagtgattcgcattagtcatcagtctgttgaacccgttgtaatgatgcacatgaatattcaggactctggaacccagccgggtggcgtcccttccgccccaaccggtccgctgggacccccaggccacgggcaaacactgggtcagcaagtccccggtttccccaccgctcccaccagagtcgtgattgctaggcctactccccctcaggctagaccatcccatcctggcggacccccagtctctggcacactgcagggagccggtctgggaacaaatgcatcactggcccagatggtgagtggtcttgttgggcagctcctgatgcaacctgtgttggttgcacagggaaccccaggcatggcccctcccccagcccctgccactgcctccgctagtgccggaacaactaacactgccacgactgcgggaccagccccaggcggacctgcacaacctcccccaactccgcaaccttctatggcagacctgcaattcagccagctgttggggaacctgcttgggcctgctggccctggggcaggcggaagtggcgtggcaagccctaccataaccgtagcgatgccaggcgtacctgcatttctgcaaggtatgacggattttctccaggctacccagaccgcacccccaccacctccccctccccctccgcctcccccagccccagaacagcaaacaatgccaccccctggttcccccagcggtggcgctggtagtcctgggggattgggactggagagcctgagcccagaatttttcactagtgtggtccagggcgtgctgtcgtcactgctcggaagcctgggcgcacgtgcaggttcctctgaaagtatcgctgcatttattcagaggttgagcggctcctccaacatattcgagccaggcgcagacggcgctctgggattcttcggcgctctgttgtcactgttgtgccaaaatttcagcatggtcgacgttgtgatgctgcttcacggacattttcagccactacaaaggctgcaacctcaactgaggagcttctttcaccagcactacctcggcggacaggagccaactccatccaacatccgaatggctacccacactttgataaccggcttagaagagtatgtgcgggaaagcttttcgttagtccaggtgcagcctggcgtcgacatcataagaacaaatctggagtttttgcaagagcagtttaatagcatcgcagcccacgtactgcattgtaccgattctggtttcggcgctagactgctcgagctttgcaaccaggggctgttcgagtgcctggctttgaacctccattgtctgggcggacagcagatggagctggcagcggtgatcaatggcagaatcagacgaatgtccaggggcgtcaaccctagccttgtttcgtggctgacaactatgatgggcctgcggctccaggttgtcctggaacacatgccagtagggcctgacgcaatccttcggtatgtaagacgggtgggggatccaccccagcctctgccagaggagcccatggaggttcagggagccgagagggcctctcctgagcctcagagagagaatgcctccccagctcccggaacgactgccgaagaagcaatgtctcgcggtcccccaccagcgcctgaaggcggaagccgagacgaacaagacggcgcaagtgcagagactgagccctgggcagctgctgtgccccctgaatgggtgcctattatccagcaggacatccaaagccagcgtaaggttaaaccacaacctcccttgtctgatgcatacttgagcgggatgcctgcaaaaaggcgaaagacgatgcagggtgagggacctcaattgctcctatctgaggccgtcagtagggctgcgaaagccgctggagcacgccctctgaccagtcccgagtcactgagtcgggacctggaagccccagaggtgcaggaaagttaccggcaacagctgcgaagcgacattcaaaaaagactccaggaagatcctaattactctcctcaacgctttccgaatgctcagcgcgcattcgccgacgacccctag

SEQ ID NO: 232926 - DNA, 3381 bp, Artificial Sequence
  derived and/or modified sequence
atggaaccgaacgacagtactagtacggctgttgaagagcccgattcactggaggtgctcgtgaaaaccttggattcccagactaggacgttcattgtcggcgcacagatgaatgtcaaagagtttaaggagcacattgcagctagcgtgtctattcccagcgaaaagcagagactgatataccagggcagagtgctacaggacgacaagaaactgcaggaatacaacgtcggcggtaaggttattcacctcgtggagagagcacctccacagactcatctgccctcaggggcttcgtctggcaccggatccgcttccgccacccacgggggtggaagtcctccaggtacgaggggacccggagccagcgtgcatgacagaaacgctaattcatacgtgatggtggggaccttcaacctccccagcgacggcagcgccgtggacgtccacatcaatatggaacaggcaccgatccagagtgaacccagagtgaggctggtcatggcacagcacatgattagagacatccagacgctcctctcacgcatggagtgtcgagggggtccgcagccccagcactctcaaccaccgcctcagccacccgcagtgactcctgagcccgtggctctatcctcccagacctctgaaccggtggaaagcgaagccccacctagggaacctatggaagcagaagaagtcgaagagagagccccagcccagaaccccgagctgaccccaggcccagcacctgccggtcccaccccggcacccgagactaatgctcccaaccatccgtcgcccgctgagtatgtggaggtgttacaggagctacagagactggagagccggttacagccgttccttcagcgctactacgaggtactcggcgcagctgcgacaaccgattataacaataaccatgaaggcagagaggaggatcagaggctgatcaacctggtaggcgagtcactcagactactcggaaacaccttcgtcgcactgtcagatcttcgatgcaatctggcctgcaccccaccccgtcatctgcacgtcgtgcggcctatgtctcattacaccacacctatggtcttgcagcaggctgcgatcccaatacagataaatgttgggacaacagtgacaatgacaggcaatggaacgcgcccacccccaactcctaacgccgaggccccacccccaggacccggacaggccagctcagtggccccaagttctactaatgtggagagcagtgctgagggcgcaccccctcctgggcctgcccctcctcccgcaacgtctcacccacgtgtgattcggatctcacaccaatctgtagagccagtggtgatgatgcacatgaatatccaagacagcggcacccaacccggtggcgttcccagtgcccctactggacctctgggcccaccgggtcacggacagaccttgggccagcaagtaccgggattccctacggctcccacaagggtggtaattgcgaggccaacacccccacaagcccgacccagccacccaggcggtcctcccgtcagcggcaccctacaaggcgctgggttaggcactaacgcatctctcgcacagatggtgtcaggtctagtgggacagcttctgatgcagcctgtgctggtggctcaaggcacccctggaatggctcctccaccggcacccgctacggcatctgcatcagccggaacaacaaacaccgctacaactgccggacccgctccaggcggacctgcacaaccaccccctaccccgcaacctagcatggccgacttacagttctctcagcttctcggcaatctacttggcccagccggaccgggagcagggggatctggcgtcgcatcacccacaataacagtcgcgatgcccggtgtgcctgcttttctgcaaggtatgactgattttttgcaggctactcaaactgctcccccacccccaccgccaccgccaccccctccccctgctcccgaacaacagaccatgccaccccctggttccccctccggtggcgctggaagcccaggaggacttggcctggagtcactgagccctgagttctttaccagcgtggtgcagggcgtgcttagctctttactggggtctcttggggcacgtgccggatctagcgaatccattgccgctttcatccagcgactttctggatcatctaatatctttgaaccaggcgctgacggggctctaggatttttcggggctttgcttagcctactttgccagaactttagcatggtggatgtcgtcatgctcctccacgggcacttccagcccctgcagcggctacaaccgcagcttagaagcttttttcaccagcattacctcggcggacaggagccaacaccctcaaacatacgcatggcaacgcacaccctcatcaccggcctggaggagtacgtccgcgaaagcttctctcttgttcaggtccaacccggtgtggacattatccgcaccaacctggagttcctgcaagaacaatttaattctatcgcggctcacgtgttacactgcactgacagcggattcggagctagattgcttgagctgtgcaaccagggactgtttgagtgtttagccctgaatttacattgtctggggggtcagcagatggaactggccgcagtgattaatggtcggatacggcgaatgtcacgcggtgtgaatcctagcctcgtctcttggctgactactatgatgggcctcagactgcaggtcgtcctggagcatatgcccgtaggtcctgacgctatcctgcggtacgttcgaagagtaggcgacccgccacagcctcttcccgaggaacctatggaagttcagggcgctgagagggccagtccagagcctcaacgagagaatgcatcgcccgctcctgggacaaccgctgaagaagccatgagccggggaccccctccagcacccgaagggggtagccgcgacgaacaagatggagccagcgctgaaaccgaaccttgggcagccgctgtgccccctgagtgggtaccaattattcagcaggacatccagtcacagagaaaggttaaaccccagccgcctttgtcagatgcctatctgagcgggatgcctgccaagcgcagaaaaacaatgcagggcgaaggaccccagcttttgctctcagaggccgtgagccgagccgctaaggctgcaggggcaaggccacttaccagtcccgaaagtctgtccagggatctcgaggctccagaggtgcaggagtcttaccggcagcagctgcggtctgatatccagaagcgactacaggaagaccccaattattctcctcaacgttttcccaatgcacaaagggcattcgccgacgatccctag

SEQ ID NO: 232927 - DNA, 3381 bp, Artificial Sequence
  derived and/or modified sequence
atggaacccaatgattctacctcaacagccgtcgaggaacccgactcacttgaagtcctggttaagaccctcgattcccaaaccaggacttttatcgtcggcgcacagatgaatgtgaaggagtttaaggagcacattgccgcatctgtgtctatccccagtgaaaaacagaggttaatataccaggggagggtcctgcaggacgataagaaactacaggaatacaacgtgggcggaaaagtcatccacctcgtggaaagggcccctccccagacacacttgcctagtggcgcatcatcaggtaccgggtctgcaagcgctacgcatggaggcggtagcccaccaggtactcggggtccgggtgcttcagtacatgacaggaacgcaaattcatacgtcatggtgggaacattcaacctcccttctgatggttccgccgtcgacgtccatatcaacatggagcaggcccctatccaatcagaacccagagtgcgactggtcatggctcagcatatgatccgagacatccagaccctcttgtcacggatggagtgtcgagggggacctcagccacagcacagtcagccccctcctcagcccccagccgtcacccccgaaccagtggctctttcctctcaaacgagtgagcccgtggaatctgaggcccctcctagagaacccatggaggccgaagaggttgaggaaagagcacctgctcagaacccggaactcacgccaggcccagcaccagccggacctacaccagcaccagaaacgaacgccccaaatcatccctccccagcagagtatgtagaggtcttacaggagctgcagcgattagagtcacggttacagcctttcttgcagcggtattatgaggtgctcggagctgccgctactacagattataataacaatcacgaaggccgagaagaggatcagcgtctcataaatcttgtgggggagagtctgagactgctggggaatacctttgttgccctgagcgacctgcgctgcaatctcgcctgcacaccaccacggcatctgcatgtggttaggccaatgtcccactacacaactccaatggtgctgcagcaagctgccatacctatacagatcaatgtgggtacaacagtgacaatgaccggaaacggaacaaggccgccacccacccccaatgctgaggccccacctcctggcccaggccaggccagttctgttgcaccaagttctaccaatgtggaaagtagcgccgagggggctccccctcccggacctgcccctcctccagctacctctcaccctcgtgtgatccgtatcagccatcagtctgttgagcctgtagtgatgatgcatatgaatatccaggatagtgggacccagcctggtggagttcccagcgctcccaccggcccattgggcccaccgggacatggacagactctcggtcagcaggtccctggtttccccaccgctcctacccgggtcgtgattgctagacctacacccccacaggccaggccttcacaccccggaggacctcccgtgtctggaactctccaaggcgctgggctgggcaccaacgccagcctggctcagatggtgtccggactggtcggccagttgctgatgcaacctgtgttagttgcgcagggaacgccgggaatggcacctcccccagcccctgctacagcaagtgcctcagctggcactacaaatactgccacaactgctggacccgcaccaggcggtcctgcccagcctccacccaccccacagccctccatggcagatctccagttctcacagcttctggggaacctgctgggcccagccggtcccggagccggaggtagcggagtcgcttctcctacaatcacggtggccatgccaggcgtgcccgcattccttcagggtatgacagatttccttcaagccacccagaccgccccaccgccacctccgcctcctccccctcctccccctgctcccgagcagcagacaatgccaccccctggaagtccgtctggcggtgctggatctcctggcggattgggcttagaatctttgtcacccgagttcttcacgagcgtcgtgcagggtgttttgtcaagcctgctaggcagcctgggagccagggcagggtctagcgagagtatcgccgcatttattcagagactcagtggatcatctaacatatttgaacccggtgccgacggggcactcggttttttcggggctctgctctccctcctgtgccagaacttctctatggtggacgtcgtgatgctcctgcatgggcatttccagccactgcagaggctgcagccccagctgcggtctttcttccatcaacactatctagggggtcaagaaccaacacctagtaatatcaggatggccactcacacacttataaccgggctggaggagtacgtgcgcgagtcatttagtctggttcaggttcaacctggcgtggatataatcagaaccaaccttgagttcttgcaggaacaatttaacagcatcgcggcacacgtcctccattgtaccgacagtgggttcggagccagattgttagagctgtgcaatcagggtttgtttgagtgcctcgctctgaatttgcattgtttaggcggacaacagatggaactggctgccgtgattaatggtaggatcagaaggatgagcaggggcgtcaaccccagtctcgtgtcctggcttacaactatgatggggctcagattacaagtggtgctggagcatatgcccgttggccctgatgccatcctgagatatgttaggcgggtgggggatcccccacagcccttgcccgaggagccgatggaagttcagggagctgaacgtgcttctcctgagccccagagagagaacgcgtcccctgcccctgggacaacagctgaggaggctatgtctaggggccctccccctgccccagaaggcggaagtcgagatgaacaggacggagcttcagcggaaactgagccttgggccgctgcagtgccaccggagtgggtcccaatcatccagcaggatatccagtcccagcggaaagtgaaaccgcaaccccctctgtccgatgcctacctgtccggaatgccggctaaacgtcgcaaaaccatgcagggtgagggtccccagctcctgctcagtgaagctgttagccgtgccgctaaagccgcaggggcaagacctctgaccagtcccgagtcactgagccgcgatctcgaggcaccggaggtgcaggagagctacagacaacagctcaggagcgacattcagaagcggctccaggaagaccctaactatagtccacagagattccccaatgcccaacgggcttttgccgacgacccgtag

SEQ ID NO: 232928 - DNA, 3779 bp, Artificial Sequence
  derived and/or modified sequence
gggggtggggcgatgcttaagtgtccacgcatccgtagtgcgacgcacgcaggcgtagtacggtcccccgggcgacagcggtggcggctcctcggggtgctcggctccctcccacctaggccggccccggcccgactcgccctcagaaactcactgtttggggctgcggactttctcgtcgtgccccacaaaagtaaagcttggggacctggggggagccggaagtatcgcttcgagatccccaaatactatcggggaaacggaagtggccgtcggtggcagagacctgtcggccatggagcctaatgatagtaccagtaccgctgtggaggagcctgacagcttggaggtgttggtgaagaccttggactctcaaactcgtacctttattgtgggggcccagatgaatgtaaaagagtttaaggagcacattgctgcctctgtcagcatcccatctgaaaaacaacggctcatttaccagggacgagttctgcaagatgataagaagcttcaggaatacaatgttgggggaaaggttatccacctggtggaacgggctcctcctcagactcacctcccttctggggcatcttctgggacggggtctgcctcagccactcatggtgggggatccccccctggtactcgggggcctggggcctctgttcatgaccggaatgccaacagctatgtcatggttggaaccttcaatcttcctagtgacggctctgctgtggatgttcacatcaacatggaacaggccccgattcagagtgagccccgggtacggctggtgatggctcagcacatgatcagggatatacagaccttactatcccggatggagtgtcgaggagggccccaaccgcagcacagtcagccgcccccgcagccaccggctgtgaccccggagccagtagccttgagctctcaaacatcagaaccagttgaaagtgaagcacctccccgggagcccatggaggcagaagaagtggaggagcgtgccccagcccagaacccggagctcactcctggcccagccccagcgggcccaacacctgccccggaaacaaatgcacccaaccatccttcccctgcggagtatgtcgaggtgctccaggagctacagcggctggagagtcgcctccagcccttcttgcagcgctactacgaggttctgggtgctgctgccaccacggactacaataacaatcacgagggccgggaggaggatcagcggttgatcaacttggtaggggagagcctgcgactgctgggcaacacctttgttgcactgtctgacctgcgctgcaatctggcctgcacgcccccacgacacctgcatgtggtccggcctatgtctcactacaccacccccatggtgctccagcaggcagccattcccatacagatcaatgtgggaaccactgtgaccatgacaggaaatgggactcggccccccccaactcccaatgcagaggcacctccccctggtcctgggcaggcctcatccgtggctccgtcttctaccaatgtcgagtcctcagctgagggggctcccccgccaggtccagctcccccgccagccaccagccacccgagggtcatccggatttcccaccagagtgtggaacccgtggtcatgatgcacatgaacattcaagattctggcacacagcctggtggtgttccgagtgctcccactggccccctgggaccccctggtcatggccaaaccctgggacagcaggtgccaggcttcccaacagctccaacccgggtggtgattgcccggcccactcctccacaggctcggccttcccatcctggagggcccccagtctctgggacactgcagggcgccggtctgggtaccaatgcctcgttggcccagatggtgagcggccttgtggggcagcttcttatgcagccagtccttgtggctcaggggaccccaggtatggctccaccgccagcccctgccactgcttctgccagtgctggcaccaccaacacagctaccacagctggccccgctcctggggggcctgcccagcctccacccacccctcaaccctccatggctgatcttcagttctctcagcttctggggaacctgctagggcctgcagggccaggggctggagggtctggtgtggcttctcccaccatcactgtggcgatgcctggtgtccctgcctttctccaaggcatgactgacttcttgcaggcaacacagacagcccctccaccacccccacctcctccacccccaccacctgccccagagcagcagaccatgcccccaccaggctccccttctggtggcgcagggagtcctggaggcctgggtcttgagagcctgtcaccggagttttttacctcagtggtgcagggtgtgctcagctccctgctgggctccctgggggctcgggctggcagcagtgaaagtattgctgccttcatacaacgcctcagtggatccagcaacatctttgagcctggagctgatggggcccttggattctttggggccttgctttctcttctgtgccagaacttctctatggtggacgtagtgatgcttctccatgggcatttccagccactacaacggctccagccccagctgcgatccttcttccaccagcactacctgggtggtcaggagcccacacccagtaacatccggatggcaacccacacattgatcacggggctagaagagtatgtgcgggagagtttttccttggtgcaggttcagccaggtgtggacatcatccggacaaacctggaatttctccaagagcagtttaatagcattgctgcgcatgtgctgcattgcacagatagtggatttggggcccggttgctggagttgtgtaaccaaggcctgtttgaatgcctggccctaaacctgcactgcttggggggacagcagatggagcttgctgctgttatcaatggccgaattcgtcgtatgtctcgtggggtgaatccctccttggtgagctggctgaccactatgatgggactgaggcttcaggtggtactggagcacatgcctgtaggccctgatgccattctcagatacgttcgcagggttggtgatcccccccagccacttcctgaggagccaatggaagttcagggagcagaaagagcttcccctgagcctcagcgggagaatgcttccccagcccctggaacaacagcagaagaggccatgtcccgaggtccacctcctgctcctgaggggggctcccgggatgaacaggatggagcttcagctgagacagaaccttgggcagctgcagtccccccagaatgggtccctattatccagcaggacattcagagccagcggaaggtgaaaccgcagccccctctgagtgatgcctacctcagtggtatgcctgccaagagacgcaagacgatgcagggtgagggcccccagctgcttctctcagaggctgtgagccgggcagctaaggcagccggagctcggcccctgacgagccccgagagcctgagccgggacctggaggcaccagaggttcaggagagctacaggcagcagctccggtctgatatacaaaaacgactgcaggaagaccccaactacagtccccagcgcttccccaatgcccagcgggcctttgctgatgatccttagctctttgctctatggcccttcctcatcaggggaccgtttcccccctcttccttcacagtatttaagaaataaaagtcggatttttctggctgctttctctcta

SEQ ID NO: 232929 - DNA, 3644 bp, Artificial Sequence
  derived and/or modified sequence
ggggaagtcgggggcggagccgcggggtggtgggtgtgtgtgtgtgtgtgtgtgtgtgtgtgtgtgtgtgtgtttggctgtgggttagttgtgccgttctgctggaacaccgtgggaaggcagtagacgcgggcagtcagctagcagagacctgtcggccatggagcctaatgatagtaccagtaccgctgtggaggagcctgacagcttggaggtgttggtgaagaccttggactctcaaactcgtacctttattgtgggggcccagatgaatgtaaaagagtttaaggagcacattgctgcctctgtcagcatcccatctgaaaaacaacggctcatttaccagggacgagttctgcaagatgataagaagcttcaggaatacaatgttgggggaaaggttatccacctggtggaacgggctcctcctcagactcacctcccttctggggcatcttctgggacggggtctgcctcagccactcatggtgggggatccccccctggtactcgggggcctggggcctctgttcatgaccggaatgccaacagctatgtcatggttggaaccttcaatcttcctagtgacggctctgctgtggatgttcacatcaacatggaacaggccccgattcagagtgagccccgggtacggctggtgatggctcagcacatgatcagggatatacagaccttactatcccggatggagtgtcgaggagggccccaaccgcagcacagtcagccgcccccgcagccaccggctgtgaccccggagccagtagccttgagctctcaaacatcagaaccagttgaaagtgaagcacctccccgggagcccatggaggcagaagaagtggaggagcgtgccccagcccagaacccggagctcactcctggcccagccccagcgggcccaacacctgccccggaaacaaatgcacccaaccatccttcccctgcggagtatgtcgaggtgctccaggagctacagcggctggagagtcgcctccagcccttcttgcagcgctactacgaggttctgggtgctgctgccaccacggactacaataacaatcacgagggccgggaggaggatcagcggttgatcaacttggtaggggagagcctgcgactgctgggcaacacctttgttgcactgtctgacctgcgctgcaatctggcctgcacgcccccacgacacctgcatgtggtccggcctatgtctcactacaccacccccatggtgctccagcaggcagccattcccatacagatcaatgtgggaaccactgtgaccatgacaggaaatgggactcggccccccccaactcccaatgcagaggcacctccccctggtcctgggcaggcctcatccgtggctccgtcttctaccaatgtcgagtcctcagctgagggggctcccccgccaggtccagctcccccgccagccaccagccacccgagggtcatccggatttcccaccagagtgtggaacccgtggtcatgatgcacatgaacattcaagattctggcacacagcctggtggtgttccgagtgctcccactggccccctgggaccccctggtcatggccaaaccctgggacagcaggtgccaggcttcccaacagctccaacccgggtggtgattgcccggcccactcctccacaggctcggccttcccatcctggagggcccccagtctctgggacactgcagggcgccggtctgggtaccaatgcctcgttggcccagatggtgagcggccttgtggggcagcttcttatgcagccagtccttgtggctcaggggaccccaggtatggctccaccgccagcccctgccactgcttctgccagtgctggcaccaccaacacagctaccacagctggccccgctcctggggggcctgcccagcctccacccacccctcaaccctccatggctgatcttcagttctctcagcttctggggaacctgctagggcctgcagggccaggggctggagggtctggtgtggcttctcccaccatcactgtggcgatgcctggtgtccctgcctttctccaaggcatgactgacttcttgcaggcaacacagacagcccctccaccacccccacctcctccacccccaccacctgccccagagcagcagaccatgcccccaccaggctccccttctggtggcgcagggagtcctggaggcctgggtcttgagagcctgtcaccggagttttttacctcagtggtgcagggtgtgctcagctccctgctgggctccctgggggctcgggctggcagcagtgaaagtattgctgccttcatacaacgcctcagtggatccagcaacatctttgagcctggagctgatggggcccttggattctttggggccttgctttctcttctgtgccagaacttctctatggtggacgtagtgatgcttctccatgggcatttccagccactacaacggctccagccccagctgcgatccttcttccaccagcactacctgggtggtcaggagcccacacccagtaacatccggatggcaacccacacattgatcacggggctagaagagtatgtgcgggagagtttttccttggtgcaggttcagccaggtgtggacatcatccggacaaacctggaatttctccaagagcagtttaatagcattgctgcgcatgtgctgcattgcacagatagtggatttggggcccggttgctggagttgtgtaaccaaggcctgtttgaatgcctggccctaaacctgcactgcttggggggacagcagatggagcttgctgctgttatcaatggccgaattcgtcgtatgtctcgtggggtgaatccctccttggtgagctggctgaccactatgatgggactgaggcttcaggtggtactggagcacatgcctgtaggccctgatgccattctcagatacgttcgcagggttggtgatcccccccagccacttcctgaggagccaatggaagttcagggagcagaaagagcttcccctgagcctcagcgggagaatgcttccccagcccctggaacaacagcagaagaggccatgtcccgaggtccacctcctgctcctgaggggggctcccgggatgaacaggatggagcttcagctgagacagaaccttgggcagctgcagtccccccagaatgggtccctattatccagcaggacattcagagccagcggaaggtgaaaccgcagccccctctgagtgatgcctacctcagtggtatgcctgccaagagacgcaagacgatgcagggtgagggcccccagctgcttctctcagaggctgtgagccgggcagctaaggcagccggagctcggcccctgacgagccccgagagcctgagccgggacctggaggcaccagaggttcaggagagctacaggcagcagctccggtctgatatacaaaaacgactgcaggaagaccccaactacagtccccagcgcttccccaatgcccagcgggcctttgctgatgatccttagctctttgctctatggcccttcctcatcaggggaccgtttcccccctcttccttcacagtatttaagaaataaaagtcggatttttctggctgctttctctcta

SEQ ID NO: 232930 - DNA, 3656 bp, Artificial Sequence
  derived and/or modified sequence
ggggaagtcgggggcggagccgcggggtggtgggtgggtgggtgtgtgtgtgtgtgtgtgtgtgtgtgtgtgtgtgtgtgtttggctgtgggttagttgtgccgttctgctggaacaccgtgggaaggcagtagacgcgggcagtcagctagcagagacctgtcggccatggagcctaatgatagtaccagtaccgctgtggaggagcctgacagcttggaggtgttggtgaagaccttggactctcaaactcgtacctttattgtgggggcccagatgaatgtaaaagagtttaaggagcacattgctgcctctgtcagcatcccatctgaaaaacaacggctcatttaccagggacgagttctgcaagatgataagaagcttcaggaatacaatgttgggggaaaggttatccacctggtggaacgggctcctcctcagactcacctcccttctggggcatcttctgggacggggtctgcctcagccactcatggtgggggatccccccctggtactcgggggcctggggcctctgttcatgaccggaatgccaacagctatgtcatggttggaaccttcaatcttcctagtgacggctctgctgtggatgttcacatcaacatggaacaggccccgattcagagtgagccccgggtacggctggtgatggctcagcacatgatcagggatatacagaccttactatcccggatggagtgtcgaggagggccccaaccgcagcacagtcagccgcccccgcagccaccggctgtgaccccggagccagtagccttgagctctcaaacatcagaaccagttgaaagtgaagcacctccccgggagcccatggaggcagaagaagtggaggagcgtgccccagcccagaacccggagctcactcctggcccagccccagcgggcccaacacctgccccggaaacaaatgcacccaaccatccttcccctgcggagtatgtcgaggtgctccaggagctacagcggctggagagtcgcctccagcccttcttgcagcgctactacgaggttctgggtgctgctgccaccacggactacaataacaatcacgagggccgggaggaggatcagcggttgatcaacttggtaggggagagcctgcgactgctgggcaacacctttgttgcactgtctgacctgcgctgcaatctggcctgcacgcccccacgacacctgcatgtggtccggcctatgtctcactacaccacccccatggtgctccagcaggcagccattcccatacagatcaatgtgggaaccactgtgaccatgacaggaaatgggactcggccccccccaactcccaatgcagaggcacctccccctggtcctgggcaggcctcatccgtggctccgtcttctaccaatgtcgagtcctcagctgagggggctcccccgccaggtccagctcccccgccagccaccagccacccgagggtcatccggatttcccaccagagtgtggaacccgtggtcatgatgcacatgaacattcaagattctggcacacagcctggtggtgttccgagtgctcccactggccccctgggaccccctggtcatggccaaaccctgggacagcaggtgccaggcttcccaacagctccaacccgggtggtgattgcccggcccactcctccacaggctcggccttcccatcctggagggcccccagtctctgggacactgcagggcgccggtctgggtaccaatgcctcgttggcccagatggtgagcggccttgtggggcagcttcttatgcagccagtccttgtggctcaggggaccccaggtatggctccaccgccagcccctgccactgcttctgccagtgctggcaccaccaacacagctaccacagctggccccgctcctggggggcctgcccagcctccacccacccctcaaccctccatggctgatcttcagttctctcagcttctggggaacctgctagggcctgcagggccaggggctggagggtctggtgtggcttctcccaccatcactgtggcgatgcctggtgtccctgcctttctccaaggcatgactgacttcttgcaggcaacacagacagcccctccaccacccccacctcctccacccccaccacctgccccagagcagcagaccatgcccccaccaggctccccttctggtggcgcagggagtcctggaggcctgggtcttgagagcctgtcaccggagttttttacctcagtggtgcagggtgtgctcagctccctgctgggctccctgggggctcgggctggcagcagtgaaagtattgctgccttcatacaacgcctcagtggatccagcaacatctttgagcctggagctgatggggcccttggattctttggggccttgctttctcttctgtgccagaacttctctatggtggacgtagtgatgcttctccatgggcatttccagccactacaacggctccagccccagctgcgatccttcttccaccagcactacctgggtggtcaggagcccacacccagtaacatccggatggcaacccacacattgatcacggggctagaagagtatgtgcgggagagtttttccttggtgcaggttcagccaggtgtggacatcatccggacaaacctggaatttctccaagagcagtttaatagcattgctgcgcatgtgctgcattgcacagatagtggatttggggcccggttgctggagttgtgtaaccaaggcctgtttgaatgcctggccctaaacctgcactgcttggggggacagcagatggagcttgctgctgttatcaatggccgaattcgtcgtatgtctcgtggggtgaatccctccttggtgagctggctgaccactatgatgggactgaggcttcaggtggtactggagcacatgcctgtaggccctgatgccattctcagatacgttcgcagggttggtgatcccccccagccacttcctgaggagccaatggaagttcagggagcagaaagagcttcccctgagcctcagcgggagaatgcttccccagcccctggaacaacagcagaagaggccatgtcccgaggtccacctcctgctcctgaggggggctcccgggatgaacaggatggagcttcagctgagacagaaccttgggcagctgcagtccccccagaatgggtccctattatccagcaggacattcagagccagcggaaggtgaaaccgcagccccctctgagtgatgcctacctcagtggtatgcctgccaagagacgcaagacgatgcagggtgagggcccccagctgcttctctcagaggctgtgagccgggcagctaaggcagccggagctcggcccctgacgagccccgagagcctgagccgggacctggaggcaccagaggttcaggagagctacaggcagcagctccggtctgatatacaaaaacgactgcaggaagaccccaactacagtccccagcgcttccccaatgcccagcgggcctttgctgatgatccttagctctttctttgctctatggcccttcctcatcaggggaccgtttcccccctcttccttcacagtatttaagaaataaaagtcggatttttctggctgctttctctcta

SEQ ID NO: 232931 - DNA, 3783 bp, Artificial Sequence
  derived and/or modified sequence
gggggtggggcgatgcttaagtgtccacgcatccgtagtgcgacgcacgcaggcgtagtacggtcccccgggcgacagcggtggcggctcctcggggtgctcggctccctcccacctaggccggccccggcccgactcgccctcagaaactcactgtttggggctgcggactttctcgtcgtgccccacaaaagtaaagcttggggacctggggggagccggaagtatcgcttcgagatccccaaatactatcggggaaacggaagtggccgtcggtggcagagacctgtcggccatggagcctaatgatagtaccagtaccgctgtggaggagcctgacagcttggaggtgttggtgaagaccttggactctcaaactcgtacctttattgtgggggcccagatgaatgtaaaagagtttaaggagcacattgctgcctctgtcagcatcccatctgaaaaacaacggctcatttaccagggacgagttctgcaagatgataagaagcttcaggaatacaatgttgggggaaaggttatccacctggtggaacgggctcctcctcagactcacctcccttctggggcatcttctgggacggggtctgcctcagccactcatggtgggggatccccccctggtactcgggggcctggggcctctgttcatgaccggaatgccaacagctatgtcatggttggaaccttcaatcttcctagtgacggctctgctgtggatgttcacatcaacatggaacaggccccgattcagagtgagccccgggtacggctggtgatggctcagcacatgatcagggatatacagaccttactatcccggatggagtgtcgaggagggccccaaccgcagcacagtcagccgcccccgcagccaccggctgtgaccccggagccagtagccttgagctctcaaacatcagaaccagttgaaagtgaagcacctccccgggagcccatggaggcagaagaagtggaggagcgtgccccagcccagaacccggagctcactcctggcccagccccagcgggcccaacacctgccccggaaacaaatgcacccaaccatccttcccctgcggagtatgtcgaggtgctccaggagctacagcggctggagagtcgcctccagcccttcttgcagcgctactacgaggttctgggtgctgctgccaccacggactacaataacaatcacgagggccgggaggaggatcagcggttgatcaacttggtaggggagagcctgcgactgctgggcaacacctttgttgcactgtctgacctgcgctgcaatctggcctgcacgcccccacgacacctgcatgtggtccggcctatgtctcactacaccacccccatggtgctccagcaggcagccattcccatacagatcaatgtgggaaccactgtgaccatgacaggaaatgggactcggccccccccaactcccaatgcagaggcacctccccctggtcctgggcaggcctcatccgtggctccgtcttctaccaatgtcgagtcctcagctgagggggctcccccgccaggtccagctcccccgccagccaccagccacccgagggtcatccggatttcccaccagagtgtggaacccgtggtcatgatgcacatgaacattcaagattctggcacacagcctggtggtgttccgagtgctcccactggccccctgggaccccctggtcatggccaaaccctgggacagcaggtgccaggcttcccaacagctccaacccgggtggtgattgcccggcccactcctccacaggctcggccttcccatcctggagggcccccagtctctgggacactgcagggcgccggtctgggtaccaatgcctcgttggcccagatggtgagcggccttgtggggcagcttcttatgcagccagtccttgtggctcaggggaccccaggtatggctccaccgccagcccctgccactgcttctgccagtgctggcaccaccaacacagctaccacagctggccccgctcctggggggcctgcccagcctccacccacccctcaaccctccatggctgatcttcagttctctcagcttctggggaacctgctagggcctgcagggccaggggctggagggtctggtgtggcttctcccaccatcactgtggcgatgcctggtgtccctgcctttctccaaggcatgactgacttcttgcaggcaacacagacagcccctccaccacccccacctcctccacccccaccacctgccccagagcagcagaccatgcccccaccaggctccccttctggtggcgcagggagtcctggaggcctgggtcttgagagcctgtcaccggagttttttacctcagtggtgcagggtgtgctcagctccctgctgggctccctgggggctcgggctggcagcagtgaaagtattgctgccttcatacaacgcctcagtggatccagcaacatctttgagcctggagctgatggggcccttggattctttggggccttgctttctcttctgtgccagaacttctctatggtggacgtagtgatgcttctccatgggcatttccagccactacaacggctccagccccagctgcgatccttcttccaccagcactacctgggtggtcaggagcccacacccagtaacatccggatggcaacccacacattgatcacggggctagaagagtatgtgcgggagagtttttccttggtgcaggttcagccaggtgtggacatcatccggacaaacctggaatttctccaagagcagtttaatagcattgctgcgcatgtgctgcattgcacagatagtggatttggggcccggttgctggagttgtgtaaccaaggcctgtttgaatgcctggccctaaacctgcactgcttggggggacagcagatggagcttgctgctgttatcaatggccgaattcgtcgtatgtctcgtggggtgaatccctccttggtgagctggctgaccactatgatgggactgaggcttcaggtggtactggagcacatgcctgtaggccctgatgccattctcagatacgttcgcagggttggtgatcccccccagccacttcctgaggagccaatggaagttcagggagcagaaagagcttcccctgagcctcagcgggagaatgcttccccagcccctggaacaacagcagaagaggccatgtcccgaggtccacctcctgctcctgaggggggctcccgggatgaacaggatggagcttcagctgagacagaaccttgggcagctgcagtccccccagaatgggtccctattatccagcaggacattcagagccagcggaaggtgaaaccgcagccccctctgagtgatgcctacctcagtggtatgcctgccaagagacgcaagacgatgcagggtgagggcccccagctgcttctctcagaggctgtgagccgggcagctaaggcagccggagctcggcccctgacgagccccgagagcctgagccgggacctggaggcaccagaggttcaggagagctacaggcagcagctccggtctgatatacaaaaacgactgcaggaagaccccaactacagtccccagcgcttccccaatgcccagcgggcctttgctgatgatccttagctctttctttgctctatggcccttcctcatcaggggaccgtttcccccctcttccttcacagtatttaagaaataaaagtcggatttttctggctgctttctctcta

SEQ ID NO: 232932 - DNA, 3779 bp, Artificial Sequence
  derived and/or modified sequence
gggggtggggcgatgcttaagtgtccacgcatccgtagtgcgacgcacgcaggcgtagtacggtcccccgggcgacagcggtggcggctcctcggggtgctcggctccctcccacctaggccggccccggcccgactcgccctcagaaactcactgtttggggctgcggactttctcgtcgtgccccacaaaagtaaagcttggggacctggggggagccggaagtatcgcttcgagatccccaaatactatcggggaaacggaagtggccgtcggtggcagagacctgtcggccatggagcctaatgatagtaccagtaccgctgtggaggagcctgacagcttggaggtgttggtgaagaccttggactctcaaactcgtacctttattgtgggggcccagatgaatgtaaaagagtttaaggagcacattgctgcctctgtcagcatcccatctgaaaaacaacggctcatttaccagggacgagttctgcaagatgataagaagcttcaggaatacaatgttgggggaaaggttatccacctggtggaacgggctcctcctcagactcacctcccttctggggcatcttctgggacggggtctgcctcagccactcatggtgggggatccccccctggtactcgggggcctggggcctctgttcatgaccggaatgccaacagctatgtcatggttggaaccttcaatcttcctagtgacggctctgctgtggatgttcacatcaacatggaacaggccccgattcagagtgagccccgggtacggctggtgatggctcagcacatgatcagggatatacagaccttactatcccggatggagtgtcgaggagggccccaaccgcagcacagtcagccgcccccgcagccaccggctgtgaccccggagccagtagccttgagctctcaaacatcagaaccagttgaaagtgaagcacctccccgggagcccatggaggcagaagaagtggaggagcgtgccccagcccagaacccggagctcactcctggcccagccccagcgggcccaacacctgccccggaaacaaatgcacccaaccatccttcccctgcggagtatgtcgaggtgctccaggagctacagcggctggagagtcgcctccagcccttcttgcagcgctactacgaggttctgggtgctgctgccaccacggactacaataacaatcacgagggccgggaggaggatcagcggttgatcaacttggtaggggagagcctgcgactgctgggcaacacctttgttgcactgtctgacctgcgctgcaatctggcctgcacgcccccacgacacctgcatgtggtccggcctatgtctcactacaccacccccatggtgctccagcaggcagccattcccatacagatcaatgtgggaaccactgtgaccatgacaggaaatgggactcggccccccccaactcccaatgcagaggcacctccccctggtcctgggcaggcctcatccgtggctccgtcttctaccaatgtcgagtcctcagctgagggggctcccccgccaggtccagctcccccgccagccaccagccacccgagggtcatccggatttcccaccagagtgtggaacccgtggtcatgatgcacatgaacattcaagattctggcacacagcctggtggtgttccgagtgctcccactggccccctgggaccccctggtcatggccaaaccctgggacagcaggtgccaggcttcccaacagctccaacccgggtggtgattgcccggcccactcctccacaggctcggccttcccatcctggagggcccccagtctctgggacactgcagggcgccggtctgggtaccaatgcctcgttggcccagatggtgagcggccttgtggggcagcttcttatgcagccagtccttgtggctcaggggaccccaggtatggctccaccgccagcccctgccactgcttctgccagtgctggcaccaccaacacagctaccacagctggccccgctcctggggggcctgcccagcctccacccacccctcaaccctccatggctgatcttcagttctctcagcttctggggaacctgctagggcctgcagggccaggggctggagggcctggtgtggcttctcccaccatcactgtggcgatgcctggtgtccctgcctttctccaaggcatgactgacttcttgcaggcaacacagacagcccctccaccacccccacctcctccacccccaccacctgccccagagcagcagaccatgcccccaccaggctccccttctggtggcgcagggagtcctggaggcctgggtcttgagagcctgtcaccggagttttttacctcagtggtgcagggtgtgctcagctccctgctgggctccctgggggctcgggctggcagcagtgaaagtattgctgccttcatacaacgcctcagtggatccagcaacatctttgagcctggagctgatggggcccttggattctttggggccttgctttctcttctgtgccagaacttctctatggtggacgtagtgatgcttctccatgggcatttccagccactacaacggctccagccccagctgcgatccttcttccaccagcactacctgggtggtcaggagcccacacccagtaacatccggatggcaacccacacattgatcacggggctagaagagtatgtgcgggagagtttttccttggtgcaggttcagccaggtgtggacatcatccggacaaacctggaatttctccaagagcagtttaatagcattgctgcgcatgtgctgcattgcacagatagtggatttggggcccggttgctggagttgtgtaaccaaggcctgtttgaatgcctggccctaaacctgcactgcttggggggacagcagatggagcttgctgctgttatcaatggccgaattcgtcgtatgtctcgtggggtgaatccctccttggtgagctggctgaccactatgatgggactgaggcttcaggtggtactggagcacatgcctgtaggccctgatgccattctcagatacgttcgcagggttggtgatcccccccagccacttcctgaggagccaatggaagttcagggagcagaaagagcttcccctgagcctcagcgggagaatgcttccccagcccctggaacaacagcagaagaggccatgtcccgaggtccacctcctgctcctgaggggggctcccgggatgaacaggatggagcttcagctgagacagaaccttgggcagctgcagtccccccagaatgggtccctattatccagcaggacattcagagccagcggaaggtgaaaccgcagccccctctgagtgatgcctacctcagtggtatgcctgccaagagacgcaagacgatgcagggtgagggcccccagctgcttctctcagaggctgtgagccgggcagctaaggcagccggagctcggcccctgacgagccccgagagcctgagccgggacctggaggcaccagaggttcaggagagctacaggcagcagctccggtctgatatacaaaaacgactgcaggaagaccccaactacagtccccagcgcttccccaatgcccagcgggcctttgctgatgatccttagctctttgctctatggcccttcctcatcaggggaccgtttcccccctcttccttcacagtatttaagaaataaaagtcggatttttctggctgctttctctcta

SEQ ID NO: 232933 - DNA, 3635 bp, Artificial Sequence
  derived and/or modified sequence
ggagccgcggggtggtgggtgtgtgtgtgtgtgtgtgtgtgtgtgtgtgtgtgtgtgtgtgtgtttggctgtgggttagttgtgccgttctgctggaacaccgtgggaaggcagtagacgcgggcagtcagctagcagagacctgtcggccatggagcctaatgatagtaccagtaccgctgtggaggagcctgacagcttggaggtgttggtgaagaccttggactctcaaactcgtacctttattgtgggggcccagatgaatgtaaaagagtttaaggagcacattgctgcctctgtcagcatcccatctgaaaaacaacggctcatttaccagggacgagttctgcaagatgataagaagcttcaggaatacaatgttgggggaaaggttatccacctggtggaacgggctcctcctcagactcacctcccttctggggcatcttctgggacggggtctgcctcagccactcatggtgggggatccccccctggtactcgggggcctggggcctctgttcatgaccggaatgccaacagctatgtcatggttggaaccttcaatcttcctagtgacggctctgctgtggatgttcacatcaacatggaacaggccccgattcagagtgagccccgggtacggctggtgatggctcagcacatgatcagggatatacagaccttactatcccggatggagtgtcgaggagggccccaaccgcagcacagtcagccgcccccgcagccaccggctgtgaccccggagccagtagccttgagctctcaaacatcagaaccagttgaaagtgaagcacctccccgggagcccatggaggcagaagaagtggaggagcgtgccccagcccagaacccggagctcactcctggcccagccccagcgggcccaacacctgccccggaaacaaatgcacccaaccatccttcccctgcggagtatgtcgaggtgctccaggagctacagcggctggagagtcgcctccagcccttcttgcagcgctactacgaggttctgggtgctgctgccaccacggactacaataacaatcacgagggccgggaggaggatcagcggttgatcaacttggtaggggagagcctgcgactgctgggcaacacctttgttgcactgtctgacctgcgctgcaatctggcctgcacgcccccacgacacctgcatgtggtccggcctatgtctcactacaccacccccatggtgctccagcaggcagccattcccatacagatcaatgtgggaaccactgtgaccatgacaggaaatgggactcggccccccccaactcccaatgcagaggcacctccccctggtcctgggcaggcctcatccgtggctccgtcttctaccaatgtcgagtcctcagctgagggggctcccccgccaggtccagctcccccgccagccaccagccacccgagggtcatccggatttcccaccagagtgtggaacccgtggtcatgatgcacatgaacattcaagattctggcacacagcctggtggtgttccgagtgctcccactggccccctgggaccccctggtcatggccaaaccctgggacagcaggtgccaggcttcccaacagctccaacccgggtggtgattgcccggcccactcctccacaggctcggccttcccatcctggagggcccccagtctctgggacactgcagggcgccggtctgggtaccaatgcctcgttggcccagatggtgagcggccttgtggggcagcttcttatgcagccagtccttgtggctcaggggaccccaggtatggctccaccgccagcccctgccactgcttctgccagtgctggcaccaccaacacagctaccacagctggccccgctcctggggggcctgcccagcctccacccacccctcaaccctccatggctgatcttcagttctctcagcttctggggaacctgctagggcctgcagggccaggggctggagggcctggtgtggcttctcccaccatcactgtggcgatgcctggtgtccctgcctttctccaaggcatgactgacttcttgcaggcaacacagacagcccctccaccacccccacctcctccacccccaccacctgccccagagcagcagaccatgcccccaccaggctccccttctggtggcgcagggagtcctggaggcctgggtcttgagagcctgtcaccggagttttttacctcagtggtgcagggtgtgctcagctccctgctgggctccctgggggctcgggctggcagcagtgaaagtattgctgccttcatacaacgcctcagtggatccagcaacatctttgagcctggagctgatggggcccttggattctttggggccttgctttctcttctgtgccagaacttctctatggtggacgtagtgatgcttctccatgggcatttccagccactacaacggctccagccccagctgcgatccttcttccaccagcactacctgggtggtcaggagcccacacccagtaacatccggatggcaacccacacattgatcacggggctagaagagtatgtgcgggagagtttttccttggtgcaggttcagccaggtgtggacatcatccggacaaacctggaatttctccaagagcagtttaatagcattgctgcgcatgtgctgcattgcacagatagtggatttggggcccggttgctggagttgtgtaaccaaggcctgtttgaatgcctggccctaaacctgcactgcttggggggacagcagatggagcttgctgctgttatcaatggccgaattcgtcgtatgtctcgtggggtgaatccctccttggtgagctggctgaccactatgatgggactgaggcttcaggtggtactggagcacatgcctgtaggccctgatgccattctcagatacgttcgcagggttggtgatcccccccagccacttcctgaggagccaatggaagttcagggagcagaaagagcttcccctgagcctcagcgggagaatgcttccccagcccctggaacaacagcagaagaggccatgtcccgaggtccacctcctgctcctgaggggggctcccgggatgaacaggatggagcttcagctgagacagaaccttgggcagctgcagtccccccagaatgggtccctattatccagcaggacattcagagccagcggaaggtgaaaccgcagccccctctgagtgatgcctacctcagtggtatgcctgccaagagacgcaagacgatgcagggtgagggcccccagctgcttctctcagaggctgtgagccgggcagctaaggcagccggagctcggcccctgacgagccccgagagcctgagccgggacctggaggcaccagaggttcaggagagctacaggcagcagctccggtctgatatacaaaaacgactgcaggaagaccccaactacagtccccagcgcttccccaatgcccagcgggcctttgctgatgatccttagctctttgctctatggcccttcctcatcaggggaccgtttcccccctcttccttcacagtatttaagaaataaaagtcggatttttctggctgctttctctcta

SEQ ID NO: 232934 - DNA, 3644 bp, Artificial Sequence
  derived and/or modified sequence
ggggaagtcgggggcggagccgcggggtggtgggtgtgtgtgtgtgtgtgtgtgtgtgtgtgtgtgtgtgtgtttggctgtgggttagttgtgccgttctgctggaacaccgtgggaaggcagtagacgcgggcagtcagctagcagagacctgtcggccatggagcctaatgatagtaccagtaccgctgtggaggagcctgacagcttggaggtgttggtgaagaccttggactctcaaactcgtacctttattgtgggggcccagatgaatgtaaaagagtttaaggagcacattgctgcctctgtcagcatcccatctgaaaaacaacggctcatttaccagggacgagttctgcaagatgataagaagcttcaggaatacaatgttgggggaaaggttatccacctggtggaacgggctcctcctcagactcacctcccttctggggcatcttctgggacggggtctgcctcagccactcatggtgggggatccccccctggtactcgggggcctggggcctctgttcatgaccggaatgccaacagctatgtcatggttggaaccttcaatcttcctagtgacggctctgctgtggatgttcacatcaacatggaacaggccccgattcagagtgagccccgggtacggctggtgatggctcagcacatgatcagggatatacagaccttactatcccggatggagtgtcgaggagggccccaaccgcagcacagtcagccgcccccgcagccaccggctgtgaccccggagccagtagccttgagctctcaaacatcagaaccagttgaaagtgaagcacctccccgggagcccatggaggcagaagaagtggaggagcgtgccccagcccagaacccggagctcactcctggcccagccccagcgggcccaacacctgccccggaaacaaatgcacccaaccatccttcccctgcggagtatgtcgaggtgctccaggagctacagcggctggagagtcgcctccagcccttcttgcagcgctactacgaggttctgggtgctgctgccaccacggactacaataacaatcacgagggccgggaggaggatcagcggttgatcaacttggtaggggagagcctgcgactgctgggcaacacctttgttgcactgtctgacctgcgctgcaatctggcctgcacgcccccacgacacctgcatgtggtccggcctatgtctcactacaccacccccatggtgctccagcaggcagccattcccatacagatcaatgtgggaaccactgtgaccatgacaggaaatgggactcggccccccccaactcccaatgcagaggcacctccccctggtcctgggcaggcctcatccgtggctccgtcttctaccaatgtcgagtcctcagctgagggggctcccccgccaggtccagctcccccgccagccaccagccacccgagggtcatccggatttcccaccagagtgtggaacccgtggtcatgatgcacatgaacattcaagattctggcacacagcctggtggtgttccgagtgctcccactggccccctgggaccccctggtcatggccaaaccctgggacagcaggtgccaggcttcccaacagctccaacccgggtggtgattgcccggcccactcctccacaggctcggccttcccatcctggagggcccccagtctctgggacactgcagggcgccggtctgggtaccaatgcctcgttggcccagatggtgagcggccttgtggggcagcttcttatgcagccagtccttgtggctcaggggaccccaggtatggctccaccgccagcccctgccactgcttctgccagtgctggcaccaccaacacagctaccacagctggccccgctcctggggggcctgcccagcctccacccacccctcaaccctccatggctgatcttcagttctctcagcttctggggaacctgctagggcctgcagggccaggggctggagggcctggtgtggcttctcccaccatcactgtggcgatgcctggtgtccctgcctttctccaaggcatgactgacttcttgcaggcaacacagacagcccctccaccacccccacctcctccacccccaccacctgccccagagcagcagaccatgcccccaccaggctccccttctggtggcgcagggagtcctggaggcctgggtcttgagagcctgtcaccggagttttttacctcagtggtgcagggtgtgctcagctccctgctgggctccctgggggctcgggctggcagcagtgaaagtattgctgccttcatacaacgcctcagtggatccagcaacatctttgagcctggagctgatggggcccttggattctttggggccttgctttctcttctgtgccagaacttctctatggtggacgtagtgatgcttctccatgggcatttccagccactacaacggctccagccccagctgcgatccttcttccaccagcactacctgggtggtcaggagcccacacccagtaacatccggatggcaacccacacattgatcacggggctagaagagtatgtgcgggagagtttttccttggtgcaggttcagccaggtgtggacatcatccggacaaacctggaatttctccaagagcagtttaatagcattgctgcgcatgtgctgcattgcacagatagtggatttggggcccggttgctggagttgtgtaaccaaggcctgtttgaatgcctggccctaaacctgcactgcttggggggacagcagatggagcttgctgctgttatcaatggccgaattcgtcgtatgtctcgtggggtgaatccctccttggtgagctggctgaccactatgatgggactgaggcttcaggtggtactggagcacatgcctgtaggccctgatgccattctcagatacgttcgcagggttggtgatcccccccagccacttcctgaggagccaatggaagttcagggagcagaaagagcttcccctgagcctcagcgggagaatgcttccccagcccctggaacaacagcagaagaggccatgtcccgaggtccacctcctgctcctgaggggggctcccgggatgaacaggatggagcttcagctgagacagaaccttgggcagctgcagtccccccagaatgggtccctattatccagcaggacattcagagccagcggaaggtgaaaccgcagccccctctgagtgatgcctacctcagtggtatgcctgccaagagacgcaagacgatgcagggtgagggcccccagctgcttctctcagaggctgtgagccgggcagctaaggcagccggagctcggcccctgacgagccccgagagcctgagccgggacctggaggcaccagaggttcaggagagctacaggcagcagctccggtctgatatacaaaaacgactgcaggaagaccccaactacagtccccagcgcttccccaatgcccagcgggcctttgctgatgatccttagctctttgctctatggcccttcctcatcaggggaccgtttcccccctcttccttcacagtatttaagaaataaaagtcggatttttctggctgctttctctcta

SEQ ID NO: 232935 - DNA, 3648 bp, Artificial Sequence
  derived and/or modified sequence
ggggaagtcgggggcggagccgcggggtggtgggtgtgtgtgtgtgtgtgtgtgtgtgtgtgtgtgtgtgtgtgtgtttggctgtgggttagttgtgccgttctgctggaacaccgtgggaaggcagtagacgcgggcagtcagctagcagagacctgtcggccatggagcctaatgatagtaccagtaccgctgtggaggagcctgacagcttggaggtgttggtgaagaccttggactctcaaactcgtacctttattgtgggggcccagatgaatgtaaaagagtttaaggagcacattgctgcctctgtcagcatcccatctgaaaaacaacggctcatttaccagggacgagttctgcaagatgataagaagcttcaggaatacaatgttgggggaaaggttatccacctggtggaacgggctcctcctcagactcacctcccttctggggcatcttctgggacggggtctgcctcagccactcatggtgggggatccccccctggtactcgggggcctggggcctctgttcatgaccggaatgccaacagctatgtcatggttggaaccttcaatcttcctagtgacggctctgctgtggatgttcacatcaacatggaacaggccccgattcagagtgagccccgggtacggctggtgatggctcagcacatgatcagggatatacagaccttactatcccggatggagtgtcgaggagggccccaaccgcagcacagtcagccgcccccgcagccaccggctgtgaccccggagccagtagccttgagctctcaaacatcagaaccagttgaaagtgaagcacctccccgggagcccatggaggcagaagaagtggaggagcgtgccccagcccagaacccggagctcactcctggcccagccccagcgggcccaacacctgccccggaaacaaatgcacccaaccatccttcccctgcggagtatgtcgaggtgctccaggagctacagcggctggagagtcgcctccagcccttcttgcagcgctactacgaggttctgggtgctgctgccaccacggactacaataacaatcacgagggccgggaggaggatcagcggttgatcaacttggtaggggagagcctgcgactgctgggcaacacctttgttgcactgtctgacctgcgctgcaatctggcctgcacgcccccacgacacctgcatgtggtccggcctatgtctcactacaccacccccatggtgctccagcaggcagccattcccatacagatcaatgtgggaaccactgtgaccatgacaggaaatgggactcggccccccccaactcccaatgcagaggcacctccccctggtcctgggcaggcctcatccgtggctccgtcttctaccaatgtcgagtcctcagctgagggggctcccccgccaggtccagctcccccgccagccaccagccacccgagggtcatccggatttcccaccagagtgtggaacccgtggtcatgatgcacatgaacattcaagattctggcacacagcctggtggtgttccgagtgctcccactggccccctgggaccccctggtcatggccaaaccctgggacagcaggtgccaggcttcccaacagctccaacccgggtggtgattgcccggcccactcctccacaggctcggccttcccatcctggagggcccccagtctctgggacactgcagggcgccggtctgggtaccaatgcctcgttggcccagatggtgagcggccttgtggggcagcttcttatgcagccagtccttgtggctcaggggaccccaggtatggctccaccgccagcccctgccactgcttctgccagtgctggcaccaccaacacagctaccacagctggccccgctcctggggggcctgcccagcctccacccacccctcaaccctccatggctgatcttcagttctctcagcttctggggaacctgctagggcctgcagggccaggggctggagggcctggtgtggcttctcccaccatcactgtggcgatgcctggtgtccctgcctttctccaaggcatgactgacttcttgcaggcaacacagacagcccctccaccacccccacctcctccacccccaccacctgccccagagcagcagaccatgcccccaccaggctccccttctggtggcgcagggagtcctggaggcctgggtcttgagagcctgtcaccggagttttttacctcagtggtgcagggtgtgctcagctccctgctgggctccctgggggctcgggctggcagcagtgaaagtattgctgccttcatacaacgcctcagtggatccagcaacatctttgagcctggagctgatggggcccttggattctttggggccttgctttctcttctgtgccagaacttctctatggtggacgtagtgatgcttctccatgggcatttccagccactacaacggctccagccccagctgcgatccttcttccaccagcactacctgggtggtcaggagcccacacccagtaacatccggatggcaacccacacattgatcacggggctagaagagtatgtgcgggagagtttttccttggtgcaggttcagccaggtgtggacatcatccggacaaacctggaatttctccaagagcagtttaatagcattgctgcgcatgtgctgcattgcacagatagtggatttggggcccggttgctggagttgtgtaaccaaggcctgtttgaatgcctggccctaaacctgcactgcttggggggacagcagatggagcttgctgctgttatcaatggccgaattcgtcgtatgtctcgtggggtgaatccctccttggtgagctggctgaccactatgatgggactgaggcttcaggtggtactggagcacatgcctgtaggccctgatgccattctcagatacgttcgcagggttggtgatcccccccagccacttcctgaggagccaatggaagttcagggagcagaaagagcttcccctgagcctcagcgggagaatgcttccccagcccctggaacaacagcagaagaggccatgtcccgaggtccacctcctgctcctgaggggggctcccgggatgaacaggatggagcttcagctgagacagaaccttgggcagctgcagtccccccagaatgggtccctattatccagcaggacattcagagccagcggaaggtgaaaccgcagccccctctgagtgatgcctacctcagtggtatgcctgccaagagacgcaagacgatgcagggtgagggcccccagctgcttctctcagaggctgtgagccgggcagctaaggcagccggagctcggcccctgacgagccccgagagcctgagccgggacctggaggcaccagaggttcaggagagctacaggcagcagctccggtctgatatacaaaaacgactgcaggaagaccccaactacagtccccagcgcttccccaatgcccagcgggcctttgctgatgatccttagctctttgctctatggcccttcctcatcaggggaccgtttcccccctcttccttcacagtatttaagaaataaaagtcggatttttctggctgctttctctcta

SEQ ID NO: 232936 - DNA, 3648 bp, Artificial Sequence
  derived and/or modified sequence
ggggaagtcgggggcggagccgcggggtggtgggtgggtgtgtgtgtgtgtgtgtgtgtgtgtgtgtgtgtgtttggctgtgggttagttgtgccgttctgctggaacaccgtgggaaggcagtagacgcgggcagtcagctagcagagacctgtcggccatggagcctaatgatagtaccagtaccgctgtggaggagcctgacagcttggaggtgttggtgaagaccttggactctcaaactcgtacctttattgtgggggcccagatgaatgtaaaagagtttaaggagcacattgctgcctctgtcagcatcccatctgaaaaacaacggctcatttaccagggacgagttctgcaagatgataagaagcttcaggaatacaatgttgggggaaaggttatccacctggtggaacgggctcctcctcagactcacctcccttctggggcatcttctgggacggggtctgcctcagccactcatggtgggggatccccccctggtactcgggggcctggggcctctgttcatgaccggaatgccaacagctatgtcatggttggaaccttcaatcttcctagtgacggctctgctgtggatgttcacatcaacatggaacaggccccgattcagagtgagccccgggtacggctggtgatggctcagcacatgatcagggatatacagaccttactatcccggatggagtgtcgaggagggccccaaccgcagcacagtcagccgcccccgcagccaccggctgtgaccccggagccagtagccttgagctctcaaacatcagaaccagttgaaagtgaagcacctccccgggagcccatggaggcagaagaagtggaggagcgtgccccagcccagaacccggagctcactcctggcccagccccagcgggcccaacacctgccccggaaacaaatgcacccaaccatccttcccctgcggagtatgtcgaggtgctccaggagctacagcggctggagagtcgcctccagcccttcttgcagcgctactacgaggttctgggtgctgctgccaccacggactacaataacaatcacgagggccgggaggaggatcagcggttgatcaacttggtaggggagagcctgcgactgctgggcaacacctttgttgcactgtctgacctgcgctgcaatctggcctgcacgcccccacgacacctgcatgtggtccggcctatgtctcactacaccacccccatggtgctccagcaggcagccattcccatacagatcaatgtgggaaccactgtgaccatgacaggaaatgggactcggccccccccaactcccaatgcagaggcacctccccctggtcctgggcaggcctcatccgtggctccgtcttctaccaatgtcgagtcctcagctgagggggctcccccgccaggtccagctcccccgccagccaccagccacccgagggtcatccggatttcccaccagagtgtggaacccgtggtcatgatgcacatgaacattcaagattctggcacacagcctggtggtgttccgagtgctcccactggccccctgggaccccctggtcatggccaaaccctgggacagcaggtgccaggcttcccaacagctccaacccgggtggtgattgcccggcccactcctccacaggctcggccttcccatcctggagggcccccagtctctgggacactgcagggcgccggtctgggtaccaatgcctcgttggcccagatggtgagcggccttgtggggcagcttcttatgcagccagtccttgtggctcaggggaccccaggtatggctccaccgccagcccctgccactgcttctgccagtgctggcaccaccaacacagctaccacagctggccccgctcctggggggcctgcccagcctccacccacccctcaaccctccatggctgatcttcagttctctcagcttctggggaacctgctagggcctgcagggccaggggctggagggtctggtgtggcttctcccaccatcactgtggcgatgcctggtgtccctgcctttctccaaggcatgactgacttcttgcaggcaacacagacagcccctccaccacccccacctcctccacccccaccacctgccccagagcagcagaccatgcccccaccaggctccccttctggtggcgcagggagtcctggaggcctgggtcttgagagcctgtcaccggagttttttacctcagtggtgcagggtgtgctcagctccctgctgggctccctgggggctcgggctggcagcagtgaaagtattgctgccttcatacaacgcctcagtggatccagcaacatctttgagcctggagctgatggggcccttggattctttggggccttgctttctcttctgtgccagaacttctctatggtggacgtagtgatgcttctccatgggcatttccagccactacaacggctccagccccagctgcgatccttcttccaccagcactacctgggtggtcaggagcccacacccagtaacatccggatggcaacccacacattgatcacggggctagaagagtatgtgcgggagagtttttccttggtgcaggttcagccaggtgtggacatcatccggacaaacctggaatttctccaagagcagtttaatagcattgctgcgcatgtgctgcattgcacagatagtggatttggggcccggttgctggagttgtgtaaccaaggcctgtttgaatgcctggccctaaacctgcactgcttggggggacagcagatggagcttgctgctgttatcaatggccgaattcgtcgtatgtctcgtggggtgaatccctccttggtgagctggctgaccactatgatgggactgaggcttcaggtggtactggagcacatgcctgtaggccctgatgccattctcagatacgttcgcagggttggtgatcccccccagccacttcctgaggagccaatggaagttcagggagcagaaagagcttcccctgagcctcagcgggagaatgcttccccagcccctggaacaacagcagaagaggccatgtcccgaggtccacctcctgctcctgaggggggctcccgggatgaacaggatggagcttcagctgagacagaaccttgggcagctgcagtccccccagaatgggtccctattatccagcaggacattcagagccagcggaaggtgaaaccgcagccccctctgagtgatgcctacctcagtggtatgcctgccaagagacgcaagacgatgcagggtgagggcccccagctgcttctctcagaggctgtgagccgggcagctaaggcagccggagctcggcccctgacgagccccgagagcctgagccgggacctggaggcaccagaggttcaggagagctacaggcagcagctccggtctgatatacaaaaacgactgcaggaagaccccaactacagtccccagcgcttccccaatgcccagcgggcctttgctgatgatccttagctctttctttgctctatggcccttcctcatcaggggaccgtttcccccctcttccttcacagtatttaagaaataaaagtcggatttttctggctgctttctctcta

SEQ ID NO: 232937 - DNA, 3652 bp, Artificial Sequence
  derived and/or modified sequence
ggggaagtcgggggcggagccgcggggtggtgggtgggtgggtgtgtgtgtgtgtgtgtgtgtgtgtgtgtgtgtgtttggctgtgggttagttgtgccgttctgctggaacaccgtgggaaggcagtagacgcgggcagtcagctagcagagacctgtcggccatggagcctaatgatagtaccagtaccgctgtggaggagcctgacagcttggaggtgttggtgaagaccttggactctcaaactcgtacctttattgtgggggcccagatgaatgtaaaagagtttaaggagcacattgctgcctctgtcagcatcccatctgaaaaacaacggctcatttaccagggacgagttctgcaagatgataagaagcttcaggaatacaatgttgggggaaaggttatccacctggtggaacgggctcctcctcagactcacctcccttctggggcatcttctgggacggggtctgcctcagccactcatggtgggggatccccccctggtactcgggggcctggggcctctgttcatgaccggaatgccaacagctatgtcatggttggaaccttcaatcttcctagtgacggctctgctgtggatgttcacatcaacatggaacaggccccgattcagagtgagccccgggtacggctggtgatggctcagcacatgatcagggatatacagaccttactatcccggatggagtgtcgaggagggccccaaccgcagcacagtcagccgcccccgcagccaccggctgtgaccccggagccagtagccttgagctctcaaacatcagaaccagttgaaagtgaagcacctccccgggagcccatggaggcagaagaagtggaggagcgtgccccagcccagaacccggagctcactcctggcccagccccagcgggcccaacacctgccccggaaacaaatgcacccaaccatccttcccctgcggagtatgtcgaggtgctccaggagctacagcggctggagagtcgcctccagcccttcttgcagcgctactacgaggttctgggtgctgctgccaccacggactacaataacaatcacgagggccgggaggaggatcagcggttgatcaacttggtaggggagagcctgcgactgctgggcaacacctttgttgcactgtctgacctgcgctgcaatctggcctgcacgcccccacgacacctgcatgtggtccggcctatgtctcactacaccacccccatggtgctccagcaggcagccattcccatacagatcaatgtgggaaccactgtgaccatgacaggaaatgggactcggccccccccaactcccaatgcagaggcacctccccctggtcctgggcaggcctcatccgtggctccgtcttctaccaatgtcgagtcctcagctgagggggctcccccgccaggtccagctcccccgccagccaccagccacccgagggtcatccggatttcccaccagagtgtggaacccgtggtcatgatgcacatgaacattcaagattctggcacacagcctggtggtgttccgagtgctcccactggccccctgggaccccctggtcatggccaaaccctgggacagcaggtgccaggcttcccaacagctccaacccgggtggtgattgcccggcccactcctccacaggctcggccttcccatcctggagggcccccagtctctgggacactgcagggcgccggtctgggtaccaatgcctcgttggcccagatggtgagcggccttgtggggcagcttcttatgcagccagtccttgtggctcaggggaccccaggtatggctccaccgccagcccctgccactgcttctgccagtgctggcaccaccaacacagctaccacagctggccccgctcctggggggcctgcccagcctccacccacccctcaaccctccatggctgatcttcagttctctcagcttctggggaacctgctagggcctgcagggccaggggctggagggtctggtgtggcttctcccaccatcactgtggcgatgcctggtgtccctgcctttctccaaggcatgactgacttcttgcaggcaacacagacagcccctccaccacccccacctcctccacccccaccacctgccccagagcagcagaccatgcccccaccaggctccccttctggtggcgcagggagtcctggaggcctgggtcttgagagcctgtcaccggagttttttacctcagtggtgcagggtgtgctcagctccctgctgggctccctgggggctcgggctggcagcagtgaaagtattgctgccttcatacaacgcctcagtggatccagcaacatctttgagcctggagctgatggggcccttggattctttggggccttgctttctcttctgtgccagaacttctctatggtggacgtagtgatgcttctccatgggcatttccagccactacaacggctccagccccagctgcgatccttcttccaccagcactacctgggtggtcaggagcccacacccagtaacatccggatggcaacccacacattgatcacggggctagaagagtatgtgcgggagagtttttccttggtgcaggttcagccaggtgtggacatcatccggacaaacctggaatttctccaagagcagtttaatagcattgctgcgcatgtgctgcattgcacagatagtggatttggggcccggttgctggagttgtgtaaccaaggcctgtttgaatgcctggccctaaacctgcactgcttggggggacagcagatggagcttgctgctgttatcaatggccgaattcgtcgtatgtctcgtggggtgaatccctccttggtgagctggctgaccactatgatgggactgaggcttcaggtggtactggagcacatgcctgtaggccctgatgccattctcagatacgttcgcagggttggtgatcccccccagccacttcctgaggagccaatggaagttcagggagcagaaagagcttcccctgagcctcagcgggagaatgcttccccagcccctggaacaacagcagaagaggccatgtcccgaggtccacctcctgctcctgaggggggctcccgggatgaacaggatggagcttcagctgagacagaaccttgggcagctgcagtccccccagaatgggtccctattatccagcaggacattcagagccagcggaaggtgaaaccgcagccccctctgagtgatgcctacctcagtggtatgcctgccaagagacgcaagacgatgcagggtgagggcccccagctgcttctctcagaggctgtgagccgggcagctaaggcagccggagctcggcccctgacgagccccgagagcctgagccgggacctggaggcaccagaggttcaggagagctacaggcagcagctccggtctgatatacaaaaacgactgcaggaagaccccaactacagtccccagcgcttccccaatgcccagcgggcctttgctgatgatccttagctctttctttgctctatggcccttcctcatcaggggaccgtttcccccctcttccttcacagtatttaagaaataaaagtcggatttttctggctgctttctctcta

SEQ ID NO: 232938 - DNA, 3381 bp, Artificial Sequence
  derived and/or modified sequence
atggagcccaacgacagcaccagcaccgccgtggaggagcccgacagcctggaggtgctggtgaagaccctggacagccagaccagaaccttcatcgtgggcgcccagatgaacgtgaaggagttcaaggagcacatcgccgccagcgtgagcatccccagcgagaagcagagactgatctaccagggcagagtgctgcaggacgacaagaagctgcaggagtacaacgtgggcggcaaggtgatccacctggtggagagagcccccccccagacccacctgcccagcggcgccagcagcggcaccggcagcgccagcgccacccacggcggcggcagcccccccggcaccagaggccccggcgccagcgtgcacgacagaaacgccaacagctacgtgatggtgggcaccttcaacctgcccagcgacggcagcgccgtggacgtgcacatcaacatggagcaggcccccatccagagcgagcccagagtgagactggtgatggcccagcacatgatcagagacatccagaccctgctgagcagaatggagtgcagaggcggcccccagccccagcacagccagccccccccccagccccccgccgtgacccccgagcccgtggccctgagcagccagaccagcgagcccgtggagagcgaggccccccccagagagcccatggaggccgaggaggtggaggagagagcccccgcccagaaccccgagctgacccccggccccgcccccgccggccccacccccgcccccgagaccaacgcccccaaccaccccagccccgccgagtacgtggaggtgctgcaggagctgcagagactggagagcagactgcagcccttcctgcagagatactacgaggtgctgggcgccgccgccaccaccgactacaacaacaaccacgagggcagagaggaggaccagagactgatcaacctggtgggcgagagcctgagactgctgggcaacaccttcgtggccctgagcgacctgagatgcaacctggcctgcaccccccccagacacctgcacgtggtgagacccatgagccactacaccacccccatggtgctgcagcaggccgccatccccatccagatcaacgtgggcaccaccgtgaccatgaccggcaacggcaccagacccccccccacccccaacgccgaggcccccccccccggccccggccaggccagcagcgtggcccccagcagcaccaacgtggagagcagcgccgagggcgcccccccccccggccccgcccccccccccgccaccagccaccccagagtgatcagaatcagccaccagagcgtggagcccgtggtgatgatgcacatgaacatccaggacagcggcacccagcccggcggcgtgcccagcgcccccaccggccccctgggcccccccggccacggccagaccctgggccagcaggtgcccggcttccccaccgcccccaccagagtggtgatcgccagacccacccccccccaggccagacccagccaccccggcggcccccccgtgagcggcaccctgcagggcgccggcctgggcaccaacgccagcctggcccagatggtgagcggcctggtgggccagctgctgatgcagcccgtgctggtggcccagggcacccccggcatggcccccccccccgcccccgccaccgccagcgccagcgccggcaccaccaacaccgccaccaccgccggccccgcccccggcggccccgcccagcccccccccaccccccagcccagcatggccgacctgcagttcagccagctgctgggcaacctgctgggccccgccggccccggcgccggcggcagcggcgtggccagccccaccatcaccgtggccatgcccggcgtgcccgccttcctgcagggcatgaccgacttcctgcaggccacccagaccgccccccccccccccccccccccccccccccccccccccgcccccgagcagcagaccatgcccccccccggcagccccagcggcggcgccggcagccccggcggcctgggcctggagagcctgagccccgagttcttcaccagcgtggtgcagggcgtgctgagcagcctgctgggcagcctgggcgccagagccggcagcagcgagagcatcgccgccttcatccagagactgagcggcagcagcaacatcttcgagcccggcgccgacggcgccctgggcttcttcggcgccctgctgagcctgctgtgccagaacttcagcatggtggacgtggtgatgctgctgcacggccacttccagcccctgcagagactgcagccccagctgagaagcttcttccaccagcactacctgggcggccaggagcccacccccagcaacatcagaatggccacccacaccctgatcaccggcctggaggagtacgtgagagagagcttcagcctggtgcaggtgcagcccggcgtggacatcatcagaaccaacctggagttcctgcaggagcagttcaacagcatcgccgcccacgtgctgcactgcaccgacagcggcttcggcgccagactgctggagctgtgcaaccagggcctgttcgagtgcctggccctgaacctgcactgcctgggcggccagcagatggagctggccgccgtgatcaacggcagaatcagaagaatgagcagaggcgtgaaccccagcctggtgagctggctgaccaccatgatgggcctgagactgcaggtggtgctggagcacatgcccgtgggccccgacgccatcctgagatacgtgagaagagtgggcgaccccccccagcccctgcccgaggagcccatggaggtgcagggcgccgagagagccagccccgagccccagagagagaacgccagccccgcccccggcaccaccgccgaggaggccatgagcagaggccccccccccgcccccgagggcggcagcagagacgagcaggacggcgccagcgccgagaccgagccctgggccgccgccgtgccccccgagtgggtgcccatcatccagcaggacatccagagccagagaaaggtgaagccccagccccccctgagcgacgcctacctgagcggcatgcccgccaagagaagaaagaccatgcagggcgagggcccccagctgctgctgagcgaggccgtgagcagagccgccaaggccgccggcgccagacccctgaccagccccgagagcctgagcagagacctggaggcccccgaggtgcaggagagctacagacagcagctgagaagcgacatccagaagagactgcaggaggaccccaactacagcccccagagattccccaacgcccagagagccttcgccgacgacccctag

SEQ ID NO: 232939 - DNA, 3381 bp, Artificial Sequence
  derived and/or modified sequence
atggagcccaacgacagcaccagcaccgccgtggaggagcccgacagcctggaggtgctggtgaagaccctggacagccagaccagaaccttcatcgtgggcgcccagatgaacgtgaaggagttcaaggagcacatcgccgccagcgtgagcatccccagcgagaagcagagactgatctaccagggcagagtgctgcaggacgacaagaagctgcaggagtacaacgtgggcggcaaggtgatccacctggtggagagagcccccccccagacccacctgcccagcggcgccagcagcggcaccggcagcgccagcgccacccacggcggcggcagcccccccggcaccagaggccccggcgccagcgtgcacgacagaaacgccaacagctacgtgatggtgggcaccttcaacctgcccagcgacggcagcgccgtggacgtgcacatcaacatggagcaggcccccatccagagcgagcccagagtgagactggtgatggcccagcacatgatcagagacatccagaccctgctgagcagaatggagtgcagaggcggcccccagccccagcacagccagccccccccccagccccccgccgtgacccccgagcccgtggccctgagcagccagaccagcgagcccgtggagagcgaggccccccccagagagcccatggaggccgaggaggtggaggagagagcccccgcccagaaccccgagctgacccccggccccgcccccgccggccccacccccgcccccgagaccaacgcccccaaccaccccagccccgccgagtacgtggaggtgctgcaggagctgcagagactggagagcagactgcagcccttcctgcagagatactacgaggtgctgggcgccgccgccaccaccgactacaacaacaaccacgagggcagagaggaggaccagagactgatcaacctggtgggcgagagcctgagactgctgggcaacaccttcgtggccctgagcgacctgagatgcaacctggcctgcaccccccccagacacctgcacgtggtgagacccatgagccactacaccacccccatggtgctgcagcaggccgccatccccatccagatcaacgtgggcaccaccgtgaccatgaccggcaacggcaccagacccccccccacccccaacgccgaggcccccccccccggccccggccaggccagcagcgtggcccccagcagcaccaacgtggagagcagcgccgagggcgcccccccccccggccccgcccccccccccgccaccagccaccccagagtgatcagaatcagccaccagagcgtggagcccgtggtgatgatgcacatgaacatccaggacagcggcacccagcccggcggcgtgcccagcgcccccaccggccccctgggcccccccggccacggccagaccctgggccagcaggtgcccggcttccccaccgcccccaccagagtggtgatcgccagacccacccccccccaggccagacccagccaccccggcggcccccccgtgagcggcaccctgcagggcgccggcctgggcaccaacgccagcctggcccagatggtgagcggcctggtgggccagctgctgatgcagcccgtgctggtggcccagggcacccccggcatggcccccccccccgcccccgccaccgccagcgccagcgccggcaccaccaacaccgccaccaccgccggccccgcccccggcggccccgcccagcccccccccaccccccagcccagcatggccgacctgcagttcagccagctgctgggcaacctgctgggccccgccggccccggcgccggcggccccggcgtggccagccccaccatcaccgtggccatgcccggcgtgcccgccttcctgcagggcatgaccgacttcctgcaggccacccagaccgccccccccccccccccccccccccccccccccccccccgcccccgagcagcagaccatgcccccccccggcagccccagcggcggcgccggcagccccggcggcctgggcctggagagcctgagccccgagttcttcaccagcgtggtgcagggcgtgctgagcagcctgctgggcagcctgggcgccagagccggcagcagcgagagcatcgccgccttcatccagagactgagcggcagcagcaacatcttcgagcccggcgccgacggcgccctgggcttcttcggcgccctgctgagcctgctgtgccagaacttcagcatggtggacgtggtgatgctgctgcacggccacttccagcccctgcagagactgcagccccagctgagaagcttcttccaccagcactacctgggcggccaggagcccacccccagcaacatcagaatggccacccacaccctgatcaccggcctggaggagtacgtgagagagagcttcagcctggtgcaggtgcagcccggcgtggacatcatcagaaccaacctggagttcctgcaggagcagttcaacagcatcgccgcccacgtgctgcactgcaccgacagcggcttcggcgccagactgctggagctgtgcaaccagggcctgttcgagtgcctggccctgaacctgcactgcctgggcggccagcagatggagctggccgccgtgatcaacggcagaatcagaagaatgagcagaggcgtgaaccccagcctggtgagctggctgaccaccatgatgggcctgagactgcaggtggtgctggagcacatgcccgtgggccccgacgccatcctgagatacgtgagaagagtgggcgaccccccccagcccctgcccgaggagcccatggaggtgcagggcgccgagagagccagccccgagccccagagagagaacgccagccccgcccccggcaccaccgccgaggaggccatgagcagaggccccccccccgcccccgagggcggcagcagagacgagcaggacggcgccagcgccgagaccgagccctgggccgccgccgtgccccccgagtgggtgcccatcatccagcaggacatccagagccagagaaaggtgaagccccagccccccctgagcgacgcctacctgagcggcatgcccgccaagagaagaaagaccatgcagggcgagggcccccagctgctgctgagcgaggccgtgagcagagccgccaaggccgccggcgccagacccctgaccagccccgagagcctgagcagagacctggaggcccccgaggtgcaggagagctacagacagcagctgagaagcgacatccagaagagactgcaggaggaccccaactacagcccccagagattccccaacgcccagagagccttcgccgacgacccctag

SEQ ID NO: 232940 - protein, 839 aa, Artificial Sequence [sequence omitted]

SEQ ID NO: 232941 - protein, 837 aa, Artificial Sequence
  derived and/or modified sequence
METLTPGHLQPSPSSPRPRAAPGSLGRVTRRRLSRWIALTRKVSWTPARPSQSALLSPSRGQETAPPVPGCCPRTLSPPAPRRPSGSMIAGVSLKPLLRITARIWRACCSSCRRARSTSQTTSSKVAPALGSGRAPALACPDPPLCLSDPETGKTCLLKAMLNLHDGQNTTIPLLLEIARQTDSLKELVNASYTDSYYKGQTALHIAIERRNMALVTLLVENGADVQAAAHGDFFKKTKGRPGFYFGELPLSLAACTNQLGIVKFLLQNSWQTADISARDSVGNTVLHALVEVADNTADNTKFVTSMYNEILMLGAKLHPTLKLEELTNKKGMTPLALAAGTGKIGVLAYILQREIQEPECRHLSRKFTEWAYGPVHSSLYDLSCIDTCEKNSVLEVIAYSSSETPNRHDMLLVEPLNRLLQDKWDRFVKRIFYFNFLVYCLYMIIFTMAAYYRPVDGLPPFKMEKTGDYFRVTGEILSVLGGVYFFFRGIQYFLQRRPSMKTLFVDSYSEMLFFLQSLFMLATVVLYFSHLKEYVASMVFSLALGWTNMLYYTRGFQQMGIYAVMIEKMILRDLCRFMFVYIVFLFGFSTAVVTLIEDGKNDSLPSESTSHRWRGPACRPPDSSYNSLYSTCLELFKFTIGMGDLEFTENYDFKAVFIILLLAYVILTYILLLNMLIALMGETVNKIAQESKNIWKLQRAITILDTEKSFLKCMRKAFRSGKLLQVGYTPDGKDDYRWCFRVDEVNWTTWNTNVGIINEDPGNCEGVKRTLSFSLRSSRVSGRHWKNFALVPLLREASARDRQSAQPEEVYLRQFSGSLKPEDAEVFKSPAASGEK

SEQ ID NO: 232942 - protein, 779 aa, Artificial Sequence
  derived and/or modified sequence
MKKWSSTDLGAAADPLQKDTCPDPLDGDPNSRPPPAKPQLSTAKSRTRLFGKGDSEEAFPVDCPHEEGELDSCPTITVSPVITIQRPGDGPTGARLLSQDSVAASTEKTLRLYDRRSIFEAVAQNNCQDLESLLLFLQKSKKHLTDNEFKDPETGKTCLLKAMLNLHDGQNTTIPLLLEIARQTDSLKELVNASYTDSYYKGQTALHIAIERRNMALVTLLVENGADVQAAAHGDFFKKTKGRPGFYFGELPLSLAACTNQLGIVKFLLQNSWQTADISARDSVGNTVLHALVEVADNTADNTKFVTSMYNEILMLGAKLHPTLKLEELTNKKGMTPLALAAGTGKIGNRHDMLLVEPLNRLLQDKWDRFVKRIFYFNFLVYCLYMIIFTMAAYYRPVDGLPPFKMEKTGDYFRVTGEILSVLGGVYFFFRGIQYFLQRRPSMKTLFVDSYSEMLFFLQSLFMLATVVLYFSHLKEYVASMVFSLALGWTNMLYYTRGFQQMGIYAVMIEKMILRDLCRFMFVYIVFLFGFSTAVVTLIEDGKNDSLPSESTSHRWRGPACRPPDSSYNSLYSTCLELFKFTIGMGDLEFTENYDFKAVFIILLLAYVILTYILLLNMLIALMGETVNKIAQESKNIWKLQRAITILDTEKSFLKCMRKAFRSGKLLQVGYTPDGKDDYRWCFRVDEVNWTTWNTNVGIINEDPGNCEGVKRTLSFSLRSSRVSGRHWKNFALVPLLREASARDRQSAQPEEVYLRQFSGSLKPEDAEVFKSPAASGEK

SEQ ID NO: 232943 - protein, 850 aa, Artificial Sequence
  derived and/or modified sequence
MKKWSSTDLGAAADPLQKDTCPDPLDGDPNSRPPPAKPQLSTAKSRTRLFGKGDSEEAFPVDCPHEEGELDSCPTITVSPVITIQRPGDGPTGARLLSQDSVAASTEKTLRLYDRRSIFEAVAQNNCQDLESLLLFLQKSKKHLTDNEFKDPETGKTCLLKAMLNLHDGQNTTIPLLLEIARQTDSLKELVNASYTDSYYKGQTALHIAIERRNMALVTLLVENGADVQAAAHGDFFKKTKGRPGFYFGELPLSLAACTNQLGIVKFLLQNSWQTADISARDSVGNTVLHALVEVADNTADNTKFVTSMYNEILMLGAKLHPTLKLEELTNKKGMTPLALAAGTGKIGVIENGPPLSFMVLAYILQREIQEPECRHLSRKFTEWAYGPVHSSLYDLSCIDTCEKNSVLEVIAYSSSETPNRHDMLLVEPLNRLLQDKWDRFVKRIFYFNFLVYCLYMIIFTMAAYYRPVDGLPPFKMEKTGDYFRVTGEILSVLGGVYFFFRGIQYFLQRRPSMKTLFVDSYSEMLFFLQSLFMLATVVLYFSHLKEYVASMVFSLALGWTNMLYYTRGFQQMGIYAVMIEKMILRDLCRFMFVYIVFLFGFSTAVVTLIEDGKNDSLPSESTSHRWRGPACRPPDSSYNSLYSTCLELFKFTIGMGDLEFTENYDFKAVFIILLLAYVILTYILLLNMLIALMGETVNKIAQESKNIWKLQRAITILDTEKSFLKCMRKAFRSGKLLQVGYTPDGKDDYRWCFRVDEVNWTTWNTNVGIINEDPGNCEGVKRTLSFSLRSSRVSGRHWKNFALVPLLREASARDRQSAQPEEVYLRQFSGSLKPEDAEVFKSPAASGEK

SEQ ID NO: 232944 - DNA, 2520 bp, Artificial Sequence
  derived and/or modified sequence
atgaagaagtggagcagcaccgacctgggcgccgccgccgaccccctgcagaaggacacctgccccgaccccctggacggcgaccccaacagcagacccccccccgccaagccccagctgagcaccgccaagagcagaaccagactgttcggcaagggcgacagcgaggaggccttccccgtggactgcccccacgaggagggcgagctggacagctgccccaccatcaccgtgagccccgtgatcaccatccagagacccggcgacggccccaccggcgccagactgctgagccaggacagcgtggccgccagcaccgagaagaccctgagactgtacgacagaagaagcatcttcgaggccgtggcccagaacaactgccaggacctggagagcctgctgctgttcctgcagaagagcaagaagcacctgaccgacaacgagttcaaggaccccgagaccggcaagacctgcctgctgaaggccatgctgaacctgcacgacggccagaacaccaccatccccctgctgctggagatcgccagacagaccgacagcctgaaggagctggtgaacgccagctacaccgacagctactacaagggccagaccgccctgcacatcgccatcgagagaagaaacatggccctggtgaccctgctggtggagaacggcgccgacgtgcaggccgccgcccacggcgacttcttcaagaagaccaagggcagacccggcttctacttcggcgagctgcccctgagcctggccgcctgcaccaaccagctgggcatcgtgaagttcctgctgcagaacagctggcagaccgccgacatcagcgccagagacagcgtgggcaacaccgtgctgcacgccctggtggaggtggccgacaacaccgccgacaacaccaagttcgtgaccagcatgtacaacgagatcctgatgctgggcgccaagctgcaccccaccctgaagctggaggagctgaccaacaagaagggcatgacccccctggccctggccgccggcaccggcaagatcggcgtgctggcctacatcctgcagagagagatccaggagcccgagtgcagacacctgagcagaaagttcaccgagtgggcctacggccccgtgcacagcagcctgtacgacctgagctgcatcgacacctgcgagaagaacagcgtgctggaggtgatcgcctacagcagcagcgagacccccaacagacacgacatgctgctggtggagcccctgaacagactgctgcaggacaagtgggacagattcgtgaagagaatcttctacttcaacttcctggtgtactgcctgtacatgatcatcttcaccatggccgcctactacagacccgtggacggcctgccccccttcaagatggagaagaccggcgactacttcagagtgaccggcgagatcctgagcgtgctgggcggcgtgtacttcttcttcagaggcatccagtacttcctgcagagaagacccagcatgaagaccctgttcgtggacagctacagcgagatgctgttcttcctgcagagcctgttcatgctggccaccgtggtgctgtacttcagccacctgaaggagtacgtggccagcatggtgttcagcctggccctgggctggaccaacatgctgtactacaccagaggcttccagcagatgggcatctacgccgtgatgatcgagaagatgatcctgagagacctgtgcagattcatgttcgtgtacatcgtgttcctgttcggcttcagcaccgccgtggtgaccctgatcgaggacggcaagaacgacagcctgcccagcgagagcaccagccacagatggagaggccccgcctgcagaccccccgacagcagctacaacagcctgtacagcacctgcctggagctgttcaagttcaccatcggcatgggcgacctggagttcaccgagaactacgacttcaaggccgtgttcatcatcctgctgctggcctacgtgatcctgacctacatcctgctgctgaacatgctgatcgccctgatgggcgagaccgtgaacaagatcgcccaggagagcaagaacatctggaagctgcagagagccatcaccatcctggacaccgagaagagcttcctgaagtgcatgagaaaggccttcagaagcggcaagctgctgcaggtgggctacacccccgacggcaaggacgactacagatggtgcttcagagtggacgaggtgaactggaccacctggaacaccaacgtgggcatcatcaacgaggaccccggcaactgcgagggcgtgaagagaaccctgagcttcagcctgagaagcagcagagtgagcggcagacactggaagaacttcgccctggtgcccctgctgagagaggccagcgccagagacagacagagcgcccagcccgaggaggtgtacctgagacagttcagcggcagcctgaagcccgaggacgccgaggtgttcaagagccccgccgccagcggcgagaagtag

SEQ ID NO: 232945 - DNA, 2520 bp, Artificial Sequence
  derived and/or modified sequence
atgaaaaagtggagctctactgacctgggagcagccgctgatccccttcagaaggatacatgccccgatcccttagatggagatcccaacagccggcccccccccgctaagccgcagctctccacggctaaaagtcgcactagactgtttggcaagggggactcagaagaggcttttcccgtcgattgcccgcacgaagagggggagttggattcatgtcccaccattacagtatcccccgtgatcaccattcaacgaccaggcgatggacctaccggggccagactcctgtctcaggattccgttgctgcttcaaccgagaagactcttcgactgtatgaccggagatcaatctttgaagcagtggcccagaataactgccaggacttagagtcactcctgctatttctccagaaaagcaagaagcatctgactgacaacgaattcaaggatcccgaaacagggaaaacttgcctcctaaaggcaatgctgaacctgcacgatggtcaaaacaccaccatcccactgttgctggaaatagcaaggcagacagattctctgaaagagttagtgaacgcgtcctatactgattcttattacaagggccaaaccgccctccacattgcaattgaacgcaggaatatggcactcgtgactctgctggttgagaacggggcagacgtgcaagcagccgctcacggggatttttttaaaaaaaccaaaggtcgtcccgggttttacttcggtgaattacctctgagcctcgctgcctgcactaatcaacttggaatagtcaagttcctcctgcagaacagctggcagacagccgatataagcgcacgggacagcgtagggaacacagtcctgcatgccctcgtagaagttgcagacaacacagctgacaatactaaattcgtgactagcatgtacaacgagatcctcatgcttggggcgaagctgcacccaacgcttaagttggaggaattgaccaacaagaagggcatgacgcctctggctctggctgccgggacggggaaaattggcgtcctggcctatatcctgcagagagagattcaagaacctgaatgccggcatctgtctcgtaagttcacagaatgggcttacggtcctgtccattcctctctctatgatctgagttgtatcgacacctgcgaaaaaaattcagtactagaggtgatcgcctattcgtccagcgaaaccccaaatagacatgatatgctgctggtagagccgctcaaccgcctgttgcaagataagtgggataggttcgtgaaacgcatcttctattttaacttccttgtgtactgcctctatatgatcatctttactatggctgcctactaccgcccagtggatggattaccccccttcaaaatggaaaaaacgggagattacttccgcgtgacgggagaaatcctttcagtcttgggaggtgtatatttcttctttagaggcatccagtatttcctccaacgcaggccttctatgaagaccctgttcgtggacagctattccgagatgttattcttccttcagtcactgtttatgctggccaccgtggtcttatacttctctcatctgaaagaatacgtggcaagtatggtcttcagcttggcccttggctggactaacatgctgtactacacccgaggcttccagcagatgggcatatatgcagttatgatcgagaaaatgatccttcgtgatctttgccggttcatgttcgtttatattgtgttcttgtttggattcagtacagctgttgtcacactcattgaggatggtaagaacgacagcctcccttcggaatccaccagtcacaggtggcgaggtcccgcctgcaggccaccggattcatcgtataacagcttatacagtacctgcttagagctcttcaaattcaccattgggatgggcgatctcgaatttactgagaattatgatttcaaggccgtctttatcattctgctattggcatatgtgatactgacatacatcctgctcttgaatatgctgattgctctgatgggggagaccgttaataagattgcgcaagaatctaaaaatatctggaagcttcagcgtgcaatcaccatactggacacggaaaagtctttcctgaagtgtatgcggaaggcgttcagaagcggtaaactgttacaggtcggatatacaccagatggcaaggacgattaccggtggtgttttagggtggatgaagttaactggacaacttggaacacaaatgtgggcattattaatgaagatcccggtaattgtgagggcgtgaagcggactctgtcattttctctccgatctagtcgcgtgagcgggcgacactggaagaacttcgccctggtgcccttgttgcgggaggcctctgctagggatcgccaaagcgcccagcctgaggaggtgtatctccgacagttctctggttccttaaaaccagaagatgcagaggtttttaaaagccccgccgctagtggagagaaatag

SEQ ID NO: 232946 - DNA, 2520 bp, Artificial Sequence
  derived and/or modified sequence
atgaagaagtggagcagcacagacctgggcgctgctgctgaccccctgcagaaggacacctgcccagaccccctggatggagaccccaacagcaggcctcctccagccaagccccagctgagcacagccaagagcaggacccggctgtttgggaagggggacagcgaggaggccttccctgtggactgcccccatgaggagggggagctggacagctgccccaccatcaccgtgtcccctgtgatcaccatccagaggcctggagatggccccaccggggcccggctgctgagccaggacagcgtggccgccagcacagagaagaccctgcggctgtatgacagaagaagcatctttgaagctgtggcccagaacaactgccaggacctggagagcctgctgctcttcctgcagaagagcaagaagcacctgacagacaatgagttcaaggaccctgagaccgggaagacctgcctgctgaaggccatgctgaacctgcatgatggccagaacaccaccatccccctgctgctggagatcgcccggcagacagacagcctgaaggagctggtgaatgccagctacacagacagctactacaagggccagacagccctgcacatcgccatcgagaggaggaacatggccctggtgaccctgctggtggagaatggagcagatgtgcaggccgccgcccatggagacttcttcaagaagaccaagggccggcccggcttctactttggagagctgcccctgagcctggccgcctgcaccaaccagctgggcatcgtgaagttcctgctgcagaacagctggcagacagctgacatcagcgcccgggacagcgtgggcaacacagtgctgcacgccctggtggaggtggccgacaacacagctgacaacaccaagtttgtgacctccatgtacaatgagatcctgatgctgggcgccaagctgcaccccaccctgaagctggaggagctgaccaacaagaagggcatgacccccctggccctggccgccggcaccgggaagattggagtgctggcctacatcctgcagcgggagatccaggagcctgagtgccgccacctgagcaggaagttcacagagtgggcctacggccctgtgcacagcagcctgtatgacctgagctgcatcgacacctgtgagaagaacagcgtgctggaggtgattgcctacagcagcagcgagacccccaacagacatgacatgctgctggtggagcccctgaaccggctgctgcaggacaagtgggacagatttgtgaagaggatcttctacttcaacttcctggtgtactgcctgtacatgatcatcttcaccatggccgcctactacagacctgtggatggcctgccccccttcaagatggagaagacaggagactacttccgggtgactggagagatcctgtctgtgctgggcggcgtgtacttcttcttccggggcatccagtacttcctgcagaggcggcccagcatgaagaccctgtttgtggacagctacagcgagatgctgttcttcctgcagagcctcttcatgctggccaccgtggtgctgtacttcagccacctgaaggagtatgtggcctccatggtgttcagcctggccctgggctggaccaacatgctgtactacacccggggcttccagcagatgggcatctatgctgtgatgattgagaagatgatcctgcgggacctgtgccgcttcatgtttgtgtacatcgtgttcctgtttggcttcagcacagctgtggtgaccctgattgaagatggcaagaatgacagcctgcccagcgagagcaccagccaccgctggaggggccctgcctgccggcccccagacagcagctacaacagcctgtacagcacctgcctggagctgttcaagttcaccatcggcatgggagacctggagttcacagagaactatgacttcaaggctgtgttcatcatcctgctgctggcctacgtgatcctgacctacatcctgctgctgaacatgctgattgccctgatgggagagaccgtgaacaagatcgcccaggagagcaagaacatctggaagctgcagagggccatcaccatcctggacacagagaagagcttcctgaagtgcatgaggaaggccttccgcagcggcaagctgctgcaggtgggctacaccccagatggcaaggatgactaccgctggtgcttccgggtggatgaggtgaactggaccacctggaacaccaacgtgggcatcatcaatgaagaccccggcaactgtgaaggagtgaagaggaccctgtccttcagcctgcggagcagccgggtgtctggccgccactggaagaactttgccctggtgcccctgctgcgggaggccagcgcccgggaccggcagagcgcccagcctgaggaggtgtacctgcggcagttcagcggcagcctgaagccagaagatgctgaggtgttcaagagccctgctgccagcggggagaagtag

SEQ ID NO: 232947 - DNA, 2520 bp, Artificial Sequence
  derived and/or modified sequence
atgaagaagtggagcagcaccgacctgggcgccgccgccgaccccctgcagaaagacacttgcccagaccccttagacggagaccccaacagtcggccccctccagcaaaaccccagctgtccacagccaagtcccggactcgcctgttcggtaaaggggactcggaagaagctttccctgtagactgtccccacgaggaaggggaactggattcctgtcctaccatcacggtatcccccgtgattactatccagcgtccaggcgatggccctacaggtgccaggctcctgtctcaggattcagtggctgcctctactgaaaagacgttgaggctttacgatcgccgcagcatcttcgaagctgtcgcgcagaacaattgtcaggatctggagtctttgctactgtttctgcagaaaagcaaaaagcatctcacagataacgaattcaaagatcccgagacagggaaaacatgcctactcaaagccatgttgaacctacacgatggccaaaataccacgatcccgttgcttttagagatcgctcgtcagactgattcccttaaggaactagtaaacgctagttacacagacagctattacaaagggcagacagcattgcatatagctattgaaagaagaaatatggcactggtgaccctgttagtggagaacggagccgacgtgcaggccgccgcacacggcgatttctttaaaaagacaaaaggaaggcctggtttctattttggagaacttccgctgtcactggcagcatgcacaaatcagctcggtatagtcaaattcctgctccagaacagctggcaaaccgccgatatatcagcaagggacagcgtgggtaataccgtattgcacgctctggtcgaggttgccgataatacagcagataatacaaaattcgtgaccagtatgtataatgagatcttgatgttaggggcaaaactgcatcccactttgaagctagaagagctgacaaacaagaagggaatgacacctctggccctcgcagcggggacaggcaaaattggggtgttggcctacatcctacagcgggaaatacaagagcctgaatgtcgtcacttatcccgaaagtttaccgagtgggcctacggccccgttcacagttctctctacgacctgagctgcatcgacacctgcgagaagaatagtgtacttgaggtcattgcctactcttcaagtgagacgcctaacagacatgacatgctgctggtggaacccctgaatcgactgttgcaggacaaatgggatcggttcgtaaagcgcatattctactttaactttctggtttactgtttgtatatgattatcttcaccatggccgcatattatcggccggtggatgggctgccaccgttcaagatggaaaaaaccggagattactttcgtgtgaccggcgagatcttaagtgtcttgggaggtgtgtactttttctttagggggattcagtacttcttgcaaagaagaccttccatgaagacactcttcgtggactcctactccgaaatgctgttctttctgcaatccctgttcatgctcgcaacagtcgtactctatttcagccacttgaaagaatacgtggcttcaatggtgttcagcttggctttggggtggactaacatgctgtactacacgagaggatttcagcaaatgggcatttacgctgtgatgatcgagaagatgattttgcgggacctatgtcgattcatgtttgtgtacatcgtgtttctttttggcttctcaaccgctgtcgtcactctgatagaggacggaaaaaatgattcattacctagtgagagtacttcccaccgctggcgcggccccgcctgccgacctcccgattccagctacaactctctttactctacctgcctcgaactcttcaagttcaccattggaatgggcgacctagaatttacagaaaactacgacttcaaagcagtgtttataatcctgctgctcgcctatgtgatattgacatatatacttttattgaatatgctgatcgcactcatgggcgagactgtgaacaagatcgcccaggaaagcaaaaacatctggaaactccaacgcgctattacgatcctcgacactgagaagtccttcctcaaatgcatgaggaaagcttttcgcagcgggaaactgctccaggtgggctacactcctgatgggaaggacgactacagatggtgttttcgagttgacgaggtgaactggaccacctggaatactaatgtagggatcattaatgaggatcccggcaattgtgagggcgtcaagcggactcttagttttagcctccgatcaagccgagtgtctggccgacactggaaaaattttgcgctcgtgcctctcctgcgcgaagccagtgctagagatcggcagtccgcccagccggaagaagtgtacttaagacagttcagcgggtcattaaaacctgaggacgcggaagtttttaaaagccctgcagcctccggcgagaagtag

SEQ ID NO: 232948 - DNA, 2520 bp, Artificial Sequence
  derived and/or modified sequence
atgaagaaatggtcttctacagacttgggggctgctgccgatccgttgcagaaggatacgtgcccggatcccctggacggcgatcctaactcgaggcccccaccggcaaaacctcagctgtctaccgctaagtcacgcaccaggctctttggcaaaggcgactctgaggaggctttcccagtcgactgtccacacgaggagggcgaactcgactcctgcccaaccattaccgtaagcccggtaataactatacaacgacccggagacggcccaacgggtgctagactcttatcacaggacagcgtagccgcttcaaccgagaagacgttacgtctctatgatcggcgttcgatctttgaggcagtggcgcaaaacaactgccaggatctggagtcccttctcctgttcctacagaagtctaaaaaacacctaactgacaatgagttcaaagaccctgagaccggaaagacctgtctgctgaaggcgatgctcaacctgcacgatggccaaaatacaacaattcctcttctgctggagatcgcgcgtcaaaccgatagtctgaaggaactggtcaacgcgagttacaccgactcgtactacaagggccagacggctttgcatatagccatagaaaggagaaacatggctttggtgactctgctggtggaaaacggggcagacgtccaagcagcagctcacggcgatttttttaaaaaaacaaaagggcgtccgggattctattttggtgagctgcctctgagcttggcagcttgtacaaatcagctcggtattgtcaagtttttgcttcaaaactcctggcaaactgcagacatatcggccagggactctgtcggcaacactgtgcttcacgcactcgtggaggtggctgacaacacggcagataatacaaagttcgtgaccagcatgtataatgagatccttatgctgggtgccaaactgcatcccaccctgaaactggaagaactcacaaacaaaaaggggatgacaccattggcgcttgctgcaggcactggaaagatcggcgtgctggcatatatccttcagagggagatacaggaaccagaatgccgtcatctgtcccgaaaatttactgaatgggcatacggcccagtgcatagttccctctacgatttgagctgtatcgacacctgcgaaaaaaattcagtgttggaagtgattgcctactcttccagcgaaacacctaatcgccacgatatgctgttggtcgaaccactgaaccgcctcttgcaggacaagtgggataggttcgtcaagcggatattctactttaattttcttgtgtactgcctgtacatgatcattttcacaatggccgcttattatcgacctgtggatggcctgccacctttcaagatggaaaaaaccggagactacttcagggtgacgggagaaatcttgagcgttcttggcggtgtatatttcttctttcggggtattcagtattttcttcagcgcagaccatcaatgaagactttatttgtggattcctatagtgaaatgttatttttcctgcaatccctatttatgctggccactgttgtgctgtacttcagtcacctcaaagagtacgtggcatctatggtctttagtctggctttggggtggacgaacatgctgtactacacacggggattccagcagatgggcatttacgctgtgatgatagagaagatgatcttgagagatttatgccgcttcatgtttgtgtacatcgtcttcctctttgggttttctaccgctgttgttacgttgatcgaggacggcaagaatgatagcctgccgtccgagtctacaagccaccgatggcggggacctgcgtgtcgaccccctgactccagttataattccctctactcaacctgtttggagctgtttaaattcaccatcggcatgggcgacctggagtttaccgaaaactacgattttaaagctgtttttatcatcctcctactggcctacgtcatcctcacctatatcttactgctaaacatgttgattgctctgatgggagaaactgtgaataagatagcccaggaatccaaaaatatctggaaactccaacgagcaattaccatccttgataccgaaaagtccttcctaaagtgtatgcggaaggcctttcgaagcggaaagctgctgcaggtaggctacactcccgacgggaaggatgattaccgctggtgctttcgggtggacgaggtcaactggactacctggaatacaaatgtcgggatcataaacgaagaccccggaaattgtgagggcgttaaaagaacactcagtttctcattgagaagtagcagggtgtcgggccgacactggaagaatttcgccctagtgcccctattgagagaagccagtgctcgggacaggcagagcgcacaaccagaggaggtgtacctgcggcagttttctgggtccctaaaaccagaggacgccgaagtctttaagtcacctgctgcgtccggcgagaaatag

SEQ ID NO: 232949 - DNA, 4166 bp, Artificial Sequence
  derived and/or modified sequence
ggctcaggcaggcctggcccagagtcacgctggcaaccacgagtttgggaagcagtcgtattctctctctctctctctctctctctctcagtatccatgacagtgtgatggagagtctctgccgtgccatctgggatgcaaaccgtccctgtgttccccacgtccaggccgtagatgctccccgccggtcagtcacttagtcgtcagatcgcccgtcctggtatcacagtgcttctgttcaggttgcacactgggccacagaggatccagcaaggatgaagaaatggagcagcacagacttgggggcagctgcggacccactccaaaaggacacctgcccagaccccctggatggagaccctaactccaggccacctccagccaagccccagctctccacggccaagagccgcacccggctctttgggaagggtgactcggaggaggctttcccggtggattgccctcacgaggaaggtgagctggactcctgcccgaccatcacagtcagccctgttatcaccatccagaggccaggagacggccccaccggtgccaggctgctgtcccaggactctgtcgccgccagcaccgagaagaccctcaggctctatgatcgcaggagtatctttgaagccgttgctcagaataactgccaggatctggagagcctgctgctcttcctgcagaagagcaagaagcacctcacagacaacgagttcaaagaccctgagacagggaagacctgtctgctgaaagccatgctcaacctgcacgacggacagaacaccaccatccccctgctcctggagatcgcgcggcaaacggacagcctgaaggagcttgtcaacgccagctacacggacagctactacaagggccagacagcactgcacatcgccatcgagagacgcaacatggccctggtgaccctcctggtggagaacggagcagacgtccaggctgcggcccatggggacttctttaagaaaaccaaagggcggcctggattctacttcggtgaactgcccctgtccctggccgcgtgcaccaaccagctgggcatcgtgaagttcctgctgcagaactcctggcagacggccgacatcagcgccagggactcggtgggcaacacggtgctgcacgccctggtggaggtggccgacaacacggccgacaacacgaagtttgtgacgagcatgtacaatgagattctgatgctgggggccaaactgcacccgacgctgaagctggaggagctcaccaacaagaagggaatgacgccgctggctctggcagctgggaccgggaagatcggggtcttggcctatattctccagcgggagatccaggagcccgagtgcaggcacctgtccaggaagttcaccgagtgggcctacgggcccgtgcactcctcgctgtacgacctgtcctgcatcgacacctgcgagaagaactcggtgctggaggtgatcgcctacagcagcagcgagacccctaatcgccacgacatgctcttggtggagccgctgaaccgactcctgcaggacaagtgggacagattcgtcaagcgcatcttctacttcaacttcctggtctactgcctgtacatgatcatcttcaccatggctgcctactacaggcccgtggatggcttgcctccctttaagatggaaaaaactggagactatttccgagttactggagagatcctgtctgtgttaggaggagtctacttctttttccgagggattcagtatttcctgcagaggcggccgtcgatgaagaccctgtttgtggacagctacagtgagatgcttttctttctgcagtcactgttcatgctggccaccgtggtgctgtacttcagccacctcaaggagtatgtggcttccatggtattctccctggccttgggctggaccaacatgctctactacacccgcggtttccagcagatgggcatctatgccgtcatgatagagaagatgatcctgagagacctgtgccgtttcatgtttgtctacatcgtcttcttgttcgggttttccacagcggtggtgacgctgattgaagacgggaagaatgactccctgccgtctgagtccacgtcgcacaggtggcgggggcctgcctgcaggccccccgatagctcctacaacagcctgtactccacctgcctggagctgttcaagttcaccatcggcatgggcgacctggagttcactgagaactatgacttcaaggctgtcttcatcatcctgctgctggcctatgtaattctcacctacatcctcctgctcaacatgctcatcgccctcatgggtgagactgtcaacaagatcgcacaggagagcaagaacatctggaagctgcagagagccatcaccatcctggacacggagaagagcttccttaagtgcatgaggaaggccttccgctcaggcaagctgctgcaggtggggtacacacctgatggcaaggacgactaccggtggtgcttcagggtggacgaggtgaactggaccacctggaacaccaacgtgggcatcatcaacgaagacccgggcaactgtgagggcgtcaagcgcaccctgagcttctccctgcggtcaagcagagtttcaggcagacactggaagaactttgccctggtcccccttttaagagaggcaagtgctcgagataggcagtctgctcagcccgaggaagtttatctgcgacagttttcagggtctctgaagccagaggacgctgaggtcttcaagagtcctgccgcttccggggagaagtgaggacgtcacgcagacagcactgtcaacactgggccttaggagaccccgttgccacggggggctgctgagggaacaccagtgctctgtcagcagcctggcctggtctgtgcctgcccagcatgttcccaaatctgtgctggacaagctgtgggaagcgttcttggaagcatggggagtgatgtacatccaaccgtcactgtccccaagtgaatctcctaacagactttcaggtttttactcactttactaaacagtttggatggtcagtctctactgggacatgttaggcccttgttttctttgattttattcttttttttgagacagaatttcactcttctcacccaggctggaatgcagtggcacaattttggctccctgcaacctccgcctcctggattccagcaattctcctgcctcggcttcccaagtagctgggattacaggcacgtgccaccatgtctggctaattttttgtatttttttaatagatatggggtttcgccatgttggccaggctggtctcgaactcctgacctcaggtgatccgcccacctcggcctcccaaagtgctgggattacaggtgtgagcctccacacctggctgttttctttgattttattctttttttttttttctgtgagacagagtttcactcttgttgcccaggctggagtgcagtggtgtgatcttggctcactgcaacttctgcctcccgggttcaagcgattcttctgcttcagtctcccaagtagcttggattacaggtgagcactaccacgcccggctaatttttgtatttttaatagagacggggtttcaccatgttggccaggctggtctcgaactcttgacctcaggtgatctgcccgccttggcctcccaaagtgctgggattacaggtgtgagccgctgcgctcggccttctttgattttatattattaggagcaaaagtaaatgaagcccaggaaaacacctttgggaacaaactcttcctttgatggaaaatgcagaggcccttcctctctgtgccgtgcttgctcctcttacctgcccgggtggtttgggggtgttggtgtttcctccctggagaagatgggggaggctgtcccactcccagctctggcagaatcaagctgttgcagcagtgccttcttcatccttccttacgatcaatcacagtctccagaagatcagctcaattgctgtgcaggttaaaactacagaaccacatcccaaaggtacctggtaagaatgtttgaaagatcttccatttctaggaaccccagtcctgcttctccgcaatggcacatgcttccactccatccatactggcatcctcaaataaacagatatgtatacatatata

SEQ ID NO: 232950 - DNA, 2514 bp, Artificial Sequence
  derived and/or modified sequence
atggagaccctgacccccggccacctgcagcccagccccagcagccccagacccagagccgcccccggcagcctgggcagagtgaccagaagaagactgagcagatggatcgccctgaccagaaaggtgagctggacccccgccagacccagccagagcgccctgctgagccccagcagaggccaggagaccgccccccccgtgcccggctgctgccccagaaccctgagcccccccgcccccagaagacccagcggcagcatgatcgccggcgtgagcctgaagcccctgctgagaatcaccgccagaatctggagagcctgctgcagcagctgcagaagagccagaagcaccagccagaccaccagcagcaaggtggcccccgccctgggcagcggcagagcccccgccctggcctgccccgacccccccctgtgcctgagcgaccccgagaccggcaagacctgcctgctgaaggccatgctgaacctgcacgacggccagaacaccaccatccccctgctgctggagatcgccagacagaccgacagcctgaaggagctggtgaacgccagctacaccgacagctactacaagggccagaccgccctgcacatcgccatcgagagaagaaacatggccctggtgaccctgctggtggagaacggcgccgacgtgcaggccgccgcccacggcgacttcttcaagaagaccaagggcagacccggcttctacttcggcgagctgcccctgagcctggccgcctgcaccaaccagctgggcatcgtgaagttcctgctgcagaacagctggcagaccgccgacatcagcgccagagacagcgtgggcaacaccgtgctgcacgccctggtggaggtggccgacaacaccgccgacaacaccaagttcgtgaccagcatgtacaacgagatcctgatgctgggcgccaagctgcaccccaccctgaagctggaggagctgaccaacaagaagggcatgacccccctggccctggccgccggcaccggcaagatcggcgtgctggcctacatcctgcagagagagatccaggagcccgagtgcagacacctgagcagaaagttcaccgagtgggcctacggccccgtgcacagcagcctgtacgacctgagctgcatcgacacctgcgagaagaacagcgtgctggaggtgatcgcctacagcagcagcgagacccccaacagacacgacatgctgctggtggagcccctgaacagactgctgcaggacaagtgggacagattcgtgaagagaatcttctacttcaacttcctggtgtactgcctgtacatgatcatcttcaccatggccgcctactacagacccgtggacggcctgccccccttcaagatggagaagaccggcgactacttcagagtgaccggcgagatcctgagcgtgctgggcggcgtgtacttcttcttcagaggcatccagtacttcctgcagagaagacccagcatgaagaccctgttcgtggacagctacagcgagatgctgttcttcctgcagagcctgttcatgctggccaccgtggtgctgtacttcagccacctgaaggagtacgtggccagcatggtgttcagcctggccctgggctggaccaacatgctgtactacaccagaggcttccagcagatgggcatctacgccgtgatgatcgagaagatgatcctgagagacctgtgcagattcatgttcgtgtacatcgtgttcctgttcggcttcagcaccgccgtggtgaccctgatcgaggacggcaagaacgacagcctgcccagcgagagcaccagccacagatggagaggccccgcctgcagaccccccgacagcagctacaacagcctgtacagcacctgcctggagctgttcaagttcaccatcggcatgggcgacctggagttcaccgagaactacgacttcaaggccgtgttcatcatcctgctgctggcctacgtgatcctgacctacatcctgctgctgaacatgctgatcgccctgatgggcgagaccgtgaacaagatcgcccaggagagcaagaacatctggaagctgcagagagccatcaccatcctggacaccgagaagagcttcctgaagtgcatgagaaaggccttcagaagcggcaagctgctgcaggtgggctacacccccgacggcaaggacgactacagatggtgcttcagagtggacgaggtgaactggaccacctggaacaccaacgtgggcatcatcaacgaggaccccggcaactgcgagggcgtgaagagaaccctgagcttcagcctgagaagcagcagagtgagcggcagacactggaagaacttcgccctggtgcccctgctgagagaggccagcgccagagacagacagagcgcccagcccgaggaggtgtacctgagacagttcagcggcagcctgaagcccgaggacgccgaggtgttcaagagccccgccgccagcggcgagaagtag

SEQ ID NO: 232951 - DNA, 2340 bp, Artificial Sequence
  derived and/or modified sequence
atgaagaagtggagcagcaccgacctgggcgccgccgccgaccccctgcagaaggacacctgccccgaccccctggacggcgaccccaacagcagacccccccccgccaagccccagctgagcaccgccaagagcagaaccagactgttcggcaagggcgacagcgaggaggccttccccgtggactgcccccacgaggagggcgagctggacagctgccccaccatcaccgtgagccccgtgatcaccatccagagacccggcgacggccccaccggcgccagactgctgagccaggacagcgtggccgccagcaccgagaagaccctgagactgtacgacagaagaagcatcttcgaggccgtggcccagaacaactgccaggacctggagagcctgctgctgttcctgcagaagagcaagaagcacctgaccgacaacgagttcaaggaccccgagaccggcaagacctgcctgctgaaggccatgctgaacctgcacgacggccagaacaccaccatccccctgctgctggagatcgccagacagaccgacagcctgaaggagctggtgaacgccagctacaccgacagctactacaagggccagaccgccctgcacatcgccatcgagagaagaaacatggccctggtgaccctgctggtggagaacggcgccgacgtgcaggccgccgcccacggcgacttcttcaagaagaccaagggcagacccggcttctacttcggcgagctgcccctgagcctggccgcctgcaccaaccagctgggcatcgtgaagttcctgctgcagaacagctggcagaccgccgacatcagcgccagagacagcgtgggcaacaccgtgctgcacgccctggtggaggtggccgacaacaccgccgacaacaccaagttcgtgaccagcatgtacaacgagatcctgatgctgggcgccaagctgcaccccaccctgaagctggaggagctgaccaacaagaagggcatgacccccctggccctggccgccggcaccggcaagatcggcaacagacacgacatgctgctggtggagcccctgaacagactgctgcaggacaagtgggacagattcgtgaagagaatcttctacttcaacttcctggtgtactgcctgtacatgatcatcttcaccatggccgcctactacagacccgtggacggcctgccccccttcaagatggagaagaccggcgactacttcagagtgaccggcgagatcctgagcgtgctgggcggcgtgtacttcttcttcagaggcatccagtacttcctgcagagaagacccagcatgaagaccctgttcgtggacagctacagcgagatgctgttcttcctgcagagcctgttcatgctggccaccgtggtgctgtacttcagccacctgaaggagtacgtggccagcatggtgttcagcctggccctgggctggaccaacatgctgtactacaccagaggcttccagcagatgggcatctacgccgtgatgatcgagaagatgatcctgagagacctgtgcagattcatgttcgtgtacatcgtgttcctgttcggcttcagcaccgccgtggtgaccctgatcgaggacggcaagaacgacagcctgcccagcgagagcaccagccacagatggagaggccccgcctgcagaccccccgacagcagctacaacagcctgtacagcacctgcctggagctgttcaagttcaccatcggcatgggcgacctggagttcaccgagaactacgacttcaaggccgtgttcatcatcctgctgctggcctacgtgatcctgacctacatcctgctgctgaacatgctgatcgccctgatgggcgagaccgtgaacaagatcgcccaggagagcaagaacatctggaagctgcagagagccatcaccatcctggacaccgagaagagcttcctgaagtgcatgagaaaggccttcagaagcggcaagctgctgcaggtgggctacacccccgacggcaaggacgactacagatggtgcttcagagtggacgaggtgaactggaccacctggaacaccaacgtgggcatcatcaacgaggaccccggcaactgcgagggcgtgaagagaaccctgagcttcagcctgagaagcagcagagtgagcggcagacactggaagaacttcgccctggtgcccctgctgagagaggccagcgccagagacagacagagcgcccagcccgaggaggtgtacctgagacagttcagcggcagcctgaagcccgaggacgccgaggtgttcaagagccccgccgccagcggcgagaagtag

SEQ ID NO: 232952 - DNA, 2553 bp, Artificial Sequence
  derived and/or modified sequence
atgaagaagtggagcagcaccgacctgggcgccgccgccgaccccctgcagaaggacacctgccccgaccccctggacggcgaccccaacagcagacccccccccgccaagccccagctgagcaccgccaagagcagaaccagactgttcggcaagggcgacagcgaggaggccttccccgtggactgcccccacgaggagggcgagctggacagctgccccaccatcaccgtgagccccgtgatcaccatccagagacccggcgacggccccaccggcgccagactgctgagccaggacagcgtggccgccagcaccgagaagaccctgagactgtacgacagaagaagcatcttcgaggccgtggcccagaacaactgccaggacctggagagcctgctgctgttcctgcagaagagcaagaagcacctgaccgacaacgagttcaaggaccccgagaccggcaagacctgcctgctgaaggccatgctgaacctgcacgacggccagaacaccaccatccccctgctgctggagatcgccagacagaccgacagcctgaaggagctggtgaacgccagctacaccgacagctactacaagggccagaccgccctgcacatcgccatcgagagaagaaacatggccctggtgaccctgctggtggagaacggcgccgacgtgcaggccgccgcccacggcgacttcttcaagaagaccaagggcagacccggcttctacttcggcgagctgcccctgagcctggccgcctgcaccaaccagctgggcatcgtgaagttcctgctgcagaacagctggcagaccgccgacatcagcgccagagacagcgtgggcaacaccgtgctgcacgccctggtggaggtggccgacaacaccgccgacaacaccaagttcgtgaccagcatgtacaacgagatcctgatgctgggcgccaagctgcaccccaccctgaagctggaggagctgaccaacaagaagggcatgacccccctggccctggccgccggcaccggcaagatcggcgtgatcgagaacggcccccccctgagcttcatggtgctggcctacatcctgcagagagagatccaggagcccgagtgcagacacctgagcagaaagttcaccgagtgggcctacggccccgtgcacagcagcctgtacgacctgagctgcatcgacacctgcgagaagaacagcgtgctggaggtgatcgcctacagcagcagcgagacccccaacagacacgacatgctgctggtggagcccctgaacagactgctgcaggacaagtgggacagattcgtgaagagaatcttctacttcaacttcctggtgtactgcctgtacatgatcatcttcaccatggccgcctactacagacccgtggacggcctgccccccttcaagatggagaagaccggcgactacttcagagtgaccggcgagatcctgagcgtgctgggcggcgtgtacttcttcttcagaggcatccagtacttcctgcagagaagacccagcatgaagaccctgttcgtggacagctacagcgagatgctgttcttcctgcagagcctgttcatgctggccaccgtggtgctgtacttcagccacctgaaggagtacgtggccagcatggtgttcagcctggccctgggctggaccaacatgctgtactacaccagaggcttccagcagatgggcatctacgccgtgatgatcgagaagatgatcctgagagacctgtgcagattcatgttcgtgtacatcgtgttcctgttcggcttcagcaccgccgtggtgaccctgatcgaggacggcaagaacgacagcctgcccagcgagagcaccagccacagatggagaggccccgcctgcagaccccccgacagcagctacaacagcctgtacagcacctgcctggagctgttcaagttcaccatcggcatgggcgacctggagttcaccgagaactacgacttcaaggccgtgttcatcatcctgctgctggcctacgtgatcctgacctacatcctgctgctgaacatgctgatcgccctgatgggcgagaccgtgaacaagatcgcccaggagagcaagaacatctggaagctgcagagagccatcaccatcctggacaccgagaagagcttcctgaagtgcatgagaaaggccttcagaagcggcaagctgctgcaggtgggctacacccccgacggcaaggacgactacagatggtgcttcagagtggacgaggtgaactggaccacctggaacaccaacgtgggcatcatcaacgaggaccccggcaactgcgagggcgtgaagagaaccctgagcttcagcctgagaagcagcagagtgagcggcagacactggaagaacttcgccctggtgcccctgctgagagaggccagcgccagagacagacagagcgcccagcccgaggaggtgtacctgagacagttcagcggcagcctgaagcccgaggacgccgaggtgttcaagagccccgccgccagcggcgagaagtag

SEQ ID NO: 232953 - DNA, 2520 bp, Artificial Sequence
  derived and/or modified sequence
atgaagaaatggagctcaacggacctgggcgccgctgccgacccgttgcagaaagacacatgtcctgatcctctggatggagatcctaactctagacctccccccgccaaaccacagttgagtacggccaagtcccggactaggttgtttggtaaaggcgatagcgaggaggcttttccagtggactgtccgcacgaggagggcgaacttgactcttgccccaccattacagtcagcccagtcattaccatccagagacccggggatggtcccaccggagctaggttattgagccaggatagcgtggccgcttccactgagaaaaccctccgtttgtacgaccgacggagcatcttcgaggctgtcgcacaaaataactgtcaagacctggagtctctgctgctgtttctccagaagtcgaaaaagcacctgacagacaacgaatttaaagaccctgaaacaggcaagacatgtcttttaaaggccatgctgaacctccatgacgggcaaaacaccaccatccctctgcttctggagattgctaggcagactgattcactgaaggagctggtcaacgcttcctataccgatagctattacaagggccaaaccgccctgcacattgccatcgaacggcggaacatggctctggtgaccctcctcgtggaaaacggggcagatgtgcaggctgcagcacatggcgatttctttaagaagacaaagggccgtccgggattttatttcggcgagctcccccttagcctcgctgcatgtaccaaccagctcggcatcgtgaagttcctgcttcagaactcctggcagaccgcagacattagtgcacgggactccgtcggaaacactgtcctgcacgctctcgttgaagtcgcggataacactgctgacaatacgaagttcgtgacatccatgtacaatgagattctcatgctcggggccaaacttcaccccaccctaaagctggaggagctcaccaataaaaaaggtatgacaccccttgctctggctgcaggaactggaaagatcggggtgttggcatatatcctccaacgggagatccaggagccagaatgtcgtcacctgtcacggaaattcaccgagtgggcctacggacctgtgcactccagcctttatgacctttcttgtattgacacatgtgaaaagaactctgtgctggaggtcatcgcatacagttcttccgagaccccaaaccgtcacgatatgctgttagtagagccattaaacagactcctgcaggacaagtgggataggtttgtgaaaagaattttttattttaatttcctggtctactgcctgtatatgatcatattcacgatggcggcatactacaggcccgttgatggtctgcccccattcaagatggaaaaaactggtgactattttagagtcacgggcgagatactatctgtgctcggtggcgtttatttctttttccggggtatacagtatttcctgcagagacgccctagcatgaagaccctgttcgtggactcctactcagagatgctctttttcctgcagtcattatttatgctggctactgtggtcctctacttctcacatttgaaggaatacgtggctagcatggtattctccttggccctgggatggacgaacatgttatattatacccgcggctttcaacagatgggtatttacgccgtcatgatcgagaagatgatcttgagggatctttgtcgattcatgttcgtgtacattgtgtttctattcggtttctcgaccgctgtagttacgctcatagaggacggaaagaatgactcccttcctagcgaatcaacctctcaccgctggcgggggcctgcctgccggcccccagactctagttataattcactgtactctacatgcttggaactgttcaagttcaccattggaatgggtgaccttgagttcacggagaactatgacttcaaagcagtgttcattatcttgctgttggcatacgttatcctcacctacatactgcttttgaacatgcttatcgctttaatgggagagacagtcaataagattgcccaagaaagcaaaaacatatggaagttgcagcgtgcgattacaatactcgataccgaaaaatcctttctgaagtgtatgcgtaaagcctttcggtcgggcaaacttctgcaagtggggtatacgcccgacggcaaggatgactacagatggtgtttcagggttgacgaggtgaactggaccacctggaatacaaacgttggtattattaatgaggaccccggcaactgcgagggggttaagcgcactctgagctttagcttgcggagcagtagagttagtggtagacactggaagaattttgcacttgtgcccttgttgagggaggccagtgcgagagatagacagtcagcgcaaccggaggaagtctacctaagacaattcagcggcagcctcaagcctgaggacgctgaggttttcaaatcccctgcggcctctggcgagaagtag

SEQ ID NO: 232954 - DNA, 2514 bp, Artificial Sequence
  derived and/or modified sequence
atggagactctgacccccggtcacctacagccttcccccagttctcccagacctagggcggcccctggcagtttagggcgagtcacgcggcgacgcctatctaggtggattgctctgacccggaaagtctcctggacacccgcacgcccctcccagtctgccctcctgtccccttctagagggcaggaaacagcccctcctgtccccggctgctgccctcggaccctgtccccacctgctccacgtcgcccatcaggatcaatgatcgcgggcgtcagccttaaaccactgttgcgaattacagcccgcatatggagggcctgctgctcctcatgccggagggccaggagcactagtcagacaactagttccaaggtggcccccgccttaggaagtggcagggcccccgcccttgcatgcccagatccacctttgtgcctgtcggaccctgagacagggaagacctgcctcttaaaagctatgctcaacctgcatgatggacagaataccacaatccctctgctgctcgagatcgctaggcagacggacagcctcaaggaactcgtcaacgcaagctacaccgattcctattacaagggtcagactgccctccacattgcaatagagaggcgaaatatggcactggttacgctgctcgtggagaacggagcggacgtccaggctgctgcacacggagacttctttaagaagaccaagggacgccccggcttttacttcggcgagctccccctgagcctcgctgcctgcaccaatcaactgggtattgtgaagtttctgctgcaaaatagctggcaaacggccgacatctccgcacgggactctgtaggcaacaccgtattgcatgcactggtggaagtagcagacaatactgccgataacactaagtttgtgactagcatgtataacgagatcctgatgctcggggccaaactccaccctactcttaaactcgaggaactaactaacaaaaagggcatgactcctctcgccctggccgccggcactggcaaaattggcgttttagcatatatcttgcaacgagaaattcaggaacctgagtgtcggcatctgtcacggaaatttaccgaatgggcctacggccctgttcactcctctttatatgacctgtcttgtatcgatacctgtgagaaaaattcggtgctagaggttatcgcctactcttcttctgagactccaaatcgacacgacatgcttcttgtggagcccttgaaccggctactgcaggataaatgggatcggttcgtcaagaggattttctacttcaacttcctggtttattgtctctatatgattatcttcacaatggctgcctactatcggcccgtggacggccttcccccgttcaaaatggaaaaaaccggcgattacttccgggtgaccggggagattctgtctgtcctgggaggtgtatactttttcttccggggaatccagtattttctgcagcgccggcccagtatgaaaaccctctttgtcgattcatactctgagatgcttttttttctgcaatcgttattcatgcttgccacagtggtgctttacttctcacacctgaaagaatacgtggcgtctatggtgttctccctggccctcggatggaccaacatgctgtactacacccgcggctttcagcagatggggatctacgccgttatgatcgaaaagatgattctgagggatctgtgccgctttatgttcgtctacattgtttttctgtttggattttccacggcggtggtgactttgatagaggatggcaagaacgatagtctccctagcgagagcacttcccacaggtggaggggtccggcatgtaggccaccagatagtagctataacagcctctatagcacttgtttggaactgtttaagtttacaataggtatgggggacctggaatttacggagaactacgatttcaaagctgtgtttattatcctgcttttagcttatgtaatacttacatatattcttcttctgaacatgctgatcgcgctaatgggcgaaacagtgaacaagattgctcaggagagcaaaaacatttggaagttgcagagagccatcacaatcctcgatacagaaaagagcttcctgaagtgtatgaggaaggccttccgctctggcaagttactgcaagttggatacactccggacgggaaggacgactacaggtggtgtttccgggttgacgaggtgaattggactacatggaatacaaacgtcggcattatcaatgaggatccagggaattgtgagggcgttaaacgtaccttaagcttcagcctacgatcctcccgcgtgtctggccgtcactggaagaattttgccctggtccctttactcagggaggccagtgccagggacaggcagagcgcgcagcccgaggaagtgtatctccggcagttctctggttctctaaaaccagaagacgcagaggtgtttaagagccccgcagcctccggagagaagtag

SEQ ID NO: 232955 - DNA, 2340 bp, Artificial Sequence
  derived and/or modified sequence
atgaaaaaatggtcttccacggaccttggggccgctgctgatcctcttcagaaggatacctgtccagacccactggacggggaccccaatagccggccacctccagccaaaccccagctaagtaccgctaaatccaggacgcgcctctttggaaagggcgattccgaggaagcctttcctgtcgattgcccccacgaagaaggggaactcgatagttgtccaaccatcactgtctccccagtaatcacaattcagaggcctggagatggccctaccggagctagacttttatctcaagattctgtggctgcctccaccgagaagaccctgaggctttacgatcgccgctccatcttcgaagctgttgctcagaacaattgtcaggacctggagtcactgcttttgttcctgcagaagtccaagaaacacctgaccgacaatgaattcaaggaccccgaaaccggaaagacatgtctcctgaaggccatgttgaaccttcacgatggacagaatacgaccatcccgctgttactggagattgctcgtcagacagactctcttaaggagcttgtgaacgcatcctataccgattcatattataaaggacaaaccgcactacatatcgctatagaaagacgaaatatggctctggttacgctgctggtcgagaatggagcggacgtgcaagccgctgcccacggagatttcttcaaaaaaacgaaaggccgcccgggcttttacttcggcgagctcccgctttcactcgccgcatgtacgaatcagctgggcatcgtgaaattcttgctgcagaattcttggcagaccgcagatatcagcgcccgtgacagcgtcggaaatacagttctccacgccctggtcgaggtggcagacaataccgccgacaacactaaatttgtgacctctatgtataatgaaattcttatgctcggggccaagctgcaccccaccttgaagctcgaagaactgacaaacaagaagggcatgaccccactggctttggctgcagggactggtaaaatcggcaaccgccacgatatgctcttagtggaacccctgaatagactcctgcaagacaaatgggaccggttcgttaaaagaatattctattttaatttcctggtgtattgtctgtacatgataattttcacgatggccgcttactatcggcctgtggacggcctcccgcctttcaagatggagaagactggggattacttccgtgttaccggagagatacttagtgtgctgggcggcgtgtatttctttttccgcggcatccagtactttttacagcgcagaccctctatgaagaccctatttgtcgactcatacagcgaaatgctcttcttcctacagtccctcttcatgctcgcgaccgttgtcctgtatttctcgcacctgaaagaatacgtggcaagtatggttttctctttggctctgggctggacaaacatgctctactacacacgagggtttcaacagatgggcatctacgcggttatgatagagaagatgatcctacgggatctgtgtcgtttcatgtttgtgtacatcgtgttcctgttcgggttcagcacggcagtagtgacattaattgaggacgggaaaaatgacagtcttccaagcgagtcaacatcacacagatggcgcgggcccgcatgtcggccacccgactcttcttacaatagcctctattccacctgcctcgagctgttcaagttcacaatcggcatgggggatcttgaatttacagagaactatgacttcaaagccgtttttattatcctgctgctagcatacgtcatattgacttatatactcctgctgaacatgctcatagccctcatgggtgagacagtcaataaaatcgctcaggaatcgaagaatatttggaagcttcagcgcgccatcactattctggacactgagaaatctttccttaagtgtatgcgaaaggcttttcgcagcgggaaactcttgcaggttggctatacccccgacgggaaagacgactatagatggtgctttcgggtggatgaggttaactggactacctggaatacaaatgttggaattattaatgaggatccaggaaattgtgaaggagtgaagcggacactgagtttctccctccgcagctcaagagtgagcgggcggcattggaaaaactttgctctggtgccacttcttagagaagcctcagctcgcgacaggcaatctgctcagcctgaggaggtctacctacgtcagttcagtggcagcctaaagcccgaggacgccgaagtgtttaagtcgcccgctgctagtggtgaaaaatag

SEQ ID NO: 232956 - DNA, 2520 bp, Artificial Sequence
  derived and/or modified sequence
atgaagaaatggtcaagcaccgacctgggcgcagccgctgatcccctgcagaaggatacttgccctgacccgctggatggggaccccaatagtcggccaccacctgccaagccgcaactgtctacggccaagagtcgtactcggctgtttggcaaaggagactccgaggaagctttccccgttgattgccctcacgaggaaggcgaactggattcctgcccaactatcaccgtgagcccagtaatcaccattcaacgtcctggcgacggaccaactggagcccgactcctgagtcaggatagcgtggcggcgagcactgagaaaactctaaggttgtacgaccgtagaagtatctttgaggcagttgcccagaacaattgtcaggaccttgagtctctgctcctgttcctgcagaagtcgaagaaacacctaacggataacgagtttaaggaccccgagacaggcaagacctgtctgctcaaagctatgttaaacctccacgatgggcaaaatacaacaatccctctgctactagagatagctcggcaaactgattccttaaaggagctggtcaacgcctcctacacagattcctactacaaggggcaaacagccttacacatcgcgattgagagaagaaatatggctctcgtgacactgctcgtagaaaatggggccgacgtgcaggctgccgcacatggcgacttttttaaaaagactaaaggtcgccccggcttctattttggcgagctcccattgagcctggccgcgtgtactaaccagctgggcatcgtaaaattcttactgcagaattcttggcagactgccgacatcagcgcaagagatagcgtagggaacaccgtgctacatgcccttgtcgaggtggcggacaacactgctgacaatacaaaattcgtgaccagtatgtacaatgaaatactcatgcttggcgccaagctgcatcccacactgaaactggaggagttgacgaacaagaaaggcatgaccccactcgcattggcagctggcaccggaaaaatcggggtgttggcctatatactgcaaagggaaatccaagagccagaatgtaggcatctgtccaggaaattcaccgagtgggcctacggtccagtgcactcctctctctacgacctctcttgcattgacacgtgcgagaagaactcggtactagaggtgatcgcctacagtagcagcgaaaccccgaatcggcacgacatgctattagtggaaccattgaaccggcttctccaggacaagtgggaccgctttgtcaagcgaattttttacttcaacttcctcgtgtattgtctctatatgattattttcacaatggccgcatactatcgccccgtcgatggtcttccacctttcaagatggagaagaccggagactacttccgagtgactggcgagattttatccgtcctggggggcgtctatttcttttttagaggcatccagtactttctccagcgaagaccatcaatgaagaccctcttcgtggacagctactccgagatgctgttttttcttcaatctctgtttatgctcgcgaccgtggtgctgtacttttcccatctgaaggaatacgtggcatccatggtgttctctttggcactgggctggaccaacatgctgtactacactagaggatttcagcaaatgggcatatacgccgtgatgatagaaaagatgatactgcgcgatctctgccggttcatgtttgtgtatatcgtttttctatttggcttcagcacagctgtcgtgacactcatagaggacggcaaaaacgattcattgccttccgaatctacctcacacagatggagaggacctgcctgcaggccaccagattctagttacaattccctgtatagtacttgtctcgagctgtttaaatttactatcgggatgggcgacctcgaatttaccgagaactacgatttcaaggccgtattcatcattctgctgctggcatacgtcatcctgacatatattctgctgctaaacatgttgatagctctcatgggggaaactgtcaacaaaattgcacaggagtcaaagaacatctggaagctgcaacgggcaattactatcctagacaccgaaaagagtttcttaaaatgtatgcggaaagcctttcgttctggaaagctgctccaggttggttacaccccagatggcaaagacgattaccgctggtgcttccgagttgacgaagtgaactggacaacttggaacacaaatgtggggattattaatgaggaccccggcaactgcgagggagtcaaaagaactctatccttcagcttaaggtcatcaagggtttcaggccggcattggaagaattttgccctagtgccgctcctgagggaggcctccgcgcgcgaccggcaaagcgcccagcccgaagaagtttacttgaggcagttctccggaagcctcaagcccgaggacgctgaagtgttcaagagcccagcggcaagtggggagaaatag

SEQ ID NO: 232957 - DNA, 2520 bp, Artificial Sequence
  derived and/or modified sequence
atgaaaaagtggagtagcaccgatctgggtgccgctgccgatcccttgcagaaagacacttgtcccgaccccctggacggcgatccaaactctcggccaccccctgctaagccacagctttcaacagccaaatcacgcacccgcctgtttggaaaaggggatagcgaggaggctttccccgtggactgtccccacgaagaaggcgaacttgacagctgccccacgatcacagtcagccccgtcatcaccattcagaggccaggcgatgggcctaccggggcacgcctgctttcacaggattccgtggccgcaagtactgagaagacgctcaggctgtacgaccggagatctatctttgaagcggtggctcaaaataactgtcaggacctcgaaagcctcttacttttcctgcagaaaagcaaaaagcaccttactgacaatgagtttaaagaccctgaaacaggcaaaacctgtcttttaaaagcaatgctgaacttacacgatggccagaacactaccattcctttattgcttgaaattgccaggcaaacagatagcttgaaggagctcgttaacgcgtcctacactgattcatactataagggtcagacagcattgcatatcgccattgagagacggaatatggcgctggtgactttgctggtggagaatggcgccgacgtccaagcagccgcccatggggacttcttcaaaaaaaccaaggggcggcctggtttctatttcggcgaactgccactctcactcgctgcctgtacaaatcagctgggtatcgtgaaattccttctgcaaaacagttggcagacggccgatattagtgcccgcgacagtgtgggcaatacggtgctgcacgccctggtggaagtggcagataacactgctgataacacgaagttcgtgacaagtatgtacaatgaaatcctgatgctgggagcaaagctccatccgaccctaaaactggaagaattgaccaacaaaaaaggcatgacgcctctcgccctggcagccggaacagggaagatcggcgtgttagcatacatcctgcagagagaaatccaggagcctgagtgtaggcatctgtcaaggaaatttaccgaatgggcatatggaccagtgcactcgagtctgtacgatcttagttgtattgatacatgcgaaaagaattctgttcttgaggtgatcgcctacagttcttcagaaactccaaatcgacacgacatgcttttggtagagccgctgaatcgacttttacaagacaagtgggacaggttcgttaagcggattttctactttaactttctggtctattgtctgtatatgatcatattcaccatggcagcttactatcgtcctgttgacggcctgcctccctttaagatggagaagacaggggactatttccgagtcaccggggagattcttagtgtcctcgggggggtatattttttcttccgcggcatccagtactttctgcaacgcagacctagtatgaagaccctgtttgttgattcttatagtgagatgctgttttttcttcagagtttgtttatgttggccactgtggtgctatatttttcccatctcaaggaatacgtggcatctatggtcttcagcctggcacttggctggactaatatgctgtattatacccggggattccagcaaatgggcatttatgccgtgatgattgaaaagatgattctgcgagacctgtgtcggttcatgttcgtttatatcgtgttcctgtttggtttttcaacggcagttgtgaccctgattgaagacggaaaaaatgattccctgccttctgaatcgactagccaccgctggagggggcctgcatgccgaccgcccgactcaagctacaattccctgtattctacatgcctggagctgttcaaatttacaatcggaatgggggacctcgagttcaccgaaaattacgactttaaagctgtatttataatcttgttgctagcctacgttattctgacctacattctgttattaaatatgctcatcgcactgatgggcgagactgttaataagatcgcccaagagagcaaaaatatatggaagcttcagcgtgccatcaccatcttagacacagaaaagtcttttctgaaatgcatgagaaaagcctttcgatctgggaaattgttgcaagtggggtacacacctgacggaaaagacgattaccgctggtgtttcagggtggatgaggtcaattggacaacatggaacaccaatgtcgggattatcaacgaggatccaggaaattgcgagggagtgaaacgcaccctgtccttctcgctgcgaagctctcgggtgtccggccggcattggaaaaactttgccctagttcctttgctccgggaagcctcagctagggatcgccaatcagcacagcctgaagaagtgtatttgagacagttcagtggatccctgaaacctgaagacgccgaggtctttaagtcccctgcagctagtggcgaaaaatag

SEQ ID NO: 232958 - DNA, 2553 bp, Artificial Sequence
  derived and/or modified sequence
atgaagaaatggtccagtactgacctgggtgcggccgccgatcctctacaaaaggatacatgtccagacccactcgatggcgaccccaatagccgccccccgccggccaagccccaactaagtacggccaagagcagaactcgcctgtttggcaaaggtgacagcgaggaggcctttcccgtggactgcccccatgaggagggcgagttagattcctgccccactataactgtttctcccgtgattactatccagaggccgggggatggtcccacaggcgccaggctcttgagccaggacagtgtggccgccagcactgaaaagaccctgaggctatatgatcggcgcagcatatttgaagccgtggcacaaaacaactgccaggacctggagtcgctcttactgttcttacagaaatccaaaaaacacctgaccgacaatgaatttaaggaccctgagactgggaagacctgcttactgaaggccatgctgaacctgcatgacgggcagaacaccacaatccccctcctgctcgagattgctcgccagaccgacagtctaaaggagttggtcaatgccagttacactgactcctactataaggggcagacggccctgcatatagccattgagaggaggaatatggcccttgtcaccctcttggttgaaaacggcgccgatgttcaagctgccgcgcatggggactttttcaagaaaacaaaaggcagacccggtttctactttggcgagctgcctttgtcactcgctgcctgtacaaaccagctgggtatagtaaaatttctcctgcagaattcctggcagacggccgatatctccgccagagattcagtggggaatactgtcctccacgccctggtggaggtcgcagacaatactgctgacaatacaaagttcgtgaccagcatgtataacgaaattctgatgctgggagccaaacttcatcccacgttaaagttggaggagcttacaaacaagaaagggatgacacccttggccctggccgctgggacggggaagatcggggtcatcgaaaacggccctcccctctctttcatggtcctggcatatatccttcagagagagatccaagagcctgaatgcagacatctttcccgtaagttcactgagtgggcgtacggtcctgtgcattcgagcctatacgacttgagctgcattgatacatgcgaaaagaactcggtactggaagtaatcgcttactcctcatccgagacccccaataggcacgatatgcttctggtggagccgctgaacaggttactccaggataagtgggacagattcgtgaagagaatcttttatttcaacttccttgtttattgtctttacatgatcatattcacaatggccgcttactaccgtcctgtcgacgggctccctccttttaaaatggaaaaaacaggcgactatttccgcgtcaccggcgaaatcctttccgtgcttggaggcgtctactttttctttcgcggcatccagtatttccttcaacgccgtccaagcatgaagacgctcttcgtggacagttacagcgaaatgctcttcttccttcagagcttgttcatgctggctacggttgtcttgtatttttcccacttaaaggagtacgttgcctctatggtgtttagtctcgcactgggctggacaaacatgctgtattatacccgcggcttccaacagatgggaatctatgccgtgatgatcgaaaagatgatcctccgcgatttatgccggttcatgttcgtttacatcgtgtttctcttcggtttttcaacagcagtagtgacgctgatcgaagatggtaagaacgacagcctgccgtccgaatcaacatcccacaggtggcgtggccctgcctgtcgcccacctgattctagctacaatagcctttactccacttgccttgagcttttcaaattcacaattggtatgggtgatctggaattcacagaaaattacgatttcaaagcggtcttcatcatcctactgcttgcttacgtgatcctcacctatatcttactcctgaatatgctaattgcactgatgggtgaaacggtgaacaaaattgcgcaggagagtaagaatatctggaaattacagagagcaattacgatcctggatacagagaaatctttcttgaaatgcatgcggaaagccttccggtcgggaaaacttctgcaggtgggatacacgccggatgggaaagacgactatcgctggtgctttagggtcgacgaagttaattggacaacgtggaataccaacgttgggattattaatgaggatccaggcaattgcgaaggggtcaagcgtactctatccttcagccttaggtcctccagagtgagtggacgccactggaagaatttcgctctggttccactcctgagagaggcgtccgctcgtgaccgtcagtctgcccagccagaggaagtgtaccttcggcaattcagcgggagtctcaaacctgaggacgccgaagtgtttaagagcccagccgcttcaggggagaagtag

SEQ ID NO: 232959 - DNA, 2514 bp, Artificial Sequence
  derived and/or modified sequence
atggagaccctgaccccaggccacctgcagcccagccccagcagcccccggccccgggccgcccctggcagcctgggccgggtgacccggcggcggctgagccgctggatcgccctgaccaggaaggtgtcctggaccccagcccggcccagccagagcgccctgctgagccccagccggggccaggagacagcccctcctgtgcccggctgctgccccaggaccctgagccccccagccccccggcggcccagcggctccatgattgctggggtgtccctgaagcccctgctgcgcatcacagcccgcatctggagggcctgctgcagcagctgcagaagagcccggagcaccagccagaccaccagcagcaaggtggccccagccctgggcagcggccgggccccagccctggcctgcccagacccccccctgtgcctgagtgaccctgagaccgggaagacctgcctgctgaaggccatgctgaacctgcatgatggccagaacaccaccatccccctgctgctggagatcgcccggcagacagacagcctgaaggagctggtgaatgccagctacacagacagctactacaagggccagacagccctgcacatcgccatcgagaggaggaacatggccctggtgaccctgctggtggagaatggagcagatgtgcaggccgccgcccatggagacttcttcaagaagaccaagggccggcccggcttctactttggagagctgcccctgagcctggccgcctgcaccaaccagctgggcatcgtgaagttcctgctgcagaacagctggcagacagctgacatcagcgcccgggacagcgtgggcaacacagtgctgcacgccctggtggaggtggccgacaacacagctgacaacaccaagtttgtgacctccatgtacaatgagatcctgatgctgggcgccaagctgcaccccaccctgaagctggaggagctgaccaacaagaagggcatgacccccctggccctggccgccggcaccgggaagattggagtgctggcctacatcctgcagcgggagatccaggagcctgagtgccgccacctgagcaggaagttcacagagtgggcctacggccctgtgcacagcagcctgtatgacctgagctgcatcgacacctgtgagaagaacagcgtgctggaggtgattgcctacagcagcagcgagacccccaacagacatgacatgctgctggtggagcccctgaaccggctgctgcaggacaagtgggacagatttgtgaagaggatcttctacttcaacttcctggtgtactgcctgtacatgatcatcttcaccatggccgcctactacagacctgtggatggcctgccccccttcaagatggagaagacaggagactacttccgggtgactggagagatcctgtctgtgctgggcggcgtgtacttcttcttccggggcatccagtacttcctgcagaggcggcccagcatgaagaccctgtttgtggacagctacagcgagatgctgttcttcctgcagagcctcttcatgctggccaccgtggtgctgtacttcagccacctgaaggagtatgtggcctccatggtgttcagcctggccctgggctggaccaacatgctgtactacacccggggcttccagcagatgggcatctatgctgtgatgattgagaagatgatcctgcgggacctgtgccgcttcatgtttgtgtacatcgtgttcctgtttggcttcagcacagctgtggtgaccctgattgaagatggcaagaatgacagcctgcccagcgagagcaccagccaccgctggaggggccctgcctgccggcccccagacagcagctacaacagcctgtacagcacctgcctggagctgttcaagttcaccatcggcatgggagacctggagttcacagagaactatgacttcaaggctgtgttcatcatcctgctgctggcctacgtgatcctgacctacatcctgctgctgaacatgctgattgccctgatgggagagaccgtgaacaagatcgcccaggagagcaagaacatctggaagctgcagagggccatcaccatcctggacacagagaagagcttcctgaagtgcatgaggaaggccttccgcagcggcaagctgctgcaggtgggctacaccccagatggcaaggatgactaccgctggtgcttccgggtggatgaggtgaactggaccacctggaacaccaacgtgggcatcatcaatgaagaccccggcaactgtgaaggagtgaagaggaccctgtccttcagcctgcggagcagccgggtgtctggccgccactggaagaactttgccctggtgcccctgctgcgggaggccagcgcccgggaccggcagagcgcccagcctgaggaggtgtacctgcggcagttcagcggcagcctgaagccagaagatgctgaggtgttcaagagccctgctgccagcggggagaagtag

SEQ ID NO: 232960 - DNA, 2340 bp, Artificial Sequence
  derived and/or modified sequence
atgaagaagtggagcagcacagacctgggcgctgctgctgaccccctgcagaaggacacctgcccagaccccctggatggagaccccaacagcaggcctcctccagccaagccccagctgagcacagccaagagcaggacccggctgtttgggaagggggacagcgaggaggccttccctgtggactgcccccatgaggagggggagctggacagctgccccaccatcaccgtgtcccctgtgatcaccatccagaggcctggagatggccccaccggggcccggctgctgagccaggacagcgtggccgccagcacagagaagaccctgcggctgtatgacagaagaagcatctttgaagctgtggcccagaacaactgccaggacctggagagcctgctgctcttcctgcagaagagcaagaagcacctgacagacaatgagttcaaggaccctgagaccgggaagacctgcctgctgaaggccatgctgaacctgcatgatggccagaacaccaccatccccctgctgctggagatcgcccggcagacagacagcctgaaggagctggtgaatgccagctacacagacagctactacaagggccagacagccctgcacatcgccatcgagaggaggaacatggccctggtgaccctgctggtggagaatggagcagatgtgcaggccgccgcccatggagacttcttcaagaagaccaagggccggcccggcttctactttggagagctgcccctgagcctggccgcctgcaccaaccagctgggcatcgtgaagttcctgctgcagaacagctggcagacagctgacatcagcgcccgggacagcgtgggcaacacagtgctgcacgccctggtggaggtggccgacaacacagctgacaacaccaagtttgtgacctccatgtacaatgagatcctgatgctgggcgccaagctgcaccccaccctgaagctggaggagctgaccaacaagaagggcatgacccccctggccctggccgccggcaccgggaagattggcaacagacatgacatgctgctggtggagcccctgaaccggctgctgcaggacaagtgggacagatttgtgaagaggatcttctacttcaacttcctggtgtactgcctgtacatgatcatcttcaccatggccgcctactacagacctgtggatggcctgccccccttcaagatggagaagacaggagactacttccgggtgactggagagatcctgtctgtgctgggcggcgtgtacttcttcttccggggcatccagtacttcctgcagaggcggcccagcatgaagaccctgtttgtggacagctacagcgagatgctgttcttcctgcagagcctcttcatgctggccaccgtggtgctgtacttcagccacctgaaggagtatgtggcctccatggtgttcagcctggccctgggctggaccaacatgctgtactacacccggggcttccagcagatgggcatctatgctgtgatgattgagaagatgatcctgcgggacctgtgccgcttcatgtttgtgtacatcgtgttcctgtttggcttcagcacagctgtggtgaccctgattgaagatggcaagaatgacagcctgcccagcgagagcaccagccaccgctggaggggccctgcctgccggcccccagacagcagctacaacagcctgtacagcacctgcctggagctgttcaagttcaccatcggcatgggagacctggagttcacagagaactatgacttcaaggctgtgttcatcatcctgctgctggcctacgtgatcctgacctacatcctgctgctgaacatgctgattgccctgatgggagagaccgtgaacaagatcgcccaggagagcaagaacatctggaagctgcagagggccatcaccatcctggacacagagaagagcttcctgaagtgcatgaggaaggccttccgcagcggcaagctgctgcaggtgggctacaccccagatggcaaggatgactaccgctggtgcttccgggtggatgaggtgaactggaccacctggaacaccaacgtgggcatcatcaatgaagaccccggcaactgtgaaggagtgaagaggaccctgtccttcagcctgcggagcagccgggtgtctggccgccactggaagaactttgccctggtgcccctgctgcgggaggccagcgcccgggaccggcagagcgcccagcctgaggaggtgtacctgcggcagttcagcggcagcctgaagccagaagatgctgaggtgttcaagagccctgctgccagcggggagaagtag

SEQ ID NO: 232961 - DNA, 2553 bp, Artificial Sequence
  derived and/or modified sequence
atgaagaagtggagcagcacagacctgggcgctgctgctgaccccctgcagaaggacacctgcccagaccccctggatggagaccccaacagcaggcctcctccagccaagccccagctgagcacagccaagagcaggacccggctgtttgggaagggggacagcgaggaggccttccctgtggactgcccccatgaggagggggagctggacagctgccccaccatcaccgtgtcccctgtgatcaccatccagaggcctggagatggccccaccggggcccggctgctgagccaggacagcgtggccgccagcacagagaagaccctgcggctgtatgacagaagaagcatctttgaagctgtggcccagaacaactgccaggacctggagagcctgctgctcttcctgcagaagagcaagaagcacctgacagacaatgagttcaaggaccctgagaccgggaagacctgcctgctgaaggccatgctgaacctgcatgatggccagaacaccaccatccccctgctgctggagatcgcccggcagacagacagcctgaaggagctggtgaatgccagctacacagacagctactacaagggccagacagccctgcacatcgccatcgagaggaggaacatggccctggtgaccctgctggtggagaatggagcagatgtgcaggccgccgcccatggagacttcttcaagaagaccaagggccggcccggcttctactttggagagctgcccctgagcctggccgcctgcaccaaccagctgggcatcgtgaagttcctgctgcagaacagctggcagacagctgacatcagcgcccgggacagcgtgggcaacacagtgctgcacgccctggtggaggtggccgacaacacagctgacaacaccaagtttgtgacctccatgtacaatgagatcctgatgctgggcgccaagctgcaccccaccctgaagctggaggagctgaccaacaagaagggcatgacccccctggccctggccgccggcaccgggaagattggagtgattgaaaatggcccccccctgtccttcatggtgctggcctacatcctgcagcgggagatccaggagccagaatgtcgccacctgagcaggaagttcacagagtgggcctacggccctgtgcacagcagcctgtatgacctgagctgcatcgacacctgtgagaagaacagcgtgctggaggtgattgcctacagcagcagcgagacccccaacagacatgacatgctgctggtggagcccctgaaccggctgctgcaggacaagtgggacagatttgtgaagaggatcttctacttcaacttcctggtgtactgcctgtacatgatcatcttcaccatggccgcctactacagacctgtggatggcctgccccccttcaagatggagaagacaggagactacttccgggtgactggagagatcctgtctgtgctgggcggcgtgtacttcttcttccggggcatccagtacttcctgcagaggcggcccagcatgaagaccctgtttgtggacagctacagcgagatgctgttcttcctgcagagcctcttcatgctggccaccgtggtgctgtacttcagccacctgaaggagtatgtggcctccatggtgttcagcctggccctgggctggaccaacatgctgtactacacccggggcttccagcagatgggcatctatgctgtgatgattgagaagatgatcctgcgggacctgtgccgcttcatgtttgtgtacatcgtgttcctgtttggcttcagcacagctgtggtgaccctgattgaagatggcaagaatgacagcctgcccagcgagagcaccagccaccgctggaggggccctgcctgccggcccccagacagcagctacaacagcctgtacagcacctgcctggagctgttcaagttcaccatcggcatgggagacctggagttcacagaaaattatgacttcaaggctgtgttcatcatcctgctgctggcctacgtgatcctgacctacatcctgctgctgaacatgctgattgccctgatgggagaaacagtgaacaagatcgcccaggagagcaagaacatctggaagctgcagagggccatcaccatcctggacacagagaagagcttcctgaagtgcatgaggaaggccttccgcagcggcaagctgctgcaggtgggctacaccccagatggcaaggatgactaccgctggtgcttccgggtggatgaggtgaactggaccacctggaacaccaacgtgggcatcatcaatgaagatcctggcaactgtgagggcgtgaagaggaccctgtccttcagcctgcggagcagccgggtgtctggccgccactggaagaactttgccctggtgcccctgctgcgggaggccagcgcccgggaccggcagagcgcccagcctgaggaggtgtacctgcggcagttcagcggcagcctgaagccagaagatgctgaggtgttcaagagccctgctgccagcggggagaagtag

SEQ ID NO: 232962 - DNA, 2520 bp, Artificial Sequence
  derived and/or modified sequence
atgaagaagtggagcagcaccgacctgggcgccgccgccgaccccttgcagaaagatacctgcccagatcctcttgatggagatcctaattcaagaccacccccagccaagccccagttgtccacagcaaaaagccgcaccagactgttcgggaagggagattcggaagaagcttttcctgtcgattgccctcacgaggagggagaacttgactcctgcccgaccatcacggtgtccccagtgataacaatccagcgcccaggagacggtccgaccggcgcccggctcctgtcccaggactccgtcgctgcgagcacagaaaagactctaagattgtatgatagaagatcaatcttcgaagcagtcgcacaaaacaattgccaggatctggaaagtttattgctctttctgcagaagtctaagaaacacttaactgataatgagtttaaggacccagagactggcaaaacctgcctgttaaaggccatgctgaacctgcatgacggccagaacaccacaattcccctgcttctggagattgcccggcagacggacagcttaaaggagctcgtaaacgcttcatataccgattcgtactataaagggcagacagctctgcacattgctatcgagcggcgcaacatggctctggtgacacttcttgtcgagaacggagctgacgtccaggctgcggcgcacggggatttcttcaagaaaacaaagggtagacccggcttctactttggagaactgcctttatcactggccgcatgtactaaccaacttgggatcgttaagtttctcttgcagaactcatggcaaactgccgatatttccgccagggactccgtgggaaacaccgttttgcatgccctggtcgaggttgccgacaacactgcggacaacactaagtttgttactagcatgtataatgaaatccttatgctcggggctaaactccatcctacactcaaacttgaggaattgacaaacaagaaaggaatgactcccctcgctctcgcagccgggactggaaaaataggggtgctggcctacattctacagcgagaaattcaggaaccagaatgtcggcacctgtctcggaaatttacggagtgggcatatggccctgtccatagctcattatacgacctgagttgcatagatacttgtgaaaagaactcagtgctggaggttatcgcctactccagctccgaaacaccgaaccgccacgacatgttgctggtagagccactgaatcgcctgcttcaagataaatgggacaggtttgtgaagcggatattctactttaatttcctggtgtattgtctgtacatgattatatttacaatggctgcttattacaggcccgtggatgggctacctccctttaagatggagaaaacaggggactattttagagtgacaggcgaaattctttctgtcctcgggggtgtttacttctttttcagagggatccaatactttttgcagagaagaccttccatgaaaaccctgttcgtcgatagctattccgagatgctgttctttctgcagtccttgttcatgctggccacagtcgtgctgtatttttcccaccttaaggaatatgtggccagcatggtatttagcctggcactcgggtggaccaacatgctttattacacaagaggttttcagcagatgggcatttatgctgttatgatcgagaagatgattcttcgtgacctgtgtcgctttatgtttgtttacattgtcttcctctttggcttctccacggctgtcgtcaccctgatcgaagacggtaaaaacgacagtctgccaagcgagtccacatcacaccgttggaggggcccagcctgccggccccccgatagctcatataatagtctgtactccacatgcttggagctgtttaaatttaccatcggaatgggggatttggaatttaccgaaaactacgattttaaggccgtgttcattatcttactgctggcgtacgtgatcctcacctacatcctgttactgaacatgctgattgctttgatgggggaaactgtgaataaaattgctcaagaatccaagaatatttggaaactgcagcgggcaatcacaattttagacaccgaaaaatcttttttgaaatgcatgaggaaggcatttcgctctggcaagctgttacaggtgggatatacacctgacggcaaggatgactacagatggtgttttagggtcgacgaagtcaactggaccacgtggaacaccaacgtgggcatcataaacgaggaccctggtaactgtgaaggggtcaaaagaaccctgagttttagccttagatcttcgcgggttagcggtcgtcactggaagaattttgctctcgtccccctgctgagagaggcgagcgccagggaccgccaatccgctcagcccgaagaggtctatctgagacagttctctggatcccttaagcccgaggacgccgaggtctttaagtcacccgccgccagcggcgagaagtag

SEQ ID NO: 232963 - DNA, 2514 bp, Artificial Sequence
  derived and/or modified sequence
atggagaccctgacccccggccacctgcagcccagccccagcagcccgagaccacgcgctgcccccggctccttgggtagggtgacaaggcgccgactctccagatggatcgccctcacccgtaaagtgtcttggacacctgccaggccctctcagtcagccctattgtcacctagccgaggacaggaaacagctccccctgtcccaggctgttgtcctcgcacactctctcccccagcacctaggcggccctccgggtctatgattgccggtgtttcactgaagccactgctcaggatcacggcccgaatttggcgcgcatgctgctcaagttgcagaagagctcggagcacttcacaaactacctcatctaaggtggcacctgcgctgggttctggccgggcgccagctcttgcctgcccagaccctcccctctgcctctccgatccagagacggggaaaacttgtctcctcaaagccatgttgaatctccatgatggccagaacacaacgatcccacttctgctggagattgctaggcaaactgacagtctgaaggaactggtcaatgcctcctatactgactcttactataaaggccagactgctttgcacatcgctattgaaagaagaaacatggccctcgttaccctccttgtggagaatggcgccgatgtccaagcagctgctcacggcgatttctttaagaaaactaaggggagaccaggtttttactttggagagctccccttgtccctagcagcctgtaccaaccagcttggcatcgtgaaattcttattgcagaattcctggcaaacagctgacatcagtgcgcgcgattccgttggaaacactgtactgcatgccctcgtggaagtggctgataacaccgcggacaataccaaatttgtgacgtctatgtataatgaaattctaatgcttggtgccaaactgcatccaaccttaaagttggaggaactaacaaacaaaaaaggaatgacgcctctggctctcgctgctggtacaggcaaaatcggtgtacttgcgtacatcctgcagcgggaaattcaggaacccgaatgccgccatctgagccgaaaattcaccgagtgggcatatgggccagtgcattcaagcctatacgacctgagctgcatcgacacctgcgaaaagaattctgtgctggaagtcatcgcttactccagctctgagaccccgaatcgtcatgatatgctgctggtggaacccctgaaccgattactacaagataaatgggatcgattcgtgaagaggatcttttactttaattttcttgtttattgcctatacatgattatcttcacaatggcagcctattatcggccagtggacggactccccccatttaaaatggaaaaaacgggggattactttagggttaccggggaaatactgtctgtcctcggcggtgtgtacttcttctttaggggcatccagtactttcttcagcgccgcccatctatgaagaccctgtttgtggatagctatagcgagatgttgtttttcttacagtccctgtttatgctggccacagtggtgctttacttcagccatctcaaagaatatgtggcctccatggtgttcagcctggcactcggctggactaatatgctgtattatacacgcggtttccagcagatgggtatttatgccgtaatgatagagaagatgatcctgcgtgacctgtgtaggttcatgttcgtgtatatagtattcttgttcggcttctctacagctgttgtgacgctgatcgaggacgggaaaaacgactcactacctagcgagtcaaccagtcatcgttggcggggcccagcatgccgccccccagattccagttacaactcactatattctacatgcctggaactcttcaagttcactattgggatgggtgatcttgagttcactgagaattatgactttaaggccgttttcatcatactcctgctggcctacgtgatcctgacctatattctcctgcttaacatgcttattgcccttatgggggaaaccgtaaacaagattgcacaggagtccaagaatatttggaaactgcagcgggcaataaccattctcgataccgagaagtctttcctcaagtgcatgcggaaggctttccgatcgggaaaactgcttcaggtgggatatacacccgacggcaaggatgattatcgatggtgctttcgagtcgatgaagtgaactggacgacgtggaatacaaatgtgggcatcatcaacgaggacccaggaaactgtgagggcgtcaaacgtaccttgtccttttccttgcgctcctcacgggtaagcggacgtcattggaagaacttcgcactggtccccctgctgagggaggcgagtgcccgggacaggcagtccgctcagccagaggaggtgtacctgcggcagtttagcggcagcctcaagcccgaggacgccgaggtgtttaaatcaccggccgcttctggtgaaaagtag

SEQ ID NO: 232964 - DNA, 2340 bp, Artificial Sequence
  derived and/or modified sequence
atgaagaagtggagcagcaccgacctgggcgccgccgccgaccccctgcagaaggatacctgtcctgatccattggacggagatcctaatagtcgcccaccaccagcaaaacctcaactgtccactgcgaaaagccgtacccggctatttgggaagggcgactcggaagaggcctttccagtggactgtccccatgaggagggtgaactggactcttgtccaactattaccgtttcccctgttattacaatacagcggccaggcgatgggccaactggcgcccgtctgctaagtcaggacagcgtggcggcatccaccgagaagacactgagactatacgatagacggtctatttttgaggcagtcgcccaaaacaattgtcaagacctggagtcattgttgctgttcttgcagaagtcaaaaaagcatctaacagacaatgagttcaaggaccctgagaccgggaagacttgtctactgaaggcaatgttgaacctccacgatgggcaaaacacaactatccccctgctgctggaaatcgctaggcaaaccgattctcttaaagaactggtcaacgcaagctacaccgattcttactataaaggacagacagccttgcatatagccattgagaggcggaatatggcattagtgactctactggtggaaaacggagccgacgttcaagcagccgcccacggcgactttttcaaaaaaactaaaggacgccccggattttatttcggggagcttcctctctcgttggctgcttgtaccaaccaattaggaatcgtgaaatttctgctgcaaaattcttggcagacggcagatattagcgctcgggactcggtcggaaacacagtgctgcacgctttagtggaggttgctgataacaccgctgataacaccaagtttgtgacgtcaatgtataacgagatcctgatgctgggagccaagctgcaccccaccttgaagctcgaagaactgaccaataagaaagggatgacccctcttgccctcgccgccggaacaggcaagattggaaatcgtcacgacatgctcctcgtggagcctctgaatagactcctgcaggacaagtgggataggtttgtgaagcgcatcttttactttaatttcctcgtgtattgcctgtacatgatcatttttaccatggccgcctattatcgccccgtcgatggcttgccgccttttaagatggaaaaaacaggggactatttccgagtaacaggcgagatactgtctgtgctgggaggggtctacttctttttccgggggatccaatacttcctacagcgcagacctagcatgaagacactttttgtggattcctacagcgagatgctgtttttcctacagagtctgttcatgctggctaccgtggtcctctatttttcccatctcaaagaatatgtggcaagcatggtcttttcgctggcactgggctggaccaacatgctgtactacacacgtggattccagcagatgggcatttatgcagtcatgatcgagaagatgattcttcgggatctctgccggtttatgtttgtctacattgtgttcctgttcggctttagtactgcagtggtgaccttgatagaggatggcaagaatgactcactgccttcagaatccaccagtcacagatggcgcggacctgcctgcaggcccccagacagttcctataacagtttgtactcaacatgtctcgaactgtttaagtttacgattggaatgggagatctggaattcactgagaactatgatttcaaggccgtctttattatcctgttgctcgcatacgtgattttgacttacatactgctgctcaacatgctaattgctttaatgggtgaaacagtcaacaaaatcgctcaagaatcgaaaaatatatggaagttgcagcgagccattactatcctggatacggaaaagagcttcctgaaatgtatgcggaaggctttccggtccgggaagcttctgcaggttggctatacccccgacgggaaagacgactaccggtggtgcttccgcgtggacgaggtgaactggacgacatggaatacgaacgtcggcatcattaatgaagaccctggcaactgcgagggtgtgaagcgcactctgtctttctcgctgcgctcaagccgcgtttctggccgacactggaaaaatttcgctctcgtgccattactgcgggaggctagcgccagggaccggcagtcagcacagccagaagaagtgtatctgcgacagttctctgggtccctaaaacccgaggacgcagaggtgtttaagtccccagcggcaagcggggagaaatag

SEQ ID NO: 232965 - DNA, 2520 bp, Artificial Sequence
  derived and/or modified sequence
atgaagaagtggagcagcaccgacctgggcgccgccgccgaccccctgcaaaaggatacatgcccggaccccctggatggtgatcctaacagcagacccccccctgccaagccacagttatccaccgcaaagagccggactcggctgttcggaaaaggggactcagaggaggcctttcccgtggactgtccacatgaagaaggagagctggattcttgcccaacgataacagtgtcccctgttatcactattcaaagaccaggggacgggcccacgggcgcccgtctcctgagtcaagattccgtggccgccagtactgaaaaaactcttcgcctgtacgaccggcgtagcatctttgaggccgtggctcagaataactgtcaggacctcgagtcactcctgctctttcttcagaaaagtaaaaaacatctgactgataacgaatttaaagaccccgagacagggaaaacatgcctgctgaaggccatgttaaacttacacgatggccagaatactacaatccctctgctgctggagatcgcacgacagacagacagtctgaaggagctcgttaacgcttcctataccgactcctactacaagggacaaaccgctctgcacatcgccattgagaggcgaaacatggccctcgttactctcttggtggagaatggcgcagacgtgcaagcggccgcccacggagacttcttcaagaagaccaaaggaagacccggcttttattttggtgaactccccctgagtctcgcagcttgtacaaatcagcttggaatcgtcaaatttctcttacagaatagctggcagactgccgacataagcgcccgagattccgtcggaaatactgtcttgcacgcactggtggaggttgctgataacactgctgataatacgaagtttgtgacgtccatgtacaatgaaatcctgatgttgggcgcgaagttgcacccaaccttaaagttagaagaactgacaaacaaaaagggcatgactcctctggcccttgcggcagggacagggaaaataggtgtactcgcatatattctgcagagggaaattcaggaacctgaatgtcggcatctcagtaggaaattcactgaatgggcctacggccctgtgcacagctccctatacgacctgagctgtatcgacacatgtgagaagaattcagttctagaggtcattgcatactctagtagtgaaactccaaatcgccacgatatgctgcttgttgagcccttgaataggctgctccaagataagtgggaccgctttgtgaaacgcatcttttacttcaattttttggtctattgtctgtacatgatcatcttcacgatggccgcatattataggccggtggatgggctcccacccttcaagatggagaaaactggggactattttagagtcactggcgaaattttgagtgtattaggtggcgtatacttttttttccgaggaatccaatattttctgcagagaagaccctctatgaaaaccttgtttgttgattcctatagcgagatgttattcttccttcagtctttgtttatgctagcaactgtggtactgtacttttcccaccttaaggaatacgtcgcatctatggtgttcagccttgctctgggatggactaatatgctttactatacacgaggttttcagcagatgggaatctatgccgtaatgatcgaaaaaatgatcctcagagacctgtgcagattcatgttcgtttatattgtatttctttttggtttcagtaccgctgtcgtgacgttgattgaagatggcaagaatgactccttaccgagtgaatctacaagccatcgttggaggggacctgcctgccgcccgccagactcctcttataatagtctgtactccacgtgtctggaactctttaagtttaccatcggcatgggggacctggagtttacagaaaactacgacttcaaggccgtcttcattatcctgctgctcgcctacgtgatattaacctacatcctcctcctgaatatgctaatcgccctgatgggagagaccgtgaacaaaatagctcaggagtcgaagaatatctggaaattgcaacgtgcaatcacaattctggacactgagaaatcttttctgaagtgcatgaggaaggcctttcgcagtgggaagctcctccaggtcggctacactcctgacggcaaagacgattaccgatggtgctttcgagtggacgaggtgaactggacaacttggaacaccaatgtggggatcatcaatgaggatcctggcaactgcgaaggagtcaagcggacgctctcctttagtctccgcagtagcagggtaagtggcagacactggaaaaattttgctcttgtacccttactgcgtgaggcttcggcacgagataggcagtctgcgcagcccgaagaagtgtaccttcgtcagttctcaggatctttgaagcctgaggatgctgaagtatttaaatccccagcagcatccggcgagaaatag

SEQ ID NO: 232966 - DNA, 2520 bp, Artificial Sequence
  derived and/or modified sequence
atgaagaagtggagcagcaccgacctgggcgccgccgccgaccccctgcaaaaggacacatgccctgaccccctggatggagaccccaacagtaggccccctcccgccaagccacagctttcaacggccaagagcagaactcgcctcttcgggaaaggcgatagcgaagaagcattccctgtggattgtccccacgaggagggggagttagatagttgccctactattaccgttagcccagtgattaccattcaaaggccaggagatggccccactggggccagactactaagccaggacagcgtggctgccagcacagagaagaccttgcgcctgtacgatcgccgatctattttcgaggctgtggctcaaaataactgccaggacctggagtcgctgctgctgttcctgcagaagtccaaaaagcacctcacggataatgaatttaaggatcccgagaccggtaagacctgtctactgaaagccatgctgaacttgcacgatggtcagaatacgaccattccattgttgctcgagattgcccgtcagacagacagcttgaaggaactggtgaatgccagctacacagattcatattataaagggcagaccgcacttcatatcgctatcgagagacgaaacatggctttagtcaccctcctggtggagaacggggcagacgtgcaggccgccgcccacggagacttttttaagaagaccaagggaaggcccggattctactttggggaactgccccttagtctcgccgcctgcacaaatcagctcggaatcgtgaaatttctcctacaaaatagttggcagacggccgatattagtgcccgtgattctgttggaaataccgtgctgcacgctcttgtggaggttgcagataatacagccgataatacaaagttcgttacaagcatgtacaatgagatcctcatgctcggtgcaaaattgcaccccacattaaagctcgaggagcttaccaataaaaaggggatgacaccacttgccctggccgctgggactggtaagattggggtcctcgcttacatactgcagcgcgagatacaggagccagagtgtagacacctcagccgtaagttcacagaatgggcctacggcccggtgcattctagcctgtatgacctgtcatgcatcgacacatgtgagaaaaattccgtactcgaagtgattgcttatagttcttcggaaacgccaaatcggcacgacatgctcctggtggaaccactcaaccgccttctgcaggataagtgggatcgcttcgtgaagcggattttctattttaatttcttagtgtactgtctgtacatgattatttttacaatggctgcctactacagacctgtagacggcctgccaccgttcaaaatggaaaaaaccggcgactacttccgcgtaactggcgagattctgtctgtcctcgggggagtttactttttcttcagggggatacaatatttcctgcagcgaagaccgagtatgaagactctcttcgttgatagttatagtgagatgctgtttttccttcagtccctgtttatgctagccactgtagtcctttacttcagccaccttaaggagtacgtggcatctatggtgttctccttggcactgggctggactaacatgctttattacacccggggattccagcagatgggcatctacgctgtgatgattgaaaaaatgatcttgcgggacctctgtaggttcatgttcgtgtacattgtgttcctgttcggattcagtacagcagtggtgacattaatagaggacggcaaaaacgacagtctgccttctgagagcacaagccatcggtggcgaggacctgcttgtagacctcctgactcaagctataatagcctttatagcacgtgtcttgagttgtttaaattcaccatcggcatgggcgatttggagtttacagagaattatgactttaaggctgtgttcattattctgcttctggcttacgtgatcttaacctacatcttactgcttaatatgcttatcgccctaatgggcgaaaccgttaataaaatcgcacaggaaagcaagaatatctggaagctgcagagagcgatcactattctggacaccgagaaatccttcctcaaatgcatgcgcaaggcttttcgcagtggcaaactattgcaggtcgggtatacgcccgacggcaaggatgattatcgctggtgctttcgggtagacgaggtcaattggactacgtggaacactaacgttggaatcatcaacgaggaccccgggaactgtgaaggcgtgaaacgaacactctccttcagcttgaggtcgtctcgggtgagtggaagacactggaagaattttgctctggttcctttactccgggaggccagtgcccgcgacaggcagtcagcacagccggaagaagtgtatctgcgacaattcagcgggagtctgaagcccgaggatgcagaagtgtttaaatccccggccgcaagcggagagaaatag

SEQ ID NO: 232967 - DNA, 2553 bp, Artificial Sequence
  derived and/or modified sequence
atgaagaagtggagcagcaccgacctgggcgccgccgccgaccccctgcagaaagatacctgccctgacccactggatggcgatcccaattccagacctccccctgcaaagccccaactgagcaccgctaaatcaaggaccaggctcttcggaaaaggagacagcgaagaggcctttcccgtggactgcccacacgaggaaggggagctggactcctgcccaactattacagtgtcgcccgtgataactattcaacgcccaggagacggccctactggggcccgcttactctcccaggattcagtagccgcaagcaccgagaaaactctacggttgtacgaccgacggagtattttcgaagccgtcgcccagaataattgccaagacctcgaaagcttgctactgttcctgcaaaagtcgaaaaaacatctcactgacaatgagtttaaagaccctgaaacaggaaaaacatgcctcttgaaagccatgctgaacctgcatgacggacagaacacaaccatcccattgctgcttgagatagctagacagacagactccctcaaggagcttgtcaacgcatcttatacagattcttactacaagggtcagacagcactgcatatcgccatcgaacgtagaaatatggcactggtaaccctcctcgtggagaatggcgccgatgtgcaggccgccgctcatggcgacttttttaagaagactaagggccggccaggattttatttcggagagctgccactgagtttagccgcgtgcaccaatcagttagggatagtcaagtttttactgcagaatagctggcaaaccgctgacatttctgctcgagacagcgtgggaaataccgtattacatgcgctggtggaagtggctgataatacggccgacaatacgaagttcgtgacttccatgtataatgaaatcctgatgctcggagcgaagctccacccgacgttaaagcttgaggagctgaccaataaaaagggtatgactccactagcattagctgcaggcactgggaagataggggtgatcgaaaacggaccccctctgagtttcatggtcctagcttacatactccaaagagaaattcaggagccagagtgtagacacctctctcggaaatttactgaatgggcttacggtcccgttcacagcagcctatacgacctgtcttgtatcgacacgtgcgagaagaacagcgttctagaggttatagcatattcttcctcggagacaccaaaccgtcacgacatgcttctcgtggaacccctgaaccggctactccaggataagtgggatagattcgttaagaggatcttttacttcaacttcctcgtctattgtctctatatgataatctttacaatggccgcttactataggccggtggatgggctacccccctttaagatggaaaaaacgggagactacttccgcgttacgggcgagatactgtcagtgctgggcggcgtgtattttttcttccgcgggatccagtatttcttgcaacgaaggcccagcatgaagaccttgttcgtcgattcctattcagaaatgctcttcttcctgcagtctttattcatgcttgcaactgtggttctctacttctcccatttgaaggagtatgtagcatccatggtgttttctcttgcactgggctggactaatatgctctactacactaggggattccagcaaatggggatctacgccgtcatgattgagaagatgattctccgagacctgtgtagattcatgttcgtctatatcgtgttcctgttcgggttcagcaccgccgttgtgactcttatcgaggacgggaagaacgattctctgcctagcgagagtactagccatcgatggcggggccccgcttgccgcccgccagactccagctataacagcctctacagtacctgtctggagctgtttaagtttacaattggaatgggagacttagagttcactgagaattacgatttcaaggcagtgttcattatactcctacttgcttacgtgatcctgacttacatccttctactgaacatgctgatcgcccttatgggcgagactgtgaacaagatcgcgcaggagagcaagaatatttggaagctgcagcgcgctataactatcctcgacactgaaaaaagctttctcaagtgcatgcgcaaagcttttcgctctggtaagcttctccaggtcgggtatacgcccgatggcaaggacgattaccggtggtgctttagggtggacgaggtcaactggacgacctggaacaccaatgtcggaatcattaatgaggacccgggaaattgtgagggcgttaaacgaacactctctttctcactccgatcgtcccgggtgtcaggcaggcattggaagaacttcgccctagtgcctctgctcagagaagcctccgcacgcgatagacaatccgcccagcccgaggaagtctacctacggcagttctctggttcactgaagccagaagatgcagaggtcttcaagtctcccgctgcctctggagagaagtag

SEQ ID NO: 232968 - DNA, 2520 bp, Artificial Sequence
  derived and/or modified sequence
atgaagaagtggtccagcacagacctgggcgctgccgcagaccccctgcagaaggacacttgcccggatcctctggatggggaccccaatagtagaccgcctcctgctaagcctcagctgtctacagccaagagccggacccgccttttcggaaagggcgattcagaagaggccttcccggtggactgcccccacgaggaaggcgaactggacagttgccctaccattaccgtaagtcctgtgatcaccatccagaggccaggagatggtccaacgggagcccgactgctctcccaggacagcgtggcagcctcgacagagaaaacgctacggctctatgatagaaggagtatttttgaggctgtcgcccaaaacaactgtcaggacctggaaagcctactcttgtttttacaaaagagcaagaaacacctgaccgataatgaatttaaggatcctgaaacggggaaaacgtgcttgctgaaggctatgctgaacctgcacgacggacagaatacaactattcccctgctgttggagatcgcccgacagaccgattccctcaaggaactagtgaacgctagttacacagacagttactacaaaggacagacagcccttcacatcgctatcgagcgcagaaatatggcccttgtaactctgttagtggagaatggagctgacgttcaggccgctgcacacggtgatttttttaagaaaaccaagggaaggccgggtttctattttggcgaactacctttgtcacttgctgcctgtacaaatcagctgggaatcgttaaattcttgcttcagaattcttggcagactgccgacatctcggcgcgagactccgtcggcaatactgtgctgcacgctctcgttgaggtggcggataatacggccgataataccaagtttgttacttccatgtacaacgagattttgatgctcggcgctaaattacaccccaccctgaaactggaggaactgacaaacaagaaaggaatgacacctctagctctggctgccggtacagggaagattggtgtgcttgcctatatcctccagagagaaatccaagagcctgaatgtcgacacctctccaggaaatttactgaatgggcctacggccctgtgcatagttctctttacgaccttagctgcattgacacctgtgagaagaacagcgtactcgaagtcatcgcctactcctccagtgaaacaccaaatagacacgacatgttgctcgtggagccactgaataggctgctccaagacaaatgggaccggttcgtcaagagaatcttttacttcaacttcttggtttactgtctctatatgataatatttaccatggctgcttactatcgaccggtcgatggtctgccaccattcaagatggagaagacaggtgattatttcagagtaactggggagatcttgtcagtgctcgggggagtgtacttttttttccgtggaattcagtattttctccagcgcaggccgtctatgaagacattattcgtggacagctatagtgaaatgctcttcttcctgcagtcactgttcatgttggccaccgtggtcttatattttagccacctgaaggagtacgttgcctctatggtattcagcctcgccttggggtggaccaatatgctgtattacacgaggggctttcagcagatgggcatttatgccgtgatgatcgaaaagatgatcctgagagacctttgtcggtttatgttcgtttacattgtttttctgtttgggttctctacagctgtggtaaccctcatcgaagatggcaaaaacgattctctcccctctgaatctacaagccacagatggcggggaccagcttgcagacctcccgatagctcctataatagcctgtatagcacctgcctagagttgtttaaatttactatcggtatgggagatctcgagttcaccgaaaattatgatttcaaagcagtgttcattatattgttgctcgcttacgtcatcctgacctatatactccttcttaatatgttgattgccctcatgggcgagactgtcaataagattgctcaggagtctaagaatatctggaaactgcagagggccattacaatcctggatacagagaagagtttccttaagtgcatgcgcaaggcctttagaagtggaaagctcctccaagttggctacacacccgacgggaaggatgattacagatggtgtttcagggtagatgaggtgaattggacgacctggaataccaacgtgggaattatcaacgaagatccgggtaactgtgaaggggtgaagcgaacgctttcatttagtctgagatcttcaagggtctcaggccgtcattggaagaattttgccttagtaccgttgttgagggaagcctctgccagagacagacagtcagcacagcccgaagaagtgtatctacgacagttcagtggctccttgaaaccagaggacgccgaagtcttcaaatctcccgcagcaagcggggaaaaatag

SEQ ID NO: 232969 - DNA, 2514 bp, Artificial Sequence
  derived and/or modified sequence
atggagacactgactccaggacaccttcagccatcaccctctagtcccagacctcgagccgcaccaggctccctaggcagggttacacgtaggcgtctgagtaggtggatagctcttactaggaaagtgtcctggacccctgctaggcctagtcagagcgccctgctctctccatccagaggccaggaaactgctcccccagtgccgggatgttgtccccgaacactgtcacctccagcccctaggcgcccatcaggttcaatgatcgccggagtgtccctgaaaccactgctccgcattactgctcgtatttggcgagcctgctgtagctcatgtcgcagggctaggtccacctcacagactacttcatcaaaagtggcgcctgcacttggttcggggagggccccagcacttgcctgcccggatccaccgctttgcctaagcgaccctgaaactgggaagacttgtctgttgaaagctatgctcaacttacatgacggacagaatactactatcccgctcttgttggaaattgccaggcagactgactccctcaaggaacttgtgaacgcctcgtatactgacagttactacaagggtcagactgccctccatattgctattgaacggagaaacatggccttggttactctgttggtcgagaacggtgctgatgtccaggccgctgctcatggcgatttctttaaaaaaactaaaggtcgtccaggcttctacttcggggagctgccactcagtctggctgcctgcacgaaccagctcggaatcgtcaaattcctcctccagaactcctggcagacagccgacatcagtgcgagggactcagtgggaaataccgtcttgcacgcactcgtggaggtcgctgacaatactgcagacaacaccaaattcgtcacctcaatgtacaatgagatcctcatgttaggtgccaaactacatccgactctaaagctggaagaactcacaaataagaagggcatgaccccattggccctagccgctgggaccggaaaaataggcgtcttggcctatatactgcaacgagaaatccaggagcctgaatgtagacacctctctcgcaagttcaccgagtgggcttatgggcctgtgcatagctccctgtacgacctatcgtgcatagatacgtgtgaaaaaaattcggtactggaggtgatcgcctactcttcttctgagacccccaatcgacatgacatgctgctagtggaacccctaaatagactcctccaggacaagtgggatagatttgtgaagcgtatcttttatttcaacttccttgtgtattgcctctatatgatcatattcactatggcggcatactatagaccagtggatgggctgccacctttcaaaatggaaaagactggtgactatttccgggtgactggtgagattctgtctgttctcggaggcgtgtatttcttttttagagggatccagtattttcttcagagacggcctagcatgaagactctgttcgttgactcatatagcgagatgcttttttttctgcagtctctctttatgctggccaccgtggtgctctacttctcccacctgaaagaatacgtggctagtatggttttctctttagctctgggctggacaaacatgttatattacaccaggggcttccagcagatggggatctatgcagtcatgatcgagaaaatgatcctaagggacctttgccggtttatgttcgtttatatcgtgttcctctttggcttcagcacagctgtggtgaccctcatcgaagacgggaagaacgactcactgcctagcgaaagcacttctcaccgatggcgtggccctgcttgtcggcctccggacagctcttacaactctctgtactccacctgcctagagctgttcaaatttaccattggcatgggcgatctggaatttactgaaaattatgatttcaaagcggttttcatcatcctgctcctcgcgtatgtaatcctaacgtatatactgctgttgaatatgttgattgccttaatgggtgagacagtgaataagatcgcccaggagagtaaaaatatctggaagttacagcgcgcaattacgatccttgacactgagaaatcctttctcaagtgcatgcgcaaggcttttcgcagcggtaagttactgcaggtcggttatactccagatggtaaggatgattacagatggtgcttcagagtcgatgaggtaaattggaccacctggaacaccaacgtggggatcattaatgaagacccaggcaactgcgagggcgttaaaagaacattgtctttttctttgcggagcagccgggtcagcgggcgacactggaaaaatttcgctcttgttccactgttgagagaggcttcagctcgggaccgccagagtgcgcagcccgaggaggtgtacttgcgccagttcagtggaagcctgaagccagaagatgcggaggtgtttaaaagcccagcagcgtccggcgaaaagtag

SEQ ID NO: 232970 - DNA, 2340 bp, Artificial Sequence
  derived and/or modified sequence
atgaagaaatggtcctcaaccgacctgggcgctgccgctgaccccttgcagaaagacacttgccctgacccattggatggggacccgaactccaggccacccccagcaaaaccccagcttagcaccgccaaaagccgcactagactgttcggaaagggcgacagcgaagaggcgtttcctgtggactgtcctcacgaagaaggggagctcgatagctgtccaactatcaccgtgagccccgtgataacaatccagaggcctggcgatggacccaccggcgcacgcctcctgagtcaggactctgtcgccgctagtacagaaaaaaccttgaggctctacgataggcgttcaatctttgaagctgtggcccagaacaattgtcaggatctagaaagtttgctgctgtttctccagaaatccaagaagcatctgaccgacaacgagtttaaggatcctgagaccggaaagacatgtctcctgaaagctatgcttaatcttcatgatggtcagaataccacaatccccctgcttcttgaaattgccaggcagaccgattccctcaaagagctggtcaacgcctcctatactgatagctattataagggacagaccgccctgcatattgccatcgaacgccgtaatatggccctggtcactttactcgtggaaaacggagctgacgtccaggctgcagcacacggagatttcttcaagaagacgaaaggaagacctggattctatttcggcgagttgcctctgtctttagctgcctgcactaaccagctgggtattgtgaagttccttctgcagaactcttggcaaactgccgacatctccgcaagggattctgtaggaaatacggtccttcacgcactggtcgaagtcgctgacaatacagccgacaacaccaagtttgtgacctcaatgtacaatgaaatcttaatgctcggtgctaaattacacccaacccttaagttagaggaacttacgaacaaaaaggggatgacccccttagcactggctgctggtacgggaaagatcgggaatcggcacgacatgctcctggtggagccgctgaataggctcctgcaggacaagtgggaccgttttgtcaaacgcatattttattttaatttcctggtctactgtctttacatgatcatctttacaatggcggcatactatcgccctgtggatggcctgcccccttttaaaatggaaaagaccggagactactttagagttactggcgagattctctccgtgctcgggggagtgtatttttttttcagggggatccagtatttcctgcagcggaggccatcgatgaaaaccttgtttgtagacagctattccgaaatgctcttttttcttcagtcccttttcatgctcgccacagtcgtgctctactttagtcatcttaaggagtacgtggcctccatggtttttagcctggctctgggatggacgaatatgctgtattatacccgcggatttcagcagatgggtatatacgccgtgatgatcgaaaagatgatactccgcgatctgtgcaggttcatgttcgtgtacatagtgtttttatttggcttctccacagctgtggtaaccctcattgaggatggcaagaacgatagtctcccaagcgaatcaacatctcataggtggagggggcctgcatgtcggcctcccgatagcagctataacagtctgtatagtacatgcctagagcttttcaaattcaccatcgggatgggggatctggaatttacggagaattatgacttcaaggctgtgttcattatactgctcctggcctatgtcatcttgacatatatactgcttttgaatatgcttattgcgctgatgggagagacggtcaacaagattgcacaggaaagcaaaaacatctggaaattacagcgcgctataacgatcctggacactgaaaaatccttcttgaagtgtatgaggaaggccttccgatctggcaaactactgcaggtcgggtacacccccgacggaaaggatgactacaggtggtgcttccgtgtggacgaagtgaactggaccacttggaacactaatgtggggattataaatgaagaccctggtaactgtgaaggcgtcaagagaaccctttcgtttagtctacgttcctccagggtgtcgggtagacactggaaaaattttgcattagtacccctcctccgggaggcttccgccagagatcgtcagagcgcacaaccggaggaagtgtatctgaggcaatttagcggctctttaaaacctgaggacgcagaggttttcaagagcccagcggcatcaggcgaaaagtag

SEQ ID NO: 232971 - DNA, 2520 bp, Artificial Sequence
  derived and/or modified sequence
atgaaaaagtggagttccactgatctaggcgcagcggcagatcctctccagaaggacacttgcccagacccgctcgacggagatccaaacagcaggcctcctcccgctaaacctcagctgtccacggccaagtccaggaccaggctattcgggaagggcgacagcgaagaagccttcccagtggattgcccccatgaggaaggggaattagattcgtgtcccacaattacggttagtcctgtcattaccattcagaggcctggtgatggccctacaggagcaagattgctcagccaggattccgtcgcagcgagtacggagaaaaccctgcgattgtatgatcgcaggtccatctttgaggccgtcgctcagaataattgtcaggacctggaatccctcctccttttcctgcagaaaagtaagaagcacctcacagacaatgagtttaaggatccagagaccggcaagacttgcctgcttaaagcaatgctcaaccttcatgatggtcagaatactacgatcccattgctgctggagatcgccaggcagactgattccctcaaggaactcgtgaatgctagttatactgactcttattataaaggccagacagccctccatatagcgattgaacgtcgtaacatggcattagtgactttactcgtggagaatggcgcagatgttcaggccgcagcacacggagatttcttcaaaaagacaaaaggacggcctggattttattttggtgagcttccactctcattagcagcttgcaccaaccagctgggcatcgtcaagttcttattacagaatagttggcagaccgctgacatttccgcgcgagacagcgtggggaacacagttctccacgcccttgtagaagtggctgacaatacagccgacaacacgaaattcgttacctccatgtacaacgagatcctcatgctgggagctaagctccatcccaccctgaaactggaagaactgactaataagaagggcatgaccccgctcgcactggcagctggaacaggcaagatcggtgtgctggcctacatccttcagagagagattcaggagcccgagtgtcggcacttaagcaggaaattcactgagtgggcatatggtccagtccactcctctctttacgatttgagttgtatcgacacatgcgaaaaaaattcagtactggaggtgatcgcatacagctcctccgaaacccctaataggcatgacatgctgttggtagaaccacttaatagactgctccaagataagtgggataggttcgtgaagcggattttctactttaacttcctggtttactgtctctatatgatcatctttacaatggccgcttactatcgccctgtggatgggctgccacccttcaagatggaaaaaaccggcgattacttccgcgtcacaggggaaatcctgtcagtgctcgggggtgtgtacttctttttcaggggaattcaatatttcctccagcgcagaccttcgatgaagaccctgtttgtggactcctattcagaaatgctcttcttcctgcagtccttgtttatgctggcaactgtagtgctgtatttttcgcacctcaaagagtatgtcgccagcatggtctttagcctcgccttgggatggaccaacatgttgtattacacccgaggatttcaacagatgggaatttacgccgtaatgattgagaagatgattctcagggacttatgtcgctttatgttcgtgtacatcgtctttctgtttgggtttagcacagccgtagtaacgctgattgaagacggcaaaaatgacagtctccccagtgagagcacatcacatagatggagaggaccggcatgccgtccaccagatagctcttataatagcttgtacagtacatgcttagagctttttaagttcacaatcggcatgggtgacctggagtttacagaaaactacgacttcaaagctgtgtttataatcttgttattagcatacgtgatcctcacttatatactcctcctcaatatgctcattgctttgatgggagaaacagtgaataagatcgcccaagaatccaagaacatatggaaattgcagagggcgatcacaatcctggataccgaaaaatctttcctgaaatgcatgaggaaggcttttaggtccgggaagctcctccaggttgggtacacccctgatggcaaggacgactacagatggtgcttcagggtggacgaggtcaattggacgacttggaataccaatgtcggaattattaacgaggatccaggtaattgcgagggagtaaagcgcactctttcattctccctccgttcgtctcgcgtgagtggacgtcactggaagaacttcgcccttgtcccacttctgagggaagctagcgccagagacagacaatccgctcagccagaggaggtgtatttacgtcagttttcaggcagtctgaaacctgaagatgccgaagtgttcaagtcccctgctgcctccggggaaaagtag

SEQ ID NO: 232972 - DNA, 2520 bp, Artificial Sequence
  derived and/or modified sequence
atgaagaagtggagttccacagatttaggggcagccgcagatcctcttcagaaggacacctgccccgaccctctggatggcgatccaaactctcgacctcctccggcaaagcctcagctttcaacagcgaagtctcgaacccgtctgttcggcaagggagattcagaggaggctttcccggtcgactgcccgcacgaggaaggagagttagatagttgcccaacgatcacagtgtcccctgtcatcacaattcagaggccaggggacgggcctactggcgcacgcttgcttagccaggactctgtggcggctagcacagagaaaacactcaggctgtacgatcgacgatccatcttcgaagccgtcgctcagaacaactgtcaggacctagaatctctactgctgtttctgcagaaatccaagaagcaccttacagacaacgaattcaaagacccagagaccggaaagacctgtctgctgaaagctatgctgaacctccacgatgggcagaacacaacgatacccttgctgctggaaatcgcacgacaaacagactcgctgaaggaactggtgaacgctagctacacagactcatactacaaggggcagaccgccctgcatatcgcaattgaaagacgaaatatggccttagtcaccttactggttgaaaatggcgctgatgtccaggccgcagctcacggcgatttctttaagaagaccaaaggaagaccgggtttctattttggtgagctccctttaagccttgcggcatgtactaaccagttaggcattgtgaaatttctgctgcagaactcctggcagacggctgacatttctgccagagatagcgtggggaatactgttctccatgccctcgtggaggtggcagacaacaccgccgataatactaagtttgtgacatcaatgtataatgagattctgatgctgggcgctaagctgcacccgaccttgaaacttgaagaattaactaataagaagggcatgacgcccttagctctagccgctgggaccgggaagattggtgtccttgcctacatcctgcagagagagatccaagagccagaatgtcgtcatctatcgaggaaatttaccgaatgggcctacggccctgtccactctagcctgtacgacttatcatgcattgatacctgtgaaaagaattcagtgctcgaggttatcgcctattcctcttcagagacccccaataggcacgacatgctgcttgtcgaaccgctgaatcgactgctgcaggataaatgggataggtttgtaaagagaatcttctatttcaactttcttgtatactgcctgtatatgatcattttcacaatggccgcttattaccgcccagtcgatgggctgcccccattcaagatggagaaaacgggcgattactttagggtaacaggtgagatcctcagcgtcctgggtggtgtgtatttcttcttccgcggaatccaatatttcctgcagaggcgaccttcaatgaagaccctcttcgtcgatagttactcagaaatgctgttcttcctgcagagcctgtttatgctggccacggtggtgctatatttctcccacttgaaggagtatgttgcctcaatggtcttcagccttgccctcggatggaccaatatgctgtattacactagagggttccagcagatgggtatctacgctgtaatgatagaaaagatgatcctccgagatctctgccgcttcatgttcgtctatatcgtgttcctttttggcttctcgactgctgtggtaacgctcatagaggacggcaaaaatgactctctgccatccgagtctactagtcacagatggcgcggaccagcctgtagaccacctgacagctcctataattccctgtattctacctgtctggagctttttaaattcaccatcggaatgggagatcttgagttcaccgagaattatgattttaaagccgtattcatcatcctgctgctggcttatgttattctcacttatatcctgctgttaaatatgctcattgccctgatgggggagacagtgaacaagatcgctcaggagagcaagaacatctggaaacttcagagggccattacaattctcgacactgagaagtccttcctgaagtgcatgagaaaggcttttagaagcggaaaactcttacaggtgggctatacccctgacggcaaggatgattatcgatggtgtttccgagttgatgaggtgaattggacaacttggaataccaatgtggggatcatcaacgaagaccctgggaattgtgagggcgttaagcgcacactcagcttcagcctccgatcttctcgggtgtctggcaggcattggaagaactttgccctggtgcctcttctccgcgaggcctccgccagggacagacagtccgcacagcccgaagaagtctacttgcggcagttcagcggatctctgaaaccagaggatgccgaggttttcaagtcacctgcagcttctggcgagaaatag

SEQ ID NO: 232973 - DNA, 2553 bp, Artificial Sequence
  derived and/or modified sequence
atgaagaagtggtcttcgaccgacctgggggctgccgcagaccctttacagaaggatacgtgcccagacccattggatggcgatccaaacagtagacctccccctgccaagccccagctgtcgacggccaaatcccggactcggctcttcggcaagggcgactccgaagaagccttccccgtggactgccctcacgaggaaggggagttggactcttgtccgactatcaccgtgtccccggtgatcacgatccaacgacctggtgacgggccaacaggcgctcgtcttcttagccaagattccgtggccgctagcacggaaaagacgttaagactatatgatagacgaagcatcttcgaggcagtcgcgcagaacaactgtcaggatctggaatctcttctgctcttcctgcagaaaagcaaaaaacatctgacagataatgaattcaaggacccggaaacaggtaagacctgcctgctaaaagccatgctcaatcttcacgatggccagaatacaaccatacctttgcttctggagatcgctaggcagactgactctctaaaggagctcgtaaatgcctcatataccgattcttattacaaggggcagaccgcattacacattgcgattgagcgcaggaacatggccttggtcaccctactcgtggagaatggcgctgatgtgcaagccgctgcacacggagatttttttaagaagacaaaaggccgtccaggtttttattttggcgagctacctttgagcctcgccgcttgcacgaatcagctcgggatcgtgaaatttttgctgcaaaattcctggcagaccgccgatatcagcgcacgcgattccgtgggcaatactgtcctgcatgccctggtggaagtggcggacaatactgccgataacaccaaatttgtgacttcaatgtataacgagatcttaatgttgggtgccaagctgcatccgaccctgaaactcgaggaattaaccaataaaaaaggtatgacacccttagccctggcggcaggcaccggaaagataggtgttattgaaaacggtccacctctcagttttatggttctggcctatatcctacagcgagaaatccaggagcccgagtgcaggcatctttccagaaagtttaccgaatgggcttacgggcctgtccattcctccctgtacgacctgtcttgtatcgacacctgcgagaaaaattctgtgctggaggtgatcgcatactcaagctcggaaacacctaacagacatgatatgctgctggttgagccactaaaccggttgttgcaggacaagtgggaccgctttgtaaaaagaattttttatttcaactttctggtgtattgtctctacatgatcatctttaccatggcggcatactaccggccagtggacggcctgccgccttttaaaatggagaaaaccggcgactacttccgcgtaacaggcgagattcttagcgtcctgggcggagtgtactttttcttccgcggtatccagtatttcctgcagcggcgtccctctatgaagaccctgtttgtggacagctacagcgaaatgctcttttttcttcagagcctgttcatgctggcaacagtggtactctattttagtcaccttaaggaatacgttgcgagcatggttttctcgttagccctagggtggacaaatatgttgtattacaccagggggttccagcagatgggtatttacgccgttatgattgagaagatgatcctgagggacctctgtcgcttcatgttcgtgtacattgtgtttctgttcggtttttctacggctgtcgtcacacttattgaagacggcaagaatgacagtttgccttccgagagcaccagtcacagatggcgcggacctgcgtgtaggcctcctgattctagttataactccttatacagcacttgccttgaactgttcaaattcaccatcggaatgggcgatttagaattcacagagaactatgattttaaggctgtgtttatcatactcctgctggcctatgtgatactgacctatatcctcctgctcaacatgctcatcgcattaatgggggagaccgttaacaagatagcgcaggaatctaaaaacatatggaagctccagcgcgctatcaccatcttagacacggaaaagtcctttctgaagtgtatgcggaaagctttcaggagtggcaaactgttgcaggtgggctatacacccgatggaaaggatgactacagatggtgtttccgggtggacgaggtgaactggacaacatggaatacaaacgttggcatcatcaatgaggatcctggtaactgcgagggcgtcaaacgcaccctctccttttcccttcggagttccagggtgtctggtagacactggaaaaattttgccctcgtgcctctccttcgcgaagcttcggcgagggacaggcaaagcgcgcagccagaggaagtgtacctgagacaattctcaggatccctcaagccagaagatgccgaagtgtttaagtcgcctgcagcatcaggggaaaagtag

SEQ ID NO: 232974 - DNA, 4105 bp, Artificial Sequence
  derived and/or modified sequence
ccgaagggcgtccacagcgactcctgctagtgcagggcagctgctgccagggccgggcccgggaccccacggaggcggggagaccactcttctcccacacgagcccagctctcccttcgagtagcaaccgccttcaagctcacaagcacccgtgggcctggggtgtgcctgcgtctagctggttgcacactgggccacagaggatccagcaaggatgaagaaatggagcagcacagacttgggggcagctgcggacccactccaaaaggacacctgcccagaccccctggatggagaccctaactccaggccacctccagccaagccccagctctccacggccaagagccgcacccggctctttgggaagggtgactcggaggaggctttcccggtggattgccctcacgaggaaggtgagctggactcctgcccgaccatcacagtcagccctgttatcaccatccagaggccaggagacggccccaccggtgccaggctgctgtcccaggactctgtcgccgccagcaccgagaagaccctcaggctctatgatcgcaggagtatctttgaagccgttgctcagaataactgccaggatctggagagcctgctgctcttcctgcagaagagcaagaagcacctcacagacaacgagttcaaagaccctgagacagggaagacctgtctgctgaaagccatgctcaacctgcacgacggacagaacaccaccatccccctgctcctggagatcgcgcggcaaacggacagcctgaaggagcttgtcaacgccagctacacggacagctactacaagggccagacagcactgcacatcgccatcgagagacgcaacatggccctggtgaccctcctggtggagaacggagcagacgtccaggctgcggcccatggggacttctttaagaaaaccaaagggcggcctggattctacttcggtgaactgcccctgtccctggccgcgtgcaccaaccagctgggcatcgtgaagttcctgctgcagaactcctggcagacggccgacatcagcgccagggactcggtgggcaacacggtgctgcacgccctggtggaggtggccgacaacacggccgacaacacgaagtttgtgacgagcatgtacaatgagattctgatgctgggggccaaactgcacccgacgctgaagctggaggagctcaccaacaagaagggaatgacgccgctggctctggcagctgggaccgggaagatcggggtcttggcctatattctccagcgggagatccaggagcccgagtgcaggcacctgtccaggaagttcaccgagtgggcctacgggcccgtgcactcctcgctgtacgacctgtcctgcatcgacacctgcgagaagaactcggtgctggaggtgatcgcctacagcagcagcgagacccctaatcgccacgacatgctcttggtggagccgctgaaccgactcctgcaggacaagtgggacagattcgtcaagcgcatcttctacttcaacttcctggtctactgcctgtacatgatcatcttcaccatggctgcctactacaggcccgtggatggcttgcctccctttaagatggaaaaaactggagactatttccgagttactggagagatcctgtctgtgttaggaggagtctacttctttttccgagggattcagtatttcctgcagaggcggccgtcgatgaagaccctgtttgtggacagctacagtgagatgcttttctttctgcagtcactgttcatgctggccaccgtggtgctgtacttcagccacctcaaggagtatgtggcttccatggtattctccctggccttgggctggaccaacatgctctactacacccgcggtttccagcagatgggcatctatgccgtcatgatagagaagatgatcctgagagacctgtgccgtttcatgtttgtctacatcgtcttcttgttcgggttttccacagcggtggtgacgctgattgaagacgggaagaatgactccctgccgtctgagtccacgtcgcacaggtggcgggggcctgcctgcaggccccccgatagctcctacaacagcctgtactccacctgcctggagctgttcaagttcaccatcggcatgggcgacctggagttcactgagaactatgacttcaaggctgtcttcatcatcctgctgctggcctatgtaattctcacctacatcctcctgctcaacatgctcatcgccctcatgggtgagactgtcaacaagatcgcacaggagagcaagaacatctggaagctgcagagagccatcaccatcctggacacggagaagagcttccttaagtgcatgaggaaggccttccgctcaggcaagctgctgcaggtggggtacacacctgatggcaaggacgactaccggtggtgcttcagggtggacgaggtgaactggaccacctggaacaccaacgtgggcatcatcaacgaagacccgggcaactgtgagggcgtcaagcgcaccctgagcttctccctgcggtcaagcagagtttcaggcagacactggaagaactttgccctggtcccccttttaagagaggcaagtgctcgagataggcagtctgctcagcccgaggaagtttatctgcgacagttttcagggtctctgaagccagaggacgctgaggtcttcaagagtcctgccgcttccggggagaagtgaggacgtcacgcagacagcactgtcaacactgggccttaggagaccccgttgccacggggggctgctgagggaacaccagtgctctgtcagcagcctggcctggtctgtgcctgcccagcatgttcccaaatctgtgctggacaagctgtgggaagcgttcttggaagcatggggagtgatgtacatccaaccgtcactgtccccaagtgaatctcctaacagactttcaggtttttactcactttactaaacagtttggatggtcagtctctactgggacatgttaggcccttgttttctttgattttattcttttttttgagacagaatttcactcttctcacccaggctggaatgcagtggcacaattttggctccctgcaacctccgcctcctggattccagcaattctcctgcctcggcttcccaagtagctgggattacaggcacgtgccaccatgtctggctaattttttgtatttttttaatagatatggggtttcgccatgttggccaggctggtctcgaactcctgacctcaggtgatccgcccacctcggcctcccaaagtgctgggattacaggtgtgagcctccacacctggctgttttctttgattttattctttttttttttttctgtgagacagagtttcactcttgttgcccaggctggagtgcagtggtgtgatcttggctcactgcaacttctgcctcccgggttcaagcgattcttctgcttcagtctcccaagtagcttggattacaggtgagcactaccacgcccggctaatttttgtatttttaatagagacggggtttcaccatgttggccaggctggtctcgaactcttgacctcaggtgatctgcccgccttggcctcccaaagtgctgggattacaggtgtgagccgctgcgctcggccttctttgattttatattattaggagcaaaagtaaatgaagcccaggaaaacacctttgggaacaaactcttcctttgatggaaaatgcagaggcccttcctctctgtgccgtgcttgctcctcttacctgcccgggtggtttgggggtgttggtgtttcctccctggagaagatgggggaggctgtcccactcccagctctggcagaatcaagctgttgcagcagtgccttcttcatccttccttacgatcaatcacagtctccagaagatcagctcaattgctgtgcaggttaaaactacagaaccacatcccaaaggtacctggtaagaatgtttgaaagatcttccatttctaggaaccccagtcctgcttctccgcaatggcacatgcttccactccatccatactggcatcctcaaataaacagatatgtatacatatata

SEQ ID NO: 232975 - DNA, 4170 bp, Artificial Sequence
  derived and/or modified sequence
ccgaagggcgtccacagcgactcctgctagtgcagggcagctgctgccagggccgggcccgggaccccacggaggcggggagaccactcttctcccacacgagcccagctctcccttcgagtagcaaccgccttcaagctcacaagcacccgtgggcctggggtgtgcctgcgtctagctggttgcacactgggccacagaggatccagcaaggatgaagaaatggagcagcacagacttgggggcagctgcggacccactccaaaaggacacctgcccagaccccctggatggagaccctaactccaggccacctccagccaagccccagctctccacggccaagagccgcacccggctctttgggaagggtgactcggaggaggctttcccggtggattgccctcacgaggaaggtgagctggactcctgcccgaccatcacagtcagccctgttatcaccatccagaggccaggagacggccccaccggtgccaggctgctgtcccaggactctgtcgccgccagcaccgagaagaccctcaggctctatgatcgcaggagtatctttgaagccgttgctcagaataactgccaggatctggagagcctgctgctcttcctgcagaagagcaagaagcacctcacagacaacgagttcaaaggtggccccagcgctgggctcggggagggccccagccctggcctgccctgaccctcccttatgtctttcagaccctgagacagggaagacctgtctgctgaaagccatgctcaacctgcacgacggacagaacaccaccatccccctgctcctggagatcgcgcggcaaacggacagcctgaaggagcttgtcaacgccagctacacggacagctactacaagggccagacagcactgcacatcgccatcgagagacgcaacatggccctggtgaccctcctggtggagaacggagcagacgtccaggctgcggcccatggggacttctttaagaaaaccaaagggcggcctggattctacttcggtgaactgcccctgtccctggccgcgtgcaccaaccagctgggcatcgtgaagttcctgctgcagaactcctggcagacggccgacatcagcgccagggactcggtgggcaacacggtgctgcacgccctggtggaggtggccgacaacacggccgacaacacgaagtttgtgacgagcatgtacaatgagattctgatgctgggggccaaactgcacccgacgctgaagctggaggagctcaccaacaagaagggaatgacgccgctggctctggcagctgggaccgggaagatcggggtcttggcctatattctccagcgggagatccaggagcccgagtgcaggcacctgtccaggaagttcaccgagtgggcctacgggcccgtgcactcctcgctgtacgacctgtcctgcatcgacacctgcgagaagaactcggtgctggaggtgatcgcctacagcagcagcgagacccctaatcgccacgacatgctcttggtggagccgctgaaccgactcctgcaggacaagtgggacagattcgtcaagcgcatcttctacttcaacttcctggtctactgcctgtacatgatcatcttcaccatggctgcctactacaggcccgtggatggcttgcctccctttaagatggaaaaaactggagactatttccgagttactggagagatcctgtctgtgttaggaggagtctacttctttttccgagggattcagtatttcctgcagaggcggccgtcgatgaagaccctgtttgtggacagctacagtgagatgcttttctttctgcagtcactgttcatgctggccaccgtggtgctgtacttcagccacctcaaggagtatgtggcttccatggtattctccctggccttgggctggaccaacatgctctactacacccgcggtttccagcagatgggcatctatgccgtcatgatagagaagatgatcctgagagacctgtgccgtttcatgtttgtctacatcgtcttcttgttcgggttttccacagcggtggtgacgctgattgaagacgggaagaatgactccctgccgtctgagtccacgtcgcacaggtggcgggggcctgcctgcaggccccccgatagctcctacaacagcctgtactccacctgcctggagctgttcaagttcaccatcggcatgggcgacctggagttcactgagaactatgacttcaaggctgtcttcatcatcctgctgctggcctatgtaattctcacctacatcctcctgctcaacatgctcatcgccctcatgggtgagactgtcaacaagatcgcacaggagagcaagaacatctggaagctgcagagagccatcaccatcctggacacggagaagagcttccttaagtgcatgaggaaggccttccgctcaggcaagctgctgcaggtggggtacacacctgatggcaaggacgactaccggtggtgcttcagggtggacgaggtgaactggaccacctggaacaccaacgtgggcatcatcaacgaagacccgggcaactgtgagggcgtcaagcgcaccctgagcttctccctgcggtcaagcagagtttcaggcagacactggaagaactttgccctggtcccccttttaagagaggcaagtgctcgagataggcagtctgctcagcccgaggaagtttatctgcgacagttttcagggtctctgaagccagaggacgctgaggtcttcaagagtcctgccgcttccggggagaagtgaggacgtcacgcagacagcactgtcaacactgggccttaggagaccccgttgccacggggggctgctgagggaacaccagtgctctgtcagcagcctggcctggtctgtgcctgcccagcatgttcccaaatctgtgctggacaagctgtgggaagcgttcttggaagcatggggagtgatgtacatccaaccgtcactgtccccaagtgaatctcctaacagactttcaggtttttactcactttactaaacagtttggatggtcagtctctactgggacatgttaggcccttgttttctttgattttattcttttttttgagacagaatttcactcttctcacccaggctggaatgcagtggcacaattttggctccctgcaacctccgcctcctggattccagcaattctcctgcctcggcttcccaagtagctgggattacaggcacgtgccaccatgtctggctaattttttgtatttttttaatagatatggggtttcgccatgttggccaggctggtctcgaactcctgacctcaggtgatccgcccacctcggcctcccaaagtgctgggattacaggtgtgagcctccacacctggctgttttctttgattttattctttttttttttttctgtgagacagagtttcactcttgttgcccaggctggagtgcagtggtgtgatcttggctcactgcaacttctgcctcccgggttcaagcgattcttctgcttcagtctcccaagtagcttggattacaggtgagcactaccacgcccggctaatttttgtatttttaatagagacggggtttcaccatgttggccaggctggtctcgaactcttgacctcaggtgatctgcccgccttggcctcccaaagtgctgggattacaggtgtgagccgctgcgctcggccttctttgattttatattattaggagcaaaagtaaatgaagcccaggaaaacacctttgggaacaaactcttcctttgatggaaaatgcagaggcccttcctctctgtgccgtgcttgctcctcttacctgcccgggtggtttgggggtgttggtgtttcctccctggagaagatgggggaggctgtcccactcccagctctggcagaatcaagctgttgcagcagtgccttcttcatccttccttacgatcaatcacagtctccagaagatcagctcaattgctgtgcaggttaaaactacagaaccacatcccaaaggtacctggtaagaatgtttgaaagatcttccatttctaggaaccccagtcctgcttctccgcaatggcacatgcttccactccatccatactggcatcctcaaataaacagatatgtatacat

SEQ ID NO: 232976 - DNA, 2340 bp, Artificial Sequence
  derived and/or modified sequence
atgaagaaatggagcagcacagacttgggggcagctgcggacccactccaaaaggacacctgcccagaccccctggatggagaccctaactccaggccacctccagccaagccccagctctccacggccaagagccgcacccggctctttgggaagggtgactcggaggaggctttcccggtggattgccctcacgaggaaggtgagctggactcctgcccgaccatcacagtcagccctgttatcaccatccagaggccaggagacggccccaccggtgccaggctgctgtcccaggactctgtcgccgccagcaccgagaagaccctcaggctctatgatcgcaggagtatctttgaagccgttgctcagaataactgccaggatctggagagcctgctgctcttcctgcagaagagcaagaagcacctcacagacaacgagttcaaagaccctgagacagggaagacctgtctgctgaaagccatgctcaacctgcacgacggacagaacaccaccatccccctgctcctggagatcgcgcggcaaacggacagcctgaaggagcttgtcaacgccagctacacggacagctactacaagggccagacagcactgcacatcgccatcgagagacgcaacatggccctggtgaccctcctggtggagaacggagcagacgtccaggctgcggcccatggggacttctttaagaaaaccaaagggcggcctggattctacttcggtgaactgcccctgtccctggccgcgtgcaccaaccagctgggcatcgtgaagttcctgctgcagaactcctggcagacggccgacatcagcgccagggactcggtgggcaacacggtgctgcacgccctggtggaggtggccgacaacacggccgacaacacgaagtttgtgacgagcatgtacaatgagattctgatgctgggggccaaactgcacccgacgctgaagctggaggagctcaccaacaagaagggaatgacgccgctggctctggcagctgggaccgggaagatcgggaatcgccacgacatgctcttggtggagccgctgaaccgactcctgcaggacaagtgggacagattcgtcaagcgcatcttctacttcaacttcctggtctactgcctgtacatgatcatcttcaccatggctgcctactacaggcccgtggatggcttgcctccctttaagatggaaaaaactggagactatttccgagttactggagagatcctgtctgtgttaggaggagtctacttctttttccgagggattcagtatttcctgcagaggcggccgtcgatgaagaccctgtttgtggacagctacagtgagatgcttttctttctgcagtcactgttcatgctggccaccgtggtgctgtacttcagccacctcaaggagtatgtggcttccatggtattctccctggccttgggctggaccaacatgctctactacacccgcggtttccagcagatgggcatctatgccgtcatgatagagaagatgatcctgagagacctgtgccgtttcatgtttgtctacatcgtcttcttgttcgggttttccacagcggtggtgacgctgattgaagacgggaagaatgactccctgccgtctgagtccacgtcgcacaggtggcgggggcctgcctgcaggccccccgatagctcctacaacagcctgtactccacctgcctggagctgttcaagttcaccatcggcatgggcgacctggagttcactgagaactatgacttcaaggctgtcttcatcatcctgctgctggcctatgtaattctcacctacatcctcctgctcaacatgctcatcgccctcatgggtgagactgtcaacaagatcgcacaggagagcaagaacatctggaagctgcagagagccatcaccatcctggacacggagaagagcttccttaagtgcatgaggaaggccttccgctcaggcaagctgctgcaggtggggtacacacctgatggcaaggacgactaccggtggtgcttcagggtggacgaggtgaactggaccacctggaacaccaacgtgggcatcatcaacgaagacccgggcaactgtgagggcgtcaagcgcaccctgagcttctccctgcggtcaagcagagtttcaggcagacactggaagaactttgccctggtcccccttttaagagaggcaagtgctcgagataggcagtctgctcagcccgaggaagtttatctgcgacagttttcagggtctctgaagccagaggacgctgaggtcttcaagagtcctgccgcttccggggagaagtga

SEQ ID NO: 232977 - DNA, 4413 bp, Artificial Sequence
  derived and/or modified sequence
ctgccgctcaccctattccagggacacagtctgcttggctcttctggactgagccatcctcatcaccgagatcctccctgaattcagcccacgacagccaccccggccgttttccttgttctgtgtggggagggaggcagcgcggtggttatcaacctcaccctgcagaggaggcacctgaggcccagagacgaggagggatgggtctaacccagaaccacagatggctctgagccgggggcctgtccaccctcccaggccgacgtcagtggccgcaggactgcctgggccctgctaggcctgctcacctctgaggcctctggggtgagaggttcagtcctggaaacacttcagttctagggggctgggggcagcagcaagttggagttttggggtaccctgcttcacagggcccttggcaaggagggcaggtggggtctaaggacaagcagtccttactttgggagtcaaccccggcgtggtggctgctgcaggttgcacactgggccacagaggatccagcaaggatgaagaaatggagcagcacagacttgggggcagctgcggacccactccaaaaggacacctgcccagaccccctggatggagaccctaactccaggccacctccagccaagccccagctctccacggccaagagccgcacccggctctttgggaagggtgactcggaggaggctttcccggtggattgccctcacgaggaaggtgagctggactcctgcccgaccatcacagtcagccctgttatcaccatccagaggccaggagacggccccaccggtgccaggctgctgtcccaggactctgtcgccgccagcaccgagaagaccctcaggctctatgatcgcaggagtatctttgaagccgttgctcagaataactgccaggatctggagagcctgctgctcttcctgcagaagagcaagaagcacctcacagacaacgagttcaaagaccctgagacagggaagacctgtctgctgaaagccatgctcaacctgcacgacggacagaacaccaccatccccctgctcctggagatcgcgcggcaaacggacagcctgaaggagcttgtcaacgccagctacacggacagctactacaagggccagacagcactgcacatcgccatcgagagacgcaacatggccctggtgaccctcctggtggagaacggagcagacgtccaggctgcggcccatggggacttctttaagaaaaccaaagggcggcctggattctacttcggtgaactgcccctgtccctggccgcgtgcaccaaccagctgggcatcgtgaagttcctgctgcagaactcctggcagacggccgacatcagcgccagggactcggtgggcaacacggtgctgcacgccctggtggaggtggccgacaacacggccgacaacacgaagtttgtgacgagcatgtacaatgagattctgatgctgggggccaaactgcacccgacgctgaagctggaggagctcaccaacaagaagggaatgacgccgctggctctggcagctgggaccgggaagatcggggtcttggcctatattctccagcgggagatccaggagcccgagtgcaggcacctgtccaggaagttcaccgagtgggcctacgggcccgtgcactcctcgctgtacgacctgtcctgcatcgacacctgcgagaagaactcggtgctggaggtgatcgcctacagcagcagcgagacccctaatcgccacgacatgctcttggtggagccgctgaaccgactcctgcaggacaagtgggacagattcgtcaagcgcatcttctacttcaacttcctggtctactgcctgtacatgatcatcttcaccatggctgcctactacaggcccgtggatggcttgcctccctttaagatggaaaaaactggagactatttccgagttactggagagatcctgtctgtgttaggaggagtctacttctttttccgagggattcagtatttcctgcagaggcggccgtcgatgaagaccctgtttgtggacagctacagtgagatgcttttctttctgcagtcactgttcatgctggccaccgtggtgctgtacttcagccacctcaaggagtatgtggcttccatggtattctccctggccttgggctggaccaacatgctctactacacccgcggtttccagcagatgggcatctatgccgtcatgatagagaagatgatcctgagagacctgtgccgtttcatgtttgtctacatcgtcttcttgttcgggttttccacagcggtggtgacgctgattgaagacgggaagaatgactccctgccgtctgagtccacgtcgcacaggtggcgggggcctgcctgcaggccccccgatagctcctacaacagcctgtactccacctgcctggagctgttcaagttcaccatcggcatgggcgacctggagttcactgagaactatgacttcaaggctgtcttcatcatcctgctgctggcctatgtaattctcacctacatcctcctgctcaacatgctcatcgccctcatgggtgagactgtcaacaagatcgcacaggagagcaagaacatctggaagctgcagagagccatcaccatcctggacacggagaagagcttccttaagtgcatgaggaaggccttccgctcaggcaagctgctgcaggtggggtacacacctgatggcaaggacgactaccggtggtgcttcagggtggacgaggtgaactggaccacctggaacaccaacgtgggcatcatcaacgaagacccgggcaactgtgagggcgtcaagcgcaccctgagcttctccctgcggtcaagcagagtttcaggcagacactggaagaactttgccctggtcccccttttaagagaggcaagtgctcgagataggcagtctgctcagcccgaggaagtttatctgcgacagttttcagggtctctgaagccagaggacgctgaggtcttcaagagtcctgccgcttccggggagaagtgaggacgtcacgcagacagcactgtcaacactgggccttaggagaccccgttgccacggggggctgctgagggaacaccagtgctctgtcagcagcctggcctggtctgtgcctgcccagcatgttcccaaatctgtgctggacaagctgtgggaagcgttcttggaagcatggggagtgatgtacatccaaccgtcactgtccccaagtgaatctcctaacagactttcaggtttttactcactttactaaacagtttggatggtcagtctctactgggacatgttaggcccttgttttctttgattttattcttttttttgagacagaatttcactcttctcacccaggctggaatgcagtggcacaattttggctccctgcaacctccgcctcctggattccagcaattctcctgcctcggcttcccaagtagctgggattacaggcacgtgccaccatgtctggctaattttttgtatttttttaatagatatggggtttcgccatgttggccaggctggtctcgaactcctgacctcaggtgatccgcccacctcggcctcccaaagtgctgggattacaggtgtgagcctccacacctggctgttttctttgattttattctttttttttttttctgtgagacagagtttcactcttgttgcccaggctggagtgcagtggtgtgatcttggctcactgcaacttctgcctcccgggttcaagcgattcttctgcttcagtctcccaagtagcttggattacaggtgagcactaccacgcccggctaatttttgtatttttaatagagacggggtttcaccatgttggccaggctggtctcgaactcttgacctcaggtgatctgcccgccttggcctcccaaagtgctgggattacaggtgtgagccgctgcgctcggccttctttgattttatattattaggagcaaaagtaaatgaagcccaggaaaacacctttgggaacaaactcttcctttgatggaaaatgcagaggcccttcctctctgtgccgtgcttgctcctcttacctgcccgggtggtttgggggtgttggtgtttcctccctggagaagatgggggaggctgtcccactcccagctctggcagaatcaagctgttgcagcagtgccttcttcatccttccttacgatcaatcacagtctccagaagatcagctcaattgctgtgcaggttaaaactacagaaccacatcccaaaggtacctggtaagaatgtttgaaagatcttccatttctaggaaccccagtcctgcttctccgcaatggcacatgcttccactccatccatactggcatcctcaaataaacagatatgtatacat

SEQ ID NO: 232978 - DNA, 4087 bp, Artificial Sequence
  derived and/or modified sequence
gcagagtgtgcagtatagattcagcgtttgtcgactgactgaatgatagcacaatcccggctgcttcctgttggctgggtttggttggactgggacccgtcagaggaaaaggcaacgccgctgacaaagaacattgccgaaaggttcatgggaggctccggctaacaggttgcacactgggccacagaggatccagcaaggatgaagaaatggagcagcacagacttgggggcagctgcggacccactccaaaaggacacctgcccagaccccctggatggagaccctaactccaggccacctccagccaagccccagctctccacggccaagagccgcacccggctctttgggaagggtgactcggaggaggctttcccggtggattgccctcacgaggaaggtgagctggactcctgcccgaccatcacagtcagccctgttatcaccatccagaggccaggagacggccccaccggtgccaggctgctgtcccaggactctgtcgccgccagcaccgagaagaccctcaggctctatgatcgcaggagtatctttgaagccgttgctcagaataactgccaggatctggagagcctgctgctcttcctgcagaagagcaagaagcacctcacagacaacgagttcaaagaccctgagacagggaagacctgtctgctgaaagccatgctcaacctgcacgacggacagaacaccaccatccccctgctcctggagatcgcgcggcaaacggacagcctgaaggagcttgtcaacgccagctacacggacagctactacaagggccagacagcactgcacatcgccatcgagagacgcaacatggccctggtgaccctcctggtggagaacggagcagacgtccaggctgcggcccatggggacttctttaagaaaaccaaagggcggcctggattctacttcggtgaactgcccctgtccctggccgcgtgcaccaaccagctgggcatcgtgaagttcctgctgcagaactcctggcagacggccgacatcagcgccagggactcggtgggcaacacggtgctgcacgccctggtggaggtggccgacaacacggccgacaacacgaagtttgtgacgagcatgtacaatgagattctgatgctgggggccaaactgcacccgacgctgaagctggaggagctcaccaacaagaagggaatgacgccgctggctctggcagctgggaccgggaagatcggggtcttggcctatattctccagcgggagatccaggagcccgagtgcaggcacctgtccaggaagttcaccgagtgggcctacgggcccgtgcactcctcgctgtacgacctgtcctgcatcgacacctgcgagaagaactcggtgctggaggtgatcgcctacagcagcagcgagacccctaatcgccacgacatgctcttggtggagccgctgaaccgactcctgcaggacaagtgggacagattcgtcaagcgcatcttctacttcaacttcctggtctactgcctgtacatgatcatcttcaccatggctgcctactacaggcccgtggatggcttgcctccctttaagatggaaaaaactggagactatttccgagttactggagagatcctgtctgtgttaggaggagtctacttctttttccgagggattcagtatttcctgcagaggcggccgtcgatgaagaccctgtttgtggacagctacagtgagatgcttttctttctgcagtcactgttcatgctggccaccgtggtgctgtacttcagccacctcaaggagtatgtggcttccatggtattctccctggccttgggctggaccaacatgctctactacacccgcggtttccagcagatgggcatctatgccgtcatgatagagaagatgatcctgagagacctgtgccgtttcatgtttgtctacatcgtcttcttgttcgggttttccacagcggtggtgacgctgattgaagacgggaagaatgactccctgccgtctgagtccacgtcgcacaggtggcgggggcctgcctgcaggccccccgatagctcctacaacagcctgtactccacctgcctggagctgttcaagttcaccatcggcatgggcgacctggagttcactgagaactatgacttcaaggctgtcttcatcatcctgctgctggcctatgtaattctcacctacatcctcctgctcaacatgctcatcgccctcatgggtgagactgtcaacaagatcgcacaggagagcaagaacatctggaagctgcagagagccatcaccatcctggacacggagaagagcttccttaagtgcatgaggaaggccttccgctcaggcaagctgctgcaggtggggtacacacctgatggcaaggacgactaccggtggtgcttcagggtggacgaggtgaactggaccacctggaacaccaacgtgggcatcatcaacgaagacccgggcaactgtgagggcgtcaagcgcaccctgagcttctccctgcggtcaagcagagtttcaggcagacactggaagaactttgccctggtcccccttttaagagaggcaagtgctcgagataggcagtctgctcagcccgaggaagtttatctgcgacagttttcagggtctctgaagccagaggacgctgaggtcttcaagagtcctgccgcttccggggagaagtgaggacgtcacgcagacagcactgtcaacactgggccttaggagaccccgttgccacggggggctgctgagggaacaccagtgctctgtcagcagcctggcctggtctgtgcctgcccagcatgttcccaaatctgtgctggacaagctgtgggaagcgttcttggaagcatggggagtgatgtacatccaaccgtcactgtccccaagtgaatctcctaacagactttcaggtttttactcactttactaaacagtttggatggtcagtctctactgggacatgttaggcccttgttttctttgattttattcttttttttgagacagaatttcactcttctcacccaggctggaatgcagtggcacaattttggctccctgcaacctccgcctcctggattccagcaattctcctgcctcggcttcccaagtagctgggattacaggcacgtgccaccatgtctggctaattttttgtatttttttaatagatatggggtttcgccatgttggccaggctggtctcgaactcctgacctcaggtgatccgcccacctcggcctcccaaagtgctgggattacaggtgtgagcctccacacctggctgttttctttgattttattctttttttttttttctgtgagacagagtttcactcttgttgcccaggctggagtgcagtggtgtgatcttggctcactgcaacttctgcctcccgggttcaagcgattcttctgcttcagtctcccaagtagcttggattacaggtgagcactaccacgcccggctaatttttgtatttttaatagagacggggtttcaccatgttggccaggctggtctcgaactcttgacctcaggtgatctgcccgccttggcctcccaaagtgctgggattacaggtgtgagccgctgcgctcggccttctttgattttatattattaggagcaaaagtaaatgaagcccaggaaaacacctttgggaacaaactcttcctttgatggaaaatgcagaggcccttcctctctgtgccgtgcttgctcctcttacctgcccgggtggtttgggggtgttggtgtttcctccctggagaagatgggggaggctgtcccactcccagctctggcagaatcaagctgttgcagcagtgccttcttcatccttccttacgatcaatcacagtctccagaagatcagctcaattgctgtgcaggttaaaactacagaaccacatcccaaaggtacctggtaagaatgtttgaaagatcttccatttctaggaaccccagtcctgcttctccgcaatggcacatgcttccactccatccatactggcatcctcaaataaacagatatgtatacat

SEQ ID NO: 232979 - DNA, 2607 bp, Artificial Sequence
  derived and/or modified sequence
cagaggatccagcaaggatgaagaaatggagcagcacagacttgggggcagctgcggacccactccaaaaggacacctgcccagaccccctggatggagaccctaactccaggccacctccagccaagccccagctctccacggccaagagccgcacccggctctttgggaagggtgactcggaggaggctttcccggtggattgccctcacgaggaaggtgagctggactcctgcccgaccatcacagtcagccctgttatcaccatccagaggccaggagacggccccaccggtgccaggctgctgtcccaggactctgtcgccgccagcaccgagaagaccctcaggctctatgatcgcaggagtatctttgaagccgttgctcagaataactgccaggatctggagagcctgctgctcttcctgcagaagagcaagaagcacctcacagacaacgagttcaaagaccctgagacagggaagacctgtctgctgaaagccatgctcaacctgcacgacggacagaacaccaccatccccctgctcctggagatcgcgcggcaaacggacagcctgaaggagcttgtcaacgccagctacacggacagctactacaagggccagacagcactgcacatcgccatcgagagacgcaacatggccctggtgaccctcctggtggagaacggagcagacgtccaggctgcggcccatggggacttctttaagaaaaccaaagggcggcctggattctacttcggtgaactgcccctgtccctggccgcgtgcaccaaccagctgggcatcgtgaagttcctgctgcagaactcctggcagacggccgacatcagcgccagggactcggtgggcaacacggtgctgcacgccctggtggaggtggccgacaacacggccgacaacacgaagtttgtgacgagcatgtacaatgagattctgatgctgggggccaaactgcacccgacgctgaagctggaggagctcaccaacaagaagggaatgacgccgctggctctggcagctgggaccgggaagatcggggttatcgagaatggaccaccgctgtccttcatggtcttggcctatattctccagcgggagatccaggagcccgagtgcaggcacctgtccaggaagttcaccgagtgggcctacgggcccgtgcactcctcgctgtacgacctgtcctgcatcgacacctgcgagaagaactcggtgctggaggtgatcgcctacagcagcagcgagacccctaatcgccacgacatgctcttggtggagccgctgaaccgactcctgcaggacaagtgggacagattcgtcaagcgcatcttctacttcaacttcctggtctactgcctgtacatgatcatcttcaccatggctgcctactacaggcccgtggatggcttgcctccctttaagatggaaaaaactggagactatttccgagttactggagagatcctgtctgtgttaggaggagtctacttctttttccgagggattcagtatttcctgcagaggcggccgtcgatgaagaccctgtttgtggacagctacagtgagatgcttttctttctgcagtcactgttcatgctggccaccgtggtgctgtacttcagccacctcaaggagtatgtggcttccatggtattctccctggccttgggctggaccaacatgctctactacacccgcggtttccagcagatgggcatctatgccgtcatgatagagaagatgatcctgagagacctgtgccgtttcatgtttgtctacatcgtcttcttgttcgggttttccacagcggtggtgacgctgattgaagacgggaagaatgactccctgccgtctgagtccacgtcgcacaggtggcgggggcctgcctgcaggccccccgatagctcctacaacagcctgtactccacctgcctggagctgttcaagttcaccatcggcatgggcgacctggagttcactgagaactatgacttcaaggctgtcttcatcatcctgctgctggcctatgtaattctcacctacatcctcctgctcaacatgctcatcgccctcatgggtgagactgtcaacaagatcgcacaggagagcaagaacatctggaagctgcagagagccatcaccatcctggacacggagaagagcttccttaagtgcatgaggaaggccttccgctcaggcaagctgctgcaggtggggtacacacctgatggcaaggacgactaccggtggtgcttcagggtggacgaggtgaactggaccacctggaacaccaacgtgggcatcatcaacgaagacccgggcaactgtgagggcgtcaagcgcaccctgagcttctccctgcggtcaagcagagtttcaggcagacactggaagaactttgccctggtcccccttttaagagaggcaagtgctcgagataggcagtctgctcagcccgaggaagtttatctgcgacagttttcagggtctctgaagccagaggacgctgaggtcttcaagagtcctgccgcttccggggagaagtgaggacgtcacgcagacagcactgtcaacactgggcctt

SEQ ID NO: 232980 - DNA, 1269 bp, Artificial Sequence
  derived and/or modified sequence
atggacatcgtgcccgccgacgaccacagatacaagttcgccgacaacaagtggagcgtgaccggcaaggccgagcccgccatgcccggcagactgtacgtgcaccccgacagccccgccaccggcgcccactggatgagacagctggtgagcttccagaagctgaagctgaccaacaaccacctggaccccttcggccacatcatcctgaacagcatgcacaagtaccagcccagactgcacatcgtgaaggccgacgagaacaacggcttcggcagcaagaacaccgccttctgcacccacgtgttccccgagaccgccttcatcgccgtgaccagctaccagaaccacaagatcacccagctgaagatcgagaacaaccccttcgccaagggcttcagaggcagcgacgacatggagctgcacagaatgagcagaatgcagagcaaggagtaccccgtggtgcccagaagcaccgtgagacagaaggtggccagcaaccacagccccttcagcagcgagagcagagccctgagcaccagcagcaacctgggcagccagtaccagtgcgagaacggcgtgagcggccccagccaggacctgctgcccccccccaacccctaccccctgccccaggagcacagccagatctaccactgcaccaagagaaaggaggaggagtgcagcaccaccgaccacccctacaagaagccctacatggagaccagccccagcgaggaggacagcttctacagaagcagctacccccagcagcagggcctgggcgccagctacagaaccgagagcgcccagagacaggcctgcatgtacgccagcagcgccccccccagcgagcccgtgcccagcctggaggacatcagctgcaacacctggcccagcatgcccagctacagcagctgcaccgtgaccaccgtgcagcccatggacagactgccctaccagcacttcagcgcccacttcaccagcggccccctggtgcccagactggccggcatggccaaccacggcagcccccagctgggcgagggcatgttccagcaccagaccagcgtggcccaccagcccgtggtgagacagtgcggcccccagaccggcctgctgcacaacagacacttcctggagaaggagagagagagaggcgagagagagagaagaagagagaccgtggccaagagaacccccagaaccagattcttcatcagccccaacgtgcacatctgcacccagggcagatggatgctgatctag

SEQ ID NO: 232981 - DNA, 1269 bp, Artificial Sequence
  derived and/or modified sequence
atggatatcgttcctgctgatgaccaccgttataaatttgcggacaacaaatggagcgtcacagggaaggctgaaccggccatgcccggcagactgtacgtgcacccagattctcccgccacaggggcccattggatgagacagctggtgagctttcagaagttgaaattgacgaataatcacttagatcccttcggacatatcattcttaattccatgcataagtatcagccccgtttacacattgtcaaggccgacgagaataatggctttggatccaaaaacactgcattttgtacccacgtcttcccagagacggctttcattgctgtcacctcataccagaatcacaaaatcacccaactgaagatcgagaacaaccccttcgctaagggctttcgcgggtccgacgacatggagctccatcgcatgagtcggatgcagagcaaggagtatcccgtcgtgccaaggtccacagtgcgccagaaggtggcctctaaccacagcccattttcaagcgaatctagagctttatcaacaagctccaatctgggcagtcagtatcagtgtgaaaatggggtttccggcccaagccaggacctgctgcctccccctaatccataccctctaccccaggagcattctcagatctatcactgcaccaaaagaaaggaagaggagtgctcaactacagatcacccgtataaaaagccttacatggaaacctctccctccgaagaagacagtttctatagatcttcatacccacagcagcagggccttggggcctcatatcgcacagagagtgcccaaaggcaagcatgtatgtacgccagctccgccccgccctctgagcccgtgccaagcctcgaagacatcagttgtaacacctggccttctatgccttcctatagctcttgtaccgtgacaaccgtccagccaatggacagactcccctaccagcactttagtgcacactttacctctggaccactcgtgccccggctggctggcatggctaaccacggttctccccagctgggcgagggcatgtttcagcatcagacctctgtggctcaccaacctgtggtgcggcaatgcggtcctcagaccggtttactgcataacagacacttcctcgagaaggagagagaacgaggcgaaagggagaggcggcgggaaaccgtggccaagcgaaccccacgcacacggttcttcatcagcccaaacgtgcatatttgtacacagggtcgttggatgttaatttag

SEQ ID NO: 232982 - DNA, 1269 bp, Artificial Sequence
  derived and/or modified sequence
atggacatcgtgcctgcagatgaccaccgctacaagtttgctgacaacaagtggagcgtgacaggcaaggccgagcccgccatgcctggccgcctgtatgtgcacccagacagccctgccactggagcccactggatgaggcagctggtgtccttccagaagctgaagctgaccaacaaccacctggaccccttcggccacatcatcctgaacagcatgcacaagtaccagccccggctgcacatcgtgaaggcagatgaaaataatggatttggcagcaagaacacagccttctgcacccacgtgtttcctgagacagccttcatcgctgtgaccagctaccagaaccacaagatcacccagctgaagattgagaacaacccctttgccaagggcttccggggcagtgatgacatggagctgcacaggatgagcaggatgcagagcaaggagtaccctgtggtgcccaggagcacagtgcggcagaaggtggccagcaaccacagccccttcagcagcgagagccgggccctgagcaccagcagcaacctgggcagccagtaccagtgtgaaaatggagtgtctggccccagccaggacctgctgcccccacccaacccctaccccctgccccaggagcacagccagatctaccactgcaccaagaggaaggaggaggagtgcagcaccacagaccacccctacaagaagccctacatggagaccagccccagtgaagaagattccttctaccgcagcagctacccccagcagcagggcctgggcgccagctacagaacagaaagtgcccagaggcaggcctgcatgtatgccagcagcgccccacccagcgagcctgtgcccagcctggaggacatcagctgcaacacctggcccagcatgcccagctacagcagctgcaccgtgaccaccgtgcagcccatggaccggctgccctaccagcacttcagcgcccacttcaccagcggccccctggtgccccggctggccggcatggccaaccacggcagcccccagctgggggagggcatgttccagcaccagacctctgtggcccaccagcctgtggtgcggcagtgtggcccccagacaggcctgctgcacaacagacacttcctggagaaggagcgggagcggggggagcgggagcggcggcgggagaccgtggccaagaggacccccaggacccgcttcttcatcagccccaacgtgcacatctgcacccagggccgctggatgctgatctag

SEQ ID NO: 232983 - DNA, 1269 bp, Artificial Sequence
  derived and/or modified sequence
atggacatcgtgcccgccgacgaccaccggtacaagttcgccgacaacaaatggtcagtaaccggaaaagccgagccagctatgcctggacgtctgtacgtacatccagacagccctgcgacgggagcccactggatgcgacagctggtgagctttcagaagctcaaacttaccaacaaccacttggatcctttcggccacatcattctgaactccatgcataaatatcagccccgcctgcacatagtgaaggccgatgagaataatggttttggctccaagaataccgcattctgtacgcacgtgttcccagaaactgccttcattgccgtgacatcatatcagaatcataagatcactcagcttaagattgagaacaatccctttgccaaggggtttcgcgggtcagacgatatggagttgcaccggatgtcccggatgcagagcaaagaatatcccgtggtgccgcgtagtaccgtgagacagaaggtggcctctaaccattcaccgttctcctcagaatcaagggcgctctctacaagtagcaacttaggcagtcagtaccaatgcgaaaacggcgttagcgggccatcacaggatctgttgcccccgccaaacccctatccactcccccaagaacatagccagatttaccactgcacaaagcgcaaagaagaggaatgttctacaactgatcacccgtacaaaaaaccatacatggagacgagccctagtgaagaagatagcttctacaggtctagttacccacagcagcagggactgggcgccagttatcgaactgaatccgctcaacgccaggcatgtatgtatgcttctagcgcccccccttctgaaccagttccaagtctggaggatatcagctgcaatacctggccctcaatgcccagctactcctcgtgcacagtcactacagttcaacccatggaccggctcccctatcagcacttttctgcccactttacaagtggacctctcgtgcctagattggcaggcatggctaaccacggaagcccacaactgggcgagggtatgttccagcaccagaccagtgtcgcacatcagcctgtggtacggcagtgcggccctcagactggactgctccacaataggcatttcctcgaaaaggaacgggaacggggagagagagagaggcgccgggaaacagtagccaaaagaaccccacgcacacgctttttcatctcaccaaatgtacacatctgtacacaggggcggtggatgcttatttag

SEQ ID NO: 232984 - DNA, 1269 bp, Artificial Sequence
  derived and/or modified sequence
atggacatagtaccggctgacgatcacaggtacaaattcgctgataataagtggagtgtaaccggaaaagcagaacctgcaatgcccggtcggctttacgtgcatccagactctccagcaaccggtgcgcattggatgagacagctggtttcttttcagaaactcaaactcacgaacaaccacctggacccctttggacatatcattttgaattcaatgcacaagtatcagccacgcctgcacatcgtcaaggctgacgagaacaatgggttcggttccaagaacaccgccttctgcacacatgtgttccccgagacagctttcatcgcagttacctcttaccaaaaccacaaaatcacacaattgaagattgagaacaacccatttgccaagggcttccgcggatcagatgacatggaattgcacaggatgtcccgaatgcaaagtaaagaataccctgtggtgcctaggtcgacagtgcgtcagaaggtggccagcaaccactcacccttctcttctgaatcccgggctctctcaaccagctccaacctgggctcccagtaccagtgcgagaacggcgtatcaggaccctcacaggatttgctgcctccaccaaacccataccctctgcctcaagaacactcccagatttaccactgcaccaagagaaaggaagaggagtgttctactacagatcacccgtataaaaagccctatatggagacatccccatctgaagaggacagtttttacaggtcttcttaccctcaacagcagggactgggcgcaagttaccgcacagagagtgcccaaaggcaggcctgtatgtatgctagctcagccccaccttctgagcccgtgccatctctagaggacatctcctgtaatacatggcctagcatgccgagttattcaagctgcacggttaccaccgtgcagcctatggaccggttaccttaccaacatttcagcgcccactttacaagtggaccgttagtccctcggcttgctggcatggcaaatcatgggtcaccacagctcggggagggcatgttccaacaccagacctccgtagcgcaccagcctgtagttagacagtgcggaccccaaaccggcctgctacacaatcggcatttcctcgaaaaggaacgggaaaggggggaaagagagagacgcagagagaccgtagcaaagcggacccccagaactaggttctttatctcccctaacgtacacatatgcactcagggcagatggatgctgatatag

SEQ ID NO: 232985 - DNA, 1911 bp, Artificial Sequence
  derived and/or modified sequence
attttactggggtatgcctggtaataaacagtaatatttaatttgtcggagaccacaaaccaaccttgagctgggaggtacgtgctcttcttgacagacgttggaagaagacctggcctaaagaggtctcttttggtggtccttttcaaagtcttcacctgagccctgctctccagcgaggcgcactcctggcttttgcgctccaaagaagaggtgggatagttggagagcagaaccttgcgcgggccttaatcccaaaacgaagtacattcttctcatggacattgtacctgccgacgatcacagatacaaattcgcagataataaatggtctgtgacgggcaaagctgagcccgccatgcctggccgcctgtacgtgcacccagactcccccgccaccggggcgcattggatgaggcagctcgtctccttccagaaactcaagctcaccaacaaccacctggacccatttgggcatattattctaaattccatgcacaaataccagcctagattacacatcgtgaaagcggatgaaaataatggatttggctcaaaaaatacagcgttctgcactcacgtctttcctgagactgcgtttatagcagtgacttcctaccagaaccacaagatcacgcaattaaagattgagaataatccctttgccaaaggatttcggggcagtgatgacatggagctgcacagaatgtcaagaatgcaaagtaaagaatatcccgtggtccccaggagcaccgtgaggcaaaaagtggcctccaaccacagtcctttcagcagcgagtctcgagctctctccacctcatccaatttggggtcccaataccagtgtgagaatggtgtttccggcccctcccaggacctcctgcctccacccaacccatacccactgccccaggagcatagccaaatttaccattgtaccaagaggaaagaggaagaatgttccaccacagaccatccctataagaagccctacatggagacatcacccagtgaagaagattccttctaccgctctagctatccacagcagcagggcctgggtgcctcctacaggacagagtcggcacagcggcaagcttgcatgtatgccagctctgcgccccccagcgagcctgtgcccagcctagaggacatcagctgcaacacgtggccaagcatgccttcctacagcagctgcaccgtcaccaccgtgcagcccatggacaggctaccctaccagcacttctccgctcacttcacctcggggcccctggtccctcggctggctggcatggccaaccatggctccccacagctgggagagggaatgttccagcaccagacctccgtggcccaccagcctgtggtcaggcagtgtgggcctcagactggcctgcttcacaacagacatttcctagagaaagagagagagagaggagaaagagagagaaggagagagacagtagccaagagaaccccacggacaagatttttcatttcacccaatgttcacatctgcactcaaggtcgctggatgctgatctaatcagtagcttgaaaccacaattttaaaaatgtgactttcttgttttgtctcaaaacttaaaaaaacaaacacaaaaagatgagtcccaccccccactaccaccacacccatcaaccagccacattcacgctactccccagatctcttcccccattccttcttttgggctctagaaagtcttgcctcattgagtgtttttccctagtgcgtagttggagtctgtccctgtcttggtgttaatgttgacattgttatataataaatgataatatatttttttctttcaattttcttaatgggacccagtcccttatttggggggaggtctgaggcaagtatatttcaaaatatgtacttgcgggatt

SEQ ID NO: 232986 - protein, 1223 aa, Artificial Sequence
  derived and/or modified sequence
MAPLRALLSYLLPLHCALCAAAGSRTPELHLSGKLSDYGVTVPCSTDFRGRFLSHVVSGPAAASAGSMVVDTPPTLPRHSSHLRVARSPLHPGGTLWPGRVGRHSLYFNVTVFGKELHLRLRPNRRLVVPGSSVEWQEDFRELFRQPLRQECVYTGGVTGMPGAAVAISNCDGLAGLIRTDSTDFFIEPLERGQQEKEASGRTHVVYRREAVQQEWAEPDGDLHNEAFGLGDLPNLLGLVGDQLGDTERKRRHAKPGSYSIEVLLVVDDSVVRFHGKEHVQNYVLTLMNIVDEIYHDESLGVHINIALVRLIMVGYRQSLSLIERGNPSRSLEQVCRWAHSQQRQDPSHAEHHDHVVFLTRQDFGPSGYAPVTGMCHPLRSCALNHEDGFSSAFVIAHETGHVLGMEHDGQGNGCADETSLGSVMAPLVQAAFHRFHWSRCSKLELSRYLPSYDCLLDDPFDPAWPQPPELPGINYSMDEQCRFDFGSGYQTCLAFRTFEPCKQLWCSHPDNPYFCKTKKGPPLDGTECAPGKWCFKGHCIWKSPEQTYGQDGGWSSWTKFGSCSRSCGGGVRSRSRSCNNPSPAYGGRLCLGPMFEYQVCNSEECPGTYEDFRAQQCAKRNSYYVHQNAKHSWVPYEPDDDAQKCELICQSADTGDVVFMNQVVHDGTRCSYRDPYSVCARGECVPVGCDKEVGSMKADDKCGVCGGDNSHCRTVKGTLGKASKQAGALKLVQIPAGARHIQIEALEKSPHRIVVKNQVTGSFILNPKGKEATSRTFTAMGLEWEDAVEDAKESLKTSGPLPEAIAILALPPTEGGPRSSLAYKYVIHEDLLPLIGSNNVLLEEMDTYEWALKSWAPCSKACGGGIQFTKYGCRRRRDHHMVQRHLCDHKKRPKPIRRRCNQHPCSQPVWVTEEWGACSRSCGKLGVQTRGIQCLLPLSNGTHKVMPAKACAGDRPEARRPCLRVPCPAQWRLGAWSQCSATCGEGIQQRQVVCRTNANSLGHCEGDRPDTVQVCSLPACGGNHQNSTVRADVWELGTPEGQWVPQSEPLHPINKISSTEPCTGDRSVFCQMEVLDRYCSIPGYHRLCCVSCIKKASGPNPGPDPGPTSLPPFSTPGSPLPGPQDPADAAEPPGKPTGSEDHQHGRATQLPGALDTSSPGTQHPFAPETPIPGASWSISPTTPGGLPWGWTQTPTPVPEDKGQPGEDLRHPGTSLPAASPVT

SEQ ID NO: 232987 - DNA, 3672 bp, Artificial Sequence
  derived and/or modified sequence
atggccccactgagagcactgctgtcctacctgctgccactgcattgcgccctgtgtgctgcggcaggctctcgaacgcctgagcttcacctctccggaaagctgtccgattatggcgttaccgtgccgtgttccacagatttccgagggaggttcctctctcatgttgtatctggacccgcagcggctagcgctggttcaatggtggtggacacacctcccacgctacctcgtcacagttctcacctgagagtggcgagaagccctctacaccctggcggtacactgtggccagggagagtcggccgacactctctgtatttcaacgtgacagtctttggaaaagaactgcacctcagattgaggccaaacaggaggctggtagtcccgggaagttccgttgaatggcaagaggatttccgggagctttttaggcaacctctccggcaggaatgtgtatacaccggcggtgtcacagggatgcccggtgccgcagtggccatatcaaactgcgacggtttagccggactcatccggaccgacagtaccgattttttcattgaaccactcgaaagagggcagcaggaaaaggaggcatctggacgaacgcacgtggtgtaccgcagggaggccgtgcagcaggagtgggccgagccagatggagacttgcataatgaagcctttgggctgggcgatctgcctaacctgttgggtctggttggagaccagctgggggacactgaaaggaaacggaggcacgctaagcccggttcctattcaattgaggtgctgcttgtggttgacgactccgtcgtaaggtttcacggaaaagagcacgtgcagaactatgtgctgactctcatgaacatcgtggatgagatctatcacgatgagtccttgggtgtccatatcaacattgccctggtcaggctgataatggtaggctatagacagtccctgtccctaattgaacggggtaatcctagcagatctctcgagcaggtttgcaggtgggcccattcacagcagcgccaggaccccagccacgcagagcaccacgatcacgtggtgtttctcacccggcaggatttcggaccttccgggtatgccccagttactggaatgtgccacccactgcgctcatgtgcgctcaaccatgaagacggcttctcaagcgcttttgtgatagcccatgaaacgggccacgtgctgggaatggaacacgacggacagggcaacggatgcgcagatgaaaccagcctggggtctgtgatggccccactcgtgcaggccgcattccaccgctttcactggtctcgttgcagcaaacttgaactgtctaggtatttgccctcctacgactgcctgttagacgatcccttcgaccctgcctggccgcagcctcctgagctccctggcattaactactccatggacgagcaatgtaggttcgactttgggagtggttatcagacttgcctagctttccggaccttcgaaccgtgcaagcagctgtggtgttcacaccctgataatccatatttttgcaaaacaaagaaaggccctccattggatggtacagagtgcgcacctggaaaatggtgcttcaagggccattgtatttggaagtcacccgaacagacatacggccaggatggcggttggtctagctggacgaagttcgggtcatgcagtcgcagctgcggaggtggcgttcggtcacgctctaggtcgtgtaacaatccatccccagcgtacggtggtagactgtgtctgggcccaatgtttgagtaccaggtttgcaactccgaggagtgccccggaacatacgaggactttagggcacagcagtgtgcaaaacgaaacagctactatgtccatcagaatgctaagcactcatgggtcccttacgagcccgacgatgacgctcaaaagtgcgaactcatttgccagtccgccgacactggcgatgtggtgttcatgaaccaagtggttcacgacggcacgcggtgttcgtaccgggacccttattccgtttgtgctcggggagaatgtgtgcccgttgggtgtgacaaggaggtcggctctatgaaggcagatgacaagtgcggcgtgtgtggtggcgacaattctcactgtcgcactgttaagggcacacttggcaaggcttctaaacaggcaggggctctcaagcttgtacagatacctgctggcgcacggcacatccagatcgaggcactggaaaaatctccccatagaatcgtggtcaagaatcaggtgaccggctctttcatcctcaatcccaagggaaaagaagccactagtcgaacttttaccgccatggggctcgaatgggaagatgcagtggaggacgccaaagagagccttaagacatcaggtcccctccccgaagccattgcgatcctggctctgcctccgaccgagggcggtcctagatccagcctggcttacaagtacgtaattcacgaagacctgctgcctttgatcggcagtaacaacgttctgctcgaggagatggatacctacgaatgggccctgaaatcttgggccccatgtagtaaggcatgtgggggaggaatccagttcaccaagtacggctgtaggcgccgacgggatcaccacatggtccagcggcatctctgtgaccataaaaagaggccaaagccaatcagacgcaggtgtaaccagcatccttgcagtcagcccgtttgggtaacagaggagtggggagcctgctctagatcctgcggaaagcttggcgtccagacaagagggattcaatgtcttttgcctctctcaaacggtacccataaagttatgccagccaaagcttgcgctggtgatcgcccagaagctcgcagaccctgcttgcgagttccttgtcccgctcaatggcgtctgggagcctggtctcaatgctctgccacatgtggagagggtatacaacagcgccaggtggtctgtaggactaacgcaaacagcctcgggcactgcgagggggataggccggacacggtccaggtctgtagcctgccggcatgcggcggtaatcaccagaactcgacagtccgggctgacgtgtgggagctggggacgcctgaagggcagtgggtgcctcagtctgagcccttacaccctataaataaaatcagttcaacagaaccgtgtaccggggaccgttctgtcttttgccagatggaggtgctggatcgctattgttccattccaggctaccatagactttgctgtgtgtcgtgcatcaagaaagccagtgggcctaaccccggtcctgaccccggaccaacttctttaccacccttctccacaccaggcagtcctctgccagggccacaggaccccgcagatgctgccgagcctcctgggaagccaacaggatcagaggatcaccagcacggaagggcgactcagctgcccggtgcattggacacctcctctccaggcacgcagcatcctttcgcaccagaaacgcctattccaggtgcctcctggagcatctccccaaccacgcctggagggcttccatggggctggacccagaccccaacaccagtgcctgaagacaagggccaaccgggagaggacctccgccatcctggaacttctctccccgctgcatcacccgtgacctag

SEQ ID NO: 232988 - DNA, 3672 bp, Artificial Sequence
  derived and/or modified sequence
atggcgccattgagagccttgctatcctaccttttgcctcttcactgtgctctgtgtgctgctgcaggcagcaggactcctgaactacacttgtccggcaagttatccgactatggtgtgactgtaccatgcagcacagatttccgaggaagattcctgagtcatgtcgtgtccggcccagccgctgccagtgccggttccatggtcgttgacaccccacccaccctgccacgacattctagtcacttgcgggtggcacggtcacccctacatcccggggggactctctggcccggccgcgtgggcagacatagcctgtacttcaacgtgactgttttcggcaaggaattgcacttgcgactgcgaccaaataggcggctggtggtccccggcagctcagtggaatggcaggaggacttcagagaattattccggcagccgctgaggcaggaatgcgtgtacactggaggcgtaaccggaatgcctggggctgctgtggccatttctaattgcgacgggttagccggcctcattcggactgattcaaccgatttcttcatcgaacctttggagagaggccagcaggaaaaggaggctagtggacggacccatgtagtctacaggcgagaggccgtacagcaggagtgggctgaacccgatggcgacctgcataatgaggcttttggactgggcgatctacccaatctcctcgggctggtgggggatcagctgggcgacaccgaaagaaagagacgccacgctaagccaggaagttattccatagaggtcttgttggtggtggacgattctgttgttcggtttcacggcaaagagcatgtgcagaactacgtgttaacgctgatgaatattgtcgatgaaatctatcacgacgagtctctaggggtgcacattaacatcgccttggtgcgtctcatcatggtgggataccggcagagcctgagcctcatcgagcgaggaaatccaagccggagtctggaacaggtgtgtcgctgggcccacagtcaacagagacaagatccttctcatgcagagcatcatgaccacgtcgtctttcttacacgccaagacttcgggccgagcggttatgcccccgtcaccggaatgtgtcaccctctcagatcttgtgccctgaatcatgaggatggattctccagtgcctttgtgatcgcccacgaaacaggtcacgtgctgggtatggaacacgatggccaggggaatggctgtgccgacgagacaagtctcgggagtgtcatggctccactggtacaggctgcattccacagattccattggtctaggtgctcaaaactggaactgtctcgctacttgccctcttatgattgcttactcgacgaccccttcgatcccgcttggccacagcctcccgaacttcctggaattaattattccatggatgaacagtgtcgcttcgatttcggctccggctaccaaacatgtctggcattcagaaccttcgagccctgcaagcagttgtggtgtagccaccccgacaacccctacttttgcaaaactaaaaagggtcctccactcgacggcaccgaatgcgctccagggaaatggtgtttcaaggggcactgcatctggaagtcccctgagcagacgtacggccaggacggcgggtggagcagttggacaaagtttggctcctgttcaagaagctgcggggggggagtcaggagtcggagccgctcatgcaacaacccaagtccggcttacggaggccggctatgccttggccctatgtttgaataccaagtctgtaactctgaagagtgcccaggcacttacgaggattttcgagcgcaacagtgcgcaaaaagaaattcttattacgtccaccagaacgccaaacattcctgggttccttacgagcccgatgacgatgcccagaaatgtgagctgatctgtcaatctgcggatacaggggacgtcgtttttatgaatcaggtggttcacgatggcacccggtgttcctacagggacccttattcagtctgcgcacggggggaatgcgtgccagtaggctgcgataaagaggtcggttctatgaaagccgacgataaatgcggcgtttgcggcggcgacaattctcattgcagaaccgtgaagggaacactgggaaaggcctccaagcaggccggggcactgaaactcgttcaaattccagctggggcaagacacatccaaatagaagctcttgagaagtccccccatagaatagtggtgaaaaaccaagtgacagggagctttatcttaaacccaaaaggcaaagaagcaacatcccgcacatttaccgccatgggtcttgagtgggaggacgcagtcgaagatgctaaggagagtctcaagacatccggccctttgcccgaggcaatcgctatactcgcactgcccccaacagaggggggaccccgatctagtctcgcttataaatatgtaatccatgaggatctattgcctttgatcggtagcaataatgtcctcctggaagagatggatacctacgagtgggctctcaaaagctgggctccatgctccaaagcatgtggcggtggtatccagttcactaagtatggatgccgtaggagaagggatcatcacatggtccagcgccacctgtgtgaccacaaaaagaggcctaaacctatcaggagaagatgcaatcaacacccatgtagccagcccgtatgggtgacagaagaatggggagcttgttctagaagttgcggcaagctcggggtccagactagaggtatccagtgcctgctccccctcagcaacggaactcataaagtaatgcctgctaaggcatgtgcaggggacaggcccgaggctcgtaggccctgtcttcgagtcccttgtcccgcccaatggaggctgggcgcatggtctcaatgcagcgctacttgcggagaaggcatacaacagagacaggtcgtgtgtcggactaatgcaaactctctggggcactgcgaaggggacaggccagatacggtccaggtctgcagcctaccagcctgcggcggaaaccaccaaaatagtaccgtccgagctgacgtgtgggaactcggcaccccagaggggcaatgggtgccgcagtcagagccacttcatcccataaacaagatctcctccaccgagccatgcacaggtgaccgaagtgtgttttgtcaaatggaggtcctggaccggtactgttccatccctggataccatagactatgctgtgttagttgcataaagaaggctagcggccctaatccgggacccgaccctggtccaacctctttgcccccattttcaacccccggctcacccctgcctggcccacaagatcctgccgatgccgcagagcctccggggaagccaaccgggtcagaagaccaccagcatgggagggccactcagctgcctggcgcactggacacaagcagtccaggaacccagcaccctttcgcgcccgagacacccatcccgggcgccagctggagcataagtccaaccacaccgggtggattgccatggggttggacacagactcccacccccgtgcctgaggataagggacagcccggagaagatcttagacaccccggcactagtctgccggcagcatcgcctgttacctag

SEQ ID NO: 232989 - DNA, 3672 bp, Artificial Sequence
  derived and/or modified sequence
atggccccactccgcgccctgctttcttacctgctccctctccattgcgccttgtgtgcagcagctggatcacgtactcccgagcttcatctatccggcaagttgagcgactacggggtaacagtgccatgttccaccgattttaggggacgctttctgtcacacgttgtatccggtcctgcggccgcctctgctggatccatggtagtcgacaccccgccaacgctaccaagacatagttcgcatctgagggtggcccgctccccgctccatccgggcggaaccttgtggcccgggagggtaggcagacattcactgtacttcaacgtaacggtgttcgggaaggagctacatttacgtttaagacctaataggcggttggtagtgcccgggagtagtgtggagtggcaagaagatttccgagaactattcagacagcctctgcgtcaggaatgtgtgtacaccggaggagtgacaggcatgcctggtgccgccgtggcgatcagtaactgcgatggattggccggcctcattcgcaccgactcaacagacttcttcattgagccattagagcgagggcaacaggaaaaggaagcatcagggagaacacatgtggtctaccgtcgagaggccgtgcaacaagagtgggctgagccagatggagacctgcacaatgaagcctttgggctcggcgatttaccaaacctcctcggcttggtcggtgatcagttaggagatactgagagaaagaggcgccacgctaagcctgggtcatacagtatcgaagtccttctggtggtggatgattcagtggtaaggttccacggaaaagaacacgtgcaaaattatgtcctgacccttatgaacattgtagacgaaatttaccatgatgagtcactcggggtgcacataaatatcgcacttgtgcgcctaataatggtgggatacagacagtcactctcccttatcgaacgcgggaacccttcaagaagtctggagcaagtttgccggtgggctcacagtcagcagcgacaggacccaagccacgccgagcaccatgaccacgtcgtattcctgacaagacaggactttggaccatccggttacgcccctgttactggaatgtgtcaccccttgagatcgtgcgctctcaatcacgaagatggcttctctagcgcattcgtcattgcccatgaaacaggtcacgtgctggggatggaacatgacggacaagggaatggttgtgctgatgaaacgtctttaggctccgtcatggcaccattggtgcaggccgcttttcatagattccactggtcccgctgcagtaaactcgagctcagccgctacctgccctcttatgattgtctcttggatgatcctttcgatccagcttggccccaacctccggaactcccagggattaactattctatggatgaacagtgccggttcgattttggatcaggctatcagacttgcttagctttcaggaccttcgaaccctgtaagcaactttggtgctcacacccggacaacccctacttttgcaaaactaaaaaaggaccccctctcgacggtaccgagtgtgcccctggaaagtggtgcttcaaagggcattgtatctggaaatctcctgagcaaacatatgggcaggatggaggttggtcttcgtggacgaagttcggaagctgttctcgttcctgtgggggcggagtgcggagcaggtcaagatcatgcaacaaccctagcccggcttatggaggccgtctttgtctcggccctatgttcgaataccaagtgtgcaactccgaggaatgccccggaacatacgaagacttccgtgctcagcaatgtgctaaacgtaacagttattacgtgcatcagaatgccaagcacagctgggttccttatgaaccagatgatgatgctcaaaagtgcgaactgatctgccagtcagccgacacaggtgatgtcgtgttcatgaatcaagtcgtccatgacggcactagatgctcttatagagacccttattcagtgtgtgcaagaggagaatgtgtgcctgtcggatgtgacaaagaggtgggtagcatgaaggctgacgataaatgcggagtgtgtggcggggataactcacattgcaggaccgttaaaggcaccctcggaaaggcgtccaagcaggcaggcgctctgaaactcgtgcagatccccgctggagccagacacattcagatagaagctctggagaaatcgccccaccgcatcgtggttaagaaccaggtcaccggatcatttatactgaaccctaaaggaaaggaggctacatcaaggacattcacagcaatggggctggaatgggaggacgctgtggaagatgcaaaagaaagtcttaaaacctcagggcctctgcctgaagccatagccattctggctctcccacccaccgaaggggggcctcggagttcactcgcctacaaatatgtgattcacgaggatcttctgcccttgatcgggtctaataatgtgttattggaggaaatggatacttatgaatgggctcttaaaagttgggctccatgcagtaaagcttgcggaggcgggatccagtttacgaaatatggatgcaggaggcggcgggatcatcacatggtgcagagacatttgtgcgatcataagaaaagacctaagccaatccgtagacgctgtaaccaacacccatgctcccaacctgtatgggtgaccgaggagtggggggcttgttcccgatcttgcggtaagcttggggtccagacgagaggtatccaatgcctgctgcctctctccaatggaacacataaggtaatgcctgccaaagcctgcgcgggagatagaccagaagcaagaaggccttgcctgcgcgtgccatgtcccgcccaatggaggctcggtgcctggagccagtgtagcgccacttgcggtgaaggtatccaacagagacaggttgtttgcagaacaaacgccaactcactggggcactgcgaaggcgaccgccccgatacagttcaggtgtgtagcttacctgcctgcggcggtaaccatcagaatagtaccgtgagggccgacgtttgggagttgggaaccccagaaggacaatgggttccacaatcagagcccctgcatcctattaacaagatcagtagcacagagccatgcactggcgatagatccgtattttgtcagatggaagtgttagatcgttattgttcaattccgggatatcatcgactatgttgtgtctcctgcatcaaaaaggcctccggacctaaccctggcccagaccccggtcccacatcattgccccccttctcaacacccggtagtccgctcccaggaccccaagacccagccgacgccgccgaacctcccggcaagcctacagggagtgaagaccaccagcacgggcgcgccacacaactgccgggcgccttggataccagtagcccgggcactcaacaccctttcgctcccgaaacgcctatacccggtgcctcttggtcaattagtccaacgactcccggcggcctcccttggggctggacacagactcccacacccgtccctgaggataaaggtcaacctggagaagatctccgtcatcccggcaccagtctgcccgcagcatccccagtcacatag

SEQ ID NO: 232990 - DNA, 3672 bp, Artificial Sequence
  derived and/or modified sequence
atggcccccctgagagccctgctgagctacctgctgcccctgcactgcgccctgtgcgccgccgccggcagcagaacccccgagctgcacctgagcggcaagctgagcgactacggcgtgaccgtgccctgcagcaccgacttcagaggcagattcctgagccacgtggtgagcggccccgccgccgccagcgccggcagcatggtggtggacaccccccccaccctgcccagacacagcagccacctgagagtggccagaagccccctgcaccccggcggcaccctgtggcccggcagagtgggcagacacagcctgtacttcaacgtgaccgtgttcggcaaggagctgcacctgagactgagacccaacagaagactggtggtgcccggcagcagcgtggagtggcaggaggacttcagagagctgttcagacagcccctgagacaggagtgcgtgtacaccggcggcgtgaccggcatgcccggcgccgccgtggccatcagcaactgcgacggcctggccggcctgatcagaaccgacagcaccgacttcttcatcgagcccctggagagaggccagcaggagaaggaggccagcggcagaacccacgtggtgtacagaagagaggccgtgcagcaggagtgggccgagcccgacggcgacctgcacaacgaggccttcggcctgggcgacctgcccaacctgctgggcctggtgggcgaccagctgggcgacaccgagagaaagagaagacacgccaagcccggcagctacagcatcgaggtgctgctggtggtggacgacagcgtggtgagattccacggcaaggagcacgtgcagaactacgtgctgaccctgatgaacatcgtggacgagatctaccacgacgagagcctgggcgtgcacatcaacatcgccctggtgagactgatcatggtgggctacagacagagcctgagcctgatcgagagaggcaaccccagcagaagcctggagcaggtgtgcagatgggcccacagccagcagagacaggaccccagccacgccgagcaccacgaccacgtggtgttcctgaccagacaggacttcggccccagcggctacgcccccgtgaccggcatgtgccaccccctgagaagctgcgccctgaaccacgaggacggcttcagcagcgccttcgtgatcgcccacgagaccggccacgtgctgggcatggagcacgacggccagggcaacggctgcgccgacgagaccagcctgggcagcgtgatggcccccctggtgcaggccgccttccacagattccactggagcagatgcagcaagctggagctgagcagatacctgcccagctacgactgcctgctggacgaccccttcgaccccgcctggccccagccccccgagctgcccggcatcaactacagcatggacgagcagtgcagattcgacttcggcagcggctaccagacctgcctggccttcagaaccttcgagccctgcaagcagctgtggtgcagccaccccgacaacccctacttctgcaagaccaagaagggcccccccctggacggcaccgagtgcgcccccggcaagtggtgcttcaagggccactgcatctggaagagccccgagcagacctacggccaggacggcggctggagcagctggaccaagttcggcagctgcagcagaagctgcggcggcggcgtgagaagcagaagcagaagctgcaacaaccccagccccgcctacggcggcagactgtgcctgggccccatgttcgagtaccaggtgtgcaacagcgaggagtgccccggcacctacgaggacttcagagcccagcagtgcgccaagagaaacagctactacgtgcaccagaacgccaagcacagctgggtgccctacgagcccgacgacgacgcccagaagtgcgagctgatctgccagagcgccgacaccggcgacgtggtgttcatgaaccaggtggtgcacgacggcaccagatgcagctacagagacccctacagcgtgtgcgccagaggcgagtgcgtgcccgtgggctgcgacaaggaggtgggcagcatgaaggccgacgacaagtgcggcgtgtgcggcggcgacaacagccactgcagaaccgtgaagggcaccctgggcaaggccagcaagcaggccggcgccctgaagctggtgcagatccccgccggcgccagacacatccagatcgaggccctggagaagagcccccacagaatcgtggtgaagaaccaggtgaccggcagcttcatcctgaaccccaagggcaaggaggccaccagcagaaccttcaccgccatgggcctggagtgggaggacgccgtggaggacgccaaggagagcctgaagaccagcggccccctgcccgaggccatcgccatcctggccctgccccccaccgagggcggccccagaagcagcctggcctacaagtacgtgatccacgaggacctgctgcccctgatcggcagcaacaacgtgctgctggaggagatggacacctacgagtgggccctgaagagctgggccccctgcagcaaggcctgcggcggcggcatccagttcaccaagtacggctgcagaagaagaagagaccaccacatggtgcagagacacctgtgcgaccacaagaagagacccaagcccatcagaagaagatgcaaccagcacccctgcagccagcccgtgtgggtgaccgaggagtggggcgcctgcagcagaagctgcggcaagctgggcgtgcagaccagaggcatccagtgcctgctgcccctgagcaacggcacccacaaggtgatgcccgccaaggcctgcgccggcgacagacccgaggccagaagaccctgcctgagagtgccctgccccgcccagtggagactgggcgcctggagccagtgcagcgccacctgcggcgagggcatccagcagagacaggtggtgtgcagaaccaacgccaacagcctgggccactgcgagggcgacagacccgacaccgtgcaggtgtgcagcctgcccgcctgcggcggcaaccaccagaacagcaccgtgagagccgacgtgtgggagctgggcacccccgagggccagtgggtgccccagagcgagcccctgcaccccatcaacaagatcagcagcaccgagccctgcaccggcgacagaagcgtgttctgccagatggaggtgctggacagatactgcagcatccccggctaccacagactgtgctgcgtgagctgcatcaagaaggccagcggccccaaccccggccccgaccccggccccaccagcctgccccccttcagcacccccggcagccccctgcccggcccccaggaccccgccgacgccgccgagccccccggcaagcccaccggcagcgaggaccaccagcacggcagagccacccagctgcccggcgccctggacaccagcagccccggcacccagcaccccttcgcccccgagacccccatccccggcgccagctggagcatcagccccaccacccccggcggcctgccctggggctggacccagacccccacccccgtgcccgaggacaagggccagcccggcgaggacctgagacaccccggcaccagcctgcccgccgccagccccgtgacctag

SEQ ID NO: 232991 - DNA, 3672 bp, Artificial Sequence
  derived and/or modified sequence
atggccccgcttcgagctttactatcctacctgctgcctctgcactgtgcactctgcgccgcggccggaagcagaacaccggagctccatctgtctggaaagctgtcggactatggagtgacagttccctgcagtaccgattttagaggcagatttctgtcccacgtggtgagcggaccagccgcggctagcgccgggtccatggtggttgacactccccccacactgccccggcatagctcgcacctgagagtggctagatctcctttacatcctggcggaacgctgtggccaggccgcgtcgggcgtcatagcctgtactttaatgtgacagtgttcggaaaggagctgcacctgagactacgcccaaacaggcgcttagtggtccctggcagcagcgtggagtggcaggaggattttcgcgagttattccggcagccactgcggcaggagtgtgtttatacaggtggcgtgaccgggatgccaggggctgcagttgccatctccaactgtgacggtttggctggtcttatacggacagactccactgacttcttcatcgaacccctggagcgcgggcagcaggaaaaggaggcctccggcagaacacacgtggtgtaccggcgggaagccgtgcagcaagagtgggctgagcctgacggtgaccttcacaacgaggcttttggactgggcgatctgcccaacttactgggcttggtaggcgatcagctcggcgacacagaacgaaaacggagacatgcaaagcctggtagctactcaatcgaagtgctgttggtcgtcgatgactcagtggtgaggttccatggcaaggagcatgtccagaattatgttctcaccctcatgaacatagtggacgagatttaccatgatgagtccctgggcgtccatattaacatcgctctcgtgaggttgattatggtaggatatcggcagtctttaagtctcatcgaaagaggcaatccttctagatcactcgaacaggtctgcaggtgggctcacagccagcaacggcaggacccaagccatgctgagcatcatgatcatgttgtcttcttaactcgtcaggacttcggaccctcaggttatgccccagtaacaggcatgtgccaccctttgagaagctgcgccctgaaccacgaagatgggttcagctcagccttcgtcatcgcacacgaaactgggcatgtgctggggatggaacacgacggccagggcaacggctgcgctgacgaaacatctcttggatccgtcatggccccactcgtacaggccgccttccaccgcttccactggagtaggtgttccaaattagaactatcacgttatctgccaagctacgattgtctcctcgacgatcctttcgaccctgcctggccacaaccccccgaactccccggaattaactattcaatggatgaacagtgtcggttcgacttcggcagcggttatcaaacatgcctggctttcagaacttttgaaccttgcaaacaactctggtgcagtcaccctgataacccctatttctgcaaaaccaaaaagggcccccctttagacggcaccgaatgcgcaccggggaaatggtgcttcaaaggccactgcatttggaaaagccctgagcagacttatggccaggacggtgggtggtcttcttggactaagtttggctcctgtagccggagttgcgggggcggagtgcgttctaggtctcgctcttgcaataaccccagccccgcatacggcgggcgactttgtctcgggccaatgtttgaataccaggtctgcaatagcgaggagtgcccaggcacatacgaggacttcagagctcaacaatgtgctaaacgcaactcatactatgtgcatcagaatgccaagcactcttgggtgccttacgaacctgatgacgatgcgcaaaaatgcgagctcatttgccaatcggcggacaccggcgatgtcgtcttcatgaaccaggttgtccatgacggaacaaggtgttcatatcgagacccatacagcgtctgcgcccgtggcgagtgcgtccccgtgggatgcgacaaagaagtcgggagcatgaaagccgacgacaaatgcggagtatgtgggggcgacaacagtcactgccgcacggtgaaagggaccttgggcaaagcttctaagcaggccggcgccctcaagctggttcagatacctgcaggagcacggcatatccagatagaagctctggagaaatctccacatagaatcgttgtcaagaatcaggtgacaggctcgttcatcctcaacccgaagggcaaggaagccacctctcggacatttactgcgatgggcctggagtgggaagatgcagtggaagacgctaaagagagcctcaagacatcagggcctctgcctgaggcaatagctatactcgccttgcccccgactgaaggggggccccggtcctctctcgcatacaagtatgtgatccacgaagacttgctgccactcataggcagcaataacgtattgctggaggagatggacacctacgaatgggcccttaagtcatgggctccttgcagtaaggcctgcggtggaggtatccagttcactaagtatgggtgtagacggcgcagggaccatcatatggtccaaaggcacttgtgcgaccacaagaaaagacctaagcctatccgtcggcgctgtaaccaacacccatgctctcagccggtgtgggtgacagaggaatggggtgcctgttcccgttcgtgtggcaagctgggggttcagacccgaggaatccagtgcctgttgccccttagcaacggtacacataaggtgatgccagccaaggcctgcgcgggggaccgccccgaggctcggagaccttgcttaagagtcccttgtccggcacaatggagattaggggcttggagccagtgttccgccacctgcggcgagggaatccagcaaaggcaggtagtgtgcaggaccaacgccaactcactgggccattgcgaaggggaccgtcccgacaccgtacaagtctgctcgctccccgcttgtggaggcaaccatcaaaactccaccgtcagggcggacgtgtgggaactcggaacacccgaaggacaatgggtgccccagtctgagccactgcaccctatcaataagatctccagcaccgagccctgcacaggagaccgcagcgtgttctgtcagatggaggtcctggacaggtactgctcaatcccaggttatcatagattgtgttgcgtttcctgcatcaagaaggcttccggacctaaccccggtccagaccccggaccaacgagcctgcctcctttcagcactcctggatcacccttgcccggccctcaagaccctgccgatgctgccgaaccacctgggaagcctaccgggagtgaggaccaccagcatggccgcgcaacgcagctgcctggagcgctggacacctcttcacctggcacacagcaccctttcgcccccgaaacccccatcccaggcgccagctggtcaatctcacctaccacgcccggagggctgccatggggctggacccagacacctactccagtgcccgaggacaagggacaacctggcgaagacctgagacatcccggtacctcgctgcccgccgcgagccccgtgacctag

SEQ ID NO: 232992 - DNA, 3672 bp, Artificial Sequence
  derived and/or modified sequence
atggcccccctgcgggccctgctgagctacctgctgcccctgcactgtgccctgtgtgccgccgccggcagcaggaccccagagctgcacctgagcggcaagctgagtgactatggagtgacagtgccctgcagcacagacttccggggccgcttcctgagccacgtggtgtctggccctgctgctgccagcgctggctccatggtggtggacaccccacccaccctgcccaggcacagcagccacctgcgggtggcccggagccccctgcaccctgggggcaccctgtggccaggccgggtgggccgccacagcctgtacttcaacgtgacagtgtttgggaaggagctgcacctgcggctgcggcccaacagaaggctggtggtgcccggcagctctgtggagtggcaggaggacttccgggagctgttccggcagcccctgcggcaggagtgtgtgtacacaggaggagtgacaggcatgcctggagctgctgtggccatcagcaactgtgatggcctggccggcctcatcagaacagacagcacagacttcttcatcgagcccctggagcggggccagcaggagaaggaggccagcggccgcacccacgtggtgtaccgccgggaggccgtgcagcaggagtgggccgagccagatggagacctgcacaatgaggccttcggcctgggggacctgcccaacctgctgggcctggtgggggaccagctgggggacacagagaggaagagaagacatgccaagccaggcagctacagcattgaggtgctgctggtggtggatgacagcgtggtgcgcttccacggcaaggagcacgtgcagaactacgtgctgaccctgatgaacatcgtggatgagatctaccatgatgagagcctgggcgtgcacatcaacatcgccctggtgcggctcatcatggtgggctaccggcagagcctgagcctgattgagcggggcaaccccagccgcagcctggagcaggtgtgccgctgggcccacagccagcagaggcaggaccccagccacgccgagcaccacgaccacgtggtgttcctgacccggcaggactttggccccagcggctacgcccctgtgacaggcatgtgccaccccctgcggagctgtgccctgaaccatgaagatggcttcagcagcgccttcgtcatcgcccacgagaccggccacgtgctgggcatggagcatgatggccagggcaatggctgtgctgatgagaccagcctgggctctgtgatggcccccctggtgcaggccgccttccaccgcttccactggagccgctgcagcaagctggagctgagccgctacctgcccagctatgactgcctgctggatgacccctttgatcctgcctggccccagcccccagagctgcccggcatcaactacagcatggatgagcagtgccgctttgattttggcagcggctaccagacctgcctggccttccgcacctttgagccctgcaagcagctgtggtgcagccacccagacaacccctacttctgcaagaccaagaagggcccccccctggatggaacagaatgtgcccctgggaagtggtgcttcaagggccactgcatctggaagagccctgagcagacctacggccaggacggcggctggagctcctggaccaagtttggcagctgcagccgcagctgtggcggcggcgtgcgcagccgcagccgcagctgcaacaaccccagccctgcctacggcggccgcctgtgcctgggccccatgtttgagtaccaggtgtgcaacagtgaagaatgtcctggcacctatgaggacttccgggcccagcagtgtgccaagagaaattcctactacgtgcaccagaatgccaagcacagctgggtgccctatgagccagatgatgatgcccagaagtgtgagctgatctgccagagcgctgacacaggagatgtggtgttcatgaaccaggtggtgcatgatggcacccgctgcagctacagagacccctacagcgtgtgtgcccggggggagtgtgtgcctgtgggctgtgacaaggaggtgggctccatgaaggcagatgacaagtgtggggtgtgtggcggggacaacagccactgcaggacagtgaagggcaccctgggcaaggccagcaagcaggccggggccctgaagctggtgcagatcccagctggggcccggcacatccagatcgaggccctggagaagagcccccaccgcatcgtggtgaagaaccaggtgacaggcagcttcatcctgaaccccaagggcaaggaggccaccagcaggaccttcaccgccatgggcctggagtgggaggatgctgtggaggatgccaaggagagcctgaagaccagcggccccctgcctgaggccatcgccatcctggccctgcccccaacagagggcggccccaggagcagcctggcctacaagtatgtgattcatgaggacctgctgcccctcatcggcagcaacaacgtgctgctggaggagatggacacctatgagtgggccctgaagtcctgggccccctgcagcaaggcctgtggcggcggcatccagttcaccaagtatggctgcagaagaagaagagaccaccacatggtgcagaggcacctgtgtgaccacaagaagaggcccaagcccatcagaagacgctgcaaccagcacccctgcagccagcctgtgtgggtgacagaggagtggggcgcctgcagccgcagctgtgggaagctgggcgtgcagacccggggcatccagtgcctgctgcccctgagcaatggcacccacaaggtgatgcctgccaaggcctgtgccggggacaggcctgaggcccggcggccctgcctgcgggtgccctgcccagcccagtggaggctgggcgcctggagccagtgcagcgccacctgtggggagggcatccagcagaggcaggtggtgtgcaggaccaatgccaacagcctgggccactgtgagggggacagaccagacacagtgcaggtgtgcagcctgcctgcctgtggcggcaaccaccagaacagcacagtgcgggcagatgtgtgggagctgggcaccccagagggccagtgggtgccccagagcgagcccctgcaccccatcaacaagatcagcagcacagagccctgcaccggggacaggagcgtcttctgccagatggaggtgctggaccgctactgcagcatccctggctaccaccggctgtgctgcgtgtcctgcatcaagaaggccagcggccccaaccctggccctgaccccggccccaccagcctgccccccttcagcaccccaggcagccccctgcccggcccccaggaccctgcagatgctgctgagcccccaggcaagcccaccggcagcgaggaccaccagcacggccgggccacccagctgcccggggccctggacaccagcagccctggcacccagcacccctttgcccctgagacccccatccctggggcctcctggagcatcagccccaccacccctgggggcctgccctggggctggacccagacccccacccctgtgcctgaggacaagggccagcctggagaggacctgcggcaccctggcaccagcctgcctgctgccagccctgtgacctag

SEQ ID NO: 232993 - DNA, 5260 bp, Artificial Sequence
  derived and/or modified sequence
atggctccactccgcgcgctgctgtcctacctgctgcctttgcactgtgcgctctgcgccgccgcgggcagccggaccccagagctgcacctctctggaaagctcagtgactatggtgtgacagtgccctgcagcacagactttcggggacgcttcctctcccacgtggtgtctggcccagcagcagcctctgcagggagcatggtagtggacacgccacccacactaccacgacactccagtcacctccgggtggctcgcagccctctgcacccaggagggaccctgtggcctggcagggtggggcgccactccctctacttcaatgtcactgttttcgggaaggaactgcacttgcgcctgcggcccaatcggaggttggtagtgccaggatcctcagtggagtggcaggaggattttcgggagctgttccggcagcccttacggcaggagtgtgtgtacactggaggtgtcactggaatgcctggggcagctgttgccatcagcaactgtgacggattggcgggcctcatccgcacagacagcaccgacttcttcattgagcctctggagcggggccagcaggagaaggaggccagcgggaggacacatgtggtgtaccgccgggaggccgtccagcaggagtgggcagaacctgacggggacctgcacaatgaagcctttggcctgggagaccttcccaacctgctgggcctggtgggggaccagctgggcgacacagagcggaagcggcggcatgccaagccaggcagctacagcatcgaggtgctgctggtggtggacgactcggtggttcgcttccatggcaaggagcatgtgcagaactatgtcctcaccctcatgaatatcgtagatgagatttaccacgatgagtccctgggggttcatataaatattgccctcgtccgcttgatcatggttggctaccgacagtccctgagcctgatcgagcgcgggaacccctcacgcagcctggagcaggtgtgtcgctgggcacactcccagcagcgccaggaccccagccacgctgagcaccatgaccacgttgtgttcctcacccggcaggactttgggccctcagggtatgcacccgtcactggcatgtgtcaccccctgaggagctgtgccctcaaccatgaggatggcttctcctcagccttcgtgatagctcatgagaccggccacgtgctcggcatggagcatgacggtcaggggaatggctgtgcagatgagaccagcctgggcagcgtcatggcgcccctggtgcaggctgccttccaccgcttccattggtcccgctgcagcaagctggagctcagccgctacctcccctcctacgactgcctcctcgatgacccctttgatcctgcctggccccagcccccagagctgcctgggatcaactactcaatggatgagcagtgccgctttgactttggcagtggctaccagacctgcttggcattcaggacctttgagccctgcaagcagctgtggtgcagccatcctgacaacccgtacttctgcaagaccaagaaggggcccccgctggatgggactgagtgtgcacccggcaagtggtgcttcaaaggtcactgcatctggaagtcgccggagcagacatatggccaggatggaggctggagctcctggaccaagtttgggtcatgttcgcggtcatgtgggggcggggtgcgatcccgcagccggagctgcaacaacccctccccagcctatggaggccgcctgtgcttagggcccatgttcgagtaccaggtctgcaacagcgaggagtgccctgggacctacgaggacttccgggcccagcagtgtgccaagcgcaactcctactatgtgcaccagaatgccaagcacagctgggtgccctacgagcctgacgatgacgcccagaagtgtgagctgatctgccagtcggcggacacgggggacgtggtgttcatgaaccaggtggttcacgatgggacacgctgcagctaccgggacccatacagcgtctgtgcgcgtggcgagtgtgtgcctgtcggctgtgacaaggaggtggggtccatgaaggcggatgacaagtgtggagtctgcgggggtgacaactcccactgcaggactgtgaaggggacgctgggcaaggcctccaagcaggcaggagctctcaagctggtgcagatcccagcaggtgccaggcacatccagattgaggcactggagaagtccccccaccgcattgtggtgaagaaccaggtcaccggcagcttcatcctcaaccccaagggcaaggaagccacaagccggaccttcaccgccatgggcctggagtgggaggatgcggtggaggatgccaaggaaagcctcaagaccagcgggcccctgcctgaagccattgccatcctggctctccccccaactgagggtggcccccgcagcagcctggcctacaagtacgtcatccatgaggacctgctgccccttatcgggagcaacaatgtgctcctggaggagatggacacctatgagtgggcgctcaagagctgggccccctgcagcaaggcctgtggaggagggatccagttcaccaaatacggctgccggcgcagacgagaccaccacatggtgcagcgacacctgtgtgaccacaagaagaggcccaagcccatccgccggcgctgcaaccagcacccgtgctctcagcctgtgtgggtgacggaggagtggggtgcctgcagccggagctgtgggaagctgggggtgcagacacgggggatacagtgcctgctgcccctctccaatggaacccacaaggtcatgccggccaaagcctgcgccggggaccggcctgaggcccgacggccctgtctccgagtgccctgcccagcccagtggaggctgggagcctggtcccagtgctctgccacctgtggagagggcatccagcagcggcaggtggtgtgcaggaccaacgccaacagcctcgggcattgcgagggggataggccagacactgtccaggtctgcagcctgcccgcctgtggaggaaatcaccagaactccacggtgagggccgatgtctgggaacttgggacgccagaggggcagtgggtgccacaatctgaacccctacatcccattaacaagatatcatcaacggagccctgcacgggagacaggtctgtcttctgccagatggaagtgctcgatcgctactgctccattcccggctaccaccggctctgctgtgtgtcctgcatcaagaaggcctcgggccccaaccctggcccagaccctggcccaacctcactgccccccttctccactcctggaagccccttaccaggaccccaggaccctgcagatgctgcagagcctcctggaaagccaacgggatcagaggaccatcagcatggccgagccacacagctcccaggagctctggatacaagctccccagggacccagcatccctttgcccctgagacaccaatccctggagcatcctggagcatctcccctaccacccccggggggctgccttggggctggactcagacacctacgccagtccctgaggacaaagggcaacctggagaagacctgagacatcccggcaccagcctccctgctgcctccccggtgacatgagctgtgccctgccatcccactggcacgtttacactctgtgtactgccccgtgactcccagctcagaggacacacatagcagggcaggcgcaagcacagacttcattttaaatcattcgccttcttctcgtttggggctgtgatgctctttaccccacaaagcggggtgggaggaagacaaagatcagggaaagccctaatcggagatacctcagcaagctgcccccggcgggactgaccctctcagggcccctgttggtctcccctgccaagaccagggtcaactattgctccctcctcacagaccctgggcctgggcaggtctgaatcccggctggtctgtagctagaagctgtcagggctgcctgccttcccggaactgtgaggacccctgtggaggccctgcatatttggcccctctccccagaaaggcaaagcagggccagggtaggtgggggactgttcacagccaggccgagaggaggggggcctgggaatgtggcatgaggcttcccagctgcagggctggagggggtggaacacaaggtgatcgcaggcccagctcctggaagccaagagctccatgcagttccaccagctgaggccaggcagcagaggccagtttgtctttgctggccagaagatggtgctcatggccatactctggccttgcagatgtcactagtgttacttctagtgactccagattacagactggccccccaatctcaccccagcccaccagagaagggggctcaggacaccctggaccccaagtcctcagcatccagggatttccaaactggcgctcactccctgactccaccaggatggcaacttcaattatcactctcagcctggaaggggactctgtgggacacagagggaacacgatttctcaggctgtcccttcaatcattgcccttctccgaagatcgctcctgctggagtcggacatcttcatcttctacctggctcaagctgggccagagtgtgtggttctcccaggggtggttggaccccaggactgaggaccagagtccactcatagcctggccctggagatgacaagggccacccaggccaagtgccccagggcagggtgccagcccctggcctggtgctggagtggggaagacacactcacccacggtgctgtaagggcctgagctgtgctcagctgccggccatgctacctccaagggacaggtaacagtcttagatcctctggctctcaggaagtggcagggggtcccaggacacctccggggtcttggaggatgtctcctaaactcctgccaggtgatagaggtgcttctcacttcttccttccccaaggcaaaggggctgttctgagccagcctggaggaacatgagtagtgggcccctggcctgcaacccctttggagagtggaggtcctggggggctccccgccctccccctgttgccctcccctccctgggatgctggggcacacgcggagtcattcctgtgagaaccagcctggcctgtgttaaactcttgtgccttggaaatccagatctttaaaattttatgtatttattaacatcgccattggaccccaaaa

SEQ ID NO: 232994 - DNA, 3672 bp, Artificial Sequence
  derived and/or modified sequence
atggcccccctgcgggccctgctgagctacctgctgcccctgcactgcgctctatgcgctgctgcaggcagccggacgccagagctgcacctgagcggtaaactaagcgactacggagtcacagttccttgctcaaccgacttcagagggcgattcctgagtcacgtggtcagcggacccgcggccgcgtccgccgggagcatggtggtcgatacaccgccaacgctgcccaggcactcttcccacctacgggtggcgcggagccccctgcacccaggcgggaccttatggcctggtcgggttgggaggcacagcctttacttcaatgtcacagtgttcggcaaggagctgcacctgagactcagacctaaccggcgccttgttgtgcccggatcctctgtcgagtggcaggaggacttccgagagcttttcagacagcccctgcgtcaggaatgtgtctacaccggtggggtgactggcatgccaggggccgctgtggcaatctctaactgcgatggtcttgcgggtctgattcgaactgactccaccgacttttttatagagccccttgagcgcggtcagcaggaaaaagaggcaagcgggcgtacacacgtcgtgtacagaagggaagccgtgcagcaggaatgggcagagccagacggcgatctgcacaatgaggcatttggtcttggggatctcccaaacctcttgggtctggtcggggatcagctcggagacacagagcgaaaaagacgacacgcgaagcctggcagctattctatcgaagtgctgctggtggtcgacgactctgtggtacggtttcacgggaaggagcacgtgcagaattacgtgctcacactgatgaacatcgtagatgaaatctaccacgacgaatctcttggcgtgcacatcaacatagccctggtgcgcctgatcatggtgggctataggcagtccttgtcactgattgagagaggcaaccctagtaggagccttgaacaggtctgccggtgggcccacagtcagcaacggcaggatccttctcatgccgagcaccacgatcacgtcgtgttcctcacaaggcaagactttgggccgtcagggtatgcccctgtcaccgggatgtgtcaccctcttcgttcctgtgctctgaatcatgaagacgggttctcgtctgcctttgtgatcgcccacgagacgggccatgtgctcggaatggaacacgacggccaaggtaatggctgcgcagatgagactagcttgggttcagtgatggcccctctcgtgcaggccgcctttcatcggtttcactggtcccgctgcagtaaactggaactgtcaagatacctccctagctatgactgtctgctggacgatccattcgacccggcctggcctcagccacccgagcttcctgggataaactatagcatggacgagcagtgccgctttgactttggatccggatatcaaacgtgccttgcctttcgaacctttgaaccctgtaagcagctctggtgctctcacccggacaatccctacttttgcaagactaaaaaaggcccaccattggatggcaccgaatgtgcacctggaaaatggtgtttcaagggccactgtatctggaaatctcccgaacagacgtatggccaggacggtggatggtcctcctggacgaaattcggctcttgttctcgctcctgtggaggtggcgtgaggtcccgctctaggtcttgcaataacccgagcccagcatacggaggcaggctgtgcttaggcccaatgtttgagtatcaagtctgtaattccgaagaatgcccagggacctacgaagacttcagggcacagcagtgcgccaagcgaaactcttactacgtgcaccagaacgccaaacacagctgggtgccgtatgaaccagatgatgacgcccagaagtgtgaactcatttgccagagcgccgatactggtgatgtggtttttatgaaccaggtcgtacatgatggtacccggtgctcctacagagatccttatagtgtctgcgctcgcggggaatgtgtgcctgtgggatgcgacaaagaagtggggtcaatgaaggctgatgacaagtgtggcgtgtgtggaggagataacagccattgcaggaccgtgaagggcactctcggaaaggcatcaaaacaagccggggcattgaaactggtccagatacctgccggggcccgccacatccaaattgaggccctcgagaagagtccccacagaatcgtcgtgaaaaaccaggtgaccgggtcctttatcttgaatcctaagggtaaggaagccacatcgagaacctttaccgctatgggcctggaatgggaagatgctgttgaggatgctaaggagagcctgaagacttctggccctcttcccgaagccattgcgatcctcgcgctaccccccacggagggcgggcccaggagctctttggcctacaaatatgttatccacgaagacctgctccccttgatcggcagtaacaatgtgctcctggaggagatggacacttacgaatgggctctcaagagctgggccccttgctctaaagcttgtgggggaggcatccagtttaccaagtatggatgccggaggcgccgggaccatcacatggtccagcgacatttatgcgaccataaaaaaagacccaagcccattaggcgtcgttgcaatcaacatccgtgttctcagcccgtttgggtgacggaagaatggggcgcttgttcacgcagttgcggcaagctgggtgttcaaactcgtggcattcaatgtctgctgccactgtccaatggcactcataaggtgatgccagccaaggcttgtgctggcgacaggcccgaggcgcggagaccctgtttgagagtcccttgtcccgcgcagtggcgattgggggcctggtcccaatgttccgccacatgcggcgagggtattcagcagcgtcaggtcgtgtgtagaaccaacgccaacagtcttggccactgtgaaggtgatcgacccgatactgtgcaggtatgtagtctcccggcctgcggtggcaatcaccagaactcgacagtaagggcagatgtctgggagctaggcacccccgagggacaatgggttcctcagagcgagccccttcacccgatcaacaagatcagtagcactgaaccctgcacaggggatcgttctgtattctgccagatggaggtcctcgaccgctattgcagtattccgggttatcatcgcctttgctgtgttagttgcatcaagaaggcttccggacctaaccctggccccgaccctgggcctacctccctgcctcccttctcaacccctggttcaccactacccggtcctcaagatccagcagacgccgcggagccacccggcaaaccgaccgggtccgaagaccatcaacacggccgggcaacccagcttcccggcgcattggataccagttcgcctgggacgcaacacccctttgcgccagagacaccaataccaggagcctcgtggtctatctctcccactacgcctgggggcctcccgtggggctggactcagacaccaaccccggtgcctgaagacaaggggcagcccggcgaagatcttagacaccccggtactagcttgcccgctgcgtcacccgtcacttag

SEQ ID NO: 232995 - RNA, 3672 nt, Artificial Sequence
  derived and/or modified sequence
auggcgccauugagagccuugcuauccuaccuuuugccucuucacugugcucugugugcugcugcaggcagcaggacuccugaacuacacuuguccggcaaguuauccgacuauggugugacuguaccaugcagcacagauuuccgaggaagauuccugagucaugucguguccggcccagccgcugccagugccgguuccauggucguugacaccccacccacccugccacgacauucuagucacuugcggguggcacggucaccccuacaucccggggggacucucuggcccggccgcgugggcagacauagccuguacuucaacgugacuguuuucggcaaggaauugcacuugcgacugcgaccaaauaggcggcuggugguccccggcagcucaguggaauggcaggaggacuucagagaauuauuccggcagccgcugaggcaggaaugcguguacacuggaggcguaaccggaaugccuggggcugcuguggccauuucuaauugcgacggguuagccggccucauucggacugauucaaccgauuucuucaucgaaccuuuggagagaggccagcaggaaaaggaggcuaguggacggacccauguagucuacaggcgagaggccguacagcaggagugggcugaacccgauggcgaccugcauaaugaggcuuuuggacugggcgaucuacccaaucuccucgggcuggugggggaucagcugggcgacaccgaaagaaagagacgccacgcuaagccaggaaguuauuccauagaggucuuguuggugguggacgauucuguuguucgguuucacggcaaagagcaugugcagaacuacguguuaacgcugaugaauauugucgaugaaaucuaucacgacgagucucuaggggugcacauuaacaucgccuuggugcgucucaucauggugggauaccggcagagccugagccucaucgagcgaggaaauccaagccggagucuggaacaggugugucgcugggcccacagucaacagagacaagauccuucucaugcagagcaucaugaccacgucgucuuucuuacacgccaagacuucgggccgagcgguuaugcccccgucaccggaaugugucacccucucagaucuugugcccugaaucaugaggauggauucuccagugccuuugugaucgcccacgaaacaggucacgugcuggguauggaacacgauggccaggggaauggcugugccgacgagacaagucucgggagugucauggcuccacugguacaggcugcauuccacagauuccauuggucuaggugcucaaaacuggaacugucucgcuacuugcccucuuaugauugcuuacucgacgaccccuucgaucccgcuuggccacagccucccgaacuuccuggaauuaauuauuccauggaugaacagugucgcuucgauuucggcuccggcuaccaaacaugucuggcauucagaaccuucgagcccugcaagcaguugugguguagccaccccgacaaccccuacuuuugcaaaacuaaaaaggguccuccacucgacggcaccgaaugcgcuccagggaaaugguguuucaaggggcacugcaucuggaaguccccugagcagacguacggccaggacggcggguggagcaguuggacaaaguuuggcuccuguucaagaagcugcggggggggagucaggagucggagccgcucaugcaacaacccaaguccggcuuacggaggccggcuaugccuuggcccuauguuugaauaccaagucuguaacucugaagagugcccaggcacuuacgaggauuuucgagcgcaacagugcgcaaaaagaaauucuuauuacguccaccagaacgccaaacauuccuggguuccuuacgagcccgaugacgaugcccagaaaugugagcugaucugucaaucugcggauacaggggacgucguuuuuaugaaucaggugguucacgauggcacccgguguuccuacagggacccuuauucagucugcgcacggggggaaugcgugccaguaggcugcgauaaagaggucgguucuaugaaagccgacgauaaaugcggcguuugcggcggcgacaauucucauugcagaaccgugaagggaacacugggaaaggccuccaagcaggccggggcacugaaacucguucaaauuccagcuggggcaagacacauccaaauagaagcucuugagaaguccccccauagaauaguggugaaaaaccaagugacagggagcuuuaucuuaaacccaaaaggcaaagaagcaacaucccgcacauuuaccgccaugggucuugagugggaggacgcagucgaagaugcuaaggagagucucaagacauccggcccuuugcccgaggcaaucgcuauacucgcacugcccccaacagaggggggaccccgaucuagucucgcuuauaaauauguaauccaugaggaucuauugccuuugaucgguagcaauaauguccuccuggaagagauggauaccuacgagugggcucucaaaagcugggcuccaugcuccaaagcauguggcggugguauccaguucacuaaguauggaugccguaggagaagggaucaucacaugguccagcgccaccugugugaccacaaaaagaggccuaaaccuaucaggagaagaugcaaucaacacccauguagccagcccguaugggugacagaagaauggggagcuuguucuagaaguugcggcaagcucgggguccagacuagagguauccagugccugcucccccucagcaacggaacucauaaaguaaugccugcuaaggcaugugcaggggacaggcccgaggcucguaggcccugucuucgagucccuugucccgcccaauggaggcugggcgcauggucucaaugcagcgcuacuugcggagaaggcauacaacagagacaggucgugugucggacuaaugcaaacucucuggggcacugcgaaggggacaggccagauacgguccaggucugcagccuaccagccugcggcggaaaccaccaaaauaguaccguccgagcugacgugugggaacucggcaccccagaggggcaaugggugccgcagucagagccacuucaucccauaaacaagaucuccuccaccgagccaugcacaggugaccgaaguguguuuugucaaauggagguccuggaccgguacuguuccaucccuggauaccauagacuaugcuguguuaguugcauaaagaaggcuagcggcccuaauccgggacccgacccugguccaaccucuuugcccccauuuucaacccccggcucaccccugccuggcccacaagauccugccgaugccgcagagccuccggggaagccaaccgggucagaagaccaccagcaugggagggccacucagcugccuggcgcacuggacacaagcaguccaggaacccagcacccuuucgcgcccgagacacccaucccgggcgccagcuggagcauaaguccaaccacaccggguggauugccaugggguuggacacagacucccacccccgugccugaggauaagggacagcccggagaagaucuuagacaccccggcacuagucugccggcagcaucgccuguuaccuag

SEQ ID NO: 232996 - RNA, 3672 nt, Artificial Sequence
  derived and/or modified sequence
auggccccacuccgcgcccugcuuucuuaccugcucccucuccauugcgccuugugugcagcagcuggaucacguacucccgagcuucaucuauccggcaaguugagcgacuacgggguaacagugccauguuccaccgauuuuaggggacgcuuucugucacacguuguauccgguccugcggccgccucugcuggauccaugguagucgacaccccgccaacgcuaccaagacauaguucgcaucugaggguggcccgcuccccgcuccauccgggcggaaccuuguggcccgggaggguaggcagacauucacuguacuucaacguaacgguguucgggaaggagcuacauuuacguuuaagaccuaauaggcgguugguagugcccgggaguaguguggaguggcaagaagauuuccgagaacuauucagacagccucugcgucaggaauguguguacaccggaggagugacaggcaugccuggugccgccguggcgaucaguaacugcgauggauuggccggccucauucgcaccgacucaacagacuucuucauugagccauuagagcgagggcaacaggaaaaggaagcaucagggagaacacauguggucuaccgucgagaggccgugcaacaagagugggcugagccagauggagaccugcacaaugaagccuuugggcucggcgauuuaccaaaccuccucggcuuggucggugaucaguuaggagauacugagagaaagaggcgccacgcuaagccugggucauacaguaucgaaguccuucuggugguggaugauucagugguaagguuccacggaaaagaacacgugcaaaauuauguccugacccuuaugaacauuguagacgaaauuuaccaugaugagucacucggggugcacauaaauaucgcacuugugcgccuaauaauggugggauacagacagucacucucccuuaucgaacgcgggaacccuucaagaagucuggagcaaguuugccggugggcucacagucagcagcgacaggacccaagccacgccgagcaccaugaccacgucguauuccugacaagacaggacuuuggaccauccgguuacgccccuguuacuggaaugugucaccccuugagaucgugcgcucucaaucacgaagauggcuucucuagcgcauucgucauugcccaugaaacaggucacgugcuggggauggaacaugacggacaagggaaugguugugcugaugaaacgucuuuaggcuccgucauggcaccauuggugcaggccgcuuuucauagauuccacuggucccgcugcaguaaacucgagcucagccgcuaccugcccucuuaugauugucucuuggaugauccuuucgauccagcuuggccccaaccuccggaacucccagggauuaacuauucuauggaugaacagugccgguucgauuuuggaucaggcuaucagacuugcuuagcuuucaggaccuucgaacccuguaagcaacuuuggugcucacacccggacaaccccuacuuuugcaaaacuaaaaaaggacccccucucgacgguaccgagugugccccuggaaaguggugcuucaaagggcauuguaucuggaaaucuccugagcaaacauaugggcaggauggagguuggucuucguggacgaaguucggaagcuguucucguuccugugggggcggagugcggagcaggucaagaucaugcaacaacccuagcccggcuuauggaggccgucuuugucucggcccuauguucgaauaccaagugugcaacuccgaggaaugccccggaacauacgaagacuuccgugcucagcaaugugcuaaacguaacaguuauuacgugcaucagaaugccaagcacagcuggguuccuuaugaaccagaugaugaugcucaaaagugcgaacugaucugccagucagccgacacaggugaugucguguucaugaaucaagucguccaugacggcacuagaugcucuuauagagacccuuauucagugugugcaagaggagaaugugugccugucggaugugacaaagagguggguagcaugaaggcugacgauaaaugcggaguguguggcggggauaacucacauugcaggaccguuaaaggcacccucggaaaggcguccaagcaggcaggcgcucugaaacucgugcagauccccgcuggagccagacacauucagauagaagcucuggagaaaucgccccaccgcaucgugguuaagaaccaggucaccggaucauuuauacugaacccuaaaggaaaggaggcuacaucaaggacauucacagcaauggggcuggaaugggaggacgcuguggaagaugcaaaagaaagucuuaaaaccucagggccucugccugaagccauagccauucuggcucucccacccaccgaaggggggccucggaguucacucgccuacaaauaugugauucacgaggaucuucugcccuugaucgggucuaauaauguguuauuggaggaaauggauacuuaugaaugggcucuuaaaaguugggcuccaugcaguaaagcuugcggaggcgggauccaguuuacgaaauauggaugcaggaggcggcgggaucaucacauggugcagagacauuugugcgaucauaagaaaagaccuaagccaauccguagacgcuguaaccaacacccaugcucccaaccuguaugggugaccgaggaguggggggcuuguucccgaucuugcgguaagcuugggguccagacgagagguauccaaugccugcugccucucuccaauggaacacauaagguaaugccugccaaagccugcgcgggagauagaccagaagcaagaaggccuugccugcgcgugccaugucccgcccaauggaggcucggugccuggagccaguguagcgccacuugcggugaagguauccaacagagacagguuguuugcagaacaaacgccaacucacuggggcacugcgaaggcgaccgccccgauacaguucagguguguagcuuaccugccugcggcgguaaccaucagaauaguaccgugagggccgacguuugggaguugggaaccccagaaggacaauggguuccacaaucagagccccugcauccuauuaacaagaucaguagcacagagccaugcacuggcgauagauccguauuuugucagauggaaguguuagaucguuauuguucaauuccgggauaucaucgacuauguugugucuccugcaucaaaaaggccuccggaccuaacccuggcccagaccccggucccacaucauugccccccuucucaacacccgguaguccgcucccaggaccccaagacccagccgacgccgccgaaccucccggcaagccuacagggagugaagaccaccagcacgggcgcgccacacaacugccgggcgccuuggauaccaguagcccgggcacucaacacccuuucgcucccgaaacgccuauacccggugccucuuggucaauuaguccaacgacucccggcggccucccuuggggcuggacacagacucccacacccgucccugaggauaaaggucaaccuggagaagaucuccgucaucccggcaccagucugcccgcagcauccccagucacauag

SEQ ID NO: 232997 - protein, 146 aa, Artificial Sequence
  derived and/or modified sequence
MSSCSNVCGSRQAQAAAEGGYQRYGVRSYLHQFYEDCTASIWEYEDDFQIQRSPNRWSSVFWKQELGFHTSSHSQEWNRKLQHKNCPRCCFGSLSPPGEALLCRHWDWPYHPKAPGCSAEPGGGPFQSIPTLLCGPKRGCFASSEL

SEQ ID NO: 232998 - protein, 177 aa, Artificial Sequence
  derived and/or modified sequence
MSSCSNVCGSRQAQAAAEGGYQRYGVRSYLHQFYEDCTASIWEYEDDFQIQRSPNRWSSVFWKVGLISGTVFVILGLTVLAVGFLVPPKIEAFGEADFVVVDTHAVQFNSALDMYKLAGAVLFCIGGTSMAGCLLMSVFVKSYSKEEKFLQQKFKERIADIKAHTQPVTKAPGTPLS

SEQ ID NO: 232999 - protein, 195 aa, Artificial Sequence
  derived and/or modified sequence
MSSCSNVCGSRQAQAAAEGGYQRYGVRSYLHQFYEDCTASIWEYEDDFQIQRSPNRWSSVFWKVGLISGTVFVILGLTVLAVGFLVPPKIEAFGEADFVVVDTHAVQFNSALDMYKLAGAVLFCIGGTSMAGCLLMSVFVKSYSKEEKFLQQKFKERIADIKAHTQPVTKAPGPGETKIPVTLSRVQNVQPLLAT

SEQ ID NO: 233000 - DNA, 441 bp, Artificial Sequence
  derived and/or modified sequence
atgagcagctgcagcaacgtgtgcggcagcagacaggcccaggccgccgccgagggcggctaccagagatacggcgtgagaagctacctgcaccagttctacgaggactgcaccgccagcatctgggagtacgaggacgacttccagatccagagaagccccaacagatggagcagcgtgttctggaagcaggagctgggcttccacaccagcagccacagccaggagtggaacagaaagctgcagcacaagaactgccccagatgctgcttcggcagcctgagcccccccggcgaggccctgctgtgcagacactgggactggccctaccaccccaaggcccccggctgcagcgccgagcccggcggcggccccttccagagcatccccaccctgctgtgcggccccaagagaggctgcttcgccagcagcgagctgtag

SEQ ID NO: 233001 - DNA, 534 bp, Artificial Sequence
  derived and/or modified sequence
atgagcagctgcagcaacgtgtgcggcagcagacaggcccaggccgccgccgagggcggctaccagagatacggcgtgagaagctacctgcaccagttctacgaggactgcaccgccagcatctgggagtacgaggacgacttccagatccagagaagccccaacagatggagcagcgtgttctggaaggtgggcctgatcagcggcaccgtgttcgtgatcctgggcctgaccgtgctggccgtgggcttcctggtgccccccaagatcgaggccttcggcgaggccgacttcgtggtggtggacacccacgccgtgcagttcaacagcgccctggacatgtacaagctggccggcgccgtgctgttctgcatcggcggcaccagcatggccggctgcctgctgatgagcgtgttcgtgaagagctacagcaaggaggagaagttcctgcagcagaagttcaaggagagaatcgccgacatcaaggcccacacccagcccgtgaccaaggcccccggcacccccctgagctag

SEQ ID NO: 233002 - DNA, 588 bp, Artificial Sequence
  derived and/or modified sequence
atgagcagctgcagcaacgtgtgcggcagcagacaggcccaggccgccgccgagggcggctaccagagatacggcgtgagaagctacctgcaccagttctacgaggactgcaccgccagcatctgggagtacgaggacgacttccagatccagagaagccccaacagatggagcagcgtgttctggaaggtgggcctgatcagcggcaccgtgttcgtgatcctgggcctgaccgtgctggccgtgggcttcctggtgccccccaagatcgaggccttcggcgaggccgacttcgtggtggtggacacccacgccgtgcagttcaacagcgccctggacatgtacaagctggccggcgccgtgctgttctgcatcggcggcaccagcatggccggctgcctgctgatgagcgtgttcgtgaagagctacagcaaggaggagaagttcctgcagcagaagttcaaggagagaatcgccgacatcaaggcccacacccagcccgtgaccaaggcccccggccccggcgagaccaagatccccgtgaccctgagcagagtgcagaacgtgcagcccctgctggccacctag

SEQ ID NO: 233003 - DNA, 441 bp, Artificial Sequence
  derived and/or modified sequence
atgtcaagctgctctaacgtgtgtggctctagacaggctcaagctgcagctgaaggcgggtaccagcggtatggagtgaggtcatatctacatcaattctatgaggattgtaccgcgtctatttgggagtatgaggacgacttccaaatccagcggagcccaaaccgctggagctccgtcttctggaaacaggagctggggtttcatacctcgtcgcacagccaggaatggaatcgcaagctgcagcacaagaactgtcctaggtgctgcttcggatccctgtctcccccgggcgaagcgctactttgcaggcactgggattggccttatcaccctaaagcgccaggatgtagcgctgaacccggtggtggaccgttccagtcgatacccacactgttgtgcgggccaaagagggggtgcttcgctagcagtgagttgtag

SEQ ID NO: 233004 - DNA, 534 bp, Artificial Sequence
  derived and/or modified sequence
atgtcttcatgctcaaatgtgtgcgggagcagacaagctcaggcagcggctgaaggcggatatcagagatacggagtacgatcctacctgcaccagttctatgaagactgcaccgcttcaatttgggagtatgaggacgactttcagattcagaggtcacccaaccggtggtctagtgtcttctggaaagtggggcttatctctggaacagtttttgtgatcctgggtcttaccgtgttagctgtgggttttcttgtccctcctaaaattgaggccttcggggaagccgattttgtcgttgttgacacccacgctgtgcagttcaacagtgcgctggacatgtataagctggcgggcgctgttctgttttgtatcggtgggacatccatggccgggtgtctccttatgagcgtcttcgtgaagtcctactccaaagaggaaaagttcctgcagcagaagttcaaagaaagaattgcagacatcaaggcccacacccagccagtgacaaaagccccgggcaccccactgagctag

SEQ ID NO: 233005 - DNA, 441 bp, Artificial Sequence
  derived and/or modified sequence
atgtcttcatgctcaaatgtctgtggcagtcgacaggcccaggctgcagctgagggcgggtaccaaagatacggagtgcgctcgtacctccatcagttctatgaggactgcaccgcctccatatgggaatatgaggatgattttcagatccaaaggtctcccaaccgctggtcgtcagtcttctggaaacaagaactgggatttcatacgtccagccactctcaggagtggaacaggaagctccagcacaagaactgtcctcggtgttgctttgggtcgctcagcccccccggggaagccctgctctgtaggcactgggactggccataccacccaaaggctcccgggtgctctgctgagcccggagggggaccttttcaatcgatccctacgctgctgtgcggtcccaagagggggtgctttgcgtctagtgagctatag

SEQ ID NO: 233006 - DNA, 588 bp, Artificial Sequence
  derived and/or modified sequence
atgtcatcttgttctaatgtgtgtggaagcagacaggcccaggctgccgctgagggtggctaccaaagatatggagttcggtcctatctgcaccaattctacgaggactgtaccgcttcaatctgggaatacgaggacgacttccagattcagcggtcacctaacaggtggtcgtccgtgttttggaaggtaggactgatctccggcactgtttttgtgatcctgggcctcacagtgctggctgtgggcttcctcgttccgcctaaaattgaagcctttggagaagcagacttcgttgtcgtagatacacacgccgtccagttcaacagcgctctggatatgtacaagctagccggggccgtgttattctgcataggtggcacctcgatggccgggtgtctattgatgagtgtctttgtgaagtcatattcgaaggaggaaaaatttttgcaacagaagttcaaagaacggattgccgatattaaagcacacacccagcccgtgacaaaggcacccggcccgggcgagacaaagatacctgttaccctatccagagtccagaatgtccagccactgctggcaacttag

SEQ ID NO: 233007 - DNA, 441 bp, Artificial Sequence
  derived and/or modified sequence
atgagcagctgcagcaatgtgtgtggcagccggcaggcccaggccgctgctgagggcggctaccagagatatggagtgcgcagctacctgcaccagttctatgaggactgcacagccagcatctgggagtatgaagatgacttccagatccagaggagccccaaccgctggagctctgtgttctggaagcaggagctgggcttccacaccagcagccacagccaggagtggaacaggaagctgcagcacaagaactgcccccgctgctgcttcggcagcctgagccccccaggagaggccctgctgtgccgccactgggactggccctaccaccccaaggcccctggctgcagcgctgagcccggcggcggccccttccagagcatccccaccctgctgtgtggccccaagaggggctgctttgccagcagcgagctgtag

SEQ ID NO: 233008 - DNA, 534 bp, Artificial Sequence
  derived and/or modified sequence
atgagcagctgcagcaatgtgtgtggcagccggcaggcccaggccgctgctgagggcggctaccagagatatggagtgcgcagctacctgcaccagttctatgaggactgcacagccagcatctgggagtatgaagatgacttccagatccagaggagccccaaccgctggagctctgtgttctggaaggtgggcctcatcagcggcaccgtgtttgtgatcctgggcctgactgtgctggccgtgggcttcctggtgccccccaagattgaggcctttggagaggccgactttgtggtggtggacacccatgctgtgcagttcaacagcgccctggacatgtacaagctggccggggctgtgctcttctgcattggaggcacctccatggccggctgcctgctgatgtctgtgtttgtgaagagctacagcaaggaggagaagttcctgcagcagaagttcaaggagagaattgctgacatcaaggcccacacccagcctgtgaccaaggcccctggcacccccctgtcctag

SEQ ID NO: 233009 - DNA, 588 bp, Artificial Sequence
  derived and/or modified sequence
atgagcagctgcagcaatgtgtgtggcagccggcaggcccaggccgctgctgagggcggctaccagagatatggagtgcgcagctacctgcaccagttctatgaggactgcacagccagcatctgggagtatgaagatgacttccagatccagaggagccccaaccgctggagctctgtgttctggaaggtgggcctcatcagcggcaccgtgtttgtgatcctgggcctgactgtgctggccgtgggcttcctggtgccccccaagattgaggcctttggagaggccgactttgtggtggtggacacccatgctgtgcagttcaacagcgccctggacatgtacaagctggccggggctgtgctcttctgcattggaggcacctccatggccggctgcctgctgatgtctgtgtttgtgaagagctacagcaaggaggagaagttcctgcagcagaagttcaaggagagaattgctgacatcaaggcccacacccagcctgtgaccaaggcccctggccctggagagaccaagatccctgtgaccctgagccgggtgcagaatgtgcagcccctgctggccacctag

SEQ ID NO: 233010 - DNA, 800 bp, Artificial Sequence
  derived and/or modified sequence
agctgggaaggatgagttcttgcagcaacgtctgtgggtccaggcaggcacaggctgcagctgagggtggttaccagcgctatggagtccggtcctacctgcaccagttttatgaggactgtacagcctcaatttgggagtatgaggatgatttccagatccaaagatcacctaacaggtggagctcagtattctggaagcaggaactgggttttcacacatcctcccacagccaagagtggaatcggaagttacagcacaaaaactgtcctcgctgctgtttcgggagtttgtcaccacctggagaggcccttctctgtcgccattgggattggccttaccaccctaaggccccaggttgctctgctgagcctggaggaggacccttccaaagcattccaactcttctgtgtggccctaaacgaggctgctttgcttcctcagaactttaaacaacctctgcattgcaattttttgactctttccatttgggagtcctctttctgttagacctgggaccaattcgactttgaactgtgtccagagataatttttatgatactgtatggaattgctccctcaatttttatcctttccagtactcagcatggtaccaagactaagctgatgagtcccaactgctctcctcacctcccatatgctactcatgagactccttcgtacctatcatcccacgctctccctcccatgttttaacatgtctggaattccccaatgggtgcatctctcagagattctcattaaagactggcattaacagccccttcagaagccttgaa

SEQ ID NO: 233011 - DNA, 817 bp, Artificial Sequence
  derived and/or modified sequence
acgaggcggagcggcggcggtggcgacggcgatgggaccccagcgagagatctgcagctaggctggctgcacttgctccacgggtcaggggatcggagggggattgaagaatgcgccattaaaaggaaagatcaaggagtaaaccagaagaagaagaaaaagaggacttcaaagctgggaaggatgagttcttgcagcaacgtctgtgggtccaggcaggcacaggctgcagctgagggtggttaccagcgctatggagtccggtcctacctgcaccagttttatgaggactgtacagcctcaatttgggagtatgaggatgatttccagatccaaagatcacctaacaggtggagctcagtattctggaaggttggactcatctcaggtacagtttttgtgatcctcggattgactgttctggcagtgggctttcttgtgccccccaaaatcgaagcatttggcgaagccgattttgtggtggtcgacacacatgctgtccagtttaacagtgctctggacatgtacaagctggcaggagctgttctcttctgcattggaggcacgtccatggcagggtgcctgctgatgtcggtgtttgtaaagagctactccaaagaagaaaaattcctccagcagaagtttaaagaacgaatcgcagacatcaaagcccacacccagccggttacaaaagctccaggaactcctctttcatagatcgtgactttgtgttattttccgtgttgtttgaaagtgccgaacagtttagaccagctcaccaatggctaatgtggtccattttattttctaatattgg

SEQ ID NO: 233012 - DNA, 742 bp, Artificial Sequence
  derived and/or modified sequence
aaagctggaaccctgcccctttggagggggaggcggcggcggcggcggcggctgcgcgggcctcgggtgcgcgggcacgcgggactcccagctgtcaatcaggcgcgggctgagctctacgaggcggagcggcggcggtggcgacggcgatgggaccccagcgagagatctgcagctaggctggctgcacttgctccacgggtcaggggatcggagggggattgaagaatgcgccattaaaaggaaagatcaaggagtaaaccagaagaagaagaaaaagaggacttcaaagctgggaaggatgagttcttgcagcaacgtctgtgggtccaggcaggcacaggctgcagctgagggtggttaccagcgctatggagtccggtcctacctgcaccagttttatgaggactgtacagcctcaatttgggagtatgaggatgatttccagatccaaagatcacctaacaggtggagctcagtattctggaagcaggaactgggttttcacacatcctcccacagccaagagtggaatcggaagttacagcacaaaaactgtcctcgctgctgtttcgggagtttgtcaccacctggagaggcccttctctgtcgccattgggattggccttaccaccctaaggccccaggttgctctgctgagcctggaggaggacccttccaaagcattccaactcttctgtgtggccctaaacgaggctgctttgcttcctcagaactttaa

SEQ ID NO: 233013 - DNA, 2354 bp, Artificial Sequence
  derived and/or modified sequence
aaagctggaaccctgcccctttggagggggaggcggcggcggcggcggcggctgcgcgggcctcgggtgcgcgggcacgcgggactcccagctgtcaatcaggcgcgggctgagctctacgaggcggagcggcggcggtggcgacggcgatgggaccccagcgagagatctgcagctaggctggctgcacttgctccacgggtcaggggatcggagggggattgaagaatgcgccattaaaaggaaagatcaaggagtaaaccagaagaagaagaaaaagaggacttcaaagctgggaaggatgagttcttgcagcaacgtctgtgggtccaggcaggcacaggctgcagctgagggtggttaccagcgctatggagtccggtcctacctgcaccagttttatgaggactgtacagcctcaatttgggagtatgaggatgatttccagatccaaagatcacctaacaggtggagctcagtattctggaaggttggactcatctcaggtacagtttttgtgatcctcggattgactgttctggcagtgggctttcttgtgccccccaaaatcgaagcatttggcgaagccgattttgtggtggtcgacacacatgctgtccagtttaacagtgctctggacatgtacaagctggcaggagctgttctcttctgcattggaggcacgtccatggcagggtgcctgctgatgtcggtgtttgtaaagagctactccaaagaagaaaaattcctccagcagaagtttaaagaacgaatcgcagacatcaaagcccacacccagccggttacaaaagctccagggccaggggaaacaaagattccagtcactttgtccagggttcaaaatgtccagcctctactggcaacctgaaacctttcccaccccagttcttcttgtctgatttatgcccgtggttaaaaagagcaggccagttttcgagataaagaagatttggcgttgactgccctagggctgtgttcagctgtgggcaatataatgggtggactcacacttgctcagttcaggcagctctgctggagggcggtgccatgcctaagcctgtgcacatgcatccagctgcttaagatgggtgcttccttgtacccggccaccagaaaacccctggaactcctctttcatagatcgtgactttgtgttattttccgtgttgtttgaaagtgccgaacagtttagaccagctcaccaatggctaatgtggtccattttattttctaatattggtttatctaatgttttctgcgtggtgctgtcttccattcctgtctcactatgtgtaagattttgtcatatgtgttcatagaaacatggaattctctgattttgagccgaacatgagtttttagactgtatcttgacatgaggttcctgacattggatacaaagttatcagcattcacaaatctttttgttttctccattttttttccctttgagatgaagtgctgttcttttgcctaggttggagtacagcggtgaaatcatagcgcactgcagccttgaactcctgggctcaagcgatcctcccacctcagcctcccaagtagctgggactacaggcacctgccaccacccccagttaatattttttttaattttttttagaggcaggatcttgctgtccaattttttttaaaaagctaaaattgccaactttagaatcttgaccaaaaaaaattaattttaggagcatctatttatgcagtgttcaaaagtactgaattagaaaccaggaagttttagttccttctactacctgtgtgatcttggggaaattatttaacctctcagtcctaattttccccttctgtataatgggagttctggatcacaatatgtctgggctctcattacccaaacatctgagattccatttttgccatgtgtcatcgagtcgctccccaacagatgtttgtgatgtttttgtggctgtcaccatggtgggattctttcagaatgagactcctggaaattcactgagtcagcagccttcacaccatctacccttaaatatccaaccccagcaatttatacaacgctgtcatatttttaaaaaaacaaaagtaagccatcctcaaataaggaaccccttggtagatattaaccttaaaaagggttttcattctcaaacaagatgctttgttctccaacaagatgttcatctcatcacttgcacttttgttttaatgtatggattcagattagactgagaaaaatggatggtattttcttaaaattgtgccaccttagagcccccccccttttttttttcttccttcactggataaataaaatatgtgaacaagtggaacctgaa

SEQ ID NO: 233014 - DNA, 441 bp, Artificial Sequence
  derived and/or modified sequence
atgagcagctgcagcaacgtgtgcggcagccggcaggcccaggccgcggcggaggggggctaccagcgatacggagttcgcagctatcttcaccagttctatgaagattgtacagccagtatctgggaatatgaggacgactttcagatacagcggtcccccaatcggtggagttctgtgttctggaagcaggagctcggcttccacacctcatctcattcgcaggaatggaatcggaagctccagcacaagaattgtccacgatgttgtttcggcagtctgagcccgcctggagaggcactcctgtgcaggcattgggactggccataccatccaaaagcacccggatgctccgctgaaccaggtggtgggcccttccagtcgattcccaccttgctgtgtggtccaaagcgtggctgctttgcgtctagtgaactgtag

SEQ ID NO: 233015 - DNA, 534 bp, Artificial Sequence
  derived and/or modified sequence
atgagcagctgcagcaacgtgtgcggcagccggcaggcccaggccgctgccgaaggaggataccagcgctacggcgtgcgtagctacctgcaccagttctacgaggattgtaccgctagtatctgggagtacgaggacgatttccaaattcagcgctccccaaatcgttggtccagtgtgttctggaaagttggccttatctctggcaccgtgtttgtgattctagggctaacagtcctggccgtgggctttttggttccccctaaaatcgaggctttcggggaagccgacttcgtagtggtcgatactcatgctgtacaattcaatagcgctttggacatgtataaattggccggcgcggtactgttctgcatcggaggaacttccatggccggatgcttgctgatgagcgtgttcgtgaaatcatattccaaggaggaaaaatttctgcaacaaaagttcaaagaacgcattgcagacattaaggctcacactcaaccggtcactaaggcacccgggacccccctgtcgtag

SEQ ID NO: 233016 - DNA, 441 bp, Artificial Sequence
  derived and/or modified sequence
atgagcagctgcagcaacgtgtgcggcagccggcaggcccaggccgccgccgagggcggataccagcggtacggagtgagatcatacctccatcagttttacgaggattgtacggcctctatatgggaatatgaggatgattttcagatacagaggagtccaaatcgttggagctcggtgttttggaaacaggaactagggtttcatacttcttcccattcccaggaatggaaccggaaactgcagcacaagaactgtcccaggtgctgtttcgggtccctgtcccccccgggcgaggctttgctgtgcaggcactgggattggccttaccaccctaaggccccagggtgttccgcagaacctggcggaggtcctttccagagtatacctaccttgctgtgcggacccaagaggggctgcttcgcgtccagcgagctttag

SEQ ID NO: 233017 - DNA, 588 bp, Artificial Sequence
  derived and/or modified sequence
atgagcagctgcagcaacgtgtgcggcagccggcaggcccaggccgctgccgaggggggctatcaaaggtacggggtccggtcctatctccatcagttttatgaggattgcacggcaagcatctgggagtacgaagacgatttccaaattcaaagatccccaaaccgatggtcaagcgtgttctggaaagtggggctaatctcaggaaccgtgttcgtgattctaggattgaccgttttggccgtgggcttcttggtgccccccaagatcgaggctttcggggaagcagattttgtcgtggtggatacccacgccgtccaattcaactccgctttagatatgtacaagttagccggcgccgtgcttttttgcatcggtggcaccagtatggctggttgccttttgatgtccgtgtttgtaaaaagctactctaaggaagaaaaatttctgcagcagaaattcaaagagcgaatcgcagacatcaaggcgcatacccagccagtcacaaaagcaccgggccctggggagactaaaatcccagttacacttagccgtgtacaaaacgtgcagcctctgctcgccacctag

SEQ ID NO: 233018 - DNA, 441 bp, Artificial Sequence
  derived and/or modified sequence
atgagctcctgttccaacgtatgtggaagccgccaagctcaggccgcagccgagggcggataccagcgctatggggtaaggagctacctgcaccaattctatgaagattgcactgcatccatctgggaatatgaggacgacttccagattcaaaggtcccctaatcggtggagctccgtcttttggaagcaggaattgggatttcatacttcaagccacagccaggagtggaaccggaagctgcagcataagaactgcccacggtgctgcttcggtagcctgtcccctcccggagaggcattgttgtgcaggcactgggactggccctaccaccctaaggcacctggatgcagtgctgagcccggagggggaccattccaatcaatccccacactgttatgcggtccaaagcggggttgtttcgcttcttcagaactgtag

SEQ ID NO: 233019 - DNA, 534 bp, Artificial Sequence
  derived and/or modified sequence
atgtcctcctgttctaacgtctgcgggagtagacaggcacaagctgctgctgagggcggatatcagaggtatggcgttagaagctacctgcaccagttttatgaagattgcacagccagcatctgggagtatgaggacgatttccagattcaaagatccccaaaccgttggtcatccgtgttctggaaggtcggcctcatttcaggcacggtcttcgtgatcctgggtctgacggtactcgccgttggtttccttgtgccacctaagatcgaggcatttggcgaggcggactttgtcgtagttgacacccacgcggtccagtttaacagcgctttggacatgtataagcttgccggtgcagtcctgttttgtattggaggcacgagcatggcgggttgtctgctgatgtctgtgtttgttaagagctattctaaggaagagaaattcctccagcagaagtttaaggaacggattgccgatattaaggcccacactcagcccgtaactaaggctcctggtacccccttgtcttag

SEQ ID NO: 233020 - DNA, 441 bp, Artificial Sequence
  derived and/or modified sequence
atgtcaagttgtagcaacgtgtgtgggagccgccaagctcaggccgcagccgagggcggatatcagagatatggagtcagaagttatctccaccagttttatgaagactgcactgccagcatttgggaatatgaagatgatttccagattcagagatctccaaacaggtggtccagtgtattttggaagcaggagctgggctttcacacaagcagtcactcccaggagtggaaccgaaaactccaacacaaaaattgtccacggtgttgtttcggcagtctgtccccccctggagaggcactcctgtgtcgccattgggattggccgtaccatcctaaggctcctgggtgctccgcagagcctgggggtgggcctttccagagcatccccacgttgctatgtggacctaaaagggggtgtttcgccagctcagaactgtag

SEQ ID NO: 233021 - DNA, 588 bp, Artificial Sequence
  derived and/or modified sequence
atgagcagctgcagcaatgtctgtgggagtcggcaggctcaggcggctgcagaagggggataccagagatatggcgtccgatcctacctccatcagttttacgaagattgcacagcctccatctgggagtacgaggatgattttcaaattcagcgctcacccaatcggtggagcagcgtcttttggaaggtggggcttatctccggaaccgtgtttgtcattctcggcctgaccgtgctggccgtgggattcctggtccccccaaaaattgaggcttttggggaggccgacttcgtcgtggtggacactcacgctgtccagtttaattctgctcttgacatgtacaaactggctggcgcagtgctgttttgtatcggaggaaccagcatggcaggatgtttgttgatgtcagtgttcgtgaaatcgtattccaaggaagagaaatttctgcagcagaaatttaaagagaggatagcggatattaaggctcatacacagccagtcacgaaggcaccagggcctggtgagaccaagattcccgtcacactgagccgagtgcaaaatgtacagccattgctggccacctag

SEQ ID NO: 233022 - protein, 137 aa, Artificial Sequence
  derived and/or modified sequence
MGLRAGGTLGRAGAGRGAPEGPGPSGGAQGGSIHSGRIAAVHNVPLSVLIRPLPSVLDPAKVQSLVDTIREDPDSVPPIDVLWIKGAQGGDYFYSFGGCHRYAAYQQLQRETIPAKLVQSTLSDLRVYLGASTPDLQ

SEQ ID NO: 233023 - DNA, 414 bp, Artificial Sequence
  derived and/or modified sequence
atgggcctgagagccggcggcaccctgggcagagccggcgccggcagaggcgcccccgagggccccggccccagcggcggcgcccagggcggcagcatccacagcggcagaatcgccgccgtgcacaacgtgcccctgagcgtgctgatcagacccctgcccagcgtgctggaccccgccaaggtgcagagcctggtggacaccatcagagaggaccccgacagcgtgccccccatcgacgtgctgtggatcaagggcgcccagggcggcgactacttctacagcttcggcggctgccacagatacgccgcctaccagcagctgcagagagagaccatccccgccaagctggtgcagagcaccctgagcgacctgagagtgtacctgggcgccagcacccccgacctgcagtag

SEQ ID NO: 233024 - DNA, 414 bp, Artificial Sequence
  derived and/or modified sequence
atgggtctccgggctggaggtacccttggtagagctggtgccggccgcggcgctcccgagggtccaggcccctctggcggagcccagggtggatcaattcattctggtagaatcgccgcggtgcacaatgtcccactgtctgtgctcatccggcccctaccttccgtactggaccctgctaaggttcagtccttggtagacacgattagagaagaccctgacagtgtgccaccaatcgatgtgttgtggataaagggtgcccaaggtggagattacttctactcattcggtgggtgtcacaggtacgccgcctaccagcagctgcagagggagaccatcccagctaagcttgtccagtcgacgctcagcgatctgagagtgtaccttggagcctcaactcctgatttacaatag

SEQ ID NO: 233025 - DNA, 414 bp, Artificial Sequence
  derived and/or modified sequence
atgggcctgcgggccggcggcaccctgggccgggccggggccggccgcggggcccctgagggccctggccccagcggcggggcccagggcggcagcatccacagcggcagaattgctgctgtgcacaacgtgcccctgtctgtgctgatccggcccctgcccagcgtgctggaccctgccaaggtgcagagcctggtggacaccatcagagaagatcctgattctgtgccccccattgatgtgctgtggatcaagggggcccagggcggggactacttctacagctttggaggctgccacagatatgctgcctaccagcagctgcagcgggagaccatcccagccaagctggtgcagagcaccctgagtgacctgcgggtgtacctgggcgccagcaccccagacctgcagtag

SEQ ID NO: 233026 - DNA, 2698 bp, Artificial Sequence
  derived and/or modified sequence
cggcacctggcgagcggagccggagtcgggctggggaccgcggggtcgaggccggaccgcggcggggtcgggggagaaacgcgcgctgccctggcacgggcccccccccccggccgcgcggaatggtatggcccggccggagttaaggccggggggaggcggcgagtcccgcggcggcggcgacgatggggctgcgtgcaggaggaacgctgggcagggccggcgcgggtcggggggcgcccgaggggcccgggccgagcggcggcgcgcagggcggcagcatccactcgggccgcatcgccgcggtgcacaacgtgccgctgagcgtgctcatccggccgctgccgtccgtgttggaccccgccaaggtgcagagcctcgtggacacgatccgggaggacccagacagcgtgccccccatcgatgtcctctggatcaaaggggcccagggaggtgactacttctactcctttgggggctgccaccgctacgcggcctaccagcaactgcagcgagagaccatccccgccaagcttgtccagtccactctctcagacctaagggtgtacctgggagcatccacaccagacttgcagtagcagcctccttggcacctgctgccaccttcaagagcccagaagacacacctggcctccagcaggctgggccatgcagaagggatagcaggggtgcattctctttgcacctggcgagagggtctgactctgggcacccctctcaccagctacaaggccttggactcactgtacagtgtgggagccccagttcccacctctgtgacaataggatcatggccttacccttgaagcattaccgagaaggagaacagagatgggcttgaagagccacgtgctgccggctccaaattcccaaggacaaggatccctctgcatttttgtctatgtaacctcttatatggactacattcagctgcaaggaaaggaaaaccttgattgcagtggtttaaacaaacagaagattgtttttccacatagcatggattctggagatgggtggctaatggtattggttcaacaactccacgaaggtaggggtcacgtcttggatccttttgccttaatctcagtgctcgttacttcatggtcccaagatggctgctgtatccccaagaatcatgtctgcgttcaaggaaggaggggtggaggaagaggaagggccaaactagctggacccgtcaccttctatcagaaagtaaaacctcgtcagaagtctgtttcctgctctctccctctgcatatcttcacttagatgcccttggcccgagccagctaccattgcacctctagctgcaaacaaagctaagacagcagggaacagaattgtcatggctgaatagaccaatcgtgttccatctactgagactggcacactgcctcctgcaataaaactgggatcccattaccaagagagaaatgcagaattgtgtaccagttagcttttgctgtgtaacaaaccatccccaaacttggcagctagaaacaaaccctgtattttcccacaatcctatgggttggcaatttgggctgggctcaacagggcagttctgctgctcacacctgggatccctcatggagctaaggtcagctgttacctcagctgggcctggatggtctaggatagccttactcacttgcctggcaggtgacaggctgttggctggaattgcttggttctcctccatgtggcctctccagcaggctagctcaggcttattcacatgatggcttcaggattccaaagagagtgagagtagaagctgaaagacttcttgagttcttggcctggaactgggactaggacagtgtcacttctgctaagttcttttggtcagagcaaatcacaaggctttacccagattcaagggatgagaaacagactacatgtcttgatgaggggaaccacaaagagcttgtggccatttttcacctatcacaaataattttggatgggtatttatttggataaaggtatttccctcttccccctttctctctgtctcatggggcctcactctgccaagttggaaggcactaagacattgtcctggccctcagggtctaggggaagaggtgttggggcaggaagtgagtctctccatgggctggacccactgtagtaggagtgcctccttgtctgcactgctggtatggggttaggccaggtaggacattccagaggggcttctgaaaaccaagagtccctggggaaagggaacagagtaaggcaggccttgttctcactgccctctaagggaacttggtcactcggcacttttaagcctcagtttctccagttcaataataaggacaagagcttttcccatgcattctctttccccgggaaagttgactgaggtgaccagtaatagaattgaaaagggagagtgtcttcagtgcaatgtggcatcctggattgggtcttggaacaaaaacaggacattagtgggaaaattggaaatctgaaaaaagtctgaattttagttaatataccaatttcagtctcttggttttgacagatgtaccatggtgatgtaagatgttgaccttggggtaggctgggtgaagggtatacaggaactctttgtactatctctgcaacttctctgtaaatctagtatcattccaaaataaaagtttatttaatttaaaaaaaaaaa

SEQ ID NO: 233027 - DNA, 414 bp, Artificial Sequence
  derived and/or modified sequence
atgggcctgcgggccggcggcaccctgggccgggccggcgccggcagaggcgccccggaggggcctggaccctccggcggagcccaggggggatcaatccactccgggcgtatcgcagccgtacataatgtgcccttatctgttttgatacggcccttaccttccgtgttagatcccgctaaagtgcagagtctggtggatactatacgcgaggatcccgacagtgtgcctccaatcgacgtactttggattaagggcgctcagggaggcgattatttttattctttcggtggctgccacagatatgctgcatatcagcaactccagcgcgagaccattcccgctaaactggtgcagagtacactttctgatttacgtgtatacctcggggcttcaactcccgacttgcagtag

SEQ ID NO: 233028 - DNA, 414 bp, Artificial Sequence
  derived and/or modified sequence
atgggtctgcgcgctgggggtacactcggcagagccggagccggacgaggtgcacctgagggcccaggacctagcggaggtgctcagggtggcagcatccattcaggcagaatagcagcagtccataatgttccgctctcagtcttgattcggcctctaccgagtgtgctggacccggctaaagtgcagagtctggtggacacaattagagaagaccccgactctgtgccaccgattgacgtgctgtggatcaagggggcacagggaggagactatttctacagttttggagggtgccacagatacgcagcctaccagcagttacaaagagagaccatcccagccaagctggtgcagtctactctctctgacttgcgagtgtacctaggagcctctacccctgacctccagtag

SEQ ID NO: 233029 - protein, 562 aa, Artificial Sequence
  derived and/or modified sequence
MNPLFGPNLFLLQQEQQGLAGPLGDSLGGDHFAGGGDLPPAPLSPAGPAAYSPPGPGPAPPAAMALRNDLGSNINVLKTLNLRFRCFLAKVHELERRNRLLEKQLQQALEEGKQGRRGLGRRDQAVQTGFVSPIRPLGLQLGARPAAVCSPSARVLGSPARSPAGPLAPSAASLSSSSTSTSTTYSSSARFMPGTIWSFSHARRLGPGLEPTLVQGPGLSWVHPDGVGVQIDTITPEIRALYNVLAKVKRERDEYKRRWEEEYTVRIQLQDRVNELQEEAQEADACQEELALKVEQLKAELVVFKGLMSNNLSELDTKIQEKAMKVDMDICRRIDITAKLCDVAQQRNCEDMIQMFQKKLVPSMGGRKRERKAAVEEDTSLSESEGPRQPDGDEEESTALSINEEMQRMLNQLREYDFEDDCDSLTWEETEETLLLWEDFSGYAMAAAEAQGEQEDSLEKVIKDTESLFKTREKEYQETIDQIELELATAKNDMNRHLHEYMEMCSMKRGLDVQMETCRRLITQSGDRKSPAFTAVPLSDPPPPPSEAEDSDRDVSSDSSMR

SEQ ID NO: 233030 - protein, 197 aa, Artificial Sequence
  derived and/or modified sequence
MGGRKRERKAAVEEDTSLSESEGPRQPDGDEEESTALSINEEMQRMLNQLREYDFEDDCDSLTWEETEETLLLWEDFSGYAMAAAEAQGEQEDSLEKVIKDTESLFKTREKEYQETIDQIELELATAKNDMNRHLHEYMEMCSMKRGLDVQMETCRRLITQSGDRKSPAFTAVPLSDPPPRQARLRTPIAMSHLTAP

SEQ ID NO: 233031 - DNA, 1689 bp, Artificial Sequence
  derived and/or modified sequence
atgaaccccctgttcggccccaacctgttcctgctgcagcaggagcagcagggcctggccggccccctgggcgacagcctgggcggcgaccacttcgccggcggcggcgacctgccccccgcccccctgagccccgccggccccgccgcctacagcccccccggccccggccccgccccccccgccgccatggccctgagaaacgacctgggcagcaacatcaacgtgctgaagaccctgaacctgagattcagatgcttcctggccaaggtgcacgagctggagagaagaaacagactgctggagaagcagctgcagcaggccctggaggagggcaagcagggcagaagaggcctgggcagaagagaccaggccgtgcagaccggcttcgtgagccccatcagacccctgggcctgcagctgggcgccagacccgccgccgtgtgcagccccagcgccagagtgctgggcagccccgccagaagccccgccggccccctggcccccagcgccgccagcctgagcagcagcagcaccagcaccagcaccacctacagcagcagcgccagattcatgcccggcaccatctggagcttcagccacgccagaagactgggccccggcctggagcccaccctggtgcagggccccggcctgagctgggtgcaccccgacggcgtgggcgtgcagatcgacaccatcacccccgagatcagagccctgtacaacgtgctggccaaggtgaagagagagagagacgagtacaagagaagatgggaggaggagtacaccgtgagaatccagctgcaggacagagtgaacgagctgcaggaggaggcccaggaggccgacgcctgccaggaggagctggccctgaaggtggagcagctgaaggccgagctggtggtgttcaagggcctgatgagcaacaacctgagcgagctggacaccaagatccaggagaaggccatgaaggtggacatggacatctgcagaagaatcgacatcaccgccaagctgtgcgacgtggcccagcagagaaactgcgaggacatgatccagatgttccagaagaagctggtgcccagcatgggcggcagaaagagagagagaaaggccgccgtggaggaggacaccagcctgagcgagagcgagggccccagacagcccgacggcgacgaggaggagagcaccgccctgagcatcaacgaggagatgcagagaatgctgaaccagctgagagagtacgacttcgaggacgactgcgacagcctgacctgggaggagaccgaggagaccctgctgctgtgggaggacttcagcggctacgccatggccgccgccgaggcccagggcgagcaggaggacagcctggagaaggtgatcaaggacaccgagagcctgttcaagaccagagagaaggagtaccaggagaccatcgaccagatcgagctggagctggccaccgccaagaacgacatgaacagacacctgcacgagtacatggagatgtgcagcatgaagagaggcctggacgtgcagatggagacctgcagaagactgatcacccagagcggcgacagaaagagccccgccttcaccgccgtgcccctgagcgaccccccccccccccccagcgaggccgaggacagcgacagagacgtgagcagcgacagcagcatgagatag

SEQ ID NO: 233032 - DNA, 2686 bp, Artificial Sequence
  derived and/or modified sequence
tgctcctgcaccggtctgcatctcccagcagaaggcgcagccatgaatccgttattcggccccaacctcttcctcctgcagcaggagcagcagggcctggccgggccactgggggactcactgggaggcgaccacttcgccgggggaggagacttgcccccggcgcctctctcgccggccggccctgctgcctactcgccgcccgggccgggcccggccccgcctgccgccatggccctccgcaatgacctgggctccaacatcaacgtgctcaagaccctgaacctccggttccgctgcttcctggccaaggtgcatgagctggagcgccggaaccggctgttggagaagcaactgcagcaagcgctggaggagggtaagcagggccggcggggcctgggtcgtcgcgaccaggcagtgcagaccggcttcgtcagccccatccggcccctggggctgcagctgggcgcccggccggccgctgtctgcagcccttcggcgcgcgtgctgggctcgcccgcgcgctccccggccggccccctcgcgccctccgcggccagcctctcgtcgtcctccacctccacctccaccacctattcctcgtcggcccgcttcatgcccggcaccatctggtcgttctcgcacgcccgccggctcgggccgggactggagcccactctggtgcaagggcctggcttgtcgtgggtgcacccggatggggtgggcgtccagatcgacaccatcacgcccgagatccgcgctctctacaacgtgctggccaaagtgaagcgggagcgggacgagtacaagcggaggtgggaagaggagtacacggtgcggatccagctgcaagaccgtgtaaatgagctccaggaggaagcccaggaggctgatgcctgccaggaggagctggcactgaaggtggaacagttgaaggctgagctggtggtcttcaaggggctcatgagtaacaacctgtcggagctggacaccaagatccaggagaaagccatgaaggtggatatggacatctgccgccgcatcgacatcaccgccaagctctgcgatgtggctcagcagcgcaactgcgaggacatgatccagatgttccagaagaagctggtcccatccatgggggggcggaagcgggagcgcaaggctgccgtcgaggaggacacctccctgtcggagagtgaggggccccgccagcccgatggggatgaggaggagagcacagccctcagcatcaacgaggagatgcagcgcatgctcaaccagctgagggagtatgattttgaggacgactgtgacagcctgacttgggaggagactgaggagaccctgctgctttgggaggatttctcaggctatgccatggcagctgcagaggcccagggagagcaggaagatagcctggagaaggtgattaaagatacggagtccctgttcaaaacccgggagaaggagtatcaggagaccattgaccagatagagctggagttggccacggccaagaacgacatgaaccggcacctgcacgagtacatggagatgtgcagcatgaagcgcggcctggacgtgcagatggagacctgccgccggctcatcacccagtctggagaccgaaagtctcctgctttcactgcggtcccgcttagcgacccgccgccgccgccaagcgaggctgaggactccgatcgcgatgtctcatctgacagctccatgagatagagacctgcctcccccttgcacccgaggccctcgcagcagggagctcagcgaggcagagggtggggctgcacagaggggaacatcagctgcagctctgcaccaggccggtccctggggactggggcgctcctccctcaggctttctccctcagtcttggcttctccagggctctggggtgtctggagctaggcttggccctaccattctggggccatttccaccacagttggggctctcctgccttcacgcgtgggtgtctgctacttccccatctttaaaatgctgccagagcgattgcggcccctcaccttgtccacgtatcaggaatgtgaatgtgggacctttcctccatccctgttgtccggagccagctcactgtcttccacactggtgctaactggcccaggcactggagtggaatagaatgcagctggaggctacgcatggcctctgcagcacacgcagctggagagggcttctgtccctgtcagcggcagagggcgttggggctggccggggcaccttgtccctgctatggtccacgtgctcacgctgtccacctgccaggtggagtgtatgtggctgtggccctccctcgtggaggtgccgtgctttaaagaggccttagtgcccgggatgggcacagtgttttgaagggaggtgggagctcttgctctcctggtcactgcagaatgacagagaaggtgaagctccatgcatgtgtgcgcgggtgtatgtgcgctcagggtctctgtttaagtatcagctaaagatgtgcttcctccgtgtctgtcatacactgagaccaacaggctacagtgtccctgattcttggaaaagcctggagaagctggggagatgcggttcacaatgcctcggtataggaggctgtgttgagctgacattcaaatggattctttaataataatgaaactggcgagtatttattgtgca

SEQ ID NO: 233033 - DNA, 1689 bp, Artificial Sequence
  derived and/or modified sequence
atgaaccctctgttcggtccaaacctgtttttgctccagcaagaacagcagggattggccggtcctcttggcgattccctgggtggagatcacttcgctggcgggggcgacctgccacccgcacctctgtctccagccggtccggccgcgtacagccctcccggccctgggcccgccccaccggccgcaatggcacttcggaacgaccttggaagcaacataaacgtcctcaagacattgaatttgaggtttcgatgtttcctcgccaaggttcacgaacttgaaagacggaaccgacttttagagaagcaactgcaacaagcattagaggaggggaaacagggtaggagaggactcggccggcgagatcaggctgtgcaaacaggttttgtaagccccatacgtccgctcgggctgcaactgggagcccgacccgccgccgtgtgcagcccttccgcacgagtcctgggcagccctgctagatccccagctggtcctctggcaccttctgccgcatccttgagctctagttcaacgtccacatctactacgtattcgtcgagcgcgagattcatgcctggcacgatttggagtttttcccatgctcgacggctggggcccggcctcgagcccacgctagtgcaaggcccaggactttcttgggtccacccagatggagttggtgtccagattgacactataacacccgagatacgagctctgtacaatgtgctggccaaagtgaagagggagagggacgagtacaagcggcgatgggaagaggaatacaccgtgcgaatccaactacaagacagggttaacgaactgcaggaggaggctcaggaggccgacgcttgccaggaggaactggccctgaaagtggagcagcttaaagccgaactggtagtgttcaaaggactcatgagcaataatctctctgagttggatactaagattcaggaaaaagccatgaaggtcgacatggacatctgcagacgaatagacattacggccaaactgtgcgacgtggcgcaacagcgcaactgtgaggacatgattcagatgttccaaaagaagctggtgcccagcatgggcggtcggaaacgtgagagaaaagctgctgtagaagaggatacatctctgagcgagagcgagggacccagacagccggacggggatgaggaagaatctactgctctctccatcaatgaggagatgcagcggatgctcaatcagctgagagagtacgattttgaagatgattgcgacagcctaacttgggaggaaacagaggagaccctgctgctgtgggaggacttctcaggatacgctatggcagccgctgaggcgcagggagagcaggaggattctttggaaaaggtaataaaggacactgagtctctgttcaaaaccagagaaaaggagtaccaggagacaatcgatcaaatagaactggaactcgccaccgccaagaatgatatgaacagacatctgcacgaatatatggaaatgtgctccatgaaaagaggccttgatgtgcagatggagacgtgtcggcgtttgatcactcagagtggagacaggaaaagtccagcattcactgccgttccccttagcgatccccctcctccccccagcgaggctgaggattccgatagggacgtctcttcggatagttcgatgcggtag

SEQ ID NO: 233034 - DNA, 1689 bp, Artificial Sequence
  derived and/or modified sequence
atgaaccccctgtttggccccaacctcttcctgctgcagcaggagcagcagggcctggccggccccctgggggacagcctgggcggggaccactttgctgggggcggggacctgcccccagcccccctgagccctgctggccctgctgcctacagccccccaggccctggccctgcccccccagctgccatggccctgagaaatgacctgggcagcaacatcaacgtgctgaagaccctgaacctgcgcttccgctgcttcctggccaaggtgcatgagctggagaggaggaaccggctgctggagaagcagctgcagcaggccctggaggagggcaagcagggccggcggggcctgggcagaagagaccaggccgtgcagacaggctttgtgagccccatccggcccctgggcctgcagctgggcgcccggcctgctgctgtgtgcagccccagcgcccgggtgctgggcagccctgcccggagccctgctggccccctggcccccagcgctgccagcctgagcagcagcagcaccagcaccagcaccacctacagcagcagcgcccgcttcatgcctggcaccatctggagcttcagccacgcccggcggctgggccctggcctggagcccaccctggtgcagggccctggcctgtcctgggtgcacccagatggagtgggcgtgcagattgacaccatcaccccagagatccgggccctgtacaacgtgctggccaaggtgaagcgggagagagatgagtacaagaggcgctgggaggaggagtacacagtgcgcatccagctgcaggacagagtgaatgagctgcaggaggaggcccaggaggctgatgcctgccaggaggagctggccctgaaggtggagcagctgaaggccgagctggtggtgttcaagggcctgatgagcaacaacctgtctgagctggacaccaagatccaggagaaggccatgaaggtggacatggacatctgcagaagaattgacatcacagccaagctgtgtgatgtggcccagcagaggaactgtgaggacatgatccagatgttccagaagaagctggtgcccagcatgggcggcaggaagcgggagaggaaggctgctgtggaggaggacaccagcctgtctgagagcgagggcccccggcagccagatggagatgaggaggagagcacagccctgagcatcaatgaggagatgcagaggatgctgaaccagctgcgggagtatgactttgaagatgactgtgacagcctgacctgggaggagacagaggagaccctgctgctgtgggaggacttcagcggctacgccatggctgctgctgaggcccagggcgagcaggaggacagcctggagaaggtgatcaaggacacagagagcctcttcaagacccgggagaaggagtaccaggagaccatcgaccagatcgagctggagctggccacagccaagaatgacatgaacagacacctgcacgagtacatggagatgtgcagcatgaagaggggcctggatgtgcagatggagacctgcagaagactcatcacccagagcggggacaggaagagccctgccttcaccgctgtgcccctgagtgaccccccacctccacccagcgaggctgaagattctgacagagatgtgtccagtgacagctccatgaggtag

SEQ ID NO: 233035 - DNA, 1689 bp, Artificial Sequence
  derived and/or modified sequence
atgaaccccctgttcggccccaacctgttcctgctgcagcaggagcagcaagggctggcaggaccactcggggactcactggggggcgaccactttgccggggggggcgacctgccacctgctcccctttccccggcaggacccgcagcttactccccaccaggacccggaccggccccccccgctgcaatggcgctcagaaacgacctgggaagcaatataaatgtgctgaagaccctgaatctgcgctttaggtgtttcttggccaaggtgcacgaactggagaggcgcaaccggctgttggagaagcagctccagcaagccctggaggaaggtaaacaggggcggcgcggactgggccggcgtgaccaggcggtccagacgggcttcgtaagtccaattcgcccacttgggttacagctcggcgcccgccccgctgccgtgtgcagtccaagcgcacgagtgctcggaagccccgcaaggtcacccgctgggccactggctccttcagcggcgtccctgtcctcatcatcaacatctacttcaaccacatactctagttctgctagattcatgcctggaactatatggtccttttcacacgctaggaggcttggtccgggcctggagcccacacttgtgcaaggtcctggcttaagctgggtccacccagacggcgttggggtgcagatcgataccattacacccgaaatacgggctctgtacaatgtcctcgctaaagttaaacgggagcgagatgaatataagcgaaggtgggaagaggagtatacagtccgaatccaactgcaggatcgcgtcaacgagctgcaggaggaagcccaggaggctgatgcctgtcaagaggagctcgccctgaaggttgaacagcttaaagccgagttggttgtattcaagggactgatgagcaataatctcagcgagctggataccaaaatccaggagaaggccatgaaagtggatatggatatatgcaggcgtatcgacattactgctaaactctgcgatgttgcccaacaacgaaactgcgaggatatgatccagatgtttcaaaaaaaactggtgccctccatgggaggacgcaaacgtgaacgaaaggctgcggtcgaggaagatacaagcctgtccgaatcagagggaccccggcaaccggacggcgacgaggaggagtccactgcactgagtattaacgaggaaatgcagagaatgctgaatcaactgcgcgagtatgattttgaggacgactgtgattccctgacttgggaagagactgaggaaaccctcctgctgtgggaggatttcagtggatatgcgatggcagccgctgaagcgcagggcgagcaggaggactccctggaaaaggtcattaaggacacagagagtctgtttaagacaagagagaaagaatatcaggagacaatcgatcaaattgagttggagctggccaccgccaagaacgacatgaatcgccacttacacgagtacatggaaatgtgctccatgaaacggggtctggatgtgcagatggagacttgccgccgcctgattacccagtctggcgacagaaagagcccagcatttaccgctgtgcccctgtcagaccctcctcccccaccatccgaagcggaggactcagaccgggatgtaagctctgattcatcaatgcggtag

SEQ ID NO: 233036 - DNA, 1689 bp, Artificial Sequence
  derived and/or modified sequence
atgaacccactgtttggccctaatctgttccttctccagcaagagcaacaagggctggcaggaccactgggtgactcattaggtggggaccatttcgcaggcggtggagacctgcctcctgcccctttgtccccagctgggcctgctgcttactcccctcctggaccgggtcccgctccacctgcagctatggctttgagaaacgatttggggagcaacatcaacgtcctgaagacgctcaatctgcgcttccgttgttttctcgccaaagtgcatgaactcgaaaggcgcaaccgcctgctagaaaaacaactgcaacaggccctggaggagggtaaacagggacgacgcggactgggacgtagggaccaggccgtccagactggcttcgtgagtcccattcggccattggggctccagttgggcgcaagaccagctgcggtctgcagcccctccgcaagagtgctgggatcccccgctaggtctcccgctgggccactagccccttcagccgcttctctgagttcttcttccacgtccactagtaccacttattcttcctccgccagattcatgccaggtactatctggagtttcagccatgccaggcggttgggtcctgggcttgaacctactcttgttcagggcccaggcctatcttgggtgcatcctgacggcgtgggggtgcagattgacaccattaccccagaaataagggcactttacaatgtgctggcgaaagtcaagagggaaagggatgagtacaaacgaaggtgggaagaggaatacacggtgcggatccaactccaagatcgggtgaacgagcttcaggaggaggcccaggaggccgatgcttgccaagaggaactggcacttaaggtggaacagctcaaagcagagctcgtggttttcaaaggcctgatgagcaataacctatccgagctcgacactaagatccaggaaaaggcaatgaaagttgatatggatatttgcaggcggattgatattaccgccaaattgtgtgatgttgcccagcagcggaactgtgaggacatgatccagatgttccaaaagaagctggtcccctccatgggtgggagaaaaagggaaaggaaggccgcagtagaggaggacacatccctgtcagagagcgaaggtcctcggcaacctgacggcgacgaagaggaatccactgcacttagtataaatgaggagatgcagcgcatgctcaaccagctgcgtgaatacgacttcgaagacgattgtgattctcttacttgggaggaaactgaagagaccctgctgctgtgggaggatttctccggctacgccatggctgccgctgaggcccaaggggaacaagaggattccctggaaaaggtgattaaggatacagagtccctgtttaagactagggagaaagagtatcaggagaccatcgaccaaatagagctcgagctggcgaccgcgaaaaatgatatgaacagacatctgcacgagtacatggagatgtgttccatgaaacgcggtctggacgttcaaatggaaacgtgtcggagactaattacccaatctggggatcgcaagagccctgcattcactgccgttcctctttctgacccccctcctccaccttcagaggcagaggactcagaccgagacgtgagcagcgatagttccatgaggtag

SEQ ID NO: 233037 - protein, 205 aa, Artificial Sequence
  derived and/or modified sequence
MASPDDPLRADHMVKEPVEDTDPSTLSFNMSDKYPIQDTELPKAEECDTITLNCPRNSDMKNQGEENGFPDSTGDPLPEISKDNSCKENCTCSSCLLRAPTISDLLNDQDLLDVIRIKLDPCHPTVKNWRNFASKWGMSYDELCFLEQRPQSPTLEFLLRNSQRTVGQLMELCRLYHRADVEKVLRRWVDEEWPKRERGDPSRHF

SEQ ID NO: 233038 - DNA, 618 bp, Artificial Sequence
  derived and/or modified sequence
atggccagccccgacgaccccctgagagccgaccacatggtgaaggagcccgtggaggacaccgaccccagcaccctgagcttcaacatgagcgacaagtaccccatccaggacaccgagctgcccaaggccgaggagtgcgacaccatcaccctgaactgccccagaaacagcgacatgaagaaccagggcgaggagaacggcttccccgacagcaccggcgaccccctgcccgagatcagcaaggacaacagctgcaaggagaactgcacctgcagcagctgcctgctgagagcccccaccatcagcgacctgctgaacgaccaggacctgctggacgtgatcagaatcaagctggacccctgccaccccaccgtgaagaactggagaaacttcgccagcaagtggggcatgagctacgacgagctgtgcttcctggagcagagaccccagagccccaccctggagttcctgctgagaaacagccagagaaccgtgggccagctgatggagctgtgcagactgtaccacagagccgacgtggagaaggtgctgagaagatgggtggacgaggagtggcccaagagagagagaggcgaccccagcagacacttctag

SEQ ID NO: 233039 - DNA, 255 bp, Artificial Sequence
  derived and/or modified sequence
atggtgaaggagcccgtggaggacaccgaccccagcaccctgagcttcaacatgagcgacaagtaccccatccaggacaccgagctgcccaaggccgaggagtgcgacaccatcaccctgaactgccccagaaacagcgacatgaagaaccagggcgaggagaacggcttccccgacagcaccggcgaccccctgcccgagatcagcaaggacaacagctgcaaggagaactgcacctgcagcagctgcctgtag

SEQ ID NO: 233040 - DNA, 618 bp, Artificial Sequence
  derived and/or modified sequence
atggccagtcctgacgaccccctgagggctgatcacatggttaaagagccagtggaagatacagatccctccacactcagcttcaacatgagcgacaagtatccaatccaggacaccgaactgcctaaggcagaggaatgtgatactatcaccctgaactgtccacggaactccgacatgaaaaaccagggcgaggaaaacggattccctgattccaccggcgaccctctgcctgagatctcaaaggataatagctgtaaagagaattgcacgtgtagttcatgtctgctgcgagcgccaacgatcagcgatctcctgaatgaccaggacttactggatgtgatccgcattaaactggatccctgccaccctacggtaaagaattggaggaatttcgccagcaagtggggcatgagttatgacgaactttgcttcctggagcaaaggccccagagccccacgctcgagttcctattgaggaacagccagcggaccgtgggccagctgatggaactgtgcagactgtatcaccgcgccgatgttgaaaaggtgctaaggaggtgggttgatgaggaatggcccaaaagggagcggggcgaccctagtcgccatttctag

SEQ ID NO: 233041 - DNA, 255 bp, Artificial Sequence
  derived and/or modified sequence
atggtgaaggagcccgtagaagacaccgatccatctacgctttcattcaacatgagcgacaaataccctatacaggataccgagctgcccaaagccgaagaatgtgacaccattaccctcaactgcccaaggaatagtgacatgaagaatcaaggcgaagagaatgggttcccagattccactggtgacccactgcccgaaatttcaaaagataattcttgtaaagagaattgcacatgcagctcctgcctttag

SEQ ID NO: 233042 - DNA, 618 bp, Artificial Sequence
  derived and/or modified sequence
atggccagcccagatgaccccctgcgggctgaccacatggtgaaggagcctgtggaggacacagaccccagcaccctgtccttcaacatgtctgacaagtaccccatccaggacacagagctgcccaaggccgaggagtgtgacaccatcaccctgaactgccccaggaacagcgacatgaagaaccagggcgaggagaatggcttcccagacagcactggagaccccctgcctgagatcagcaaggacaacagctgcaaggagaactgcacctgcagcagctgcctgctgcgggcccccaccatcagtgacctgctgaatgaccaggacctgctggatgtgatccgcatcaagctggacccctgccaccccaccgtgaagaactggaggaactttgccagcaagtggggcatgtcctatgatgagctgtgcttcctggagcagaggccccagagccccaccctggagttcctgctgaggaacagccagaggacagtgggccagctgatggagctgtgccgcctgtaccacagagcagatgtggagaaggtgctgcggcgctgggtggatgaggagtggcccaagcgggagcggggggaccccagccgccacttctag

SEQ ID NO: 233043 - DNA, 255 bp, Artificial Sequence
  derived and/or modified sequence
atggtgaaggagcctgtggaggacacagaccccagcaccctgtccttcaacatgtctgacaagtaccccatccaggacacagagctgcccaaggccgaggagtgtgacaccatcaccctgaactgccccaggaacagcgacatgaagaaccagggcgaggagaatggcttcccagacagcactggagaccccctgcctgagatcagcaaggacaacagctgcaaggagaactgcacctgcagcagctgcctgtag

SEQ ID NO: 233044 - DNA, 618 bp, Artificial Sequence
  derived and/or modified sequence
atggccagccccgacgaccccctgcgggccgaccacatggtgaaggagcccgtggaggacaccgaccccagcacactgtcattcaacatgtccgataagtatccaatccaggacacggagttaccaaaagctgaagaatgtgataccattacgctgaactgccctcgcaattccgacatgaagaaccagggcgaggagaacgggttccctgactcaaccggagatccgctgcccgagatcagcaaagacaattcatgcaaggaaaattgcacctgctctagttgtctcttgagagctccaacaatcagtgacctgctgaacgaccaggacctgctcgacgtgatacgaataaagctggatccttgtcaccctacggtgaagaattggagaaattttgcttctaagtggggcatgagctacgacgaactgtgctttctggagcagaggccacagtctcccaccttggagttccttctccggaacagccagagaactgtggggcagctgatggaactttgccggctctaccaccgcgctgacgtcgagaaggtcctgcgccggtgggtggacgaagaatggcccaagagggagagaggggacccgtcacggcacttttag

SEQ ID NO: 233045 - DNA, 255 bp, Artificial Sequence
  derived and/or modified sequence
atggtgaaggagcccgtggaggacaccgaccccagcaccctgagctttaatatgagtgacaagtaccctattcaggacacagaactgcctaaggcggaggagtgcgacaccattaccctgaattgcccacgcaacagcgatatgaaaaaccagggagaggagaatgggtttccagatagcacaggggacccactgcctgagatctccaaggacaactcgtgcaaggagaactgcacttgctccagttgtctgtag

SEQ ID NO: 233046 - DNA, 618 bp, Artificial Sequence
  derived and/or modified sequence
atggcaagtcccgacgatccccttcgggctgatcatatggttaaggagccagtggaagatacagatcccagcaccctcagcttcaatatgtcagataagtaccctatacaggatacagagttgccaaaagcggaagaatgcgacacaataaccctcaattgtcctcgaaactctgacatgaagaaccagggcgaagagaatgggttccccgattccactggagaccctctccctgaaatctctaaagacaattcctgtaaggagaattgcacctgtagttcatgcctgctcagagcacccacaatctccgatctcctgaacgatcaagatctcctggacgtaatccgtattaagctggatccctgccaccctacggtcaagaattggagaaattttgcttctaagtggggtatgagctatgacgaactgtgttttctcgaacagcgccctcagtcacctacactggagtttctgctgcggaactcccagaggaccgtagggcagctcatggagctgtgcaggctttatcatcgcgctgacgtcgaaaaggtgctaaggcggtgggtcgacgaggagtggcctaagagagaacggggtgatccatcccgccatttttag

SEQ ID NO: 233047 - DNA, 255 bp, Artificial Sequence
  derived and/or modified sequence
atggtgaaggagcccgttgaagataccgatccctcaacactgtccttcaatatgagtgataagtaccccattcaggacaccgagctccctaaagcggaggagtgtgacacaatcaccctcaattgccccagaaatagcgacatgaaaaaccagggcgaggagaatggcttccctgactccacaggggatccactgccagagattagtaaagacaattcctgcaaggagaattgcacttgttcttcctgcctgtag

SEQ ID NO: 233048 - DNA, 658 bp, Artificial Sequence
  derived and/or modified sequence
ttctgatcccggacgaccgtaaggtgcaaactcaaagacctacttccaagctgccgtccatgtgctgcccaatgaagctgcaacacgtgaacctctgtggaaggcgcccaccttttctccagtccttctctcactgagtgccctatcaaaatggaagaatccctgaatgaacccatttcaagtttgaattgtggtaaaatattgcaatcccaagtgttggttgcctacagcttcctactgattttggctggtgtctaaaaagaagctttgagagaagaaaaatagctccaagcattctgagctctgtaaagtactcgggaccagagagacaggagtgtgagacttcagtcatgcctgcctccagccctcccctgccccatacctggggtcaattgtttaagatcatatggtaaaggaaccagtggaagacacagaccctagcactttatcctttaatatgtcagacaaatatcccattcaagatacggaactccctaaagctgaagaatgtgatacaattactttgaactgcccacgaaattcagatatgaaaaatcagggagaagaaaatggctttccagatagcactggagatcctcttccagagatcagcaaggacaactcctgcaaagaaaactgtacttgttcctcctgcttg

SEQ ID NO: 233049 - protein, 323 aa, Artificial Sequence
  derived and/or modified sequence
MKSALFTRFFILLPWILIVIIMLDVDTRRPVPPLTPRPYFSPYAVGRGGARLPLRRGGPAHGTQKRNQSRPQPQPEPQLPTIYAITPTYSRPVQKAELTRLANTFRQVAQLHWILVEDAAARSELVSRFLARAGLPSTHLHVPTPRRYKRPGLPRATEQRNAGLAWLRQRHQHQRAQPGVLFFADDDNTYSLELFQEMRTTRKVSVWPVGLVGGRRYERPLVENGKVVGWYTGWRADRPFAIDMAGFAVSLQVILSNPKAVFKRRGSQPGMQESDFLKQITTVEELEPKANNCTKVLVWHTRTEKVNLANEPKYHLDTVKIEV

SEQ ID NO: 233050 - DNA, 6565 bp, Artificial Sequence
  derived and/or modified sequence
tgagaagacaagagcaagggactgagagcaggcttccgctgcggcgcgcgaacacagccgggacacaacccccagcgtctccacccgctcctcgccaccccggcgggaatgtgaggaaggaaagcccccagcgccgccgcccgccctcgaaggcgtcccagagagcgtcctgggggcccgcggctggagcccttgtgcccgcagcaccgccggactggagcggcgaggcgcaccgggtgccgcttctcggcttccactcttcagaaagagcgcggtggggatcagcgcctttcccgcactcggcacaactccgggaccggcggcgcgcggctggaccgagtcccgcttcccgccagctcacctggagtcgggggcagcccctgcccgcccgcctgcaccccttgtcgctctagcttgcgcgaacctgccgctcctccacgcccaggtagtgagccccgcggctccaggtctctgcagcgccctcggccccatggacagcgcacccatcaccactccctaagtgctggcgccgccgctgtccaagctgcgcactggggtccctcggctcgcccctctctggggtgtccgagaggccagggagcgtgcaccatgaagtccgcgcttttcacccgcttctttatcctcctgccctggatcctaattgtcatcatcatgctcgacgtggacacgcgcaggccagtgcccccgctcaccccgcgcccctacttctctccctacgcggtgggccgcgggggcgcccgactcccgctccgcaggggcggcccggctcacgggacccaaaagcgcaaccagtctcggccgcagccacagccggagccgcagctgcccaccatctatgccatcacgcccacctacagccgcccggtgcagaaagcggagctgacccgcctggccaacacgttccgccaggtggcgcagctgcactggatcctggtggaggacgcggcggcgcgcagcgagctggtgagccgcttcctggcgcgggccgggctgcccagcactcacctgcacgtgcccacgccgcggcgctacaagcggcccgggctgccgcgcgccactgagcagcgcaacgcgggcctcgcctggctgcgccagaggcaccagcaccagcgcgcgcagcccggcgtgctcttcttcgctgacgacgacaacacctatagtctggagctcttccaggagatgcgaaccacccgcaaggtctccgtctggcctgtgggcctggttggtgggcggcgctacgaacgtccgctggtggaaaacggcaaagttgttggctggtacaccggctggagagcagacaggccttttgccatcgacatggcaggatttgctgtaagtcttcaagtcattttgtccaatccaaaagctgtatttaagcgtcgtggatcccagccagggatgcaagaatctgactttctcaaacagataacaacagtcgaagaactggaaccgaaagcaaataactgcactaaggttctcgtgtggcacactcggacagagaaggttaatctagccaacgagccaaagtaccacctggacacagtgaaaattgaggtataaattgaagcagcaactggtgcagtttgtccagccagtggatccatatggaagaggatgtttggagtttaggctacagagcattcaggtattgtttgttttacttcagtacagcagcctttcttgtcatctgatggacatctgtttaaatggagcttgtcagttaacataagctaattggatggttggtacaaaatgtatgttttgtcttcatttgttctgcatgttttctctacaacaactaaattggaagatttttttgtacagtgccgatactgcaagataccactcttgagtatatattttttctttttctccaatttgcccttataattggtagacttgaacaggttggtagacttgaacaggtttttaaaacagacaagtattttgtcagctaaacgttcctgatgattcctgactttgcaatactaagtaatttttggaaggttagtggcagtatacatcataggaaataaaaacccacaaatgaaaaggtctatggagtcatgtttaatgtagggaaataacattttgtcaatactaggcaccataaaatgtaaacacaattactgtcataaacctagatataccttcaaggattgaagattgaaagtggctttgttttagttagttaccctgtttgcatatagtgcagaaaaaggtcttcatgttagcactatgtacattaagaagagatccaaattacaagagaggcagataaaatttgaattctttaagcattcattaaacgaagttttggagtaacatccacgtttatcttcctttcactaatcacgttccctgttaagcacatcataacaacagcacagtgaagtgaatgatgaaataagagcattttgatacactagaaaacagtgctcagtgagacatttacattctatttatatgattaaacatttgatcatacagtaccttcctacaggattactggctaattttggggtggggtttatactattagaggtattactaacatgataactacttcccttatatgcaaacattagagctataattttattgagaggaaaactgattttgcaagttgagcagcttctcaaataatgcagtacatgaaatcatgggaaatatgagcaaagctgcccttgacataaaatgatttatcaacctgcttttcaccacatcaaattgaatcagtacagaccaacacggtcaatcagatcattcttaatatgaacaaatgggtaaaaagaaaaaaaatatgcatatgaataaacaggggaactagatgcgtttcagcaaggaatgtcaggtggtagttctggatgaaacttgtattgcagttttcatttccacagttgtgtgctgagagtctgacctgatgagcttccagaccatcctgctgttgtgctggagggctggccaaaacctgcagtaggggttgcactactgatactcatgccagccatctgctgattcatctgtgaaacatataaaaggcttagttcaagaggcttacttcacttttaattcttgtttctttagccacacagttggtcattttttcattaatgtgacaactagtccaagcactggaataaaaacagagtaccatacaaatatttcttaaagcaaatagctactttgttcccttctttatctactttctagatacagtttccccaaagattaaccacaacttacttaaaaaaaaataccaaagcaatcttgggattttaatgagtccgctactctaactaactttcacctacactaggatattgtgctttaactactaaggagtaagaaaattttaggaagtaaaatagtctaaaattatcctataaactttgtatgatagatattattctctattaaaatcttatatacttcctaaatatttttaaagtggtcataaagcatttatttctctcgctgatctaacaacataaacatctaaaatttattttcattgtatgcaataaagcataagattacatgtatttttcttcaagactggagtcaaatatatatatatataagcatcttaaccctgtgattctcttacttccaaaattggtgataagagaaggaaaggcaagatttaccatatagtgagtgggtttaaaacttacactcagagttagactgtgttcttaatttaatacatttgacttgacttatttacagtttcaaagacactaacataaactacatcactaatcaggcataagtgtctgaagaagcagatcacgtcttcatacctactaaaggacattttaaccaccttgtcattggccagtagattgcactgatggagtgctggagaacagcatcacccttctgcattatctggaagtaagagccagtattaactccttcctggttcatctagcaccttaacctgagctgggtgtgcttcagcatgttgaccatgtgactgacacttagcacatacaattttttagattcccagcgggtagagaccaatgttttacctatattcttgtaaatggtggtagcaaaattaactgtgatatatagtgattgtgctaatgttagaaatcactctagactattccctgaatgctctaaaggtaaaacaagtgaccaaacagaaaccaagattgccaaaatgctggaggaacatcaatgggaagtgtaaaaggaagaagagtgggagcatgaacctctctaagagcctttgtctgtgcagctagagaaaagtcagaacacagcacctgaaatagaaatgttctatctcagctctaacttaggtagaaataggattttataatatgaggggatgtctggttcacaccttatgggaattgaatctttttgtactctttttaaacataaaagtcattatagggtatgtaaaaagaaaatacaactttacaaaggtttctcaacaaaaagaatttttacagagccatggggcagtaatcatccgacctgaaaaatagccttagatccctcataaaatagtgctttgagaatatgaggctagatttttattttctaataaaagatcctaaaattattagtgaagctaagttgtctaagtggactgtaaaaatgtcccaccagcaagctggataaagcttagtgctaatctcagaggtgacagagagggagtctcatgatgcctgagataatttctggccattagtggtgttcacgttacagttacattacaatttgaaatgaaagatgtttaaccttttttttacagaatactctaaaatagcgataataacacatcatttgtctatctgatacaacttcataatatttatagatacttttgaccctataacatattatccctattgaattctttctgccagatcactagacttaaaaaaaaaaaaaaaaaaaaaaaaaaaagatttagaaaataaatctggtttgatttgggagaagctagaaagtaaatgacccctacctgtgagaggctccactggggctgctgagcttgcggcaggccaaacttactctggggtgcacccatttgtcccaccattcctccttgggggccaacaacgttctgaggaagtggcatcacaccagtttgtgcatttcccataaacccattgggcatgggcatgcccaccatcatgcttggactctgtcccatcacatttcctataaggccaggagctgcaggcacaggcacgcccatcgatggaaagccctgaaatgcagctggtgcttgtgaggtaaatggtatatttgtgggtcccataaatacacctgcaccacaaaaagaaaatgaatgaagacagagctatcacgtgtagttgcactcatctctataatcacagaaaaattgcctttctgaactactcacagcaaacattttaattccagtttggctgctcctactactcagaccaacccacacctaaaccctgagagctggttgtttctaggatgcagacaaatcagttattaacctgagtaaatttaattaagaaatgtaaatcatatgcaacagccacacaaaatatcttccactgtgaagaccaaactatgtagcatgacatcatacactgttttattgctgatttgtaccactggtcccccagtacgaaacagggaagtgagagctgactatatctcgcttcaataggtgtagtgggctgcccaacaattttagctcacatgtgaaatgcagctcattattttaaaggaaatggtgtgaaagattaaaactctgtaaacaataaggcttatgctaatattttgttatgattacaaaaaaattcatagattttttttaatccatgtggtaactcaagactgtttacctgcagagaaaatacactgtacgcagtcataaacttcatgcaaatcgtttcaataattcatcaaagataatccatgttctataagcttgtgaaacaacatttagtgatctatgaacagcttgttaattccaaataaagttctgtgaatcctgtacatgcctcttaattttttaattctaatgctcattcatttcggcttcatagttgtataaactgcaacaacaaaagcactcactacatggaacaataaaagatatataattgatcttattatataattacaaaggatgtacttctagtaatgtcactgaaagcagatatcaaaattcattaccaggagtactttgctgttgaatggttcctgtgccatacagagataagatggagtctttggaaagttgtttctttgccacttcttctgattttgtagtttgctcagtgaataaatctagatccccagatgttactgtagacagggttgcagctgctggtgcagagggtgtcccctgagacaaacaccaaaataagctatcaaattctgcatagtaaagcgcagcttatccattacttaaaatccaaataaagttataaaattagataggaatcaaacaattgtagaaggtaaaatggtgccattcaagaggatcacttacaagcccaagcccatataaaaacatctacaatca

SEQ ID NO: 233051 - DNA, 972 bp, Artificial Sequence
  derived and/or modified sequence
atgaagtctgctttgtttactcgattttttatactgctgccttggatcctgatcgtgataatcatgctggatgtggacacccgaagaccagtcccccctctaacccctagaccctacttttccccttacgccgtgggtagaggcggcgcccggctgccgttgagacgaggcggaccagcacacggcactcaaaagcggaaccagagcaggcctcagccccaacctgaaccgcagctgccgacaatctacgctatcacaccaacttattctaggcccgtgcagaaggctgagcttactcgcctggctaatacttttaggcaagtcgcacagctgcactggatactcgtggaagacgccgctgcgagatccgaactggtgtcccgatttctggcgcgggccggtctcccatcaactcacctgcacgtgcctactcccaggagatacaaacgtcccggtttacccagggctaccgaacaacggaatgccggactggcgtggcttcgccagcggcatcagcaccaacgcgctcaaccaggtgtactgttttttgccgacgatgataatacttactcgctcgagttgtttcaggaaatgaggaccactcggaaagtgtctgtctggcccgtagggctggttgggggccggagatatgaacgccccctcgtcgaaaacggcaaggtcgtaggctggtacacaggttggcgggctgatcggccgtttgctatcgatatggccggttttgccgtttccttgcaggtgatactctcaaaccctaaagctgtgttcaagaggcgcggaagtcaaccaggaatgcaggagagtgacttcctgaaacaaattaccactgtcgaggagctggaacctaaggcgaataattgtacaaaagtgttggtttggcatacaaggacggagaaagtcaatctcgccaacgagccaaaataccacctcgacactgtgaaaatcgaagtgtag

SEQ ID NO: 233052 - DNA, 972 bp, Artificial Sequence
  derived and/or modified sequence
atgaagagcgccctcttcacccgcttcttcatcctgctgccctggatcctgattgtcatcatcatgctggatgtggacacccggcggcctgtgccccccctgaccccccggccctacttcagcccctatgctgtgggccggggcggggcccggctgcccctgcggcggggcggccctgcccacggcacccagaagaggaaccagagccggccccagccccagcctgagccccagctgcccaccatctatgccatcacccccacctacagcaggcctgtgcagaaggccgagctgacccggctggccaacaccttccggcaggtggcccagctgcactggatcctggtggaggatgctgctgcccggtctgagctggtgagccgcttcctggcccgggccggcctgcccagcacccacctgcacgtgcccaccccccggcgctacaagaggcctggcctgccccgggccacagagcagagaaatgccggcctggcctggctgcggcagaggcaccagcaccagagggcccagcccggggtgctcttctttgctgatgatgacaacacctacagcctggagctgttccaggagatgaggaccaccaggaaggtgtctgtgtggcctgtgggcctggtgggcggcagaagatatgagcggcccctggtggagaatggcaaggtggtgggctggtacacaggctggagggctgaccggccctttgccatcgacatggccggctttgctgtgtccctgcaggtgatcctgagcaaccccaaggctgtgttcaagaggcggggcagccagcccggcatgcaggagagtgacttcctgaagcagatcaccaccgtggaggagctggagcccaaggccaacaactgcaccaaggtgctggtgtggcacaccaggacagagaaggtgaacctggccaatgagcccaagtaccacctggacacagtgaagattgaggtgtag

SEQ ID NO: 233053 - DNA, 972 bp, Artificial Sequence
  derived and/or modified sequence
atgaagagcgccctgttcacccggttcttcatcctgctgccctggatcctgatcgtcattattatgcttgatgttgacacccgtaggccagttcctccactgaccccccggccttacttttcaccatacgccgtcggccgcggaggagcaagattgcctttaaggcggggaggccctgcccatgggacccagaaaaggaatcagtcaaggccccagccgcagccagagcctcagctgccaacaatctatgcaattacccctacctactcacggccagtgcagaaagctgagctgacccgccttgccaacacatttaggcaagtcgctcagctccactggatcctggtcgaggatgccgccgcccgttcagagcttgtgtcacgcttccttgctagggcagggctgccttcaactcatctacatgtgcccacgccacggcgctataagcgtccaggactaccaagagctactgagcaacggaatgctggacttgcatggcttcggcaaaggcaccagcatcaacgggctcagcctggcgtactgttctttgctgatgacgacaatacctattcgctcgaactgttccaggaaatgcggactacccgtaaagtgagtgtatggccggtgggcctggtgggaggaaggagatacgaacggccactggtcgagaacggcaaggtcgtggggtggtatactgggtggcgtgccgataggcccttcgccatagatatggctggattcgccgtgtctctgcaggtgatcctgtctaaccccaaggcagttttcaaaagaagggggagtcagcccggcatgcaggagtcagactttcttaagcagatcactactgttgaagagctcgaaccaaaagctaataattgcaccaaagtcctggtctggcatacccggaccgagaaagtcaacctggctaatgaaccaaaataccatctcgacaccgtcaaaattgaggtgtag

SEQ ID NO: 233054 - DNA, 972 bp, Artificial Sequence
  derived and/or modified sequence
atgaagtcggcattgttcaccaggtttttcattctattaccgtggattcttatcgtgatcataatgctagacgtcgacacccggcgtccagtgccccctttgacgcccagaccgtactttagcccatacgccgtcggcaggggtggcgctcgcctacctctgcggcgaggtgggccagcgcacggaacccaaaaacgcaatcagagccgcccacaacctcagcctgaacctcagttgccaacaatctacgcaatcacacccacctacagccgccctgtccagaaagccgagcttacacgactggccaatacttttcgccaggttgcccagctccattggatccttgtcgaggatgctgctgccaggtctgagttggtatcgcggttcctggcacgtgcgggtctccctagcacccacctgcacgtgcctacgcctcggagatacaagaggccaggactcccgagagctaccgagcagagaaatgcaggtctggcatggttgcggcaaaggcatcagcaccagcgggcacaacctggcgttctgttttttgctgatgacgacaatacctattctttagagctgttccaagagatgcggacaacacgaaaggtgagcgtatggcctgttggcctagtcggtggacgcaggtatgagaggccactggttgaaaacggaaaggtggtcggctggtacaccggatggagggcagaccgccctttcgcaatcgatatggctggattcgctgtgtccctgcaggttattctgagcaatcccaaggccgtgttcaagaggaggggaagtcagcccggaatgcaggagtcagatttcttgaagcaaataacaacagttgaagaattggagccaaaggccaataattgcacaaaggtgctggtgtggcacacgcgcactgagaaggtgaatctggccaacgagccaaagtatcacctggatacagtgaaaatagaagtttag

SEQ ID NO: 233055 - DNA, 972 bp, Artificial Sequence
  derived and/or modified sequence
atgaagagcgccctgttcaccagattcttcatcctgctgccctggatcctgatcgtgatcatcatgctggacgtggacaccagaagacccgtgccccccctgacccccagaccctacttcagcccctacgccgtgggcagaggcggcgccagactgcccctgagaagaggcggccccgcccacggcacccagaagagaaaccagagcagaccccagccccagcccgagccccagctgcccaccatctacgccatcacccccacctacagcagacccgtgcagaaggccgagctgaccagactggccaacaccttcagacaggtggcccagctgcactggatcctggtggaggacgccgccgccagaagcgagctggtgagcagattcctggccagagccggcctgcccagcacccacctgcacgtgcccacccccagaagatacaagagacccggcctgcccagagccaccgagcagagaaacgccggcctggcctggctgagacagagacaccagcaccagagagcccagcccggcgtgctgttcttcgccgacgacgacaacacctacagcctggagctgttccaggagatgagaaccaccagaaaggtgagcgtgtggcccgtgggcctggtgggcggcagaagatacgagagacccctggtggagaacggcaaggtggtgggctggtacaccggctggagagccgacagacccttcgccatcgacatggccggcttcgccgtgagcctgcaggtgatcctgagcaaccccaaggccgtgttcaagagaagaggcagccagcccggcatgcaggagagcgacttcctgaagcagatcaccaccgtggaggagctggagcccaaggccaacaactgcaccaaggtgctggtgtggcacaccagaaccgagaaggtgaacctggccaacgagcccaagtaccacctggacaccgtgaagatcgaggtgtag

SEQ ID NO: 233056 - protein, 261 aa, Artificial Sequence
  derived and/or modified sequence
MSRYTRPPNTSLFIRNVADATRPEDLRREFGRYGPIVDVYIPLDFYTRRPRGFAYVQFEDVRDAEDALYNLNRKWVCGRQIEIQFAQGDRKTPGQMKSKERHPCSPSDHRRSRSPSQRRTRSRSSSWGRNRRRSDSLKESRHRRFSYSQSKSRSKSLPRRSTSARQSRTPRRNFGSRGRSRSKSLQKRSKSIGKSQSSSPQKQTSSGTKSRSHGRHSDSIARSPCKSPKGYTNSETKVQTAKHSHFRSHSRSRSYRHKNSW

SEQ ID NO: 233057 - DNA, 786 bp, Artificial Sequence
  derived and/or modified sequence
atgtcccggtacacccggccgccaaataccagtttgttcatacgtaacgtggctgacgctactcggcccgaggacctgcggcgcgagtttgggcggtacgggccaatagtggacgtgtacattcctctcgatttttacactcgcaggccacgtggatttgcctatgtgcaatttgaggacgttagagatgcagaagatgccctgtataacctgaaccggaagtgggtgtgtggcaggcagattgagattcagtttgcacaaggcgatagaaaaacccccggccagatgaagtccaaggaacggcatccttgcagcccctctgaccaccgaaggtcccgctctccgagccagaggcgcactagaagccgttcctcctcatggggacgcaacagacgaaggagcgacagcctcaaagagagccgtcataggcggttctcttacagccaatctaaaagccgcagcaaatctcttccgaggcgtagcacatccgctagacagagtaggacccctaggcggaactttggatctaggggccggagccggtcaaaatctctgcagaaaagaagcaaatccataggcaaaagccagtcctcgagccctcagaaacagacctcctccggaactaaatcgaggagccacggccgccatagtgatagtatcgctcgttccccttgtaaaagcccaaaaggctacacaaactccgagaccaaagtgcagacggccaaacacagccattttcgttcgcattcccgaagccgtagctaccggcacaaaaactcatggtag

SEQ ID NO: 233058 - DNA, 786 bp, Artificial Sequence
  derived and/or modified sequence
atgagccgctacaccaggcctcccaacaccagcctcttcatcagaaatgtggctgatgccaccaggcctgaggacctgcggcgggagtttggccgctatggccccatcgtggatgtgtacatccccctggacttctacacccggcggccccggggctttgcctacgtgcagtttgaagatgtgagagatgctgaagatgccctgtacaacctgaacaggaagtgggtgtgtggccggcagatcgagatccagtttgcccagggcgacaggaagaccccaggccagatgaagagcaaggagcggcacccctgcagccccagcgaccaccggcgcagccgcagccccagccagaggaggaccaggagccgcagcagctcctggggcaggaacagaagaagaagtgacagcctgaaggagagccgccaccggcgcttctcctacagccagagcaagagccgcagcaagagcctgcccaggaggagcaccagcgcccggcagagcaggaccccaagaagaaactttggcagccggggccgcagccgcagcaagagcctgcagaagaggagcaagagcatcggcaagagccagagcagcagcccccagaagcagaccagcagcggcaccaagagccgcagccacggccgccacagcgacagcatcgcccggagcccctgcaagagccccaagggctacaccaacagcgagaccaaggtgcagacagccaagcacagccacttccgcagccacagccgcagccgcagctaccgccacaagaacagctggtag

SEQ ID NO: 233059 - DNA, 786 bp, Artificial Sequence
  derived and/or modified sequence
atgagccggtacacccggccccccaacaccagcctgttcatccggaacgtcgctgatgctacaaggccggaggatcttcgacgagagttcggacgatatggaccaattgtggacgtgtatatcccattagacttctatacgaggcgcccccggggtttcgcatacgtgcagtttgaggacgtgagagatgcagaagacgctctgtataatctcaatcgcaagtgggtgtgtgggcgacaaatcgagatccagtttgctcaaggagaccgtaaaacacccggtcagatgaagtcaaaggagaggcacccctgcagtccatccgatcaccgcagatcacgttcaccatcgcagagaagaactcgcagccggagcagcagctggggtcgtaaccggcgtaggagcgactcactgaaggagtcaaggcatagacgtttctcctattcccaaagcaagtcccgcagcaagtctcttcctcggcgtagtacctctgcccggcagtctaggactccgcggcgaaactttggatcccggggaagaagtaggtcaaaaagcctgcagaagcggtccaaaagtattgggaagtctcaaagttcgagccctcagaagcagacaagttccggaaccaagtcccgaagccatggaaggcatagcgacagtattgcccggagtccatgcaaatcacctaagggatacaccaactctgagacaaaggttcagacagccaaacactcccacttccgttcacacagccgcagccgatcttatcgccacaagaatagttggtag

SEQ ID NO: 233060 - DNA, 3599 bp, Artificial Sequence
  derived and/or modified sequence
ccgtgcgtccaggctggcgccgcgctgcgccccctctgcgccggcctctgcggctgcgcgctggcggggctgaggccgaggggtgggggtcgcgccgggggccggcggagctcctgtggtggtagcagcggtagcgggagacggagcgagtccagcggccgcgggcagacccggagggaacggaggaagcggtcatgtctcgctacacgaggccccccaacacctccctgttcatcaggaacgtcgcggacgccaccaggcctgaggacttgcgccgtgagtttggtcgatatggccctatagtagacgtttacattccacttgacttctacactcgccgcccaagaggatttgcttatgttcaatttgaagatgttcgagatgctgaagatgctctttataacctcaatagaaagtgggtatgtggccgtcagattgaaatacagtttgcacaaggtgatcgcaaaacaccaggccaaatgaaatcaaaagaacgtcatccttgttctccaagtgatcacaggagatcaagaagccccagccaaagaagaactcgaagtagaagttcttcatggggaagaaataggaggcggtcagacagccttaaagagtctcgacacaggcgattttcttatagccagtctaaatctcgttccaaatcattaccaaggcggtctacctcagcaaggcagtcaagaactccaagaaggaattttggctctagaggacggtcaaggtccaagtccttacaaaagaggtccaagtcaataggaaaatcacagtcaagttcacctcaaaagcagactagctcaggaacaaaatcaagatcacatggaagacattctgactcaatagcaagatccccgtgtaaatctcccaaagggtataccaattctgaaactaaagtacaaacagcaaagcattctcattttcggtcacattccagatctcgaagttatcgtcataaaaacagttggtgaacagcaacagaaagagcaccacgccgtctttaatataagttattaaactctcattatgttaaataaaaattctttaaggcatacagaaaatgcgagttgatattagttactttgggcatatggaagaaataaaatctctagctttggattaataaaaatttggtctccatttaaagggcccacactacaaattatgatttgtctaatgtcaccattttatggaccattttttatttacattgtggcagaagggtacttttcaagggaaatgagtaaactggaactaatttttaaaattctacttgcatagtattagtactattaataataccttttacacaaatatttttgactttaaagcactttcatgtaaaaagtaactatgactgtataattgcatagagcagacttaagctgtttgacacctatgtctcttttgtgtcttctgtttaaacttgggccaattcctggtggatattagttcatattacaaaattctgatgttccaaaaagtagaatatatatagagatcaaacattcaaaagatacattctctcctaagctcaaaggttatatttttattgggtagaacagtataggtaagttgacatgaaattgcatcctgcaccatgaccacattagtaatatcagaacttttgagaaatactggattttgaatggtttgagactaattctttaaaaattaggctgagcaacactcacaatccaaaaatattcatattaagacttacacatttgaagaatggtacattttgtataaaatcatatttgataccattatttccacatacctacttttcatctgttgcttaattttttctttttagagttcttgctcaactttatatggaacaagtcttattatttttgaaagagtgtttagtaccttgtattaagaaacttggccaagcgtggtggttcactcctgtaatcccagcactttgggaggtcgaggcgggcagattgcttgaggccaggagattgagaccagcctgggcaacatggtgaaatcctgtctctaaaatttaaaaaaaagaagaagaagaaactcgagactacatcttcaaaaaacaactttgcagtatttgaattttacattatactgcccttcatttctgacagccaaataactttattgatatttattgcttttgtagttgttataactaataatttctttgaaaatgtgttgtagtttatgtttttcaaagggttttggtagtgtttgtgatagaatggttttgcatatgattattataggggatatatttatagagctctacttgtatactttgtgacttacattatgaaaacttcaaagttctcaatccatacagttagtatttgtatccagagtgtttaagaaaaaaatctgtcttatatttttagtatataggagccagtgttgcttctatttgttttgaatacaaattccagttttctttgcatattagatcccatatgtaagaaacaaccttaaacaataatttgtatgctggtaatatttggacaagtgccataaattaatgtatattgtactttctgaatagattttctctaatcatagcaaaatttatttcaaaactacaactctttgaattattccgctataataaaatttagttataaaattatgtggcactactgaaaatctaaaggataatctgaagaatgagtaagacagatattgatagaaatttttagtattttcagaatgtttgggttcatacacataagtgaaatcattttaaaaactaggggctgggcacagtggctcacaccagtaatcctagcactttgggaggccaaggcaggaggattgcttgagcccaggagtttgagaccagcctgggcaacatagcaagacccctttatctataaaaataataataactaggtaccattgtgaaaaataataactagggattgattatagtatctttactctgtattcacaaatctctgtattcctgaacatatttaatcctttgatttacctctgactaggtttgtcattgtaatccctgggctgcttaggaggataccatttggtttgatgaaaaagctggaatgataatagctcaaactcttttgagcatttagtacatgcttggcactgttctatatgtcttaagttattcactcttgtatttaaccatcaacactcttatgaggtaaatatcccgcaattacttttgcgccaacctagtaccactacagacaaggaaacagatgcagagaggctaagttacaagggcacacagccataaactttggatctgtggagtgactgggcttcagagtcctcttcctgactgctgttcctatgtcttttgcaaagagaagtctttgacaggtatatgctttattaaaatcatgtttagaaagaaatgagagaatagaattagaaaaaggaatgactgtaggcttcgatgaaaatgacttttgtgactaggtgaaaattgtttggctgggtatcctggaaaattgtcttctgggaatatctatattccagggttcacttttgtcatagaattgtttcttggcccatttaagagagatactttgtttattaataaatcaaacgttttaatttta

SEQ ID NO: 233061 - DNA, 786 bp, Artificial Sequence
  derived and/or modified sequence
atgagtcggtatacaaggccccctaacacctctttgttcattcgtaacgtggcagacgccacccgccctgaggatctgcggagggaatttggaagatacggccctatcgtggacgtctatattcctctggacttttatacgaggcggcctcgtgggtttgcctacgtacagtttgaagatgtgcgggatgctgaggatgcattatataatctaaaccggaagtgggtctgtggtagacaaatcgagatccaattcgcgcagggcgacaggaagacaccgggtcagatgaaaagtaaagagaggcatccctgctcaccttctgatcatcgacggtctcgatctccctctcagcgcaggaccaggtccagatcatccagctggggtagaaatcgacggaggtccgatagtctgaaggagagccggcatcgccgtttttcttatagccagagtaagtcgaggtccaagagtcttcccagaagatctacatcggcccgacagagcagaactccgagaaggaatttcggtagccgcggtaggagtcgatctaaatcactgcagaaaaggtctaagagtatagggaaaagccagagtagtagtcctcagaaacagaccagttcaggaaccaagtctcgcagtcatggcagacattcagacagtatcgccagatcaccatgcaagtccccaaaagggtacactaactctgaaacaaaagtacagacagctaaacacagtcacttccggtctcattcaaggtcaaggagctatcgccataagaattcctggtag

SEQ ID NO: 233062 - DNA, 786 bp, Artificial Sequence
  derived and/or modified sequence
atgagcagatacaccagaccccccaacaccagcctgttcatcagaaacgtggccgacgccaccagacccgaggacctgagaagagagttcggcagatacggccccatcgtggacgtgtacatccccctggacttctacaccagaagacccagaggcttcgcctacgtgcagttcgaggacgtgagagacgccgaggacgccctgtacaacctgaacagaaagtgggtgtgcggcagacagatcgagatccagttcgcccagggcgacagaaagacccccggccagatgaagagcaaggagagacacccctgcagccccagcgaccacagaagaagcagaagccccagccagagaagaaccagaagcagaagcagcagctggggcagaaacagaagaagaagcgacagcctgaaggagagcagacacagaagattcagctacagccagagcaagagcagaagcaagagcctgcccagaagaagcaccagcgccagacagagcagaacccccagaagaaacttcggcagcagaggcagaagcagaagcaagagcctgcagaagagaagcaagagcatcggcaagagccagagcagcagcccccagaagcagaccagcagcggcaccaagagcagaagccacggcagacacagcgacagcatcgccagaagcccctgcaagagccccaagggctacaccaacagcgagaccaaggtgcagaccgccaagcacagccacttcagaagccacagcagaagcagaagctacagacacaagaacagctggtag

SEQ ID NO: 233063 - protein, 341 aa, Artificial Sequence
  derived and/or modified sequence
MEEELAIQQGQLETTLKELQTLRNMQKEAIAAHKENKLHLQQHVSMEFLKLHQFLHSKEKDILTELREEGKALNEEMELNLSQLQEQCLLAKDMLVSIQAKTEQQNSFDFLKDITTLLHSLEQGMKVLATRELISRKLNLGQYKGPIQYMVWREMQDTLCPGLSPLTLDPKTAHPNLVLSKSQTSVWHGDIKKIMPDDPERFDSSVAVLGSRGFTSGKWYWEVEVAKKTKWTVGVVRESIIRKGSCPLTPEQGFWLLRLRNQTDLKALDLPSFSLTLTNNLDKVGIYLDYEGGQLSFYNAKTMTHIYTFSNTFMEKLYPYFCPCLNDGGENKEPLHILHPQ

SEQ ID NO: 233064 - protein, 296 aa, Artificial Sequence
  derived and/or modified sequence
MEFLKLHQFLHSKEKDILTELREEGKALNEEMELNLSQLQEQCLLAKDMLVSIQAKTEQQNSFDFLKDITTLLHSLEQGMKVLATRELISRKLNLGQYKGPIQYMVWREMQDTLCPGLSPLTLDPKTAHPNLVLSKSQTSVWHGDIKKIMPDDPERFDSSVAVLGSRGFTSGKWYWEVEVAKKTKWTVGVVRESIIRKGSCPLTPEQGFWLLRLRNQTDLKALDLPSFSLTLTNNLDKVGIYLDYEGGQLSFYNAKTMTHIYTFSNTFMEKLYPYFCPCLNDGGENKEPLHILHPQ

SEQ ID NO: 233065 - DNA, 1434 bp, Artificial Sequence
  derived and/or modified sequence
ggggagctatgaaccttaagattagaccactaactcgaatctaaatgagctgcccttgtctcctacaaaagaaaagttgggcaggtagggtattctaatgagggtttctctttctcttaagcaaatgatgatcaaagttaactgacaaactgtcacggaatctgccagacctcactctggccttgctgcttctctccagctcctgaacttttctttcttccatcatgctctgagcccattccttgaaaactaaaaggtccctgactcccagtctgcagccatcctgggcctgctgagctctgattcaagtgcctgcctctgccccttggtgggctgaagcttcatggaggaggagcttgccatccaacagggtcaactggagacaactctgaaggagcttcagaccctgaggaacatgcagaaggaagctattgctgctcacaaggaaaacaagctacatctgcagcaacatgtgtccatggagtttctaaagctgcatcagttcctgcacagcaaagaaaaggacattttaactgagctccgggaagaggggaaagccttgaatgaggagatggagttgaatctgagccagcttcaggagcaatgtctcttagccaaggatatgttggtgagcattcaggcaaagacggaacaacagaactccttcgactttctcaaagacatcacaactctcttacatagcttggagcaaggaatgaaggtgctggcaaccagagagcttatttccagaaagctgaacctgggccagtacaaaggtcctatccagtacatggtatggagggaaatgcaggacactctctgcccaggcctgtctccactaactctggaccctaaaacagctcacccaaatctggtgctctccaaaagccaaaccagcgtctggcatggtgacattaagaagataatgcctgatgatcctgagaggtttgactcaagtgtggctgtactgggctcaagaggcttcacctctggaaagtggtactgggaagtagaagtagcaaagaagacaaaatggacagttggagttgtcagagaatccatcattcggaagggcagctgtcctctaactcctgagcaaggattctggcttttaagactaaggaaccaaactgatctaaaggctctggatttgccttctttcagtctgacactgactaacaacctcgacaaggtgggcatatacctggattatgaaggaggacagttgtccttctacaatgctaaaaccatgactcacatttacaccttcagtaacactttcatggagaaactttatccctacttctgcccctgccttaatgatggtggagagaataaagaaccattgcacatcttacatccacagtaatgagtcataatattatacaaattcagagtgttattaaagaggtattgaaatatttaaaaaaaaaa

SEQ ID NO: 233066 - DNA, 1026 bp, Artificial Sequence
  derived and/or modified sequence
atggaagaagagttggctattcagcagggccagctggagactaccttgaaagagttacaaaccttgcgtaacatgcagaaagaggccatcgccgcacacaaggagaacaaactccacctccaacagcacgtaagcatggagttcttaaagctccaccaattcctgcattccaaagagaaggatatcttgactgaactccgggaggaagggaaagcgctaaatgaagaaatggagctgaacctgagccagttgcaggaacaatgcctgctggccaaagacatgctggtctccatacaggctaaaaccgaacagcagaattctttcgacttcttaaaagatatcaccacacttctgcactccctggaacagggtatgaaagtgcttgctactagagagctaatctctcggaagttgaacctgggccagtacaaagggccaattcagtacatggtgtggagggagatgcaagacacattatgtccaggcttgtcaccactgactcttgatcccaaaacagcacacccgaatctcgtgctaagtaaatcccagacttctgtttggcacggagatataaaaaagataatgcctgacgatcccgagcgattcgatagcagcgtcgctgtcctgggctcaaggggctttacgtctgggaaatggtactgggaggtggaagtggctaagaagaccaagtggaccgtgggtgtggtgagggagagtatcatacggaaaggaagttgccctctaacccccgaacagggcttttggcttctgagactgcgaaatcaaaccgatctgaaagcactggacctgcctagctttagccttaccctcacgaataatctggacaaggtcggcatttatctcgactatgaaggaggacagctgtccttctataacgccaagactatgacccacatatatacattctccaacacattcatggaaaaactctacccctacttttgcccatgtctgaacgacggcggtgaaaataaagagccgctccacattctgcatccacaatag

SEQ ID NO: 233067 - DNA, 1026 bp, Artificial Sequence
  derived and/or modified sequence
atggaggaggagctggccatccagcagggccagctggagaccaccctgaaggagctgcagaccctgaggaacatgcagaaggaggccatcgccgcccacaaggagaacaagctgcacctgcagcagcacgtgtccatggagttcctgaagctgcaccagttcctgcacagcaaggagaaggacatcctgacagagctgcgggaggagggcaaggccctgaatgaggagatggagctgaacctgagccagctgcaggagcagtgcctgctggccaaggacatgctggtgtccatccaggccaagacagagcagcagaacagctttgacttcctgaaggacatcaccaccctgctgcacagcctggagcagggcatgaaggtgctggccacccgggagctgatcagcaggaagctgaacctgggccagtacaagggccccatccagtacatggtgtggagggagatgcaggacaccctgtgccccggcctgagccccctgaccctggaccccaagacagcccaccccaacctggtgctgagcaagagccagacctctgtgtggcacggggacatcaagaagatcatgccagatgatcctgagagatttgacagctctgtggccgtgctgggcagccggggcttcaccagcggcaagtggtactgggaggtggaggtggccaagaagaccaagtggacagtgggcgtggtgcgggagagcatcatcaggaagggcagctgccccctgaccccagagcagggcttctggctgctgcggctgaggaaccagacagacctgaaggccctggacctgcccagcttcagcctgaccctgaccaacaacctggacaaggtgggcatctacctggactatgagggcggccagctgtccttctacaatgccaagaccatgacccacatctacaccttcagcaacaccttcatggagaagctgtacccctacttctgcccctgcctgaatgatggaggagagaacaaggagcccctgcacatcctgcacccccagtag

SEQ ID NO: 233068 - DNA, 1026 bp, Artificial Sequence
  derived and/or modified sequence
atggaggaggagctggccatccagcagggccagctggagaccaccctgaaagagttgcagaccttgcgtaacatgcagaaagaagccatcgcagctcacaaggaaaataagcttcacttacagcaacacgtgagcatggaattcctgaagcttcaccagtttctacattctaaggaaaaagacattctgaccgaactgagagaggaaggcaaggccttaaacgaggaaatggagctaaatttgagtcaactgcaggaacagtgtttgcttgctaaggatatgcttgtgagcattcaggccaagaccgagcaacagaactcgttcgactttctaaaggatatcacaactcttctgcatagcctcgaacagggcatgaaggttctggcgacaagggaactcatatcaagaaaacttaatctgggtcagtacaaaggccctattcagtatatggtgtggcgtgaaatgcaggatactctatgccccggcctgtcgccattgaccctcgatcccaagaccgctcacccaaaccttgtcctttcaaagagtcagaccagtgtttggcacggggacataaagaaaatcatgcctgacgatcccgaacgttttgactcctccgttgccgtactaggaagcaggggatttacgtctggaaagtggtactgggaggtggaggtggccaagaagacaaagtggacagtgggcgtcgttcgcgaaagcattatcagaaaaggatcctgcccactcacgcctgagcagggtttctggctgctaagattacggaatcagactgatttaaaagccctcgacttgccatccttctctctgacgctcacaaataacctggacaaagtgggtatctatctggactatgagggagggcaactgtccttttataacgcaaagaccatgacacacatctacaccttctccaacaccttcatggagaagctgtatccctacttttgcccttgtctcaacgacggcggggagaacaaggagcccctgcatatactacaccctcagtag

SEQ ID NO: 233069 - DNA, 1026 bp, Artificial Sequence
  derived and/or modified sequence
atggaagaggagcttgcgatacagcagggccaacttgagacgacactaaaagagctacagaccctgagaaatatgcaaaaagaggcgatcgccgcacataaggaaaataaactccacctccagcagcacgttagcatggagtttctgaagctccatcaatttctacattccaaggaaaaggatattttaaccgaactgcgcgaggagggcaaggccctaaacgaagaaatggagctgaacctgtcccagctccaagagcagtgcctcctggccaaggacatgttggtatcaatccaggccaaaactgaacagcaaaattcctttgacttcttgaaggatatcaccacactcttgcattcattggaacaggggatgaaagtcttggcgacgagagagttgatctcaaggaagctgaacctagggcagtataaagggccaatccagtatatggtttggagagagatgcaggacacgctgtgcccaggtctgtcgcctctgaccctcgatcccaagacggctcatcccaatctggtactgagtaagtctcaaacttctgtttggcacggcgacatcaagaagataatgcctgatgaccccgaacgcttcgacagcagcgtggctgtcctcggatcccggggattcacatctggtaagtggtattgggaggtcgaggttgccaagaaaacaaaatggacagtaggcgtagttcgcgagagcataattcggaagggctcttgcccgctgacccccgagcagggcttctggctcctgagacttcgaaatcagaccgacttaaaggctcttgacctgccctcattctcactgacattgacgaataaccttgataaggtcgggatctacctggattatgaaggcggacagctgagcttttacaatgcgaagaccatgactcacatatacactttttccaatacattcatggaaaaactctacccttatttttgtccatgtctgaatgacggcggagagaacaaggagccgcttcacatcctccaccctcagtag

SEQ ID NO: 233070 - DNA, 1222 bp, Artificial Sequence
  derived and/or modified sequence
gaacttttctttcttccatcatgctctgagcccattccttgaaaactaaaaggtccctgactcccagtctgcagccatcctgggcctgctgagctctgattcaagtgcctgcctctgccccttggtgggctgaagcttcatggaggaggagcttgccatccaacagggtcaactggagacaactctgaaggagcttcagaccctgaggaacatgcagaaggaagctattgctgctcacaaggaaaacaagctacatctgcagcaacatgtgtccatggagtttctaaagctgcatcagttcctgcacagcaaagaaaaggacattttaactgagctccgggaagaggggaaagccttgaatgaggagatggagttgaatctgagccagcttcaggagcaatgtctcttagccaaggatatgttggtgagcattcaggcaaagacggaacaacagaactccttcgactttctcaaagacatcacaactctcttacatagcttggagcaaggaatgaaggtgctggcaaccagagagcttatttccagaaagctgaacctgggccagtacaaaggtcctatccagtacatggtatggagggaaatgcaggacactctctgcccaggcctgtctccactaactctggaccctaaaacagctcacccaaatctggtgctctccaaaagccaaaccagcgtctggcatggtgacattaagaagataatgcctgatgatcctgagaggtttgactcaagtgtggctgtactgggctcaagaggcttcacctctggaaagtggtactgggaagtagaagtagcaaagaagacaaaatggacagttggagttgtcagagaatccatcattcggaagggcagctgtcctctaactcctgagcaaggattctggcttttaagactaaggaaccaaactgatctaaaggctctggatttgccttctttcagtctgacactgactaacaacctcgacaaggtgggcatatacctggattatgaaggaggacagttgtccttctacaatgctaaaaccatgactcacatttacaccttcagtaacactttcatggagaaactttatccctacttctgcccctgccttaatgatggtggagagaataaagaaccattgcacatcttacatccacagtaatgagtcataatattatacaaattcagagtgttattaaagaggtattgaaatatttta

SEQ ID NO: 233071 - DNA, 5691 bp, Artificial Sequence
  derived and/or modified sequence
ctgttttctcctttttgttgttattatcaccaattatctctttatacattgcatatccattaacacacataactattgttttgtgcatttgtcttttatattgaataggggaaaaagaggagttagaaaccaaaaactgcaatattggactttacctatgtagctactttttcactggtctctacttctttatatggcttggagatacttcctagtttcctttcatttcaacatgtaggactccttttagcatttcttctagagcagatctactagcattttttgtagattaagactactagacaactccttcagtttttgtttatctgggaatgtcttaattcctcttttcatgaatatataattctttatttttaaaaaattttaattaaaaaaaagtagaaacagggtcttgccatgttgttcctgggctcaaatgatctgcccaccttggcctcccaaagtgttgggattacaggtgtgagctactgtgcctggctggatacagaactcttagttaacagtttttttctttcggcagttcagatatgtcatctctctccttcttggctttcatattttctgaaaagaaatcagctagtaatcttactgagaatcccttgtatgtgaagagtcatttctctcttgctgctttcaagattccttccttgtcattggacacttcaattataatgtgtctcattgtggatctctttgaatttatcctgcttggagtttgttgagcttcttggatgtaaaatttcatcatattttggaagttttcagccattactttttcaaaaatttttttttttgagacagagtttcactcttgttgcccaagctggggtgcagtggagtgatctcagcttactataacctccacctcccaggtcaagcaattctcctgtctcaacctcccaagtagcagggattaccagtgcctgccgccatgaccagctaattttttgtatttttagtagagacagggtttcaccatgttggccaggctggtctctaactcctgacctcaggtggtccacctgcctcggcaccccaaagtattgggattacaggcttgagccgcagtgcccggctgcttcaaacattctttctgcatttttctcctttctttctgaaattcttattatgtctgtttgatagtgtcttgtggatctcttaggctcagttcattgttggtcattcctttttttttttttttttctgagatggagtgtcattgttgttgcccaggctagagtgcaatggcgtggtcttggcttactgcaacctctgcctcctgggttcaagcaattcttctgcctcagcctcccaagtagctaggattacaggcgcctgccaccacacccagctaatttttgtatttttagtagagatttttagtagagatggctaaccatcctgtgttagccaggatggtctaaatctcctgacctcgtgatctgcccgccttggcctcccaaaatgctgggattacaggcatgagccactgcgcctggcctgaaatgtgtttttttaaaaaggagtgaaggggaccctggatggttgacgatatcacactactgactaaggaatctgattgattttccaattctttgtatataatttctagaaaacaaaaataaaataaaggtaataactagtagagcagaagttgaaaaataaaactttcaaaagacacttggggaaagtgggtaaagagagagatgtacaacaaagtacatttctttgatttagtactgtttcttcctctgccttgattctttattaaagtttaaatagcatcatacgctataatttcagaaaacactcaagttactggttcactttcaaaggagagattatgtgcttttactttagttgtaccaattttcagctcctttaggaatggcgccatcatcctggagtgttaaaatgggcaacaagaaagataaactcattttagctgttcttttctaaaggtatccaccaacccctcctccaacatcgatccaggcgactatgttgaaatgaatgattcaatcacccacctaccctctaaagtggtgatacaagatattactatggagctacactgccctctgtgcaatgattggttccgagacccactgatgctaagctgtggccacaacttctgtgaagcctgtatccaagacttttggaggctgcaagcaaaggaaacattctgtcctgagtgtaagatgctatgtcagtataacaactgtacattcaaccctgtactggacaagttggtagagaagattaagaagttacccttactcaagggccatccacagtgcccagagcatggagagaacctgaaactgttcagtaaaccagatgggaaactgatctgctttcaatgcaaggatgctcggttgtctgtggggcagtctaaggagttcctgcaaatctctgatgctgtccatttcttcacggaggagcttgccatccaacagggtcaactggagacaactctgaaggagcttcagaccctgaggaacatgcagaaggaagctattgctgctcacaaggtgaggagcaagaaagaggggttatgagatagaactggaacacaccctccatgtaacttcagctatgggtacaaaggtgcctaacatatattatctacacactaaatggtacctaggctatggaattggaaaactgagtctgtagggtggaaaggaatatggtggtggagtaggttcctaatagctgatcaacagagcagattaacctttcccctaatatgctgatcttttcgatagttcagtcaccaggtgactgtcgtggcgttgaaatgtgtctggtctttggctttatctatggcaaaaaaaaaaaaggaacttattagaaaaaaatcaatcactaaagattgctatgtccaaagaaatacctttatttcctttgagtttataaccagacacctctggactaggtctctaaggtcataggcttttcccagctgatttgatcttcttagcttcctccaagctaaataaagctattgtctgcactttcaacttcataggcactctaggacaacattaatggctagagctttggcaaatcagtccctagattgggggtgctaaattggaagttctgtttctttattcattattctatggagaagagccttctcaggtatttggcatctggaagaaaaaaatatgcagactcagggaaagaagaaggatatatggaagtaatgatgtcttcagaaaatcttgttccttttgtaaaagttcctattagtgtgagcattcattcattcatttaacaaatatttattgagtgggtcaggcataatactagatattggggatgggagacagctgttaattaaataatcccatgagtaataataaaataacaactgtgataagtactataactgaaagtatagggtatgatgatagcatataaatggagaacataatctagactgggggaggggtgttctctgaagaagtcacattaaaaattgagaattgaaggataagtaacttatccaagtgaactgggtgagtggggatatgaaggaggtagcctggagaagaatgttctaggaatagaaaagagtatctggaaaagtcctgagatggaaagttagctgctatgttaaacagagaaaaggccaataaagctggaacatgctaagcaagatgatattgatgaggtggatatgggctcactgtaacctcatactcttgggctcaagagatcttcccacctcagcctcctgagtatctgggactagtttgccacacatggctaattattttatttttggagagactgggtctcactatgttgcccagtcttgaactcctgttccaagcaatcctcccagcttggcctctataagtgttggaattacaggtatgagccactgtgcccagccaagactatcttaaggtgcaataataattatggaccatgggatccaagctagataagagaggacatgaaggtagaagttcctgaatagaaatggagggatcggtgaataggaggtttcaatgagatccaataattgttgcaataggagtatctgagtgagcctggtgcataaaaagttattttggagatgatacaattgctgggggtgataaaatcctaggtgagactataggaatgaatcaataaatgtggaaatcactagaaatgaggagaatgaggaactgagaagccaggatgtcaaatagtttaactgtgaggatgttgaggtaacccaaggaaaaagctgcaagtgtaacagtggcattcccccagttctgatttctaggtaaggacagttcttccagcctcccaatacccccagtctaacagtaccacttggcagcttttggattaccaatctaggagggtattatctttcattctagaatgtttgactaactccacagtcttatttaatatggcattggttaccatctcagtactgcaataggaaactggaggtcacttttgcctatttcatcctgaactattaaattagttggaaaaggagtaagtctcccaaaggactcattttagtatgactgaatttgatattcagtagccatttgtatgcatttttctgtgatggtatttaccaagtgtgtgagtgttggtggtgtgggcccccatccccaagcactagtctctgcaataaccatggtgataatcatggaggtttccaggaaaacaagctacatctgcagcaacatgtgtccatggagtttctaaagctgcatcagttcctgcacagcaaagaaaaggacattttaactgagctccgggaagaggggaaagccttgaatgaggagatggagttgaatctgagccagcttcaggagcaatgtctcttagccaaggatatgttggtgagcattcaggcaaagacggaacaacagaactccttcgactttctcaaagacatcacaactctcttacatagcttggagcaaggaatgaaggtgctggcaaccagagagcttatttccagaaagctgaacctgggccagtacaaaggtcctatccagtacatggtatggagggaaatgcaggacactctctgcccaggcctgtctccactaactctggaccctaaaacagctcacccaaatctggtgctctccaaaagccaaaccagcgtctggcatggtgacattaagaagataatgcctgatgatcctgagaggtttgactcaagtgtggctgtactgggctcaagaggcttcacctctggaaagtggtactgggaagtagaagtagcaaagaagacaaaatggacagttggagttgtcagagaatccatcattcggaagggcagctgtcctctaactcctgagcaaggattctggcttttaagactaaggaaccaaactgatctaaaggctctggatttgccttctttcagtctgacactgactaacaacctcgacaaggtgggcatatacctggattatgaaggaggacagttgtccttctacaatgctaaaaccatgactcacatttacaccttcagtaacactttcatggagaaactttatccctacttctgcccctgccttaatgatggtggagagaataaagaaccattgcacatcttacatccacagtaatgagtcataatattatacaaattcagagtgttattaaagaggtattgaaatattt

SEQ ID NO: 233072 - DNA, 1211 bp, Artificial Sequence
  derived and/or modified sequence
acctcactctggccttgctgcttctctccagctcctgaacttttctttcttccatcatgctctgagcccattccttgaaaactaaaaggtccctgactcccagtctgcagccatcctgggcctgctgagctctgattcaagtgcctgcctctgccccttggtgggctgaagcttcatggaggaggagcttgccatccaacagggtcaactggagacaactctgaaggagcttcagaccctgaggaacatgcagaaggaagctattgctgctcacaaggtttccaggaaaacaagctacatctgcagcaacatgtgtccatggagtttctaaagctgcatcagttcctgcacagcaaagaaaaggacattttaactgagctccgggaagaggggaaagccttgaatgaggagatggagttgaatctgagccagcttcaggagcaatgtctcttagccaaggatatgttggacatcacaactctcttacatagcttggagcaaggaatgaaggtgctggcaaccagagagcttatttccagaaagctgaacctgggccagtacaaaggtcctatccagtacatggtatggagggaaatgcaggacactctctgcccaggcctgtctccactaactctggaccctaaaacagctcacccaaatctggtgctctccaaaagccaaaccagcgtctggcatggtgacattaagaagataatgcctgatgatcctgagaggtttgactcaagtgtggctgtactgggctcaagaggcttcacctctggaaagtggtactgggaagtagaagtagcaaagaagacaaaatggacagttggagttgtcagagaatccatcattcggaagggcagctgtcctctaactcctgagcaaggattctggcttttaagactaaggaaccaaactgatctaaaggctctggatttgccttctttcagtctgacactgactaacaacctcgacaaggtgggcatatacctggattatgaaggaggacagttgtccttctacaatgctaaaaccatgactcacatttacaccttcagtaacactttcatggagaaactttatccctacttctgcccctgccttaatgatggtggagagaataaagaaccattgcacatcttacatccacagtaatgagtcataatattatacaaattcagagtgttattaaagaggtattgaaatat

SEQ ID NO: 233073 - DNA, 1262 bp, Artificial Sequence
  derived and/or modified sequence
acctcactctggccttgctgcttctctccagctcctgaacttttctttcttccatcatgctctgagcccattccttgaaaactaaaaggtccctgactcccagtctgcagccatcctgggcctgctgagctctgattcaagtgcctgcctctgccccttggtgggctgaagcttcatggaggaggagcttgccatccaacagggtcaactggagacaactctgaaggagcttcagaccctgaggaacatgcagaaggaagctattgctgctcacaaggtttccaggaaaacaagctacatctgcagcaacatgtgtccatggagtttctaaagctgcatcagttcctgcacagcaaagaaaaggacattttaactgagctccgggaagaggggaaagccttgaatgaggagatggagttgaatctgagccagcttcaggagcaatgtctcttagccaaggatatgttggtgagcattcaggcaaagacggaacaacagaactccttcgactttctcaaagacatcacaactctcttacatagcttggagcaaggaatgaaggtgctggcaaccagagagcttatttccagaaagctgaacctgggccagtacaaaggtcctatccagtacatggtatggagggaaatgcaggacactctctgcccaggcctgtctccactaactctggaccctaaaacagctcacccaaatctggtgctctccaaaagccaaaccagcgtctggcatggtgacattaagaagataatgcctgatgatcctgagaggtttgactcaagtgtggctgtactgggctcaagaggcttcacctctggaaagtggtactgggaagtagaagtagcaaagaagacaaaatggacagttggagttgtcagagaatccatcattcggaagggcagctgtcctctaactcctgagcaaggattctggcttttaagactaaggaaccaaactgatctaaaggctctggatttgccttctttcagtctgacactgactaacaacctcgacaaggtgggcatatacctggattatgaaggaggacagttgtccttctacaatgctaaaaccatgactcacatttacaccttcagtaacactttcatggagaaactttatccctacttctgcccctgccttaatgatggtggagagaataaagaaccattgcacatcttacatccacagtaatgagtcataatattatacaaattcagagtgttattaaagaggtattgaaatat

SEQ ID NO: 233074 - DNA, 1026 bp, Artificial Sequence
  derived and/or modified sequence
atggaggaggagctggccatccagcagggccagctggagaccaccctgaaggagctgcagaccctgagaaacatgcagaaggaggccatcgccgcccacaaggagaacaagctgcacctgcagcagcacgtgagcatggagttcctgaagctgcaccagttcctgcacagcaaggagaaggacatcctgaccgagctgagagaggagggcaaggccctgaacgaggagatggagctgaacctgagccagctgcaggagcagtgcctgctggccaaggacatgctggtgagcatccaggccaagaccgagcagcagaacagcttcgacttcctgaaggacatcaccaccctgctgcacagcctggagcagggcatgaaggtgctggccaccagagagctgatcagcagaaagctgaacctgggccagtacaagggccccatccagtacatggtgtggagagagatgcaggacaccctgtgccccggcctgagccccctgaccctggaccccaagaccgcccaccccaacctggtgctgagcaagagccagaccagcgtgtggcacggcgacatcaagaagatcatgcccgacgaccccgagagattcgacagcagcgtggccgtgctgggcagcagaggcttcaccagcggcaagtggtactgggaggtggaggtggccaagaagaccaagtggaccgtgggcgtggtgagagagagcatcatcagaaagggcagctgccccctgacccccgagcagggcttctggctgctgagactgagaaaccagaccgacctgaaggccctggacctgcccagcttcagcctgaccctgaccaacaacctggacaaggtgggcatctacctggactacgagggcggccagctgagcttctacaacgccaagaccatgacccacatctacaccttcagcaacaccttcatggagaagctgtacccctacttctgcccctgcctgaacgacggcggcgagaacaaggagcccctgcacatcctgcacccccagtag

SEQ ID NO: 233075 - protein, 214 aa, Artificial Sequence [sequence omitted]

SEQ ID NO: 233076 - DNA, 645 bp, Artificial Sequence
  derived and/or modified sequence
atgggccgtcgtcccgccaggtgctacagatactgtaagaacaagccttaccctaaatctcggttctgtagaggggttcccgacgctaagatacgtatttttgaccttgggaggaaaaaggccaaggtggatgagtttccgctggggggccatatggtctctgatgagtatgagcagctgtcctccgaggcattggaggcagcccgtatctgtgctaataagtacatggtcaagagctgtggacgcgatggattccacatgagggtgagactgcatcccttccatgtgatcaggatcaacaaaatgctcagctgcgccggtgccgatcgactgcaaacaggcatgaggggagcctttggaaagccacaaggaaccgttgcaagggtgcacatcggccaggttattatgagcatacgcacaaaactgcagaacgaggaacacgttatcgaagctttgcgaagggcaaagtttaaatttccaggtaggcaaaagattcatataagtaaaaagtggggtttcacaaaattcaacgcagacgagttcgaagatatggtggcgaaaaagtgtctcatcccagacggatgcggggttaagtatgtgcccagccacgggcccctggacaagtggcgcgttctgcactcctag

SEQ ID NO: 233077 - DNA, 645 bp, Artificial Sequence
  derived and/or modified sequence
atgggcagaagacctgcccgctgctaccgctactgcaagaacaagccctaccccaagagccgcttctgccggggcgtgcctgatgccaagatccgcatctttgacctgggcaggaagaaggccaaggtggatgagttccccctgggcggccacatggtgtctgatgaatatgagcagctgagcagcgaggccctggaggccgcccgcatctgtgccaacaagtacatggtgaagagctgtggcagagatggcttccacatgagggtgcggctgcaccccttccacgtgatccgcatcaacaagatgctgagctgtgccggggctgaccggctgcagacaggcatgagaggagccttcggcaagccccagggcaccgtggcccgggtgcacatcggccaggtgatcatgagcatccgcaccaagctgcagaatgaggagcacgtgattgaggccctgcggcgggccaagttcaagtttcctggccggcagaagatccacatcagcaagaagtggggcttcaccaagttcaatgctgatgaatttgaggacatggtggccaagaagtgcctgatcccagatggctgcggcgtgaagtatgtgcccagccacggccccctggacaagtggagggtgctgcacagctag

SEQ ID NO: 233078 - DNA, 645 bp, Artificial Sequence
  derived and/or modified sequence
atgggccggcggcccgcccggtgctaccggtactgcaagaacaagccgtatccgaagtcccgcttctgcagaggggtgccagacgcaaaaattcgcatcttcgacttgggccgaaagaaggccaaggtggacgagttcccactgggcgggcacatggttagtgatgaatatgagcagctgagcagtgaggccctggaagctgcccgtatctgtgccaataaatacatggtgaagtcctgtggaagagatgggttccacatgcgagtaagacttcatcctttccacgttatccggattaataagatgctcagctgcgcaggggcagacagactccagactgggatgcgaggcgcctttggcaaacctcaaggtaccgtggctagggttcatattggccaggttatcatgtccattcggacaaagctgcagaatgaggaacacgtgattgaggcactccgcagggcgaagttcaagtttcctggcaggcaaaagatccatataagtaaaaagtggggatttacgaagttcaatgcagacgagttcgaagatatggtcgctaagaaatgcttgattcccgacggctgtggcgtcaagtacgtgccgtctcacggtcccttggacaagtggcgcgtgttgcactcttag

SEQ ID NO: 233079 - DNA, 645 bp, Artificial Sequence
  derived and/or modified sequence
atgggaaggcggcctgctcgctgttacaggtattgtaaaaacaaaccctatcctaaatctaggttttgccggggagtccctgatgcgaagatccgcatcttcgatttaggcaggaagaaggctaaggtggatgaatttccgctgggaggtcatatggtcagtgatgaatacgaacagctttccagcgaagctctggaagcagctagaatttgtgctaacaagtacatggtgaagtcatgtgggcgtgacggcttccacatgcgggtgaggttgcacccgtttcatgtgatccgtatcaacaagatgctgtcctgcgcaggtgcagatcgcctgcagaccgggatgaggggcgcattcggcaagccccaaggaacagtggcgagggtgcacataggccaggtaattatgagcatccgaaccaagttacagaatgaggagcacgtgatagaagccctgaggagagctaagttcaaatttcccggacggcagaaaatccatatttcaaaaaaatggggtttcacaaaattcaatgccgacgaattcgaggatatggtcgctaaaaaatgtcttattcctgatggatgtggcgtaaagtacgttccgagtcatggcccactggacaaatggagggtgcttcactcatag

SEQ ID NO: 233080 - DNA, 807 bp, Artificial Sequence
  derived and/or modified sequence
ggacgaggggcaacgtatataaatgcgcgcaggcgtagttaagagagcgcattttgacttcgaggcaccgccgacgttactgtgtcgccatggggcgccgtccagctcgctgttaccggtattgtaagaacaagccgtacccaaaatctcgtttctgccgaggggttcctgatgccaagatccgcatctttgacctgggtagaaagaaggcaaaagtggatgagttcccactcggtggccacatggtgtctgatgaatatgagcagctgtcttctgaagccctggaggccgcccgtatttgtgccaacaaatacatggtgaaaagttgtggcagagatggctttcacatgcgagtgcggctccatcccttccatgtcatccgcatcaacaagatgttgtcctgtgctggggctgacaggctccagacaggtatgcgaggtgcctttggaaaaccccagggtactgtagcccgggtccacattggtcaagtcatcatgtccatccgcaccaagcttcagaacgaggagcatgtgattgaagccttgcgcagggccaagttcaagttccctggacgccagaagattcatatctccaagaagtggggcttcacgaagtttaatgctgacgaatttgaagacatggtggccaagaagtgcctcatccctgatggttgtggagtcaagtacgttcccagtcatggccccttggacaagtggcgggttctgcactcatgaaggttttggcagtactgtctccttgggccatgctggtctgacttatgcttactaataaattctgtttactggc

SEQ ID NO: 233081 - DNA, 645 bp, Artificial Sequence
  derived and/or modified sequence
atgggcagaagacccgccagatgctacagatactgcaagaacaagccctaccccaagagcagattctgcagaggcgtgcccgacgccaagatcagaatcttcgacctgggcagaaagaaggccaaggtggacgagttccccctgggcggccacatggtgagcgacgagtacgagcagctgagcagcgaggccctggaggccgccagaatctgcgccaacaagtacatggtgaagagctgcggcagagacggcttccacatgagagtgagactgcaccccttccacgtgatcagaatcaacaagatgctgagctgcgccggcgccgacagactgcagaccggcatgagaggcgccttcggcaagccccagggcaccgtggccagagtgcacatcggccaggtgatcatgagcatcagaaccaagctgcagaacgaggagcacgtgatcgaggccctgagaagagccaagttcaagttccccggcagacagaagatccacatcagcaagaagtggggcttcaccaagttcaacgccgacgagttcgaggacatggtggccaagaagtgcctgatccccgacggctgcggcgtgaagtacgtgcccagccacggccccctggacaagtggagagtgctgcacagctag

SEQ ID NO: 233082 - protein, 511 aa, Artificial Sequence
  derived and/or modified sequence
MSRQLTHFPRGERLGFSGCSAVLSGGIGSSSASFRARVKGSASFGSKSLSCLGGSRSLALSAAARRGGGRLGGFVGTAFGSAGLGPKCPSVCPPGGIPQVTVNKSLLAPLNVEMDPEIQRVRAQEREQIKALNNKFASFIDKVRFLEQQNQVLETKWNLLQQLDLNNCRKNLEPIYEGYISNLQKQLEMLSGDGVRLDSELRNMQDLVEDYKKRYEVEINRRTAAENEFVVLKKDVDAAYMNKVELQAKVDSLTDEIKFFKCLYEGEITQIQSHISDTSIVLSMDNNRDLDLDSIIAEVRAQYEEIALKSKAEAETLYQTKIQELQVTAGQHGDDLKLTKAEISELNRLIQRIRSEIGNVKKQCADLETAIADAEQRGDCALKDARAKLDELEGALHQAKEELARMLREYQELVSLKLALDMEIATYRKLLESEECRMSGEYPNSVSISVISSTNAGAGGAGFSMGFGASSSYSYKTAAADVKTKGSCGSELKDPLAKTSGSSCATKKASR

SEQ ID NO: 233083 - DNA, 1536 bp, Artificial Sequence
  derived and/or modified sequence
atgagtcggcagttgacccactttcctcgaggagagcgcctgggattcagcggatgtagcgctgtgctttcgggcgggattggctctagctccgccagcttccgagccagggtgaaaggttctgctagctttggttcaaagagtttgtcctgccttggggggtctagatcacttgccctgagcgctgcggccaggaggggggggggcaggcttggcggattcgttggaaccgctttcggatctgcaggcctgggacctaagtgccccagcgtgtgtccacctggtggcattccacaagttacggtgaacaagtctctgcttgcaccccttaacgtggagatggatcctgagatccagcgggtgcgggcacaggagagggaacagatcaaagctctgaacaacaagttcgcatcctttatagataaagtcaggttccttgaacaacagaatcaggtactggaaactaagtggaacctgcttcagcaactggacctcaataactgccggaagaacctggagcctatttacgagggatatatcagtaatctgcagaaacagttagagatgctgagtggagatggcgtgaggctggactctgagcttcggaatatgcaggacctggtcgaggattacaaaaaacggtatgaggtggaaataaacaggaggactgctgctgagaatgaatttgttgttcttaaaaaggacgtcgacgccgcctatatgaacaaggtggagctgcaggcaaaagtggactcactaaccgatgagatcaagttcttcaaatgcctgtatgagggtgaaattacgcaaattcagagccacatctccgatacctcaatagtgctcagtatggataacaatcgggacctggatttagacagcatcatcgcagaagtccgggcccagtatgaggaaattgctcttaaaagtaaggccgaggctgaaacactgtaccagaccaaaatacaggagctgcaggtcacggctgggcaacacggggacgacttgaagttaaccaaggccgagatctctgaactaaataggctcatacagagaatcagatcggaaatcggaaacgtgaagaaacagtgcgcggatctggaaacagcgatcgcagatgccgaacagcgaggtgactgcgcactgaaagatgctcgcgcgaagttggacgaactcgagggagctctgcaccaggccaaagaagaattggcccgtatgctgagagagtaccaggaactcgtgtccctgaagcttgcgttagacatggagattgccacttatcgtaagcttctggagtcagaggagtgtagaatgtctggggaatatccgaatagtgtttccatcagtgtcatatctagtacaaacgccggggcaggcggcgcagggtttagcatgggtttcggtgccagctcttcttactcttataaaaccgcggcagccgacgtaaaaacaaaggggtcttgcggctcggaacttaaggaccccctggccaagacttctggcagcagttgtgctaccaagaaagcatccagatag

SEQ ID NO: 233084 - DNA, 1536 bp, Artificial Sequence
  derived and/or modified sequence
atgtcccgtcagctgacgcacttccctaggggagaaagactgggctttagtggatgttccgccgtattatcgggaggcattggctcatcttcagctagctttcgggccagagtaaagggatcggcaagcttcgggtcaaagtccctatcctgtttaggggggagccgttctcttgctctgagcgctgcggcccgtcgtggtggagggaggctcggcggattcgtgggaaccgcattcggcagcgccggactcgggcccaagtgtccctcggtctgtccgccaggggggatcccacaggtgactgttaacaagtctctgcttgcccctttgaatgtcgagatggaccccgaaattcaaagggtaagagctcaggaacgagagcagatcaaggctctcaataataagtttgcgtccttcatcgataaagtgcggtttcttgagcagcagaatcaagtgctcgagactaaatggaacctcctccagcagctggacctgaacaactgccggaagaatttggagccaatttatgagggctatataagtaacctgcagaaacaactcgagatgttgtcgggggacggagtccgacttgactcagaactgcgcaacatgcaggatttggtggaagattacaaaaaaaggtatgaggtggagatcaacagaagaactgctgcagagaacgagtttgtggttctcaagaaagacgtggatgctgcatatatgaataaggttgagcttcaggccaaggtcgactcactgaccgacgagatcaagttttttaaatgcctttatgaaggggaaatcacgcagatacaatcccacatcagcgacacaagcatcgtgctgtctatggataacaatcgcgatctcgatcttgacagtattatcgcagaagtgcgggcacagtacgaagagattgcactgaaaagcaaagcagaagcagagactctatatcagactaagattcaggagctgcaggtgacagcaggccagcacggtgatgatcttaaactgaccaaggcagagatctctgaacttaatcggctgattcagaggattcgctcggagataggcaatgtgaaaaaacagtgtgccgacctggaaaccgcaatcgcagacgctgagcagagaggcgactgcgcactgaaagacgcccgggccaagctggatgaactcgagggcgccttgcaccaagccaaagaggaactcgccagaatgctgagagagtaccaggagctggtgagcctgaaactggccttagacatggagattgcaacttaccgaaaactgctcgagtcagaagagtgtcgcatgagcggtgaataccctaattcagtgtcaattagtgtaatctcctccaccaacgccggggccggcggggccggattttcgatgggatttggcgcctcctcctcctacagctataaaaccgcagccgcagatgtcaagactaagggaagctgcggttccgagctgaaagacccactcgccaaaactagcgggtcttcctgtgctaccaagaaggcaagccgttag

SEQ ID NO: 233085 - DNA, 2015 bp, Artificial Sequence
  derived and/or modified sequence
atttaaggggcgagctgggccgagaacgcagcggctgtttgcgccccttctgcctcccgcgcggccagcaccggtacttgcgagccatgagccgccaactgacccatttcccccgcggggagcgcctgggcttcagcggttgctccgcggtcctctctggcgggatcggcagcagctccgcctcattccgggcccgggtcaagggctcggcctcctttggcagcaagagcctctcctgccttgggggcagccgaagcctggcgctcagcgctgctgcacggcggggcggcggccgcctgggcggcttcgtgggcaccgccttcggcagcgccgggctggggcccaagtgtccctccgtgtgcccacccgggggcatccctcaggtcaccgtcaacaagagcctcctggccccgctcaacgtggagatggaccccgagatccagagggtgcgcgcccaggagcgggagcagatcaaggcgctaaacaacaagttcgcctccttcatcgacaaggtgcggttcctggagcagcagaatcaggtgctagagaccaagtggaacctcctacagcagctggacttgaacaactgcaggaagaacctggagcccatttatgagggctacatcagcaacctgcagaagcagctggagatgctgtctggggacggggtgaggctggattcggagctgaggaacatgcaggatttggtggaggactacaagaagaggtatgaggtggagattaacagacgcacagctgctgagaatgagtttgtggtgctcaagaaggacgtggatgctgcttacatgaataaggttgagctccaggccaaggtggactccttgacagatgagattaaattcttcaagtgcctttatgaaggggagatcactcagatccagtcccacatcagcgacacgtccatcgtcctgtcaatggacaacaaccgggatctggacctggacagcatcattgccgaggtccgtgcccagtacgaggagattgccctaaagagcaaggccgaggctgagaccctgtaccagaccaagatccaggagctgcaggtcacagcaggccagcatggggatgacctcaagctcaccaaggctgaaatctctgagctcaaccgcctgatccagaggatccgctcagagatagggaatgtgaagaagcagtgtgccgatctggagacggccatcgccgacgctgaacagcggggggactgcgccctgaaagatgcccgggccaagctggatgagctggagggcgccctgcaccaggccaaggaggagctggcacggatgctgcgtgagtaccaggagctcgtgagcctgaagctggccctggatatggagatcgccacctaccgcaagctgctggagagcgaggagtgcaggatgtctggcgaatatccaaattctgtgagcatctccgtcatcagcagcaccaatgctggggcaggaggggctggcttcagcatgggctttggcgcctcaagcagttatagctacaaaactgcagctgcagacgtcaagaccaaaggcagctgtggcagtgagctcaaggatccccttgccaaaacctcggggagcagctgtgccaccaaaaaggcctccagatgatggacaagtggttggctctgtgagcagaaggcttcccaactcacccgtctcctccctctccttccctgggctccctttccaagtcaagaaatgctttgtctgtcactacagtcccaaccccatttcctctccctgttgtcctcaaggtgtgatgcttcgatgcaaggagtccagtcaggagctctctcagtggcctccttcttggtcccgtttcgttgggtcattgcctgaaatgcaaagacaacacttacccaggatgtttccccaaggccagctacaagcccctctgcccccatgcctttcttgggccttcactaccaagggactctcttcatcttctgattgggattgtgtccagtcctctgcttcttctgcaataaatgattaaatctg

SEQ ID NO: 233086 - DNA, 1813 bp, Artificial Sequence
  derived and/or modified sequence
acttgcgagccatgagccgccaactgacccatttcccccgcggggagcgcctgggcttcagcggttgctccgcggtcctctctggcgggatcggcagcagctccgcctcattccgggcccgggtcaagggctcggcctcctttggcagcaagagcctctcctgccttgggggcagccgaagcctggcgctcagcgctgctgcacggcggggcggcggccgcctgggcggcttcgtgggcaccgccttcggcagcgccgggctggggcccaagtgtccctccgtgtgcccacccgggggcatccctcaggtcaccgtcaacaagagcctcctggccccgctcaacgtggagatggaccccgagatccagagggtgcgcgcccaggagcgggagcagatcaaggcgctaaacaacaagttcgcctccttcatcgacaaggtgcggttcctggagcagcagaatcaggtgctagagaccaagtggaacctcctacagcagctggacttgaacaactgcaggaagaacctggagcccatttatgagggctacatcagcaacctgcagaagcagctggagatgctgtctggggacggggtgaggctggattcggagctgaggaacatgcaggatttggtggaggactacaagaagaggtatgaggtggagattaacagacgcacagctgctgagaatgagtttgtggtgctcaagaaggacgtggatgctgcttacatgaataaggttgagctccaggccaaggtggactccttgacagatgagattaaattcttcaagtgcctttatgaaggggagatcactcagatccagtcccacatcagcgacacgtccatcgtcctgtcaatggacaacaaccgggatctggacctggacagcatcattgccgaggtccgtgcccagtacgaggagattgccctaaagagcaaggccgaggctgagaccctgtaccagaccaagatccaggagctgcaggtcacagcaggccagcatggggatgacctcaagctcaccaaggctgaaatctctgagctcaaccgcctgatccagaggatccgctcagagatagggaatgtgaagaagcagtgtgccgatctggagacggccatcgccgacgctgaacagcggggggactgcgccctgaaagatgcccgggccaagctggatgagctggagggcgccctgcaccaggccaaggaggagctggcacggatgctgcgtgagtaccaggagctcgtgagcctgaagctggccctggatatggagatcgccacctaccgcaagctgctggagagcgaggagtgcaggatgtctggcgaatatccaaattctgtgagcatctccgtcatcagcagcaccaatgctggggcaggaggggctggcttcagcatgggctttggcgcctcaagcagttatagctacaaaactgcagctgcagacgtcaagaccaaaggcagctgtggcagtgagctcaaggatccccttgccaaaacctcggggagcagctgtgccaccaaaaaggcctccagatgatggacaagtggttggctctgtgtgatgcttcgatgcaaggagtccagtcaggagctctctcagtggcctccttcttggtcccgtttcgttgggtcattgcctgaaatgcaaagacaacacttacccaggatgtttccccaaggccagctacaagcccctctgcccccatgcctttcttgggccttcactaccaagggactctcttcatcttctgattgggattgtgtccagtcctctgcttcttctgcaataaatgattaaatctg

SEQ ID NO: 233087 - DNA, 1536 bp, Artificial Sequence
  derived and/or modified sequence
atgagccggcagctgacccacttccccagaggagagcggctgggcttcagcggctgcagcgctgtgctgagcggcggcatcggcagcagcagcgccagcttccgggcccgggtgaagggcagcgccagctttggcagcaagagcctgagctgcctgggcggcagccgcagcctggccctgtctgctgctgccaggagaggaggcggccgcctgggcggctttgtgggcacagcctttggatctgctggcctgggccccaagtgccccagcgtgtgccccccaggcggcatcccccaggtgacagtgaacaagagcctgctggcccccctgaatgtggagatggaccctgagatccagagggtgcgggcccaggagcgggagcagatcaaggccctgaacaacaagtttgccagcttcatcgacaaggtgcgcttcctggagcagcagaaccaggtgctggagaccaagtggaacctgctgcagcagctggacctgaacaactgcaggaagaacctggagcccatctatgagggctacatcagcaacctgcagaagcagctggagatgctgtctggagatggagtgcggctggacagcgagctgaggaacatgcaggacctggtggaggactacaagaagagatatgaggtggagatcaacagaagaacagctgctgaaaatgaatttgtggtgctgaagaaggatgtggatgctgcctacatgaacaaggtggagctgcaggccaaggtggacagcctgacagatgagatcaagttcttcaagtgcctgtatgaaggagagatcacccagatccagagccacatcagtgacaccagcatcgtgctgtccatggacaacaacagagacctggacctggacagcatcatcgccgaggtgcgggcccagtatgaggagatcgccctgaagagcaaggccgaggccgagaccctgtaccagaccaagatccaggagctgcaggtgacagctggccagcacggagatgacctgaagctgaccaaggccgagatcagcgagctgaacagactcatccagaggatccgctcagaaattggaaatgtgaagaagcagtgtgccgacctggagacagccatcgcagatgctgagcagagaggagactgtgccctgaaggatgcccgggccaagctggatgagctggagggcgccctgcaccaggccaaggaggagctggccaggatgctgcgggagtaccaggagctggtgtccctgaagctggccctggacatggagatcgccacctacaggaagctgctggagagtgaagaatgtaggatgtctggagagtaccccaacagcgtgtccatcagcgtcatcagcagcaccaatgctggggccggcggggccggcttctccatgggctttggagccagcagcagctacagctacaagacagctgctgctgatgtgaagaccaagggcagctgtggcagcgagctgaaggaccccctggccaagaccagcggcagcagctgtgccaccaagaaggccagcaggtag

SEQ ID NO: 233088 - DNA, 1536 bp, Artificial Sequence
  derived and/or modified sequence
atgagccggcagctgacccacttcccccggggcgagcggctgggcttttctggctgcagcgccgtcctatctgggggaatcggctcatcatcagcaagttttcgggcaagagtcaaagggtcagctagctttgggtctaaaagcctctcttgcctgggcggctcccgcagtctggccctcagcgccgccgcacgaaggggaggagggcggctgggaggatttgtggggacggccttcggctcagctgggctgggacctaagtgcccttccgtatgtccacccggggggatccctcaggtgacagtgaataagtctctgctggctccgttgaatgtcgagatggacccagaaattcagagagtgcgcgcccaggaacgggagcagatcaaagctcttaataataagtttgcatccttcatcgataaagtccgctttctcgaacaacaaaaccaggtccttgagaccaaatggaacttgctgcagcagctggatctgaacaattgccgtaaaaatctggagcctatctatgaaggctacatcagtaacttgcagaagcagctggaaatgctgagcggcgatggggtacgcctcgactccgaacttcggaacatgcaggacttagttgaagactacaaaaaaaggtacgaagtggaaattaaccgcaggactgcggctgagaatgagtttgtggttctcaaaaaggatgtagatgcagcttacatgaataaagtggaacttcaggcaaaagtggattcattgaccgacgaaattaaatttttcaaatgtctgtacgagggcgagatcacccagattcagagtcatatttctgatacttctatcgttcttagtatggataacaaccgggacctggacttggactccatcatagccgaagttcgggctcagtacgaggaaatcgcactcaagtcgaaggcagaagctgaaactctgtatcagactaagattcaggagttacaggtaacagccggtcagcacggcgacgacctgaaattgaccaaagctgaaatctctgaactcaatcgattgattcagaggatcaggagcgagatcggcaatgtcaaaaagcagtgtgcggatctggagactgccatcgccgatgcagagcagcggggcgactgtgcccttaaggatgcgagggctaagctggatgagctggaaggggccctgcaccaggctaaggaggaactggcaaggatgctgagggaatatcaagagctggtctcactgaaactagctctggacatggagattgcaacctatagaaagttactggaatcagaggaatgcaggatgtccggcgagtatccaaattcagtgtctatcagtgtcataagctccaccaatgcgggagcgggtggagcaggcttctccatggggtttggggcctctagctcctatagttacaaaactgcggctgccgatgttaaaactaaaggatcctgcggtagcgaacttaaggatcctcttgcaaagacctcgggctcatcatgcgcaaccaaaaaggcctctcgatag

SEQ ID NO: 233089 - DNA, 1536 bp, Artificial Sequence
  derived and/or modified sequence
atgagccggcagctgacccacttcccccggggcgagcggctgggctttagtgggtgttctgcagtccttagtgggggtattggtagctcatcagcaagttttagagcaagagttaagggaagcgcatcttttggctcgaagtcattgagttgcttgggcgggagtcgcagcctcgccctgtccgcagccgcccggagaggtggaggccgcctgggtgggttcgttggcacggccttcggatccgctggactcgggcccaaatgcccaagtgtgtgcccgccgggtggaattccccaggtcaccgtcaacaaatcgctcttggcccctttgaacgtggagatggatcccgaaatccagagagtgcgagcccaggagagagaacagattaaagctcttaataataagttcgccagcttcattgacaaggttcgctttctcgaacagcagaatcaggttctagaaaccaagtggaatttactacagcagttggatctgaataactgcagaaagaacctggagcccatatatgaaggctacatctcaaatctgcagaagcagttggagatgctgtctggagatggcgtaaggttagacagtgaactgagaaacatgcaggatttggtggaagactacaaaaaacggtacgaggtggaaattaacagacggaccgctgccgagaacgaatttgtcgtacttaaaaaggacgtcgacgcagcctacatgaataaggttgagttgcaagcaaaggtggattctctcacggacgagataaagttttttaaatgtctttacgagggagaaattacgcaaatccaatcccacatctcagacaccagtattgttctgtcaatggacaataaccgcgacctcgacctggattctataattgcagaggttagagcccagtacgaggaaattgcacttaaaagcaaggccgaagccgagactctgtatcagaccaagatccaggagctacaagtcaccgcaggtcaacacggggacgacctcaagctgaccaaggcggaaatctcagagttgaacaggcttatccagaggataagatcagagatcggcaatgttaagaagcagtgtgctgatttggagactgcaattgcagacgcagagcaacgcggggactgcgcacttaaggatgctcgcgcaaagcttgatgagttggagggggcactgcaccaagcaaaagaagaattggctcgcatgcttcgtgagtatcaggagttagtttccctgaagttggctttggatatggagatcgccacctatcgtaaactcttggaatccgaggaatgtaggatgtccggggagtaccctaattccgtctcaatatctgtaatttcgtccactaacgctggcgctggtggggccggcttttctatgggattcggggctagctctagctactcctacaaaacggccgccgctgatgtgaagacaaaaggctcctgcggctcagagcttaaggatccactggctaagacaagcgggtcaagctgtgctactaaaaaggccagtcgctag

SEQ ID NO: 233090 - DNA, 1536 bp, Artificial Sequence
  derived and/or modified sequence
atgagcaggcagctgacccacttccctcgcggagaacgcctcggattctctggttgcagcgcagtcctgtccggtggaatcggcagttcaagcgcatcctttagggcacgcgtgaagggttcagcctcattcggttccaaatcgctgagctgcttaggaggatcgcgctccctcgcactcagtgcagctgcaaggcgcggagggggacgcctcggaggattcgtaggaacggcatttggctccgccggactgggacccaagtgtcctagcgtgtgtccgcctggtgggatccctcaggtcactgtaaataagtccctattagcaccactcaatgtcgaaatggaccctgagatacagagagtcagggctcaggaaagagaacagataaaggccttgaacaacaagttcgcaagctttatagataaagtgcggttcctcgagcagcagaaccaggtgttggagacaaaatggaatctattgcaacaactcgatctgaacaactgccggaagaatctggaacccatttatgaaggctacatttcaaacttgcaaaagcagctggaaatgctgtcgggggatggggtacgattggacagtgagctacgcaatatgcaggatctggttgaggactacaagaagcgctatgaggtcgagatcaatagaagaaccgcagcggagaatgaatttgttgtcctgaaaaaagacgtggatgccgcttatatgaacaaagtggagcttcaggccaaggtggattctttgacagatgagattaaattcttcaagtgcctgtacgagggagagattacacagattcaaagccatattagtgacacttctattgtcctaagcatggataacaaccgggaccttgaccttgatagtataatagccgaggtcagggcccagtacgaagagatcgcgctgaagtccaaagcggaagccgagacgctgtatcagacaaagattcaggaactgcaggtcactgctggccaacatggcgatgacctgaagctgactaaagctgagatcagcgagttgaaccgcctgatccagcgaatcagatcggagataggcaatgttaagaagcagtgtgctgacctcgagactgctatcgctgacgctgaacagcgtggcgactgtgccctgaaggacgcaagagctaagctcgatgagcttgaaggagcactccatcaggcaaaagaggagcttgctagaatgctgagggagtaccaggaattagtgtccctgaagctggcactggacatggagatcgctacatacaggaaactgctagaaagcgaggaatgcaggatgtctggagagtacccaaacagcgtatcgatttcagtcatctcatccaccaacgcaggcgcaggaggcgctggattcagcatgggctttggtgctagctccagctacagttataagacagctgccgcagatgtcaaaacgaaaggctcttgtggcagcgaacttaaagatcctctggccaagacgagcggctcaagttgtgccaccaaaaaggcatctcgctag

SEQ ID NO: 233091 - DNA, 1536 bp, Artificial Sequence
  derived and/or modified sequence
atgtcccgacagcttacccacttcccccgtggcgaacgactgggcttcagcggatgcagtgctgtgctatctggcggaataggctcctcctctgccagtttcagggctagagtgaagggctccgccagcttcggatccaaaagtctctcatgcctcggaggctcgcggagcctcgccctcagtgctgccgctagaaggggagggggacggctgggcggtttcgtaggcactgccttcggttccgcgggactcggtcctaagtgcccatctgtttgcccccctggcggaatcccccaggtcacagtgaataaatctttgttggccccattgaatgttgagatggacccagaaatccagcgcgtgagggcccaagagcgagaacagatcaaggctttgaacaacaagttcgcttcgttcatcgacaaggtgcgctttctagagcaacagaaccaggtcctggagactaaatggaacctactgcagcagctcgatctcaacaactgtcggaagaacctagagccaatctacgagggctatattagtaacctgcagaaacagctcgaaatgctgtccggagatggtgtccggctggacagtgaactacgcaatatgcaagacctagttgaggattacaagaaacggtatgaagtcgagatcaaccgtcgcaccgccgctgaaaatgaattcgttgtgcttaagaaagacgtcgacgctgcttacatgaataaggtcgagcttcaagccaaggtcgattccctgaccgacgagattaaatttttcaagtgcttatatgagggcgaaattacacagattcaatcccatatctcagatacctcgatcgtgctgagtatggacaataaccgggacttagacctggactccatcatcgccgaagtgagggcccagtacgaagagattgccctcaagagtaaagctgaggctgaaacattataccagacgaagattcaggaactacaggtaactgccggtcagcacggtgacgatctcaagctgactaaagccgaaatttctgagctgaatcgactcatccaacgcatccgcagcgaaatcgggaatgttaagaaacaatgcgccgacctggagactgcaatcgccgatgccgagcagcggggtgactgtgcactgaaagacgccagagcgaaactggacgagctggagggagctctccaccaagctaaggaagaactggctcgtatgctgcgtgagtaccaagagctggtatccttgaaactggccttggatatggaaattgctacttaccggaagctattagagtctgaagaatgccgtatgtccggagagtaccccaattctgtgagtattagtgtgatatctagcacgaatgcaggggctggcggagcagggttcagtatgggcttcggtgcttcttcctcttactcctataagacggctgcagccgatgttaagacaaagggatcatgcggatcagaactcaaggaccccctcgccaagacgagtgggagcagctgcgctaccaagaaggcttctcgctag

SEQ ID NO: 233092 - DNA, 1536 bp, Artificial Sequence
  derived and/or modified sequence
atgagcagacagctgacccacttccccagaggcgagagactgggcttcagcggctgcagcgccgtgctgagcggcggcatcggcagcagcagcgccagcttcagagccagagtgaagggcagcgccagcttcggcagcaagagcctgagctgcctgggcggcagcagaagcctggccctgagcgccgccgccagaagaggcggcggcagactgggcggcttcgtgggcaccgccttcggcagcgccggcctgggccccaagtgccccagcgtgtgcccccccggcggcatcccccaggtgaccgtgaacaagagcctgctggcccccctgaacgtggagatggaccccgagatccagagagtgagagcccaggagagagagcagatcaaggccctgaacaacaagttcgccagcttcatcgacaaggtgagattcctggagcagcagaaccaggtgctggagaccaagtggaacctgctgcagcagctggacctgaacaactgcagaaagaacctggagcccatctacgagggctacatcagcaacctgcagaagcagctggagatgctgagcggcgacggcgtgagactggacagcgagctgagaaacatgcaggacctggtggaggactacaagaagagatacgaggtggagatcaacagaagaaccgccgccgagaacgagttcgtggtgctgaagaaggacgtggacgccgcctacatgaacaaggtggagctgcaggccaaggtggacagcctgaccgacgagatcaagttcttcaagtgcctgtacgagggcgagatcacccagatccagagccacatcagcgacaccagcatcgtgctgagcatggacaacaacagagacctggacctggacagcatcatcgccgaggtgagagcccagtacgaggagatcgccctgaagagcaaggccgaggccgagaccctgtaccagaccaagatccaggagctgcaggtgaccgccggccagcacggcgacgacctgaagctgaccaaggccgagatcagcgagctgaacagactgatccagagaatcagaagcgagatcggcaacgtgaagaagcagtgcgccgacctggagaccgccatcgccgacgccgagcagagaggcgactgcgccctgaaggacgccagagccaagctggacgagctggagggcgccctgcaccaggccaaggaggagctggccagaatgctgagagagtaccaggagctggtgagcctgaagctggccctggacatggagatcgccacctacagaaagctgctggagagcgaggagtgcagaatgagcggcgagtaccccaacagcgtgagcatcagcgtgatcagcagcaccaacgccggcgccggcggcgccggcttcagcatgggcttcggcgccagcagcagctacagctacaagaccgccgccgccgacgtgaagaccaagggcagctgcggcagcgagctgaaggaccccctggccaagaccagcggcagcagctgcgccaccaagaaggccagcagatag

SEQ ID NO: 233093 - protein, 285 aa, Artificial Sequence
  derived and/or modified sequence
MAAASEPVDSGALWGLERPEPPPTRFHRVHGANIRVDPSGTRATRVESFAHGVCFSREPLAPGQVFLVEIEEKELGWCGHLRLGLTALDPASLAPVPEFSLPDLVNLGHTWVFAITRHHNRVPREGRPEAEAAAPSRPPTLLVEPYLRIEQFRIPRDRLVGRSRPGLYSHLLDQLYELNVLPPTARRSRLGVLFCPRPDGTADMHIIINGEDMGPSARGLPAAQPLYAVVDVFASTKSVRLVQLEYGLPSLQTLCRLVIQRSMVHRLAIDGLHLPKELKDFCKYE

SEQ ID NO: 233094 - DNA, 858 bp, Artificial Sequence
  derived and/or modified sequence
atggccgccgccagcgagcccgtggacagcggcgccctgtggggcctggagagacccgagcccccccccaccagattccacagagtgcacggcgccaacatcagagtggaccccagcggcaccagagccaccagagtggagagcttcgcccacggcgtgtgcttcagcagagagcccctggcccccggccaggtgttcctggtggagatcgaggagaaggagctgggctggtgcggccacctgagactgggcctgaccgccctggaccccgccagcctggcccccgtgcccgagttcagcctgcccgacctggtgaacctgggccacacctgggtgttcgccatcaccagacaccacaacagagtgcccagagagggcagacccgaggccgaggccgccgcccccagcagaccccccaccctgctggtggagccctacctgagaatcgagcagttcagaatccccagagacagactggtgggcagaagcagacccggcctgtacagccacctgctggaccagctgtacgagctgaacgtgctgccccccaccgccagaagaagcagactgggcgtgctgttctgccccagacccgacggcaccgccgacatgcacatcatcatcaacggcgaggacatgggccccagcgccagaggcctgcccgccgcccagcccctgtacgccgtggtggacgtgttcgccagcaccaagagcgtgagactggtgcagctggagtacggcctgcccagcctgcagaccctgtgcagactggtgatccagagaagcatggtgcacagactggccatcgacggcctgcacctgcccaaggagctgaaggacttctgcaagtacgagtag

SEQ ID NO: 233095 - DNA, 858 bp, Artificial Sequence
  derived and/or modified sequence
atggccgctgcaagtgagcctgtggactcaggcgcgttatggggtttggaacgtcccgagcctccaccaacaaggtttcaccgggttcacggcgcgaacatccgtgttgatccgagcggcaccagagcaactcgcgttgagtcgttcgcacatggggtgtgcttcagtcgggagcctctcgcaccaggccaggtctttttggttgagatcgaggagaaggaactaggctggtgtggccacctgcgactcggcctcacagcactggatccagcctctctcgcacctgtgccggaattcagcctccccgatcttgtgaacttaggacacacatgggttttcgccatcacacgtcatcacaatcgcgtgccgcgcgaagggaggccagaggccgaggccgccgctccctctcggccacccactctcctggtggagccttacctccgtatagaacagttccgcattccgagggaccggctggtgggcagatcccgccccggcctgtatagccacttgctcgatcagctctacgaactgaatgttctgccccctactgcgagaaggtcgcgtctgggggtacttttttgcccacggcccgacggcaccgccgatatgcatattatcattaacggggaggacatgggcccaagcgcacggggcctcccagccgcccagcctctatacgctgtggttgacgtattcgccagcacgaagtctgttcgacttgtgcagctggagtacggactcccttcccttcagactctgtgtaggctcgtgatccagcgaagcatggtgcacagactggctattgacggcctgcacctccccaaagaactaaaagatttctgcaagtacgagtag

SEQ ID NO: 233096 - DNA, 858 bp, Artificial Sequence
  derived and/or modified sequence
atggctgctgccagcgagcctgtggacagcggggccctgtggggcctggagaggcctgagcccccacccacccgcttccaccgggtgcacggggccaacatccgggtggaccccagcggcacccgggccaccagggtggagagctttgcccatggagtgtgcttcagccgggagcccctggcccctggccaggtgttcctggtggagattgaggagaaggagctgggctggtgtggccacctgcggctgggcctgacagccctggaccctgccagcctggcccctgtgcctgagttcagcctgcctgacctggtgaacctgggccacacctgggtgtttgccatcaccaggcaccacaacagagtgccccgggagggccggcctgaggccgaggccgccgcccccagccggccccccaccctgctggtggagccctacctgagaattgagcagttccgcatcccccgggaccggctggtgggccgcagcaggcctggcctgtacagccacctgctggaccagctgtatgagctgaatgtgctgcccccaacagcccggcgcagccggctgggcgtgctcttctgccccaggccagatggaacagctgacatgcacatcatcatcaatggagaggacatgggccccagcgcccggggcctgcctgctgcccagcccctgtatgctgtggtggatgtgtttgccagcaccaagtctgtgcggctggtgcagctggagtatggcctgcccagcctgcagaccctgtgccgcctggtgatccagaggtccatggtgcaccggctggccattgatggcctgcacctgcccaaggagctgaaggacttctgcaagtatgaatag

SEQ ID NO: 233097 - DNA, 1278 bp, Artificial Sequence
  derived and/or modified sequence
cttcctcccgccccttctttggtccctacggacctggggggcggtggcggtcaatgccgggtcaaggtccgcgggcctcgcagatcgtagcccgggcgcacgcgatcagatgatcctgttgtggacggctaagttgtaggcgggatggctgagaaagcggcgctaggacccccgggcagaggctcggggaagggagtcaggggggaaatgccttacaaggtcgccttgcggtcaccatcattgcccgccgcccaaaatagcccccggcgccagctggcctgccctatggccgagagatggctgctgcctccgagcccgtggattcgggtgcactctggggactcgagcgcccggagccccctcccacccgcttccatcgggtgcacggtgccaacatccgcgtggacccctctgggacgcgggccacacgcgtggagagcttcgcccacggcgtgtgcttcagccgcgagccgctggccccgggccaggtcttcctggtcgagatcgaggagaaagagctgggctggtgcggacatctgcgtctcggtctgaccgcgctggaccccgccagtctggcccccgttcccgagttttctctgcccgatctggtcaacctgggccacacctgggtcttcgccatcacgcgccaccacaaccgcgtgccccgggagggccgcccggaggcggaggcagcggcccccagccgacctccaaccctcctcgtggaaccatatctgcgcattgagcagtttcgcattccccgggaccgcctggtgggccgcagccggccagggctctacagccatctcttggaccagctctatgagctgaacgtgctgcctccgaccgcgcgccgtagccgcctgggtgtcctcttttgcccgcgccccgatggcacggccgacatgcacatcatcatcaacggcgaggacatgggcccgagcgcccggggactgccagctgcgcagcccctctacgcggtggtggacgtgtttgcttccacaaagagcgtgcgccttgtccagctcgagtatggcttgccatccctgcagactctgtgccgcctagtgatacaaaggagcatggtgcaccggctggccattgatgggctccacctgcccaaagaacttaaggatttctgcaagtatgagtgaagacccacagtgcaccagagcacagctgcatcctggagccccagacctgtggctggctggtccgaagttggccacattgctgccagccaagaccagaaataaacagccgatgctgacatcttga

SEQ ID NO: 233098 - DNA, 858 bp, Artificial Sequence
  derived and/or modified sequence
atggccgccgccagcgagcccgtggacagcggcgccctgtggggcctggaacgacccgagcctcccccgacacggttccacagagtccatggcgcaaatattcgggttgatccaagcggcacccgggcaacacgggtggaatctttcgcgcatggggtttgttttagtagagagccactcgctccaggccaggtattcctggtggagattgaggagaaggaattgggatggtgcgggcatctccgtctcggactgaccgctttggaccccgcatccttggctcccgtgcccgaatttagcctgccagacctagtgaatctggggcacacatgggtgtttgcgatcacccggcaccacaatcgggtgcctcgggagggacgcccagaggctgaggctgcggccccctctcgtccacccaccctgctggtggagccctacctgagaatcgaacagtttcggatccctcgggaccgacttgtgggacgttctcgcccaggtctttattcacacctgctcgatcagttgtatgagttaaacgtgctgccacccacagctcgaagatcccgcctgggcgtactcttttgcccacgacctgacggaacagcggatatgcatataattatcaacggcgaagatatgggtcccagcgcccgcggcctgcctgccgcgcaaccactttatgcggtggttgatgtattcgcatcgacgaagtccgtgcgactggtgcaactcgagtatgggctgccctcgctgcagaccctgtgccggctcgttatccagcggtcaatggtccaccgtctggctatagacggcctgcacctgcccaaagagctgaaggacttctgcaagtatgagtag

SEQ ID NO: 233099 - DNA, 858 bp, Artificial Sequence
  derived and/or modified sequence
atggcggctgcctccgagcctgttgattcaggtgccctttgggggttagagcgaccagaacctccacctacacggttccatagagtccacggcgcaaatattcgagtcgacccctctgggacccgcgctaccagggtggaaagctttgcccatggggtgtgcttttctagggaacctctggctccaggacaggtatttttggtggagatcgaagaaaaggaactggggtggtgtggccaccttcgcctcgggttgacagctctcgacccggcaagcctggcccctgtgcctgaattctcactacctgacctggtcaacctcggtcacacctgggtgttcgccataacccgacatcataaccgggtgccccgtgaaggacgccctgaggctgaggccgctgccccaagccgcccacccactctgctggtcgagccctatctgagaatcgagcagtttaggatacctcgcgatcggctggtcgggaggtcgaggcctgggttatatagtcacctccttgatcagttgtacgagctcaatgtactgccccctaccgctaggcggtccaggctcggtgtactattctgccccagaccagatggaactgccgatatgcacatcatcatcaatggagaggatatggggccttcagccagaggcctccccgcagctcagccactgtacgctgtagtagatgtgtttgcgtctactaaaagcgtcagactggtccagctggaatacgggctcccctcactgcagaccctttgcaggctggtcattcaacgatcaatggttcaccggctggccatcgacggcctgcacctgccaaaagaactgaaggatttttgtaagtatgaatag

SEQ ID NO: 233100 - protein, 906 aa, Artificial Sequence
  derived and/or modified sequence
MSHQVKGLKEEARGGVKGRVKSGSPHTGDRLGRRSSSKRALKAEGTPGRRGAQRSQKERAGGSPSPGSPRRKQTGRRRHREELGEQERGEAERTCEGRRKRDERASFQERTAAPKREKEIPRREEKSKRQKKPRSSSLASSASGGESLSEEELAQILEQVEEKKKLIATMRSKPWPMAKKLTELREAQEFVEKYEGALGKGKGKQLYAYKMLMAKKWVKFKRDFDNFKTQCIPWEMKIKDIESHFGSSVASYFIFLRWMYGVNLVLFGLIFGLVIIPEVLMGMPYGSIPRKTVPRAEEEKAMDFSVLWDFEGYIKYSALFYGYYNNQRTIGWLRYRLPMAYFMVGVSVFGYSLIIVIRSMASNTQGSTGEGESDNFTFSFKMFTSWDYLIGNSETADNKYASITTSFKESIVDEQESNKEENIHLTRFLRVLANFLIICCLCGSGYLIYFVVKRSQQFSKMQNVSWYERNEVEIVMSLLGMFCPPLFETIAALENYHPRTGLKWQLGRIFALFLGNLYTFLLALMDDVHLKLANEETIKNITHWTLFNYYNSSGWNESVPRPPLHPADVPRGSCWETAVGIEFMRLTVSDMLVTYITILLGDFLRACFVRFMNYCWCWDLEAGFPSYAEFDISGNVLGLIFNQGMIWMGSFYAPGLVGINVLRLLTSMYFQCWAVMSSNVPHERVFKASRSNNFYMGLLLLVLFLSLLPVAYTIMSLPPSFDCGPFSGKNRMYDVLQETIENDFPTFLGKIFAFLANPGLIIPAILLMFLAIYYLNSVSKSLSRANAQLRKKIQVLREVEKSHKSVKGKATARDSEDTPKSSSKNATQLQLTKEETTPPSASQSQAMDKKAQGPGTSNSASRTTLPASGHLPISRPPGIGPDSGHAPSQTHPWRSASGKSAQRPPH

SEQ ID NO: 233101 - DNA, 2721 bp, Artificial Sequence
  derived and/or modified sequence
atgagccaccaggtgaagggcctgaaggaggaggccagaggcggcgtgaagggcagagtgaagagcggcagcccccacaccggcgacagactgggcagaagaagcagcagcaagagagccctgaaggccgagggcacccccggcagaagaggcgcccagagaagccagaaggagagagccggcggcagccccagccccggcagccccagaagaaagcagaccggcagaagaagacacagagaggagctgggcgagcaggagagaggcgaggccgagagaacctgcgagggcagaagaaagagagacgagagagccagcttccaggagagaaccgccgcccccaagagagagaaggagatccccagaagagaggagaagagcaagagacagaagaagcccagaagcagcagcctggccagcagcgccagcggcggcgagagcctgagcgaggaggagctggcccagatcctggagcaggtggaggagaagaagaagctgatcgccaccatgagaagcaagccctggcccatggccaagaagctgaccgagctgagagaggcccaggagttcgtggagaagtacgagggcgccctgggcaagggcaagggcaagcagctgtacgcctacaagatgctgatggccaagaagtgggtgaagttcaagagagacttcgacaacttcaagacccagtgcatcccctgggagatgaagatcaaggacatcgagagccacttcggcagcagcgtggccagctacttcatcttcctgagatggatgtacggcgtgaacctggtgctgttcggcctgatcttcggcctggtgatcatccccgaggtgctgatgggcatgccctacggcagcatccccagaaagaccgtgcccagagccgaggaggagaaggccatggacttcagcgtgctgtgggacttcgagggctacatcaagtacagcgccctgttctacggctactacaacaaccagagaaccatcggctggctgagatacagactgcccatggcctacttcatggtgggcgtgagcgtgttcggctacagcctgatcatcgtgatcagaagcatggccagcaacacccagggcagcaccggcgagggcgagagcgacaacttcaccttcagcttcaagatgttcaccagctgggactacctgatcggcaacagcgagaccgccgacaacaagtacgccagcatcaccaccagcttcaaggagagcatcgtggacgagcaggagagcaacaaggaggagaacatccacctgaccagattcctgagagtgctggccaacttcctgatcatctgctgcctgtgcggcagcggctacctgatctacttcgtggtgaagagaagccagcagttcagcaagatgcagaacgtgagctggtacgagagaaacgaggtggagatcgtgatgagcctgctgggcatgttctgcccccccctgttcgagaccatcgccgccctggagaactaccaccccagaaccggcctgaagtggcagctgggcagaatcttcgccctgttcctgggcaacctgtacaccttcctgctggccctgatggacgacgtgcacctgaagctggccaacgaggagaccatcaagaacatcacccactggaccctgttcaactactacaacagcagcggctggaacgagagcgtgcccagaccccccctgcaccccgccgacgtgcccagaggcagctgctgggagaccgccgtgggcatcgagttcatgagactgaccgtgagcgacatgctggtgacctacatcaccatcctgctgggcgacttcctgagagcctgcttcgtgagattcatgaactactgctggtgctgggacctggaggccggcttccccagctacgccgagttcgacatcagcggcaacgtgctgggcctgatcttcaaccagggcatgatctggatgggcagcttctacgcccccggcctggtgggcatcaacgtgctgagactgctgaccagcatgtacttccagtgctgggccgtgatgagcagcaacgtgccccacgagagagtgttcaaggccagcagaagcaacaacttctacatgggcctgctgctgctggtgctgttcctgagcctgctgcccgtggcctacaccatcatgagcctgccccccagcttcgactgcggccccttcagcggcaagaacagaatgtacgacgtgctgcaggagaccatcgagaacgacttccccaccttcctgggcaagatcttcgccttcctggccaaccccggcctgatcatccccgccatcctgctgatgttcctggccatctactacctgaacagcgtgagcaagagcctgagcagagccaacgcccagctgagaaagaagatccaggtgctgagagaggtggagaagagccacaagagcgtgaagggcaaggccaccgccagagacagcgaggacacccccaagagcagcagcaagaacgccacccagctgcagctgaccaaggaggagaccaccccccccagcgccagccagagccaggccatggacaagaaggcccagggccccggcaccagcaacagcgccagcagaaccaccctgcccgccagcggccacctgcccatcagcagaccccccggcatcggccccgacagcggccacgcccccagccagacccacccctggagaagcgccagcggcaagagcgcccagagacccccccactag

SEQ ID NO: 233102 - DNA, 2721 bp, Artificial Sequence
  derived and/or modified sequence
atgagtcaccaggtgaaggggttaaaagaagaggctcggggaggggtgaaggggagagtgaagagcggttcaccgcacaccggcgacagactgggccgccggagtagctctaagagagcactaaaagcagaaggcactccagggcgcagaggcgcccaacgatcccagaaggagcgcgcgggtgggagtccaagtcctggctctccgcggcgcaagcagacaggtaggcggagacaccgggaagagctgggagagcaggagagaggagaagccgagcgcacctgcgagggtcgccggaagagggacgagagggcaagcttccaagagaggaccgccgcccccaagagagagaaggaaatcccccgtcgcgaagaaaaatctaagcggcaaaaaaaaccccgatcctctagcttggcctcctctgcttcagggggggagagcctctcagaggaagagcttgcccagatactggagcaggtggaagagaaaaagaaactcattgcaacaatgcggagcaaaccctggcctatggccaagaagctcacggaactgcgggaggcccaggaattcgtcgaaaagtacgagggagccctaggcaagggcaagggtaaacaactgtatgcttacaagatgcttatggctaaaaaatgggtcaagtttaagagggactttgacaactttaaaacacagtgcatcccttgggaaatgaagatcaaggatatcgagagccacttcggaagctcagtggccagctactttatcttcctgagatggatgtatggcgtcaatctggtcctgttcggattgattttcggactcgtcattatccctgaagtgttgatggggatgccctacggttctataccaaggaaaactgtgccccgcgcagaggaggagaaagctatggacttcagcgtactttgggactttgaaggctatattaaatatagtgctttattttatggctattacaacaaccagcgaaccattggctggctgcggtaccgactgcccatggcgtactttatggtcggcgtaagcgtattcggctatagcctgatcattgtaattcgatccatggcaagtaatacgcaggggtccacaggggagggggaatctgacaactttaccttcagttttaaaatgttcacttcttgggactatctcattggaaattccgaaaccgccgacaacaaatacgcgagcattacgacgtcgttcaaggagagtatcgtggatgaacaagaatcaaataaggaggagaacatccacctaacgagatttcttcgtgtccttgctaactttctgattatctgctgcctgtgtggcagtgggtacttgatttatttcgtggtgaagcgcagccaacaattctctaaaatgcagaacgtgtcatggtacgaaagaaacgaggtggaaattgtaatgtcattgctggggatgttctgtcccccactgttcgaaaccattgcggcactggagaattaccacccccggacaggactgaagtggcagctcggtcgcatcttcgctctattcctgggaaatctatatacatttctgttggccttgatggacgatgtacacctcaagctggcaaacgaggagaccattaagaacatcacccattggactctctttaattactataattctagcgggtggaatgagtccgtcccccgcccaccccttcatcccgctgatgtgccccgggggtcatgttgggagacggcagtcggaatcgaattcatgcggcttactgtgtctgacatgctcgtgacttatattaccatcctgctgggggacttcttgcgcgcctgttttgtgcgatttatgaactactgctggtgctgggacttggaagctggctttccgtcatacgctgagtttgacatcagcggaaacgtcttagggctgatatttaatcaggggatgatttggatgggctccttttacgctcctgggctggttgggatcaacgtgctacgactgctgaccagcatgtacttccagtgctgggccgtgatgtccagtaatgttccgcatgagagagtttttaaagcaagccgtagtaataacttttatatgggtctgttgcttctggtcttgtttttgtccctccttcccgtggcttacaccattatgagcctgccgccctcatttgattgcgggcctttctctgggaagaaccgtatgtacgacgtgcttcaggagaccattgaaaacgactttccgacctttctggggaagatctttgcttttttggccaacccgggattaattatcccggccattttgctcatgttcctcgccatatattatctgaacagcgtttcgaaatccctttcaagggccaacgcacagctgcgcaaaaagatccaggtgctgcgcgaagttgagaagtcccacaagtcggtgaaaggaaaggctacagcccgggattcagaagacacgcccaaaagttccagcaagaatgctacccagctgcaattgaccaaagaggaaaccacccctccttccgcaagccagagccaggccatggataagaaggcccagggcccaggcaccagcaattcggcgtcacgaactacgctgcctgcttcgggacacctgcctatctctcgcccgcccggcatcggtcctgacagtggccacgccccgtcccaaacccatccatggagaagcgctagtggcaagtccgctcagagaccccctcactag

SEQ ID NO: 233103 - DNA, 2721 bp, Artificial Sequence
  derived and/or modified sequence
atgagccaccaggtgaagggcctgaaggaggaggcccggggcggcgtgaagggccgggtgaagagcggcagcccccacactggagaccggctgggcagaagaagcagcagcaagagggccctgaaggccgagggcaccccaggaagaagaggagcccagaggagccagaaggagcgggccggcggcagccccagccctggcagccccaggaggaagcagacaggaagaagaagacaccgggaggagctgggggagcaggagcggggggaggccgagaggacctgtgagggccgcaggaagagagatgagcgggccagcttccaggagaggacagctgcccccaagcgggagaaggagatcccccggcgggaggagaagagcaagaggcagaagaagcccaggagcagcagcctggccagcagcgccagcggcggggagagcctgtctgaggaggagctggcccagatcctggagcaggtggaggagaagaagaagctgattgccaccatgaggagcaagccctggcccatggccaagaagctgacagagctgcgggaggcccaggagtttgtggagaagtatgagggcgccctgggcaagggcaagggcaagcagctgtatgcctacaagatgctgatggccaagaagtgggtgaagttcaagagggactttgacaacttcaagacccagtgcatcccctgggagatgaagatcaaggacatcgagagccacttcggcagctctgtggccagctacttcatcttcctgcgctggatgtatggagtgaacctggtgctgtttggcctcatcttcggcctggtgatcatccctgaggtgctgatgggcatgccctacggcagcatccccaggaagacagtgcccagggctgaggaggagaaggccatggacttctctgtgctgtgggactttgagggctacatcaagtacagcgccctcttctacggctactacaacaaccagaggaccatcggctggctgcgctaccgcctgcccatggcctacttcatggtgggcgtgtctgtgtttggctacagcctcatcatcgtcatccgctccatggccagcaacacccagggcagcactggagagggggagagtgacaacttcaccttctccttcaagatgttcacctcctgggactacctgattggcaacagcgagacagctgacaacaagtatgccagcatcaccaccagcttcaaggagagcatcgtggatgagcaggagagcaacaaggaggagaacatccacctgacccgcttcctgcgggtgctggccaacttcctgatcatctgctgcctgtgtggcagcggctacctgatctactttgtggtgaagaggagccagcagttcagcaagatgcagaatgtgtcctggtatgaaagaaatgaggtggagatcgtgatgagcctgctgggcatgttctgcccccccctgtttgagaccatcgccgccctggagaactaccaccccaggacaggcctgaagtggcagctgggccgcatctttgccctcttcctgggcaacctgtacaccttcctgctggccctgatggatgatgtgcacctgaagctggccaatgaggagaccatcaagaacatcacccactggaccctcttcaactactacaacagcagcggctggaatgaatctgtgccccggccccccctgcacccagcagatgtgccccggggcagctgctgggagacagctgtgggcatcgagttcatgaggctgactgtgtctgacatgctggtgacctacatcaccatcctgctgggggacttcctgcgggcctgctttgtgcgcttcatgaactactgctggtgctgggacctggaggccggcttccccagctatgcagagtttgacatctctggaaatgtgctgggcctcatcttcaaccagggcatgatctggatgggcagcttctacgcccctggcctggtgggcatcaacgtgctgcggctgctgacctccatgtacttccagtgctgggccgtgatgagcagcaatgtgccccatgagagggtcttcaaggccagccgcagcaacaacttctacatgggcctgctgctgctggtgctcttcctgagcctgctgcctgtggcctacaccatcatgagcctgccccccagctttgactgtggccccttcagcggcaagaacaggatgtatgatgtgctgcaggagaccattgaaaatgacttccccaccttcctgggcaagatctttgccttcctggccaaccctggcctcatcatcccagccatcctgctgatgttcctggccatctactacctgaacagcgtgtccaagagcctgagccgggccaatgcccagctgaggaagaagatccaggtgctgcgggaggtggagaagagccacaagtctgtgaagggcaaggccacagcccgggacagcgaggacacccccaagagcagcagcaagaatgccacccagctgcagctgaccaaggaggagaccaccccacccagcgccagccagagccaggccatggacaagaaggcccagggccctggcaccagcaacagcgccagcaggaccaccctgcctgccagcggccacctgcccatcagccggcccccaggcattggaccagattctggccacgcccccagccagacccacccctggaggtctgccagcggcaagagcgcccagaggcctccccactag

SEQ ID NO: 233104 - DNA, 2721 bp, Artificial Sequence
  derived and/or modified sequence
atgagccaccaggtgaagggcctgaaggaggaggcccggggcggcgttaaaggtcgggtgaaatctggttcaccccacacaggcgatagattaggcagacgctccagctccaaacgggcactgaaagctgaggggacgccaggcaggaggggcgcacaacgaagccaaaaagagcgcgctggcggctcgccctcacctggcagccctaggcgcaagcagactggtcgccggcggcatcgggaggagttaggtgagcaggagcggggagaggccgagcgcacttgtgaaggcagacgcaagcgggatgagagggctagcttccaagagcggactgccgcaccgaaacgggaaaaggagattccgcggcgggaagagaaaagcaaaagacagaagaaaccacggagctcaagccttgcgagcagcgcgagtggtggggaatcgctatccgaagaagagcttgcccagatactggagcaggtagaggagaaaaagaagctcatcgccaccatgagatctaaaccctggcccatggccaagaagttgacagagctccgcgaggctcaggagtttgtggaaaagtacgagggggccctgggaaagggcaaaggaaagcagttatacgcatataaaatgctgatggccaaaaaatgggtgaagttcaaaagggacttcgacaactttaagacgcagtgcatcccctgggaaatgaaaatcaaagacattgagtcacacttcggctcgagcgtggccagttattttatttttctgcggtggatgtatggtgtgaacctggtcctgttcggcctcatcttcgggcttgttattattcctgaggttctgatgggaatgccatatggctctatcccgaggaagactgtcccaagggcagaagaggagaaggcaatggactttagcgttctgtgggactttgagggctatatcaagtattccgccttattctacggatattacaataaccaaagaacaattgggtggttgagatacaggttgccaatggcatacttcatggtaggggtgtctgtgttcgggtactctctgataatagtgatccggtcaatggcctctaacacgcaaggcagtactggcgaaggcgagtccgataattttaccttcagttttaagatgttcactagttgggattacttaataggcaatagcgagaccgcggacaacaaatatgcgtcaatcacgaccagttttaaggaaagcattgtggacgagcaggagtctaacaaggaagagaatatccacttgacccgcttccttagggtcctggccaacttcctgatcatatgctgtctctgcggcagcggctatctcatttacttcgtcgtcaaacgttcccagcagtttagtaaaatgcagaatgttagttggtatgagaggaacgaggtggaaatcgtgatgagccttctcggtatgttttgtccccccctgttcgagacaatagctgccctagagaactaccaccctcggaccggcctcaagtggcagctaggtagaatattcgccttgtttctgggaaacttgtatactttcttgctggcgttaatggacgacgtgcacttaaagctggcaaacgaagaaaccataaagaatatcactcattggacactttttaactactacaacagtagcggttggaatgagtcagtcccccggccaccacttcaccctgctgatgtgccccgagggtcgtgttgggagacggctgttgggatcgaattcatgcgtttgactgtcagtgatatgctggtgacttatattactattctgcttggggatttcctgagggcatgcttcgtgcgcttcatgaactattgttggtgttgggatctagaggccggtttcccttcctacgccgagtttgatatttctggaaatgttctcgggctcattttcaaccaaggcatgatatggatgggatccttctacgcccccggcctggtcggaataaatgtccttagactcttaacttcgatgtatttccaatgctgggctgtgatgagctctaatgtgccccacgagcgggtgtttaaagcgtctagatccaataatttctacatgggactcctgttgctggttctttttttatccctgctgccagtggcctacacgatcatgtccctgccaccgtcctttgattgtggcccattctcaggcaaaaaccgaatgtatgatgttctccaggagaccattgaaaacgacttccctacctttctcgggaaaatattcgccttcctggcaaaccccggccttatcattcccgccatcttgttaatgtttcttgccatctattacctcaattccgtatcaaaaagcctctccagggccaatgcccaacttagaaagaaaatccaggtgctgcgggaagtggaaaaaagtcacaagtccgttaaaggaaaggccacagctcgagatagtgaagatactccgaagagctcctccaagaatgctacacagctccagctaaccaaggaagagaccaccccaccttcagcttcccagtcacaggccatggataaaaaagcacagggccctggaacaagcaactctgcctcccgaacgaccctcccagcatcaggccacctgcccatttcacggcccccaggcatcgggcccgactccggtcacgcgccaagccaaacacacccgtggaggagtgcaagcgggaagagtgctcagaggccgccacattag

SEQ ID NO: 233105 - DNA, 2721 bp, Artificial Sequence
  derived and/or modified sequence
atgagccatcaggtgaaagggctaaaggaggaagcgagaggcggagtcaaagggagggttaagtcaggatcccctcacaccggcgacagactggggagacgatcctcaagcaaacgggcactcaaggctgaagggacccctggcaggaggggcgcacaaagaagtcaaaaggaaagagctggcggatctccatcacctggaagtccacggagaaaacagacggggaggcgacgacatcgggaggaactcggagaacaggagcgcggtgaggccgagcggacctgtgaggggagaagaaaaagggatgagagggccagttttcaggaacggaccgccgcaccgaaaagggagaaggagatccccaggagagaggagaaatccaagaggcaaaaaaagcctcggagttcatcactggcttcttctgcctcaggtggcgagagcttatctgaagaagagctggcccagatcttggagcaagtcgaggaaaagaaaaagctgattgccaccatgcgctctaagccatggcccatggcgaagaagttaaccgaactgagggaggcacaggagtttgttgaaaaatatgaaggcgcactgggtaaaggtaagggtaaacagttatatgcttacaagatgctgatggccaagaagtgggtcaaattcaagcgggattttgacaatttcaaaacccaatgcattccttgggagatgaagattaaggacattgaatcgcactttggcagctccgtggcgagctacttcattttcttgcgctggatgtatggagtgaacttggtactgttcggtttgatctttggcctggtgatcattcctgaggtcctgatgggtatgccatatggctccatccccagaaaaaccgtgcccagggcggaagaggagaaggcaatggactttagcgtcttatgggatttcgaaggctatattaagtactcggcgctgttttatgggtattataacaatcagagaacgattgggtggctgcggtatcgactgccaatggcatatttcatggtgggcgtgtcagtgttcgggtactcactgattatagtcatcagatccatggcgtcaaatacacaagggtctaccggggaaggagagagcgataacttcacgttctctttcaaaatgttcacctcgtgggactacctgatcgggaattcagagactgccgataataaatacgccagcattacaacaagctttaaagagtcgatcgtggatgaacaggagtcgaataaagaggagaatatacaccttacaaggtttttgcgtgtattagctaacttcctgatcatctgctgcctctgtggaagtggctatttaatctactttgtggtaaagcgctctcagcagttctcaaaaatgcagaacgtgagctggtatgaacggaatgaggttgagatcgtcatgtcactgctgggtatgttctgtccccctctgttcgagactatcgcagccctcgagaactatcatccaaggacaggattgaagtggcagttggggagaatcttcgccctttttcttggtaacctgtatacgttcctgctcgccctgatggatgatgttcatctgaagctggcaaatgaggagaccataaagaacattactcactggaccctgttcaattactacaattcgtccgggtggaatgagtccgtgcctcggcctccactccatcccgctgacgttcctcgtggatcctgctgggaaacagctgttgggattgagttcatgcgtctcaccgtatctgatatgttggttacctatattaccatcttactgggggatttcctgcgcgcatgtttcgtgagatttatgaactactgttggtgttgggaccttgaagcagggttccctagctacgcagagtttgacatttcaggaaatgtgttaggcctaatcttcaaccagggcatgatttggatggggtccttttatgcccctgggttggtcgggataaatgtgcttcgactgctgacatctatgtattttcagtgctgggccgtgatgtccagtaatgtacctcacgagcgagtcttcaaagccagtcgttctaataatttctacatgggcttgctgctgctggtgttgtttctcagcctgctgcctgtagcgtacacaatcatgagcctgccgccttcttttgattgcgggccattctcaggcaagaacagaatgtatgacgttctccaggagacgatagaaaacgacttccctacgttccttggaaagatttttgccttcctcgcgaatccagggcttatcatcccagccattctcctgatgttcctggccatttattatctgaactcggtgtccaaatctctgagccgggcaaatgcacagctacggaaaaaaattcaggtgttgcgggaggtcgagaagtcacataagtctgtcaagggtaaggcaactgccagggattcagaggatacccctaaatcctcttctaaaaatgcgactcagctgcagcttacaaaggaggagactacgccacccagtgcctcgcagagccaggcaatggataagaaggctcagggtccgggaacaagtaattctgcctccagaactaccctgccagccagcggccatttacctataagtagacccccagggatcggcccagattccggacacgcaccatcccagacacatccgtggcgaagcgcaagtggcaaaagtgcccagcgcccacctcactag

SEQ ID NO: 233106 - DNA, 3169 bp, Artificial Sequence
  derived and/or modified sequence
gcagtgctgctgaccatgagccaccaggtaaagggcctgaaagaggaagcacgaggcggagtgaaagggcgggtgaagagcggctctccacacacaggtgacaggctgggaaggagatcctcaagcaagcgggctctcaaagccgaggggaccccaggcaggcgcggagctcagcgaagccagaaggagcgcgccgggggcagcccaagcccggggtctccccggaggaagcaaacagggcgcaggagacacagagaagagctgggggagcaggagcggggcgaggcagagaggacctgcgagggcaggagaaagcgcgacgagagggcctccttccaggagcggacagcagccccaaagagggaaaaggagattccgaggagggaggagaagtcgaagcggcagaagaaacccaggtcatcctccttggcctccagtgcctctggtggggagtccctgtccgaggaggaactggcccagatcctggagcaggtggaagaaaaaaagaagctcattgccaccatgcggagcaagccctggcccatggcgaagaagctgacagagctcagggaggcccaggaatttgtggagaagtatgaaggtgccttgggaaaggggaaaggcaagcaactatatgcctacaagatgctgatggccaagaaatgggtcaaatttaagagagactttgataatttcaagactcaatgtatcccctgggaaatgaagatcaaggacattgaaagtcactttggttcttcagtggcatcgtatttcatctttctccgatggatgtatggagttaaccttgtcctttttggcttaatatttggtctagtcataatcccagaggtactgatgggcatgccctatgggagtattcccagaaagacagtgcctcgggctgaggaagaaaaggccatggatttttctgtcctttgggattttgagggctatatcaagtactctgcactcttctatggctactacaacaaccagaggaccatcgggtggctgaggtaccggctgcctatggcttactttatggtgggggtcagcgtgttcggctacagcctgattattgtcattcgatcgatggccagcaatacccaaggaagcacaggcgaaggggagagtgacaacttcacattcagcttcaagatgttcaccagctgggactacctgatcgggaattcagagacagctgataacaaatatgcatccatcaccaccagcttcaaggaatcaatagtggatgaacaagagagtaacaaagaagaaaatatccatctgacaagatttcttcgtgtcctggccaactttctcatcatctgctgtttgtgtggaagtgggtacctcatttactttgtggttaagcgatctcagcaattctccaaaatgcagaatgtcagctggtatgaaaggaatgaggtagagatcgtgatgtccctgcttggaatgttttgtccccctctgtttgaaaccatcgctgccctggagaattaccacccacgcactggactgaagtggcagctgggacgcatctttgcactcttcctggggaacctctacacatttctcttggccctgatggatgacgtccacctcaagcttgctaatgaagagacaataaagaacatcactcactggactctgtttaactattacaactcttctggttggaacgagagtgtcccccgaccacccctgcaccctgcagatgtgccccggggttcttgctgggagacagctgtgggcattgaattcatgaggctgacggtgtctgacatgctggtaacgtacatcaccatcctgctgggggacttcctacgggcttgttttgtgcggttcatgaactactgctggtgctgggacttggaggctggatttccttcatatgctgagtttgatattagtggaaatgtgctgggtttgatcttcaaccaaggaatgatctggatgggctccttctatgctccaggcctggtgggcattaatgtgctgcgcctgctgacctccatgtacttccagtgctgggcggtgatgagcagcaacgtaccccatgaacgcgtgttcaaagcctcccgatccaacaacttctacatgggcctcctgctgctggtgctcttcctcagcctcctgccggtggcctacaccatcatgtccctcccaccctcctttgactgcgggccgttcagtgggaaaaacagaatgtacgatgtcctccaagagaccattgaaaacgatttcccaaccttcctgggcaagatctttgctttcctcgccaatccaggcctgatcatcccagccatcctgctgatgttcttggccatttactacctgaactcagtttccaaaagcctttcccgagctaatgcccagctgaggaagaaaatccaagtgctccgtgaagttgagaagagtcacaaatctgtaaaaggcaaagccacagccagagattcagaggacacacctaaaagcagctccaaaaatgccacccagctccaactcaccaaggaagagaccactcctccctctgccagccaaagccaggccatggacaagaaggcgcagggccctgggacctccaattctgccagcaggaccacactgcctgcctctggacaccttcctatatctcggccccctggaatcggaccagattctggccacgccccatctcagactcatccgtggaggtcagcctctggaaagagtgctcagagacctccccactgatggctaggactccagggagcctcgaccctagggctgatcctcaagtaccccagtttcacacataccaaaccaaggttctctcccctctttcctctcacatacatgctctgtctcctctcttggaatgcatgaactttgattccttcaggcccttgtcagctaccgaaggaggaagacagtggcttcacctgtcctttagggaagctggagccatctctgcactaactgccctcccaaatatcttggttcagacagctctgaaccccacgctcacagtggtcgaccttgcctcccgattttcggagttggggaagggccatgaccaccctcgtagactttttccatgggatacagtttaggacacgggtttctgccagcttccctaaccaggagggggatggagaagggcctacatttctcaatccagaggaag

SEQ ID NO: 233107 - protein, 708 aa, Artificial Sequence
  derived and/or modified sequence
MAVPAALIPPTQLVPPQPPISTSASSSGTTTSTSSATSSPAPSIGPPASSGPTLFRPEPIASAAAAAATVTSTGGGGGGGGGGSGGGGGSSGNGGGGGGGGGGSNCNPNLAAASNGSGGGGGGISAGGGVASSTPINASTGSSSSSSSSSSSSSSSSSSSSSSSSCGPLPGKPVYSTPSPVENTPQNNECKMVDLRGAKVASFTVEGCELICLPQAFDLFLKHLVGGLHTVYTKLKRLEITPVVCNVEQVRILRGLGAIQPGVNRCKLISRKDFETLYNDCTNASSRPGRPPKRTQSVTSPENSHIMPHSVPGLMSPGIIPPTGLTAAAAAAAAATNAAIAEAMKVKKIKLEAMSNYHASNNQHGADSENGDMNSSVGLELPFMMMPHPLIPVSLPPASVTMAMSQMNHLSTIANMAAAAQVQSPPSRVETSVIKERVPDSPSPAPSLEEGRRPGSHPSSHRSSSVSSSPARTESSSDRIPVHQNGLSMNQMLMGLSPNVLPGPKEGDLAGHDMGHESKRMHIEKDETPLSTPTARDSLDKLSLTGHGQPLPPGFPSPFLFPDGLSSIETLLTNIQGLLKVAIDNARAQEKQVQLEKTELKMDFLRERELRETLEKQLAMEQKNRAIVQKRLKKEKKAKRKLQEALEFETKRREQAEQTLKQAASTDSLRVLNDSLTPEIEADRSGGRTDAERTIQDGRLYLKTTVMY

SEQ ID NO: 233108 - DNA, 2127 bp, Artificial Sequence
  derived and/or modified sequence
atggctgtccctgccgctctgattcctccaacgcagctggtacctccacagcctcccatttccaccagcgcgtcctcaagtggcacgaccacatctacttctagtgccaccagctctccagcgcccagcatcggcccacctgcgagctccggccccacactgttccgacctgaaccaatcgcaagtgccgccgctgctgctgccacagttaccagcaccggcggcgggggaggtggtgggggggggggctcaggggggggcggaggtagctcgggcaatggcggcggcgggggcggaggaggcgggggctccaattgcaacccgaaccttgcagccgcttcaaacgggtctggaggcgggggcggaggaatctcggcagggggcggcgttgctagttccaccccaattaacgcatccaccggttcatcttcctcttcatcatcttcttcctctagttcatcttctagctccagcagttcttccagcagttcttcttgcggccccctgcctggaaaaccagtttactcaactcctagccctgttgaaaatacaccacagaacaacgaatgtaaaatggttgacctcagaggagcgaaggttgcaagcttcacggtcgaggggtgcgaattaatctgcctaccccaggcctttgacctattcctgaaacacctggtgggcgggctgcacaccgtttacacaaagctgaaaagattggagattaccccagtcgtctgcaatgtcgaacaggtgagaatcctacggggactcggcgccattcagcccggtgtgaataggtgcaagctgatctctcgcaaagatttcgaaacattatataacgattgtaccaacgcatccagtcgccccggacgccccccaaaaagaactcagagcgtgactagtccggaaaacagccatataatgcctcatagcgtgcctgggctcatgtctcctggtatcatcccacccacagggctgaccgcagcagcggccgcagccgctgccgccacaaatgccgccatagccgaggctatgaaagttaaaaagatcaagttagaggccatgtccaattaccacgcatctaacaatcaacacggcgccgattcggaaaatggtgacatgaacagttccgtgggccttgaactgccttttatgatgatgccccaccctctgatccctgtgtcattgccacccgcaagcgtgaccatggccatgtctcagatgaaccacctgtccacgatagcgaacatggcagccgcagcccaggtgcagtcccccccttcccgtgtggagacatccgtgataaaagaacgagttcctgattcccctagtcccgctcccagcctggaggaaggtagacgccctggatctcatcccagctcccatagatcttcctcagtcagctctagtcccgcaagaaccgaatcttctagcgataggatccctgtgcaccagaatggtctctcaatgaaccagatgttgatgggtctcagccctaatgtgctgcccgggcccaaagagggggaccttgccggtcacgacatgggtcatgaatctaagcggatgcatattgaaaaggatgaaacaccgttaagtacaccaacagctagagattctctggacaagctctcactgacaggccacggacagcccctgccaccgggcttcccttctccttttctgtttcccgacggactgtctagcatagaaaccctgctgaccaatattcagggactgctgaaagtggctattgataatgctcgcgcccaggaaaagcaggtccagctcgagaagactgaactcaaaatggacttcctccgtgaacgcgagctgagagagaccctcgagaaacaattggcgatggaacagaagaacagggcaatcgtccaaaaaaggttaaaaaaagagaaaaaggctaaacgaaagttgcaagaagccttggagttcgaaactaagcgcagggaacaggctgagcaaactctgaagcaggctgcctcaacagattcacttcgcgtgctgaacgactccttgactcccgagatcgaagcagatagatcaggcggccggaccgacgccgagaggacaatacaggacgggagattgtacctgaaaacaacggttatgtactag

SEQ ID NO: 233109 - DNA, 2127 bp, Artificial Sequence
  derived and/or modified sequence
atggctgtgcctgctgccctgatcccccccacccagctggtgcccccccagccccccatcagcaccagcgccagcagcagcggcaccaccaccagcaccagcagcgccaccagcagccctgcccccagcatcggccccccagccagcagcggccccaccctcttccggcctgagcccatcgccagcgctgctgctgctgctgccaccgtgaccagcactggaggcggcggcggcggcggcggcggcggcagcggcggcggcggcggcagcagtggaaatggaggcggcggcggcggcggcggcggcggcagcaactgcaaccccaacctggccgccgccagcaatggaagtggcggcggcggcggcggcatctctgctgggggcggcgtggccagcagcacccccatcaatgccagcacaggcagcagcagcagcagcagcagcagcagcagcagcagcagcagcagcagcagcagcagcagcagcagcagcagctgtggccccctgcccgggaagcctgtgtacagcacccccagccctgtggagaacaccccccagaacaatgaatgcaagatggtggacctgcggggggccaaggtggccagcttcaccgtggagggctgtgagctgatctgcctgccccaggcctttgacctcttcctgaagcacctggtgggcggcctgcacacagtgtacaccaagctgaagaggctggagatcacccctgtggtgtgcaatgtggagcaggtgcgcatcctgcggggcctgggcgccatccagcccggggtgaaccgctgcaagctgatcagcaggaaggactttgagaccctgtacaatgactgcaccaatgccagcagccggcccggccggccccccaagaggacccagagcgtgaccagccctgagaacagccacatcatgccccacagcgtgcccggcctgatgagccctggcatcatccccccaacaggcctgacagctgctgctgctgctgctgctgctgccaccaatgctgccatcgccgaggccatgaaggtgaagaagatcaagctggaggccatgagcaactaccacgccagcaacaaccagcacggggctgacagtgaaaatggagacatgaacagctctgtgggcctggagctgcccttcatgatgatgccccaccccctcatccctgtgtccctgcccccagcctctgtgaccatggccatgagccagatgaaccacctgagcaccatcgccaacatggctgctgctgcccaggtgcagagcccccccagccgggtggagaccagcgtcatcaaggagcgggtgcctgacagccccagccctgcccccagcctggaggagggccggcggcccggcagccaccccagcagccacaggagcagctctgtgagcagcagccctgccaggacagagagcagcagtgaccgcatccctgtgcaccagaatggcctgtccatgaaccagatgctgatgggcctgagccccaacgtgctgcccggccccaaggagggggacctggccggccatgacatgggccacgagagcaagaggatgcacatcgagaaggatgagacccccctgagcacccccacagcccgggacagcctggacaagctgagcctgactggacatggccagcccctgcccccaggcttccccagccccttcctgttcccagatggcctgagcagcattgagaccctgctgaccaacatccagggcctgctgaaggtggccatcgacaatgcccgggcccaggagaagcaggtgcagctggagaagacagagctgaagatggacttcctgcgggagcgggagctgcgggagaccctggagaagcagctggccatggagcagaagaacagagccatcgtgcagaagaggctgaagaaggagaagaaggccaagaggaagctgcaggaggccctggagtttgagaccaagaggcgggagcaggccgagcagaccctgaagcaggccgccagcacagacagcctgcgggtgctgaatgacagcctgaccccagaaattgaggccgacagaagtggcggccgcacagatgctgagaggaccatccaggacggccgcctgtacctgaagaccaccgtgatgtactag

SEQ ID NO: 233110 - DNA, 2127 bp, Artificial Sequence
  derived and/or modified sequence
atggccgtgcccgccgccctgatcccccccacccagctggtgcccccccaaccccccatttcaaccagcgcttcctcttccggtactacaactagtacaagttcagccacaagctcgcctgcacctagcatcggtcctccggcttcctctggacctactctcttccgccccgaaccaattgcctctgctgctgccgccgccgcaactgtcacaagcacaggggggggaggcggaggtggcgggggcggctcaggaggaggggggggcagctcgggcaatgggggaggggggggaggcggcggggggggaagcaattgtaatcccaatttagccgctgcttccaatggctctggtggggggggaggcggaatttctgctggcgggggcgtcgcatctagtacccccattaatgcatcaacagggagctcgtcctcatcaagctcctcctcttcatcgagcagcagcagtagcagttcttcttcctcaagcagctcatgcggtcctttgcccggaaagccagtatacagcaccccttcccccgtggagaacacgccgcagaataacgagtgtaaaatggtcgacctgaggggcgcgaaagtcgcatccttcaccgtcgagggctgtgaacttatatgtttgccccaggctttcgacctctttctaaagcacctggttggggggcttcacactgtctacactaagctcaaacggctggagatcacgcctgtcgtatgcaatgtcgaacaggtacgcattctcagagggttaggggccatacagccaggcgtcaatcggtgtaagctgattagcagaaaagattttgagaccctgtataatgattgcactaatgcatcctctagaccagggaggcctcctaagcggactcagtctgtcacttcccccgaaaatagccacatcatgccacatagtgttccggggctgatgtcccctgggatcatcccgcctaccggcctcacagccgcagcagccgcagccgcagccgctactaatgccgccattgcggaagctatgaaggtcaagaagattaagctcgaggccatgtctaattatcacgcctctaataatcagcacggggcagacagtgagaatggggacatgaactcttcagtcgggctcgagctgccctttatgatgatgccgcatccactgatccctgttagtctcccgcccgcctcagtaactatggctatgtcacagatgaatcacctttccaccattgctaatatggccgcagctgcacaggtgcagtcgccccccagccgtgttgaaactagtgttatcaaagaaagagtccccgactcgccctcccccgcaccctccttggaggagggtaggcgtccagggtcccatccgagctcacatcggtctagctccgtctcgtcatccccagcaaggacagagtcgagctcagatcgtatcccagtgcaccagaatggcctgtctatgaaccagatgctgatgggattatccccaaatgtccttcccggacccaaagaaggagatctcgccggacacgacatgggccacgagagtaaaagaatgcacatcgagaaagatgagacacctttaagtacaccaaccgccagagattcactggataagctgtccctgactggccacgggcagccgttaccacccggattccctagccccttcttattcccagatgggctgtcatctattgagactctccttacaaatatccagggcctcttgaaagtagcaatcgataacgcccgcgcccaggagaagcaggtgcagttggaaaaaacagagctcaaaatggactttttgcgcgaaagagagctgcgagagactcttgaaaaacagctggccatggagcagaagaatagagcgattgtgcaaaagcgactgaagaaggagaaaaaggctaagcgaaagctgcaggaggcactggagtttgaaaccaaaagacgagagcaggccgaacagaccctcaagcaggccgcatctacggactcactgagagtgctcaacgactctctaacgccagaaatagaggccgacagaagcggaggcaggacagacgcagagcgcacgattcaggatggacgtctttacctgaaaactacagtcatgtactag

SEQ ID NO: 233111 - DNA, 2127 bp, Artificial Sequence
  derived and/or modified sequence
atggccgtgcccgcagccctaattccaccaacccagctggttccaccccagcctcctatctccacctctgcaagctcaagtgggactactacctctacaagcagcgcgacttcctcgccagccccttccattggaccacctgcctcaagtgggccaactctgttccggcctgaacccattgcctccgcagctgccgctgccgctacagtgacatccactggtggtggtggcggaggcggtggcggagggtcagggggtgggggaggctccagtgggaatgggggtggtggcggtgggggtggagggggttctaactgtaacccaaaccttgctgccgcatcgaacgggagtggaggcggtggaggcggtatcagcgcaggcggaggggtggcgtcgtccacacctataaacgcctctaccgggagctcctcttcgtcatcctcttcgagcagctcctctagttcatcttcaagttcatcttcgagttcctcaagctgtggcccattaccgggaaaacccgtgtatagtactccctctcctgtggaaaacactccccaaaacaacgagtgcaagatggtggaccttagaggcgctaaagtggctagttttacagtggagggctgcgagttgatctgcttaccacaggcgttcgatctctttttaaagcacttggtgggcggtttacacactgtctacactaaactgaaacggctggaaatcactccagtggtgtgtaacgtggaacaggtccgcatacttcgtgggctgggggcaatccagcctggagtaaacagatgcaaactcattagcaggaaggactttgagaccctttacaatgactgtaccaacgcctccagtcgcccagggaggcctcctaagagaacccagtcagttacctccccggagaatagtcacattatgccccatagcgtcccaggattaatgtcccctgggataatccctccaacagggctgactgcagctgctgcagcggcagccgcagcgacaaacgcagccatcgccgaggcaatgaaagtcaaaaaaatcaaactggaagcaatgagtaattaccacgcaagcaataatcagcacggggctgactccgagaatggcgacatgaatagcagcgtgggcctagaactgccgttcatgatgatgccgcacccactgatccccgtgtctttgccacccgcatctgtgacgatggccatgtcccagatgaaccacctgtcaacaattgccaacatggcagccgctgcgcaggtccagtcaccccctagtcgcgtggaaacgagtgttattaaggaaagggtgccagatagcccttctcctgctccttcccttgaggaagggcgacggcctggatctcaccctagctcgcatcgttctagctcagtttcaagcagccctgctagaactgagtccagcagtgatcggatcccagttcaccagaatgggctcagcatgaatcagatgcttatgggtctttcgccaaatgtactgcctgggccaaaagagggcgatttggcaggacatgatatggggcatgagtccaaacggatgcatatcgagaaagatgaaacacccctctctacaccaacagctcgggacagcctggacaaactgagtctcaccggccacggccagcccctaccccctggatttccatctccatttctattcccagatggccttagttcaatcgaaactcttctgacaaacatccagggcttgctcaaggtggcaattgacaacgcacgcgctcaagagaagcaggtgcagctcgaaaagacagagcttaagatggatttcctgcgagagcgtgagctgcgggaaacactcgaaaagcagctggcaatggaacagaaaaaccgggctatagtgcagaagagactgaaaaaggaaaagaaagccaagcggaaacttcaggaggccctcgagttcgaaacaaagcgtcgcgaacaggccgaacagacactcaaacaggctgcctctacggatagcctccgtgtgttaaatgatagcctgacccctgaaatcgaggccgacagatctggtggacggacagacgcagagcgcactatccaagacggtaggctgtatcttaaaaccactgtgatgtactag

SEQ ID NO: 233112 - DNA, 5239 bp, Artificial Sequence
  derived and/or modified sequence
atctttgatcaatgtacttgccagggagagcccaagtccttcaaacctcctccttttcaccttcatccttaactttgtgctagagcgagacccacacaacaacagccgaccctccccgccccacccccacccccaaaccagccctcgatcccagcccccggagaggactcgcatttcgacttgcgggacacttttgtgcgttcctctccagagcgcctctcgtgctcgcccctcttgcgctcgctctttattaccttcacctccttttctcccccttctctccctttctccttctcgttctctcccggagttgttgttgcccccctcgctccttctccccccttttttccccttcccctcccgggggtgtgtggcaacttttcctctcgcttctcctccgtctgtttccccttatatgtgaccatggcagtgccggcggctttgatccctccgacccagctggtcccccctcaacccccaatctccacgtctgcttcctcctctggcaccaccacctccacctcttcggcgacttcgtctccggctccttccatcggacccccggcgtcctctgggccaactctgttccgcccggagcccatcgcttcggcggcggcggcggcggccacagtcacctctaccggcggcggcggcggcggcggcggcggcggcagcggaggcggcggcggcagcagcggcaacggaggcggcggtggcggcggcggcggtggcagcaactgcaaccccaacctggcggccgcgagcaacggcagcggcggcggcggcggcggcatcagcgctggcggcggcgtcgcttccagcacccccatcaacgccagcaccggcagcagcagcagcagcagtagcagcagcagcagcagcagcagtagtagcagcagcagcagtagcagcagcagctgcggccccctccccgggaaacccgtgtactcaaccccgtccccagtggaaaacacccctcagaataatgagtgcaaaatggtggatctgaggggggccaaagtggcttccttcacggtggagggctgcgagctgatctgcctgccccaggctttcgacctgttcctgaagcacttggtggggggcttgcatacggtctacaccaagctgaagcggctggagatcacgccggtggtgtgcaatgtggaacaagttcgcatcctgaggggactgggcgccatccagccaggagtgaaccgctgcaaactcatctccaggaaggacttcgagaccctctacaatgactgcaccaacgcaagttctagacctggaaggcctcctaagaggactcaaagtgtcacctccccagagaactctcacatcatgccgcattctgtccctggtctcatgtctcctgggataattccaccaacaggtctgacagcagccgctgcagcagctgctgctgctaccaatgcagctattgctgaagcaatgaaggtgaaaaaaatcaaattagaagccatgagcaactatcatgccagtaataaccaacatggagcagactctgaaaacggggacatgaattcaagtgtcggactggaacttccttttatgatgatgccccaccctctaattcctgtcagcctacctccagcatctgtcaccatggcaatgagccagatgaaccacctcagcaccattgcaaatatggcagcagcagcacaagttcagagtcccccatccagagttgagacatcagttattaaggagcgtgttcctgatagcccctcacctgccccctctctggaggaggggagaaggcctggcagtcacccatcatcacatcgcagcagcagcgtgtccagctcccctgctcggactgagagctcttctgacagaatcccggtccatcagaatgggttgtccatgaaccagatgctgatgggcttatcaccaaatgtacttcctgggcccaaagagggagatttggccggtcatgacatgggacatgagtcaaaaaggatgcatattgaaaaagatgagaccccgctttctacaccaaccgcaagagacagccttgacaaactctctctaactgggcatggacaaccactgcctccaggttttccatctccttttctgtttcctgatggactgtcttccatcgagactcttctgactaacatacaggggctgttgaaagttgccatagataatgccagagctcaagagaaacaggtccaactggaaaaaactgagctgaagatggattttttaagggaaagagaactaagggaaacacttgagaagcagttggctatggaacaaaagaatagagccatagttcaaaagaggctaaagaaggagaagaaggcaaagagaaaattgcaggaagcacttgagtttgagacgaaacggcgtgaacaagcagaacagacgctaaaacaggcagcttcaacagatagtctcagggtcttaaatgactctctgaccccagagatagaggctgaccgcagtggcggcagaacagatgctgaaaggacaatacaagatggaagactgtatttgaaaactactgtcatgtactgaatctttcctgttgaagaaatccatgttatagaaaagaactttgcagtcagacattcgtcatgggaaagttcagaaaaaaataaagtccttttaagggaacttcctgaattttgtgtattaatgttctttaaaagtttaagtattctacaaaaaaaaaaaaagttttctccattgattttcacctgtggttcataccagagacctgagaatgtttgtaaatgtacaagtatcaaagttcttacagttaattactgcaacttgctgctggacaattgtatacagagttaaaggcaggtctgaataagacctagctttgtttttttctaatggaatgaaccattttcctcttctgaaaattctgtatctgagcacatcaagagactcttgtagcagtggttacccagacttacagaattatgtcctccagaaaccagcaagaacacttggaatgaacgaatgaacttgtagggggcatagaggattcttgaaaaaaaaaaatgcaagagtgattttctgttacattcaatttcaaactctctaattgtgggttttctcctgaagaattttttttcacatactttccaaaagaccaacaaatggatgttgacaacaacccaatgaaataacattttgcatatctgaaaagaagcattgaatataagccaaaagctttcactgaaggtttttttttcttaaaaataaaaaaaaatatataagtgtaacatgttttcattccaaactggtagtggtatgtagaattaaagataataatgttgcttcttattcaaactgttggtcatatgtacagtatataaacataaaacacacaaggaaggtattatgtatgcagtagtatactagagtttaggaaaatgaaaattttagaaaatatgttttgtcaccctgttggtcagaaagatgtctttctggttttaacgcatgcaggcatgtaaatatttgtctggagtcacagtattaatgaatgagatcttaagcatctggtgacatcagaactctgtgtcagccacttttatttgtatattgaaccctagctagtgccccaagctgcactattgggaatggattgtggctgaacagcaaatcaaaacaccagaaatatttttatatgttaacgtcatattatgttaatgttgctgaaaacaaaacctaacaaaccttgatgtaccagtccaataccatgtagcgctgagtgataaagttaaaatgtgctgtgcttcccacccttgtcagagggaagggtggctatgtgttattttcactgtctttttgaaagttacagtatgtgttttcactttcgtgcagataactggaagtaaagcggcaaacagtgcttattacatgctaaagttaccttctctttgttttttgcatatctggaattacacctttaaagactgatatgaatcagtacggtcactatacattttatgatttttctgtcatcttaaaattgtatgatcgtaacattatttattaccacaaaacagcaaaatcttcaatgtctaagaaaactagcttaaaatgtttaaatatagttctgattgggtattaattacttgattaagaaaaaattaacattatagatactctggcattacgcttctataccttttaggtcttccttgcaatactggaacataattcttttgtgtagctcactattagccagctaagttcatctttttaataccataaaaaggttatatgtacagttcctattttagcttgcttacaaagggagcattatttttatttaaagtattgctagtaaatgatttgtagaaacttggttttctaagcatagttcttccataaccaccttttgttgtttgagcacaagggattcttttcctagttctatgtgtttgtttccctatatgcagtctttaaaggattacaacacttaaaattgaatggacttgtgtcaagctttttgcatcatacattttttgaaagatttttaaaaaagcctacaacttacatatgtagtagaatcagccattgctctgctcctggcatagagtcacctgtttgttatgtggattaaatagttttaaaatacatatttgaagacctttgagaatgctttagtgtttgatttgaaataaaaggaaattttagcaaggattaaagaaaaaagctatcagctgtatgttaagagagactcttactaacatgttgtaaatattacaattcatgaaatgttattgtaagtctgtaacttaattttttccctgttttagttatacaggttggtttggaaatttgtgttttggcataaacaagtaaaatgtgcccattttatggtttccatgcttttgtaatcctaaaaatattaatgtctagttgttctatattataaccacatttgcgctctatgcaagcccttggaacagaacatactcatcttcatgtaggacctatgaaaattgtctatttttatctatatatttaaagttttctaaaaatgataaaaggttattacgaattttgttgtacaaaatctgtacaaaaatctgtttttacatcataatgcaagaattggaaatttttctatggtagcctagttatttgagcctggtttcaatgtgagaaccacgtttactgttattgtatttaattttcttttccttttcaacaatctcctaataaaactgtctgaaatctc

SEQ ID NO: 233113 - DNA, 2127 bp, Artificial Sequence
  derived and/or modified sequence
atggccgtgcccgccgccctgatcccccccacccagctggtgcccccccagccccccatcagcaccagcgccagcagcagcggcaccaccaccagcaccagcagcgccaccagcagccccgcccccagcatcggcccccccgccagcagcggccccaccctgttcagacccgagcccatcgccagcgccgccgccgccgccgccaccgtgaccagcaccggcggcggcggcggcggcggcggcggcggcagcggcggcggcggcggcagcagcggcaacggcggcggcggcggcggcggcggcggcggcagcaactgcaaccccaacctggccgccgccagcaacggcagcggcggcggcggcggcggcatcagcgccggcggcggcgtggccagcagcacccccatcaacgccagcaccggcagcagcagcagcagcagcagcagcagcagcagcagcagcagcagcagcagcagcagcagcagcagcagcagctgcggccccctgcccggcaagcccgtgtacagcacccccagccccgtggagaacaccccccagaacaacgagtgcaagatggtggacctgagaggcgccaaggtggccagcttcaccgtggagggctgcgagctgatctgcctgccccaggccttcgacctgttcctgaagcacctggtgggcggcctgcacaccgtgtacaccaagctgaagagactggagatcacccccgtggtgtgcaacgtggagcaggtgagaatcctgagaggcctgggcgccatccagcccggcgtgaacagatgcaagctgatcagcagaaaggacttcgagaccctgtacaacgactgcaccaacgccagcagcagacccggcagaccccccaagagaacccagagcgtgaccagccccgagaacagccacatcatgccccacagcgtgcccggcctgatgagccccggcatcatcccccccaccggcctgaccgccgccgccgccgccgccgccgccgccaccaacgccgccatcgccgaggccatgaaggtgaagaagatcaagctggaggccatgagcaactaccacgccagcaacaaccagcacggcgccgacagcgagaacggcgacatgaacagcagcgtgggcctggagctgcccttcatgatgatgccccaccccctgatccccgtgagcctgccccccgccagcgtgaccatggccatgagccagatgaaccacctgagcaccatcgccaacatggccgccgccgcccaggtgcagagcccccccagcagagtggagaccagcgtgatcaaggagagagtgcccgacagccccagccccgcccccagcctggaggagggcagaagacccggcagccaccccagcagccacagaagcagcagcgtgagcagcagccccgccagaaccgagagcagcagcgacagaatccccgtgcaccagaacggcctgagcatgaaccagatgctgatgggcctgagccccaacgtgctgcccggccccaaggagggcgacctggccggccacgacatgggccacgagagcaagagaatgcacatcgagaaggacgagacccccctgagcacccccaccgccagagacagcctggacaagctgagcctgaccggccacggccagcccctgccccccggcttccccagccccttcctgttccccgacggcctgagcagcatcgagaccctgctgaccaacatccagggcctgctgaaggtggccatcgacaacgccagagcccaggagaagcaggtgcagctggagaagaccgagctgaagatggacttcctgagagagagagagctgagagagaccctggagaagcagctggccatggagcagaagaacagagccatcgtgcagaagagactgaagaaggagaagaaggccaagagaaagctgcaggaggccctggagttcgagaccaagagaagagagcaggccgagcagaccctgaagcaggccgccagcaccgacagcctgagagtgctgaacgacagcctgacccccgagatcgaggccgacagaagcggcggcagaaccgacgccgagagaaccatccaggacggcagactgtacctgaagaccaccgtgatgtactag

SEQ ID NO: 233114 - protein, 560 aa, Artificial Sequence
  derived and/or modified sequence
MAVPAALIPPTQLVPPQPPISTSASSSGTTTSTSSATSSPAPSIGPPASSGPTLFRPEPIASAAAAAATVTSTGGGGGGGGGGSGGGGGSSGNGGGGGGGGGGSNCNPNLAAASNGSGGGGGGISAGGGVASSTPINASTGSSSSSSSSSSSSSSSSSSSSSSSSCGPLPGKPVYSTPSPVENTPQNNECKMVDLRGAKVASFTVEGCELICLPQAFDLFLKHLVGGLHTVYTKLKRLEITPVVCNVEQVRILRGLGAIQPGVNRCKLISRKDFETLYNDCTNASSRPGRPPKRTQSVTSPENSHIMPHSVPGLMSPGIIPPTGLTAAAAAAAAATNAAIAEAMKVKKIKLEAMSNYHASNNQHGADSENGDMNSSVDETPLSTPTARDSLDKLSLTGHGQPLPPGFPSPFLFPDGLSSIETLLTNIQGLLKVAIDNARAQEKQVQLEKTELKMDFLRERELRETLEKQLAMEQKNRAIVQKRLKKEKKAKRKLQEALEFETKRREQAEQTLKQAASTDSLRVLNDSLTPEIEADRSGGRTDAERTIQDGRLYLKTTVMY

SEQ ID NO: 233115 - DNA, 1683 bp, Artificial Sequence
  derived and/or modified sequence
atggcagtgccagcagctctgatccctcctactcagctggtcccaccccagccacccatctccacaagtgctagtagttcagggacaactacttcgacctctagcgccacaagcagccccgcacctagtatagggccccccgcttcttccggtcctaccctgttccgccccgaaccgatcgcaagcgccgccgcagccgcagcaacagttacttccacaggagggggtggaggcggaggaggtggcggtagcggaggtggagggggctcatcagggaatggcggtggtgggggaggcggaggggggggatccaattgtaatcctaatttggctgcagcctccaacggttcagggggcggcgggggtggaatttcagctggaggcggagttgcaagttccacccctattaatgcctcgaccggtagcagcagcagctcttcaagtagttcatctagcagctcgagttcctcctctagctcgtcaagctcgagtagctgtgggcccctgccaggaaaaccagtttattccactccatctcccgtggaaaacacacctcagaataatgagtgtaaaatggtagacctccgcggcgccaaggtcgcttcatttaccgtggagggttgtgaactcatctgtcttcctcaagcgttcgacctctttctgaaacacttggtggggggattgcacacagtgtacactaagctcaaacgcctggagatcacccctgttgtctgtaacgttgagcaagtgcgtattctgcgcggattaggggctattcagccaggcgtcaataggtgcaagcttataagtagaaaggatttcgagaccctgtacaatgattgcactaatgcttcatcaaggccaggaagacctcccaaacgaacacagagcgttacatcgccggaaaacagccatatcatgcctcattcggtccctggcctcatgtcaccgggcatcatcccacccacaggcctgacagcggctgccgctgcagcagccgcagccactaatgcggcgattgctgaggccatgaaagtcaaaaagatcaagctggaagctatgtccaactaccacgcctctaacaatcaacatggcgctgactccgagaacggcgatatgaactctagcgtggacgagacgcctcttagtacacctacggcacgagattctctggataaactttcattaacaggccacggccagccgctgccacctgggttcccatcaccctttctgtttcctgatggattatcaagtatcgagactctgctcactaatatccaggggcttctgaaggtggccatcgacaatgcccgggcgcaagagaagcaagttcagcttgaaaaaacagagctcaaaatggactttctgcgggagcgggaattacgcgaaacccttgaaaagcagcttgcaatggagcagaagaatagagcgattgtccagaaacggctgaagaaggagaagaaggcaaagagaaaattacaggaagcactcgagtttgaaacgaagaggagggaacaggcagaacagacattgaaacaagctgcaagcaccgattccctcagggtgttaaatgatagcctaacaccggagatagaggccgaccgttcagggggaagaactgacgccgaacgcaccattcaggacggccgattgtacctgaagactaccgtgatgtactag

SEQ ID NO: 233116 - DNA, 1683 bp, Artificial Sequence
  derived and/or modified sequence
atggctgtgcctgctgccctgatcccccccacccagctggtgcccccccagccccccatcagcaccagcgccagcagcagcggcaccaccaccagcaccagcagcgccaccagcagccctgcccccagcatcggccccccagccagcagcggccccaccctcttccggcctgagcccatcgccagcgctgctgctgctgctgccaccgtgaccagcactggaggcggcggcggcggcggcggcggcggcagcggcggcggcggcggcagcagtggaaatggaggcggcggcggcggcggcggcggcggcagcaactgcaaccccaacctggccgccgccagcaatggaagtggcggcggcggcggcggcatctctgctgggggcggcgtggccagcagcacccccatcaatgccagcacaggcagcagcagcagcagcagcagcagcagcagcagcagcagcagcagcagcagcagcagcagcagcagcagcagctgtggccccctgcccgggaagcctgtgtacagcacccccagccctgtggagaacaccccccagaacaatgaatgcaagatggtggacctgcggggggccaaggtggccagcttcaccgtggagggctgtgagctgatctgcctgccccaggcctttgacctcttcctgaagcacctggtgggcggcctgcacacagtgtacaccaagctgaagaggctggagatcacccctgtggtgtgcaatgtggagcaggtgcgcatcctgcggggcctgggcgccatccagcccggggtgaaccgctgcaagctgatcagcaggaaggactttgagaccctgtacaatgactgcaccaatgccagcagccggcccggccggccccccaagaggacccagagcgtgaccagccctgagaacagccacatcatgccccacagcgtgcccggcctgatgagccctggcatcatccccccaacaggcctgacagctgctgctgctgctgctgctgctgccaccaatgctgccatcgccgaggccatgaaggtgaagaagatcaagctggaggccatgagcaactaccacgccagcaacaaccagcacggggctgacagtgaaaatggagacatgaacagctctgtggatgagacccccctgagcacccccacagcccgggacagcctggacaagctgagcctgactggacatggccagcccctgcccccaggcttccccagccccttcctgttcccagatggcctgagcagcattgagaccctgctgaccaacatccagggcctgctgaaggtggccatcgacaatgcccgggcccaggagaagcaggtgcagctggagaagacagagctgaagatggacttcctgcgggagcgggagctgcgggagaccctggagaagcagctggccatggagcagaagaacagagccatcgtgcagaagaggctgaagaaggagaagaaggccaagaggaagctgcaggaggccctggagtttgagaccaagaggcgggagcaggccgagcagaccctgaagcaggccgccagcacagacagcctgcgggtgctgaatgacagcctgaccccagaaattgaggccgacagaagtggcggccgcacagatgctgagaggaccatccaggacggccgcctgtacctgaagaccaccgtgatgtactag

SEQ ID NO: 233117 - DNA, 1683 bp, Artificial Sequence
  derived and/or modified sequence
atggccgtgcccgccgccctgatcccccccacccagctggtgcccccacagccccccatttccacttctgctagctcttccggaactacgaccagcacctccagtgcgacttcaagtcccgccccctccattggcccacccgctagctctgggccaacactgtttaggccggaacctattgcttcggctgccgctgctgccgctaccgtcacatccactggtggcggtgggggggggggcgggggcggcagcggagggggtggaggcagctcagggaatgggggcgggggggggggtggggggggaggatccaattgcaacccaaaccttgctgcggccagcaacggctcaggaggaggcggaggcggcatctctgcagggggcggggtggctagtagtacccctattaatgcatctacaggatcatcctcgagtagcagctcctcatcctcctccagctcgtcctcaagctcttccagctccagcagttcatcttgtggcccgctgcccggcaaaccagtgtatagtacaccaagtcccgttgaaaacaccccccagaataatgagtgcaaaatggtggatctgagaggagcaaaggtcgcttcattcacagtggaggggtgcgagctgatatgtctgcctcaagccttcgacctgtttttgaaacatctggtcggtggtctgcataccgtatacacaaagctgaaacggctcgaaataacccccgtggtgtgtaatgttgagcaagtgcgcatacttaggggactcggagccatccagcccggcgtgaatcggtgtaagttgatttcacgcaaggattttgagaccttatataatgattgcacaaacgcctcatcccggccgggtaggcctcccaaacgaactcagtcagttacatcaccagaaaatagtcacattatgccccattcagtacccggcttaatgagccctggtattatacccccgaccggtctgaccgctgctgcagctgcagctgctgctgcaaccaacgctgccattgccgaggctatgaaggtgaaaaagataaagctggaggcaatgtctaactatcacgctagcaataaccaacacggtgcagactcagagaacggggacatgaactccagcgttgatgagacgccgctcagtacccctacagccagggactccttagataagctgtccttgaccggccatggccagcccctgccgccgggattcccatccccctttctcttccctgacggtctctcgagtattgagacactcctgaccaatatccagggcttgctgaaggtcgccatcgataacgcacgtgcccaggaaaaacaagtccaactagagaagacagaactcaagatggatttccttagggagcgcgaattgagagaaactcttgaaaagcagctggctatggagcaaaaaaatagagccatcgttcagaaacgcctgaagaaagagaagaaggccaaacggaaactacaagaggcccttgagttcgaaacaaagcgacgagaacaagcagagcagactctgaagcaggccgcctctacagatagcctgcgggtacttaacgactctctgactcccgaaattgaggccgatagatctggcggaaggacggatgctgagcgaactatccaggacgggaggctttaccttaaaacaactgtgatgtactag

SEQ ID NO: 233118 - DNA, 1683 bp, Artificial Sequence
  derived and/or modified sequence
atggctgtgcccgcagctttaatacccccaactcaattggtgcctccccagcccccaatctccacctctgcgagctccagcgggacaacaacatcaacctcaagcgctacgagctcccccgctccttccattgggccacctgctagtagcggccctaccctttttaggccagaaccgatcgcctcagccgcagctgccgctgctacagtcaccagcaccggcggagggggtggcggaggcggaggaggatctggagggggtgggggaagcagcggaaacggaggaggtggaggtggagggggaggcggttcaaattgcaatccaaatctggccgctgcatccaacggtagtggcggtggaggtggtggcatctctgcaggcggaggagtggctagctctacaccaattaacgcttcaaccggaagttcaagttcgagctctagttcttcgagctccagcagttcctcttcaagcagcagtagctcttcttcctcttgtggaccccttcctggtaaacctgtttactccacgccaagccccgtcgaaaacaccccccaaaacaatgagtgtaagatggtggacttacgtggggctaaagtagcgtccttcacggtggagggctgtgaattgatctgtctgccacaagcctttgacctctttctgaagcatttagtcggcggacttcatacagtgtataccaagcttaagcgactcgaaatcaccccagtagtgtgcaacgtggagcaggtgcggattctgcggggattgggggctatccagcccggagtgaacagatgcaagctgatttcacgaaaagactttgagacactgtataacgattgtaccaacgccagctcccggccaggaagaccccctaaaaggacgcagtcagtgacaagcccagagaactcccacattatgccccactccgtccccggtcttatgagtcccggaattattccgcctaccggactaaccgctgcagctgctgccgctgcagctgcgactaacgctgccatagccgaagctatgaaggtaaagaagatcaaactggaggcaatgtccaattaccacgcctccaacaatcaacatggtgcggattcagaaaacggcgatatgaatagcagcgtcgacgagacccccctttcaacccccacagccagagacagccttgacaagttatcactcactggtcatgggcaacccttgccaccaggctttcccagcccattcttattccctgacggcctttcttctattgaaactttgctgaccaatatccagggtcttctgaaggtggcaatagacaatgcacgtgcccaagagaagcaggttcagttggaaaaaactgagctgaaaatggattttttacgggagcgggagctccgagagaccctggaaaaacagctggccatggagcagaagaatcgagccatagtacagaaaagactgaaaaaagaaaagaaggcgaagaggaagttgcaggaagcgctggagttcgagaccaagcggagagaacaggccgagcagactttaaagcaggctgccagcacagacagcctgcgggtgctcaatgatagcttaacccctgagattgaggcagacagatctggcggtagaacagacgccgaaaggaccattcaggacgggaggctctatctgaagactactgtgatgtattag

SEQ ID NO: 233119 - DNA, 4795 bp, Artificial Sequence
  derived and/or modified sequence
atctttgatcaatgtacttgccagggagagcccaagtccttcaaacctcctccttttcaccttcatccttaactttgtgctagagcgagacccacacaacaacagccgaccctccccgccccacccccacccccaaaccagccctcgatcccagcccccggagaggactcgcatttcgacttgcgggacacttttgtgcgttcctctccagagcgcctctcgtgctcgcccctcttgcgctcgctctttattaccttcacctccttttctcccccttctctccctttctccttctcgttctctcccggagttgttgttgcccccctcgctccttctccccccttttttccccttcccctcccgggggtgtgtggcaacttttcctctcgcttctcctccgtctgtttccccttatatgtgaccatggcagtgccggcggctttgatccctccgacccagctggtcccccctcaacccccaatctccacgtctgcttcctcctctggcaccaccacctccacctcttcggcgacttcgtctccggctccttccatcggacccccggcgtcctctgggccaactctgttccgcccggagcccatcgcttcggcggcggcggcggcggccacagtcacctctaccggcggcggcggcggcggcggcggcggcggcagcggaggcggcggcggcagcagcggcaacggaggcggcggtggcggcggcggcggtggcagcaactgcaaccccaacctggcggccgcgagcaacggcagcggcggcggcggcggcggcatcagcgctggcggcggcgtcgcttccagcacccccatcaacgccagcaccggcagcagcagcagcagcagtagcagcagcagcagcagcagcagtagtagcagcagcagcagtagcagcagcagctgcggccccctccccgggaaacccgtgtactcaaccccgtccccagtggaaaacacccctcagaataatgagtgcaaaatggtggatctgaggggggccaaagtggcttccttcacggtggagggctgcgagctgatctgcctgccccaggctttcgacctgttcctgaagcacttggtggggggcttgcatacggtctacaccaagctgaagcggctggagatcacgccggtggtgtgcaatgtggaacaagttcgcatcctgaggggactgggcgccatccagccaggagtgaaccgctgcaaactcatctccaggaaggacttcgagaccctctacaatgactgcaccaacgcaagttctagacctggaaggcctcctaagaggactcaaagtgtcacctccccagagaactctcacatcatgccgcattctgtccctggtctcatgtctcctgggataattccaccaacaggtctgacagcagccgctgcagcagctgctgctgctaccaatgcagctattgctgaagcaatgaaggtgaaaaaaatcaaattagaagccatgagcaactatcatgccagtaataaccaacatggagcagactctgaaaacggggacatgaattcaagtgtcgatgagaccccgctttctacaccaaccgcaagagacagccttgacaaactctctctaactgggcatggacaaccactgcctccaggttttccatctccttttctgtttcctgatggactgtcttccatcgagactcttctgactaacatacaggggctgttgaaagttgccatagataatgccagagctcaagagaaacaggtccaactggaaaaaactgagctgaagatggattttttaagggaaagagaactaagggaaacacttgagaagcagttggctatggaacaaaagaatagagccatagttcaaaagaggctaaagaaggagaagaaggcaaagagaaaattgcaggaagcacttgagtttgagacgaaacggcgtgaacaagcagaacagacgctaaaacaggcagcttcaacagatagtctcagggtcttaaatgactctctgaccccagagatagaggctgaccgcagtggcggcagaacagatgctgaaaggacaatacaagatggaagactgtatttgaaaactactgtcatgtactgaatctttcctgttgaagaaatccatgttatagaaaagaactttgcagtcagacattcgtcatgggaaagttcagaaaaaaataaagtccttttaagggaacttcctgaattttgtgtattaatgttctttaaaagtttaagtattctacaaaaaaaaaaaaagttttctccattgattttcacctgtggttcataccagagacctgagaatgtttgtaaatgtacaagtatcaaagttcttacagttaattactgcaacttgctgctggacaattgtatacagagttaaaggcaggtctgaataagacctagctttgtttttttctaatggaatgaaccattttcctcttctgaaaattctgtatctgagcacatcaagagactcttgtagcagtggttacccagacttacagaattatgtcctccagaaaccagcaagaacacttggaatgaacgaatgaacttgtagggggcatagaggattcttgaaaaaaaaaaatgcaagagtgattttctgttacattcaatttcaaactctctaattgtgggttttctcctgaagaattttttttcacatactttccaaaagaccaacaaatggatgttgacaacaacccaatgaaataacattttgcatatctgaaaagaagcattgaatataagccaaaagctttcactgaaggtttttttttcttaaaaataaaaaaaaatatataagtgtaacatgttttcattccaaactggtagtggtatgtagaattaaagataataatgttgcttcttattcaaactgttggtcatatgtacagtatataaacataaaacacacaaggaaggtattatgtatgcagtagtatactagagtttaggaaaatgaaaattttagaaaatatgttttgtcaccctgttggtcagaaagatgtctttctggttttaacgcatgcaggcatgtaaatatttgtctggagtcacagtattaatgaatgagatcttaagcatctggtgacatcagaactctgtgtcagccacttttatttgtatattgaaccctagctagtgccccaagctgcactattgggaatggattgtggctgaacagcaaatcaaaacaccagaaatatttttatatgttaacgtcatattatgttaatgttgctgaaaacaaaacctaacaaaccttgatgtaccagtccaataccatgtagcgctgagtgataaagttaaaatgtgctgtgcttcccacccttgtcagagggaagggtggctatgtgttattttcactgtctttttgaaagttacagtatgtgttttcactttcgtgcagataactggaagtaaagcggcaaacagtgcttattacatgctaaagttaccttctctttgttttttgcatatctggaattacacctttaaagactgatatgaatcagtacggtcactatacattttatgatttttctgtcatcttaaaattgtatgatcgtaacattatttattaccacaaaacagcaaaatcttcaatgtctaagaaaactagcttaaaatgtttaaatatagttctgattgggtattaattacttgattaagaaaaaattaacattatagatactctggcattacgcttctataccttttaggtcttccttgcaatactggaacataattcttttgtgtagctcactattagccagctaagttcatctttttaataccataaaaaggttatatgtacagttcctattttagcttgcttacaaagggagcattatttttatttaaagtattgctagtaaatgatttgtagaaacttggttttctaagcatagttcttccataaccaccttttgttgtttgagcacaagggattcttttcctagttctatgtgtttgtttccctatatgcagtctttaaaggattacaacacttaaaattgaatggacttgtgtcaagctttttgcatcatacattttttgaaagatttttaaaaaagcctacaacttacatatgtagtagaatcagccattgctctgctcctggcatagagtcacctgtttgttatgtggattaaatagttttaaaatacatatttgaagacctttgagaatgctttagtgtttgatttgaaataaaaggaaattttagcaaggattaaagaaaaaagctatcagctgtatgttaagagagactcttactaacatgttgtaaatattacaattcatgaaatgttattgtaagtctgtaacttaattttttccctgttttagttatacaggttggtttggaaatttgtgttttggcataaacaagtaaaatgtgcccattttatggtttccatgcttttgtaatcctaaaaatattaatgtctagttgttctatattataaccacatttgcgctctatgcaagcccttggaacagaacatactcatcttcatgtaggacctatgaaaattgtctatttttatctatatatttaaagttttctaaaaatgataaaaggttattacgaattttgttgtacaaaatctgtacaaaaatctgtttttacatcataatgcaagaattggaaatttttctatggtagcctagttatttgagcctggtttcaatgtgagaaccacgtttactgttattgtatttaattttcttttccttttcaacaatctcctaataaaactgtctgaaatctc

SEQ ID NO: 233120 - DNA, 1683 bp, Artificial Sequence
  derived and/or modified sequence
atggccgtgcccgccgccctgatcccccccacccagctggtgcccccccagccccccatcagcaccagcgccagcagcagcggcaccaccaccagcaccagcagcgccaccagcagccccgcccccagcatcggcccccccgccagcagcggccccaccctgttcagacccgagcccatcgccagcgccgccgccgccgccgccaccgtgaccagcaccggcggcggcggcggcggcggcggcggcggcagcggcggcggcggcggcagcagcggcaacggcggcggcggcggcggcggcggcggcggcagcaactgcaaccccaacctggccgccgccagcaacggcagcggcggcggcggcggcggcatcagcgccggcggcggcgtggccagcagcacccccatcaacgccagcaccggcagcagcagcagcagcagcagcagcagcagcagcagcagcagcagcagcagcagcagcagcagcagcagcagctgcggccccctgcccggcaagcccgtgtacagcacccccagccccgtggagaacaccccccagaacaacgagtgcaagatggtggacctgagaggcgccaaggtggccagcttcaccgtggagggctgcgagctgatctgcctgccccaggccttcgacctgttcctgaagcacctggtgggcggcctgcacaccgtgtacaccaagctgaagagactggagatcacccccgtggtgtgcaacgtggagcaggtgagaatcctgagaggcctgggcgccatccagcccggcgtgaacagatgcaagctgatcagcagaaaggacttcgagaccctgtacaacgactgcaccaacgccagcagcagacccggcagaccccccaagagaacccagagcgtgaccagccccgagaacagccacatcatgccccacagcgtgcccggcctgatgagccccggcatcatcccccccaccggcctgaccgccgccgccgccgccgccgccgccgccaccaacgccgccatcgccgaggccatgaaggtgaagaagatcaagctggaggccatgagcaactaccacgccagcaacaaccagcacggcgccgacagcgagaacggcgacatgaacagcagcgtggacgagacccccctgagcacccccaccgccagagacagcctggacaagctgagcctgaccggccacggccagcccctgccccccggcttccccagccccttcctgttccccgacggcctgagcagcatcgagaccctgctgaccaacatccagggcctgctgaaggtggccatcgacaacgccagagcccaggagaagcaggtgcagctggagaagaccgagctgaagatggacttcctgagagagagagagctgagagagaccctggagaagcagctggccatggagcagaagaacagagccatcgtgcagaagagactgaagaaggagaagaaggccaagagaaagctgcaggaggccctggagttcgagaccaagagaagagagcaggccgagcagaccctgaagcaggccgccagcaccgacagcctgagagtgctgaacgacagcctgacccccgagatcgaggccgacagaagcggcggcagaaccgacgccgagagaaccatccaggacggcagactgtacctgaagaccaccgtgatgtactag

SEQ ID NO: 233121 - protein, 504 aa, Artificial Sequence
  derived and/or modified sequence
MEPAGPAPGRLGPLLCLLLAASCAWSGVAGEEELQVIQPDKSVLVAAGETATLRCTATSLIPVGPIQWFRGAGPGRELIYNQKEGHFPRVTTVSDLTKRNNMDFSIRIGNITPADAGTYYCVKFRKGSPDDVEFKSGAGTELSVRAKPSAPVVSGPAARATPQHTVSFTCESHGFSPRDITLKWFKNGNELSDFQTNVDPVGESVSYSIHSTAKVVLTREDVHSQVICEVAHVTLQGDPLRGTANLSETIRVPPTLEVTQQPVRAENQVNVTCQVRKFYPQRLQLTWLENGNVSRTETASTVTENKDGTYNWMSWLLVNVSAHRDDVKLTCQVEHDGQPAVSKSHDLKVSAHPKEQGSNTAAENTGSNERNIYIVVGVVCTLLVALLMAALYLVRIRQKKAQGSTSSTRLHEPEKNAREITQDTNDITYADLNLPKGKKPAPQAAEPNNHTEYASIQTSPQPASEDTLTYADLDMVHLNRTPKQPAPKPEPSFSEYASVQVPRK

SEQ ID NO: 233122 - DNA, 1515 bp, Artificial Sequence
  derived and/or modified sequence
atggagcccgccggccccgcccccggcagactgggccccctgctgtgcctgctgctggccgccagctgcgcctggagcggcgtggccggcgaggaggagctgcaggtgatccagcccgacaagagcgtgctggtggccgccggcgagaccgccaccctgagatgcaccgccaccagcctgatccccgtgggccccatccagtggttcagaggcgccggccccggcagagagctgatctacaaccagaaggagggccacttccccagagtgaccaccgtgagcgacctgaccaagagaaacaacatggacttcagcatcagaatcggcaacatcacccccgccgacgccggcacctactactgcgtgaagttcagaaagggcagccccgacgacgtggagttcaagagcggcgccggcaccgagctgagcgtgagagccaagcccagcgcccccgtggtgagcggccccgccgccagagccaccccccagcacaccgtgagcttcacctgcgagagccacggcttcagccccagagacatcaccctgaagtggttcaagaacggcaacgagctgagcgacttccagaccaacgtggaccccgtgggcgagagcgtgagctacagcatccacagcaccgccaaggtggtgctgaccagagaggacgtgcacagccaggtgatctgcgaggtggcccacgtgaccctgcagggcgaccccctgagaggcaccgccaacctgagcgagaccatcagagtgccccccaccctggaggtgacccagcagcccgtgagagccgagaaccaggtgaacgtgacctgccaggtgagaaagttctacccccagagactgcagctgacctggctggagaacggcaacgtgagcagaaccgagaccgccagcaccgtgaccgagaacaaggacggcacctacaactggatgagctggctgctggtgaacgtgagcgcccacagagacgacgtgaagctgacctgccaggtggagcacgacggccagcccgccgtgagcaagagccacgacctgaaggtgagcgcccaccccaaggagcagggcagcaacaccgccgccgagaacaccggcagcaacgagagaaacatctacatcgtggtgggcgtggtgtgcaccctgctggtggccctgctgatggccgccctgtacctggtgagaatcagacagaagaaggcccagggcagcaccagcagcaccagactgcacgagcccgagaagaacgccagagagatcacccaggacaccaacgacatcacctacgccgacctgaacctgcccaagggcaagaagcccgccccccaggccgccgagcccaacaaccacaccgagtacgccagcatccagaccagcccccagcccgccagcgaggacaccctgacctacgccgacctggacatggtgcacctgaacagaacccccaagcagcccgcccccaagcccgagcccagcttcagcgagtacgccagcgtgcaggtgcccagaaagtag

SEQ ID NO: 233123 - DNA, 1515 bp, Artificial Sequence
  derived and/or modified sequence
atggagcctgccggtccggctcccggtcggcttggtccgctgctctgtttgcttctggcagcctcctgtgcctggtccggggtggccggcgaagaggaactccaggtgatccagcccgacaaatctgtcctggtcgccgcgggggagacagctactctccgctgtacagccaccagcctaattcccgtcggtcccattcagtggtttagaggcgcaggcccaggcagggagctcatatacaaccagaaggaaggacacttcccaagggttactaccgtgtcagacctcacaaaaaggaataatatggacttctccatccgaatcgggaatattacgcccgccgacgccggtacctactactgtgtcaaatttcggaaaggatctcccgacgatgtagagtttaagtcaggagcaggaactgagctgagcgtgcgtgcaaaaccgagcgcccccgtggtctccgggccggccgcccgagccaccccccaacacaccgtgagcttcacatgcgagagtcacggctttagtccccgcgatatcacgctgaaatggtttaagaatggcaatgaattgtctgactttcagaccaatgtggacccggtgggagaaagcgtttcttactccatacatagtactgcaaaagtagtgctgactagagaggatgtgcactcgcaggtgatctgtgaggtggcccacgtcaccttgcagggtgaccctttgagaggcaccgccaatttaagtgagacaatacgggtaccccctacattggaagtcactcagcagcccgtccgtgcggagaatcaggtcaatgtgacgtgtcaggtcagaaaattttacccacagcgactccagctgacgtggctggaaaacggcaacgtgtccaggaccgaaactgcttctacggtgaccgaaaataaagatggaacttacaattggatgagctggttacttgtcaacgtgagcgcccacagagatgatgttaagcttacctgccaggtggagcatgatggacagccagctgttagtaaatcccatgacctaaaagtctcagcccaccccaaagagcaagggtctaacactgcagccgagaacaccgggagcaatgaacgcaatatctatatcgtcgtgggggtcgtatgtaccctccttgtggctctattaatggccgccctgtatctggtgcgcatccgccagaagaaggcccaaggctcaacctcctcaacaagattgcacgagcccgagaagaacgcccgggaaatcacccaggataccaacgatattacctatgccgatctgaacctacctaaaggcaagaaacctgcccctcaggccgccgagccaaacaaccatacagagtacgcttcaattcagacgtcaccacaaccagcttctgaagacaccttgacatatgccgacttggatatggtacacctaaataggacaccgaagcagccagctcctaaacccgagcctagcttttctgaatatgcgtcggttcaggtaccacgcaaatag

SEQ ID NO: 233124 - DNA, 1515 bp, Artificial Sequence
  derived and/or modified sequence
atggaacctgctggaccggcaccggggcgcctcggacccctgttatgcctgctccttgccgcttcttgcgcctggagtggcgtggctggagaggaagaactccaggtgattcagccagacaaaagcgtgctggtggctgccggcgaaactgctaccctcagatgcactgcgacttcccttatacctgtcggtcctattcagtggttcaggggggccggccccggtagggaactgatctacaatcagaaagagggtcacttccctcgggttacaaccgtttctgatctcacgaagagaaacaacatggattttagtatccgcattggaaacattacgccggcggacgcaggtacatattattgcgtgaagttcagaaagggcagtccagatgatgtggaattcaaaagcggcgccggtacagaactgtcagtgcgagccaaaccgagtgctccagtcgtcagcgggcctgctgccagagccactccgcaacatactgtcagtttcacctgtgagtcacatggtttttccccccgggacataactctcaagtggttcaagaatggaaacgaattgtccgatttccagacaaatgtcgatcccgtgggtgagagcgtctcctacagcatccactccacagcaaaagtggtcctcaccagagaggatgttcacagccaagtgatctgtgaggtagctcacgtcaccttgcagggtgatcccctccggggaactgcaaatctttcagaaactatccgagtgccaccaaccttggaggtcacacagcagcctgtgagagccgaaaaccaggttaacgtaacatgtcaggtgcgcaagttttatccgcagcggctgcagttaacttggctggaaaatgggaacgtgtcacggaccgagacggcctctacggttacagagaataaggatgggacttataattggatgtcttggttgctcgtaaatgtgtctgcccaccgggacgacgtgaagttaacttgtcaggtcgagcacgacggacagcctgccgtttcaaagagccacgatcttaaagtgagcgctcaccctaaggagcagggctccaatactgctgcagaaaacaccggttcaaacgaaagaaacatctacatagtggtgggtgttgtctgtactcttctcgtcgctctcttaatggcggctctgtatttggtcagaatcagacagaagaaagctcagggcagcacatcttctacccggctgcacgagccggagaaaaacgcccgagaaataacgcaggacacgaatgatattacatacgccgatctgaatctgccaaagggtaagaaacccgcccctcaagccgccgagccaaacaaccatacggagtacgcctccatccagactagtccccaaccggcctccgaggatactttaacatacgccgatctcgatatggtgcatctcaataggacacctaaacaaccagctccgaaaccagagccttctttttcggaatacgcctctgttcaggtgcccagaaagtag

SEQ ID NO: 233125 - DNA, 1515 bp, Artificial Sequence
  derived and/or modified sequence
atggagcccgccggccctgcccctggccgcctgggccccctgctgtgcctgctgctggccgccagctgtgcctggagcggcgtggccggggaggaggagctgcaggtgatccagcctgacaagtctgtgctggtggccgccggggagacagccaccctgcgctgcacagccaccagcctcatccctgtgggccccatccagtggttccggggggccggccctggccgggagctgatctacaaccagaaggagggccacttcccccgggtgaccaccgtgtctgacctgaccaagaggaacaacatggacttcagcatccgcatcggcaacatcaccccagcagatgctggcacctactactgtgtgaagttcaggaagggcagcccagatgatgtggagttcaagagcggggccggcacagagctgtctgtgcgggccaagcccagcgcccctgtggtgtctggccctgctgcccgggccaccccccagcacacagtgtccttcacctgtgagagccacggcttcagcccccgggacatcaccctgaagtggttcaagaatggaaatgagctgagtgacttccagaccaacgtggaccctgtgggggagagcgtgtcctacagcatccacagcacagccaaggtggtgctgacccgggaggatgtgcacagccaggtgatctgtgaggtggcccacgtgaccctgcagggcgaccccctgcggggcacagccaacctgtctgagaccatccgggtgccccccaccctggaggtgacccagcagcctgtgcgggcagagaaccaggtgaatgtgacctgccaggtgaggaagttctacccccagaggctgcagctgacctggctggagaatggaaatgtgtccaggacagaaacagccagcacagtgacagagaacaaggatggcacctacaactggatgtcctggctgctggtgaatgtgtctgcccacagagatgatgtgaagctgacctgccaggtggagcatgatggccagcctgctgtgtccaagagccatgacctgaaggtgtctgcccaccccaaggagcagggcagcaacacagctgctgaaaatacaggcagcaatgaaagaaacatctacatcgtggtgggcgtggtgtgcaccctgctggtggccctgctgatggccgccctgtacctggtgcgcatccggcagaagaaggcccagggcagcaccagcagcacccggctgcacgagcctgagaagaatgcccgggagatcacccaggacaccaatgacatcacctacgccgacctgaacctgcccaagggcaagaagccagccccccaggccgctgagcccaacaaccacacagaatatgccagcatccagaccagcccccagcctgccagcgaggacaccctgacctatgctgacctggacatggtgcacctgaacagaacacccaagcagcctgcccccaagccagagcccagcttctctgaatatgcctctgtgcaggtgcccaggaagtag

SEQ ID NO: 233126 - DNA, 1515 bp, Artificial Sequence
  derived and/or modified sequence
atggagcccgccggccccgcccccggccggctgggccccctgctgtgtctcctgctcgccgcatcatgtgcttggagcggcgtagcaggcgaggaggagctgcaggtgatccagccagataagtctgtactcgtggcagccggtgagactgctactctacggtgtacagcaacatcacttatcccagttggtcccatacagtggttccggggtgcagggcccggccgcgagttgatttataatcaaaaggagggccatttccctcgcgtcacaacagtcagtgacctgaccaagagaaataacatggacttctccatccgaatcggtaatatcacccctgccgacgccggcacttactattgcgtgaagttcagaaaaggcagccccgatgacgtggagtttaagagtggcgccggcactgagctgagcgtccgggcaaaaccttccgcccctgtggttagcggacccgccgctagagctactccacagcatacagtgtctttcacctgtgagtcacacggcttttccccacgggatatcacactgaagtggtttaaaaacggcaatgaactctctgactttcagactaatgtggaccccgtgggagagagtgtgtcatactccatccatagcacagcgaaggtcgtattgactagggaagatgtgcattcccaggtaatttgcgaggtggcgcacgtgacgctccagggagaccctctgcgagggactgccaatctgtcagagactattcgcgtccccccaacccttgaagtgacccagcagcctgtccgcgccgaaaaccaggtgaacgtaacttgccaggtgcgaaaattctatccacagcgtctacagttgacctggcttgagaacggtaatgtgagtaggacggagacggcatctacagtgactgagaacaaggatggaacctataattggatgtcctggctcttggttaacgtgtctgctcaccgggatgatgtgaaactgacttgtcaggtagagcacgacggccaacccgccgtctctaaatcccacgatcttaaggtcagcgcacacccgaaggagcagggcagcaacactgctgcggaaaacactggctccaacgaaaggaacatttatattgtcgttggtgtggtgtgcacactgctggtagcccttcttatggcagcactgtatctggtcagaatccggcagaagaaggcgcagggcagcactagtagcacgcgactgcatgagccagagaaaaacgccagggagattacgcaggataccaatgacatcacttatgccgacctgaatctcccgaagggaaagaagcccgctccacaggccgcagaacctaataatcatacggaatacgccagcatacagacgtctcctcagcctgcctccgaggacaccctgacatatgcagacctagatatggtgcacctaaacagaacgcctaagcaaccagcccctaagccagagccttctttcagcgagtacgcttctgtgcaagtaccccggaaatag

SEQ ID NO: 233127 - DNA, 1515 bp, Artificial Sequence
  derived and/or modified sequence
atggagcccgccggccccgcccccggccggctgggccccctgctgtgtcttctcctggctgcctcctgtgcgtggtcaggagtggccggtgaggaagaactgcaggtgatccagccagataaatccgttctcgtcgctgctggcgaaactgcaacgttacgctgcacggcaaccagtctgatcccggtggggcctattcagtggttcagaggcgcaggtcccggcagagagctgatctacaatcagaaagaggggcactttccgcgagttacaaccgtgagtgacctgacaaagcgtaacaatatggactttagcatcaggatcggcaacattacacccgccgatgccggaacttactactgtgtgaaattccgcaaggggagcccagacgatgtggagttcaagtcaggggctggaaccgagctctccgtacgcgcgaaaccttctgcaccagttgtgtcagggcctgcagctcgagccacaccacagcatactgtgtcctttacatgcgaatcacacggattcagcccaagagacatcactctaaaatggttcaaaaatggaaatgaactgagcgatttccagacaaatgtcgatcccgttggagagagcgtgtcttactctattcatagtaccgctaaggtggtgctgacacgcgaagacgtgcattcacaggtgatatgtgaagtcgcacacgtcacccttcaaggcgatccgctccggggaaccgctaacctgtcagagactatcagggtaccgcccacccttgaagtgacgcagcaaccggtgagggccgaaaaccaagtcaatgtcacttgccaggtgcggaaattctatccacagcgtctacaactcacatggttggagaatggcaatgtttctcgcacggagacagccagcaccgtgacggagaacaaggacgggacctacaattggatgtcatggcttctcgtgaatgtgtctgcacatagagacgacgttaaactgacatgtcaggtggaacatgatggccagcctgctgtgtcgaagtcacatgaccttaaggtcagcgcccatcctaaggagcagggcagtaacaccgcagccgagaacaccggatccaacgagagaaatatctatatcgtcgtcggagttgtgtgtaccttattagtggccttgttaatggccgccctttatctggtgcgaattcggcaaaaaaaggcacaggggagcactagctccacgagattgcacgagccggagaagaatgcgagagagattactcaggacaccaacgatataacatacgcagatctcaatttgccgaagggaaagaagcctgcaccccaggccgccgagccgaacaaccatacagagtatgcttcaatccagacgtctcctcagccggccagcgaggacaccctcacatatgctgacttggatatggtgcacctcaatcggacacccaagcagccagcgcctaagccggaaccgagtttttcagagtacgccagcgtccaggtaccacgaaaatag

SEQ ID NO: 233128 - DNA, 1515 bp, Artificial Sequence
  derived and/or modified sequence
atggagcccgctggacccgctcctggcaggttaggtccgctgttatgccttctcctggccgcttcctgcgcgtggagcggagtcgccggtgaagaggaactgcaggtgatccaacctgataagagtgtgctggtggctgccggagagacagccacgcttagatgcaccgcgacctccctcattcctgtgggcccaatccagtggtttcgaggcgctggacctggaagagaactgatttacaaccagaaagagggccacttcccccgagtgaccaccgtgtcagatttgactaagcgaaataatatggacttctctattcgtattggaaatatcacaccagcagatgcagggacctattattgtgtaaagtttaggaagggctcccctgacgatgtagagttcaaatctggtgccggtacggaactctctgttagagccaaaccgtccgcccctgtggtctccggacctgctgcacgagccacgccgcagcacacggtatctttcacgtgcgagagccatggcttctcacccagagacatcacgctcaaatggtttaaaaatggtaacgaactcagcgatttccaaacaaatgttgaccccgtaggcgaatccgtgagctactcgatccattccacggcaaaagtcgtgctcacacgagaagacgttcatagccaggtaatctgcgaagtagcacatgtgacgctccaaggcgatcccctgagaggcacagccaaccttagcgagacaatccgtgtgcctcctacccttgaggtcacccaacagcctgttcgagctgagaaccaggtgaatgtcacttgtcaagtgcggaaattctaccctcagcgtctacagctgacgtggctcgagaatgggaacgtctccaggaccgagaccgcctcgacagtgacagagaataaagacggcacatacaattggatgtcttggctcttagtgaacgtgagcgctcaccgagacgacgtcaaactgacgtgtcaggttgagcacgatggccaaccagccgtgtcaaagagccacgacctgaaagtcagcgcccaccctaaagaacagggtagcaacaccgctgcggaaaacaccgggtccaatgaaagaaacatctacatagtggtgggtgttgtttgtaccttgctggtggcattgcttatggccgcactgtatctcgtacggatccgccagaaaaaagcacagggctcaaccagtagcactcgactgcacgagccagagaaaaacgcaagagagattacccaggatactaatgacatcacttacgccgacttgaaccttcctaaaggaaagaagcctgctccccaggcagcggaaccaaacaaccacacagagtatgcaagcatccagacgagtccccaacccgcatctgaggatactcttacctacgccgaccttgatatggttcatctcaatcggactccgaaacagcctgccccaaaaccagagccgagcttttctgaatacgccagcgtccaggttccgcgaaaatag

SEQ ID NO: 233129 - DNA, 1515 bp, Artificial Sequence
  derived and/or modified sequence
atggagccagccggacctgcccctggacgacttggcccactgttgtgtcttctcctggctgcttcctgtgcgtggagcggagttgccggtgaggaagagctgcaggtcattcaacctgacaaatcggtcttggtggccgctggcgaaacggcaacactgaggtgcaccgccaccagcctgattccagtcggacccattcaatggttcaggggcgcaggacccggtagagaactgatttataaccagaaagagggtcacttcccccgagtgactacagtctccgatctcaccaaacggaacaacatggacttctccatacgtattggcaacatcacaccagccgatgcaggcacatattattgcgtgaagtttcgcaagggctccccagatgatgtagaattcaaatcaggagccggtactgagttatccgtccgtgcgaagccatctgcccctgtggtttcaggcccagctgccagggctacgccacaacacaccgtcagctttacttgcgagtcccatgggttttctcctcgggacatcactctgaaatggttcaagaacggtaatgagttaagtgattttcagacgaacgtggacccagttggcgagagcgtctcctacagcatacattcaaccgccaaggtagtccttacacgcgaggatgtccatagccaggtcatatgtgaggtagcccatgtgaccctgcagggtgatccactccggggaacagccaatctgtcagagacaatccgtgtcccacctacattggaggtgacacagcagcctgttagggctgagaatcaggttaacgtcacgtgtcaggtgcgcaagttttatccccaaagactgcagcttacatggctggagaatggtaatgtttcccgcaccgagacagcaagtacagtgaccgagaacaaagatgggacctacaactggatgtcctggctgttggtcaatgtgtcggcacacagagacgacgtcaagctgacctgccaagttgagcatgacggacaaccagccgtgtctaaaagccatgacctaaaggtctcagcccatcctaaggaacagggctctaacactgcagcagagaacaccggttccaacgagagaaacatatacatcgtggtgggtgtggtatgtactctgctcgtcgcactactcatggcagccctttatctagtgaggatccgccaaaaaaaggcccagggcagcactagttccaccagacttcatgagcctgaaaaaaacgcacgggaaatcactcaggacacgaatgacattacatatgcagatctgaatctgcccaaaggtaagaagccggcaccacaggccgcagagcccaacaatcataccgaatacgcttccatccagacctctcctcaaccggcttctgaggataccctgacgtatgcagacttggacatggtccacctcaatagaaccccaaagcagcccgcaccgaaacccgagccctcatttagcgagtacgcatccgtgcaggtccccaggaaatag

SEQ ID NO: 233130 - DNA, 3867 bp, Artificial Sequence
  derived and/or modified sequence
cgctcgcagagaagccgcggcccatggagcccgccggcccggcccccggccgcctcgggccgctgctctgcctgctgctcgccgcgtcctgcgcctggtcaggagtggcgggtgaggaggagctgcaggtgattcagcctgacaagtccgtgttggttgcagctggagagacagccactctgcgctgcactgcgacctctctgatccctgtggggcccatccagtggttcagaggagctggaccaggccgggaattaatctacaatcaaaaagaaggccacttcccccgggtaacaactgtttcagacctcacaaagagaaacaacatggacttttccatccgcatcggtaacatcaccccagcagatgccggcacctactactgtgtgaagttccggaaagggagccccgatgacgtggagtttaagtctggagcaggcactgagctgtctgtgcgcgccaaaccctctgcccccgtggtatcgggccctgcggcgagggccacacctcagcacacagtgagcttcacctgcgagtcccacggcttctcacccagagacatcaccctgaaatggttcaaaaatgggaatgagctctcagacttccagaccaacgtggaccccgtaggagagagcgtgtcctacagcatccacagcacagccaaggtggtgctgacccgcgaggacgttcactctcaagtcatctgcgaggtggcccacgtcaccttgcagggggaccctcttcgtgggactgccaacttgtctgagaccatccgagttccacccaccttggaggttactcaacagcccgtgagggcagagaaccaggtgaatgtcacctgccaggtgaggaagttctacccccagagactacagctgacctggttggagaatggaaacgtgtcccggacagaaacggcctcaaccgttacagagaacaaggatggtacctacaactggatgagctggctcctggtgaatgtatctgcccacagggatgatgtgaagctcacctgccaggtggagcatgacgggcagccagcggtcagcaaaagccatgacctgaaggtctcagcccacccgaaggagcagggctcaaataccgccgctgagaacactggatctaatgaacggaacatctatattgtggtgggtgtggtgtgcaccttgctggtggccctactgatggcggccctctacctcgtccgaatcagacagaagaaagcccagggctccacttcttctacaaggttgcatgagcccgagaagaatgccagagaaataacacaggacacaaatgatatcacatatgcagacctgaacctgcccaaggggaagaagcctgctccccaggctgcggagcccaacaaccacacggagtatgccagcattcagaccagcccgcagcccgcgtcggaggacaccctcacctatgctgacctggacatggtccacctcaaccggacccccaagcagccggcccccaagcctgagccgtccttctcagagtacgccagcgtccaggtcccgaggaagtgaatgggaccgtggtttgctctagcacccatctctacgcgctttcttgtcccacagggagccgccgtgatgagcacagccaacccagttcccggagggctggggcggtgcaggctctgggacccaggggccagggtggctcttctctccccacccctccttggctctccagcacttcctgggcagccacggccccctccccccacattgccacatacctggaggctgacgttgccaaaccagccagggaaccaacctgggaagtggccagaactgcctggggtccaagaactcttgtgcctccgtccatcaccatgtgggttttgaagaccctcgactgcctccccgatgctccgaagcctgatcttccagggtggggaggagaaaatcccacctcccctgacctccaccacctccaccaccaccaccaccaccaccaccaccactaccaccaccacccaactggggctagagtggggaagatttcccctttagatcaaactgccccttccatggaaaagctggaaaaaaactctggaacccatatccaggcttggtgaggttgctgccaacagtcctggcctcccccatccctaggctaaagagccatgagtcctggaggaggagaggacccctcccaaaggactggagacaaaaccctctgcttccttgggtccctccaagactccctggggcccaactgtgttgctccacccggacccatctctcccttctagacctgagcttgcccctccagctagcactaagcaacatctcgctgtggacgcctgtaaattactgagaaatgtgaaacgtgcaatcttgaaactgaggtgttagaaaacttgatctgtggtgttttgttttgttttttttcttaaaacaacagcaacgtgatcttggctgtctgtcatgtgttgaagtccatggttgggtcttgtgaagtctgaggtttaacagtttgttgtcctggagggattttcttacagcgaagacttgagttcctccaagtcccagaaccccaagaatgggcaagaaggatcaggtcagccactccctggagacacagccttctggctgggactgacttggccatgttctcagctgagccacgcggctggtagtgcagccttctgtgaccccgctgtggtaagtccagcctgcccagggctgctgagggctgcctcttgacagtgcagtcttatcgagacccaatgcctcagtctgctcatccgtaaagtggggatagtgaagatgacacccctccccaccacctctcataagcactttaggaacacacagagggtagggatagtggccctggccgtctatcctacccctttagtgaccgcccccatcccggctttctgagctgatccttgaagaagaaatcttccatttctgctctcaaaccctactgggatcaaactggaataaattgaagacagccagggggatggtgcagctgtgaagctcgggctgattccccctctgtcccagaaggttggccagagggtgtgacccagttaccctttaacccccacccttccagtcgggtgtgagggcctgaccgggcccagggcaagcagatgtcgcaagccctatttattcagtcttcactataactcttagagttgagacgctaatgttcatgactcctggccttgggatgcccaagggatttctggctcaggctgtaaaagtagctgagccatcctgcccattcctggaggtcctacaggtgaaactgcaggagctcagcatagacccagctctctgggggatggtcacctggtgatttcaatgatggcatccaggaattagctgagccaacagaccatgtggacagctttggccagagctcccgtgtggcatctgggagccacagtgacccagccacctggctcaggctagttccaaattccaaaagattggcttgtaaaccttcgtctccctctcttttacccagagacagcacatacgtgtgcacacgcatgcacacacacattcagtattttaaaagaatgttttcttggtgccattttcattttattttattttttaattcttggagggggaaataagggaataaggccaaggaagatgtatagctttagctttagcctggcaacctggagaatccacataccttgtgtattgaaccccaggaaaaggaagaggtcgaaccaaccctgcggaaggagcatggtttcaggagtttattttaagactgctgggaaggaaacaggccccattttgtatatagttgcaacttaaactttttggcttgcaaaatatttttgtaataaagatttctgggtaataatgagtc

SEQ ID NO: 233131 - DNA, 3996 bp, Artificial Sequence
  derived and/or modified sequence
gcggccgctccaggcgcccgttccggagtcggggggaggcccagccgggaggggggaagggggggagccttagtcatttccccgctccagcctgctcccgcccgagcgcgcactcacggccgctctccctcctcgctccgcagccgcggcccatggagcccgccggcccggcccccggccgcctcgggccgctgctctgcctgctgctcgccgcgtcctgcgcctggtcaggagtggcgggtgaggaggagctgcaggtgattcagcctgacaagtccgtgttggttgcagctggagagacagccactctgcgctgcactgcgacctctctgatccctgtggggcccatccagtggttcagaggagctggaccaggccgggaattaatctacaatcaaaaagaaggccacttcccccgggtaacaactgtttcagacctcacaaagagaaacaacatggacttttccatccgcatcggtaacatcaccccagcagatgccggcacctactactgtgtgaagttccggaaagggagccccgatgacgtggagtttaagtctggagcaggcactgagctgtctgtgcgcgccaaaccctctgcccccgtggtatcgggccctgcggcgagggccacacctcagcacacagtgagcttcacctgcgagtcccacggcttctcacccagagacatcaccctgaaatggttcaaaaatgggaatgagctctcagacttccagaccaacgtggaccccgtaggagagagcgtgtcctacagcatccacagcacagccaaggtggtgctgacccgcgaggacgttcactctcaagtcatctgcgaggtggcccacgtcaccttgcagggggaccctcttcgtgggactgccaacttgtctgagaccatccgagttccacccaccttggaggttactcaacagcccgtgagggcagagaaccaggtgaatgtcacctgccaggtgaggaagttctacccccagagactacagctgacctggttggagaatggaaacgtgtcccggacagaaacggcctcaaccgttacagagaacaaggatggtacctacaactggatgagctggctcctggtgaatgtatctgcccacagggatgatgtgaagctcacctgccaggtggagcatgacgggcagccagcggtcagcaaaagccatgacctgaaggtctcagcccacccgaaggagcagggctcaaataccgccgctgagaacactggatctaatgaacggaacatctatattgtggtgggtgtggtgtgcaccttgctggtggccctactgatggcggccctctacctcgtccgaatcagacagaagaaagcccagggctccacttcttctacaaggttgcatgagcccgagaagaatgccagagaaataacacaggacacaaatgatatcacatatgcagacctgaacctgcccaaggggaagaagcctgctccccaggctgcggagcccaacaaccacacggagtatgccagcattcagaccagcccgcagcccgcgtcggaggacaccctcacctatgctgacctggacatggtccacctcaaccggacccccaagcagccggcccccaagcctgagccgtccttctcagagtacgccagcgtccaggtcccgaggaagtgaatgggaccgtggtttgctctagcacccatctctacgcgctttcttgtcccacagggagccgccgtgatgagcacagccaacccagttcccggagggctggggcggtgcaggctctgggacccaggggccagggtggctcttctctccccacccctccttggctctccagcacttcctgggcagccacggccccctccccccacattgccacatacctggaggctgacgttgccaaaccagccagggaaccaacctgggaagtggccagaactgcctggggtccaagaactcttgtgcctccgtccatcaccatgtgggttttgaagaccctcgactgcctccccgatgctccgaagcctgatcttccagggtggggaggagaaaatcccacctcccctgacctccaccacctccaccaccaccaccaccaccaccaccaccactaccaccaccacccaactggggctagagtggggaagatttcccctttagatcaaactgccccttccatggaaaagctggaaaaaaactctggaacccatatccaggcttggtgaggttgctgccaacagtcctggcctcccccatccctaggctaaagagccatgagtcctggaggaggagaggacccctcccaaaggactggagacaaaaccctctgcttccttgggtccctccaagactccctggggcccaactgtgttgctccacccggacccatctctcccttctagacctgagcttgcccctccagctagcactaagcaacatctcgctgtggacgcctgtaaattactgagaaatgtgaaacgtgcaatcttgaaactgaggtgttagaaaacttgatctgtggtgttttgttttgttttttttcttaaaacaacagcaacgtgatcttggctgtctgtcatgtgttgaagtccatggttgggtcttgtgaagtctgaggtttaacagtttgttgtcctggagggattttcttacagcgaagacttgagttcctccaagtcccagaaccccaagaatgggcaagaaggatcaggtcagccactccctggagacacagccttctggctgggactgacttggccatgttctcagctgagccacgcggctggtagtgcagccttctgtgaccccgctgtggtaagtccagcctgcccagggctgctgagggctgcctcttgacagtgcagtcttatcgagacccaatgcctcagtctgctcatccgtaaagtggggatagtgaagatgacacccctccccaccacctctcataagcactttaggaacacacagagggtagggatagtggccctggccgtctatcctacccctttagtgaccgcccccatcccggctttctgagctgatccttgaagaagaaatcttccatttctgctctcaaaccctactgggatcaaactggaataaattgaagacagccagggggatggtgcagctgtgaagctcgggctgattccccctctgtcccagaaggttggccagagggtgtgacccagttaccctttaacccccacccttccagtcgggtgtgagggcctgaccgggcccagggcaagcagatgtcgcaagccctatttattcagtcttcactataactcttagagttgagacgctaatgttcatgactcctggccttgggatgcccaagggatttctggctcaggctgtaaaagtagctgagccatcctgcccattcctggaggtcctacaggtgaaactgcaggagctcagcatagacccagctctctgggggatggtcacctggtgatttcaatgatggcatccaggaattagctgagccaacagaccatgtggacagctttggccagagctcccgtgtggcatctgggagccacagtgacccagccacctggctcaggctagttccaaattccaaaagattggcttgtaaaccttcgtctccctctcttttacccagagacagcacatacgtgtgcacacgcatgcacacacacattcagtattttaaaagaatgttttcttggtgccattttcattttattttattttttaattcttggagggggaaataagggaataaggccaaggaagatgtatagctttagctttagcctggcaacctggagaatccacataccttgtgtattgaaccccaggaaaaggaagaggtcgaaccaaccctgcggaaggagcatggtttcaggagtttattttaagactgctgggaaggaaacaggccccattttgtatatagttgcaacttaaactttttggcttgcaaaatatttttgtaataaagatttctgggtaataatgagtc

SEQ ID NO: 233132 - protein, 544 aa, Artificial Sequence
  derived and/or modified sequence
MDDKGDPSNEEAPKAIKPTSKEFRKTWGFRRTTIAKREGAGDAEADPLEPPPPQQQLGLSLRRSGRQPKRTERVEQFLTIARRRGRRSMPVSLEDSGEPTSCPATDAETASEGSVESASETRSGPQSASTAVKERPASSEKVKGGDDHDDTSDSDSDGLTLKELQNRLRRKREQEPTERPLKGIQSRLRKKRREEGPAETVGSEASDTVEGVLPSKQEPENDQGVVSQAGKDDRESKLEGKAAQDIKDEEPGDLGRPKPECEGYDPNALYCICRQPHNNRFMICCDRCEEWFHGDCVGISEARGRLLERNGEDYICPNCTILQVQDETHSETADQQEAKWRPGDADGTDCTSIGTIEQKSSEDQGIKGRIEKAANPSGKKKLKIFQPVIEAPGASKCIGPGCCHVAQPDSVYCSNDCILKHAAATMKFLSSGKEQKPKPKEKMKMKPEKPSLPKCGAQAGIKISSVHKRPAPEKKETTVKKAVVVPARSEALGKEAACESSTPSWASDHNYNAVKPEKTAAPSPSLLYKCSGKYSYSLHPSLIA

SEQ ID NO: 233133 - protein, 1189 aa, Artificial Sequence
  derived and/or modified sequence
MDDKGDPSNEEAPKAIKPTSKEFRKTWGFRRTTIAKREGAGDAEADPLEPPPPQQQLGLSLRRSGRQPKRTERVEQFLTIARRRGRRSMPVSLEDSGEPTSCPATDAETASEGSVESASETRSGPQSASTAVKERPASSEKVKGGDDHDDTSDSDSDGLTLKELQNRLRRKREQEPTERPLKGIQSRLRKKRREEGPAETVGSEASDTVEGVLPSKQEPENDQGVVSQAGKDDRESKLEGKAAQDIKDEEPGDLGRPKPECEGYDPNALYCICRQPHNNRFMICCDRCEEWFHGDCVGISEARGRLLERNGEDYICPNCTILQVQDETHSETADQQEAKWRPGDADGTDCTSIGTIEQKSSEDQGIKGRIEKAANPSGKKKLKIFQPVIEAPGASKCIGPGCCHVAQPDSVYCSNDCILKHAAATMKFLSSGKEQKPKPKEKMKMKPEKPSLPKCGAQAGIKISSVHKRPAPEKKETTVKKAVVVPARSEALGKEAACESSTPSWASDHNYNAVKPEKTAAPSPSLLYKSTKEDRRSEEKAAAMAASKKTAPPGSAVGKQPAPRNLVPKKSSFANVAAATPAIKKPPSGFKGTIPKRPWLSATPSSGASAARQAGPAPAAATAASKKFPGSAALVGAVRKPVVPSVPMASPAPGRLGAMSAAPSQPNSQIRQNIRRSLKEILWKRVNDSDDLIMTENEVGKIALHIEKEMFNLFQVTDNRYKSKYRSIMFNLKDPKNQGLFHRVLREEISLAKLVRLKPEELVSKELSTWKERPARSVMESRTKLHNESKKTAPRQEAIPDLEDSPPVSDSEEQQESARAVPEKSTAPLLDVFSSMLKDTTSQHRAHLFDLNCKICTGQVPSAEDEPAPKKQKLSASVKKEDLKSKHDSSAPDPAPDSADEVMPEAVPEVASEPGLESASHPNVDRTYFPGPPGDGHPEPSPLEDLSPCPASCGSGVVTTVTVSGRDPRTAPSSSCTAVASAASRPDSTHMVEARQDVPKPVLTSVMVPKSILAKPSSSPDPRYLSVPPSPNISTSESRSPPEGDTTLFLSRLSTIWKGFINMQSVAKFVTKAYPVSGCFDYLSEDLPDTIHIGGRIAPKTVWDYVGKLKSSVSKELCLIRFHPATEEEEVAYISLYSYFSSRGRFGVVANNNRHVKDLYLIPLSAQDPVPSKLLPFEGPGKRRLSGWR

SEQ ID NO: 233134 - DNA, 3570 bp, Artificial Sequence
  derived and/or modified sequence
atggacgacaagggcgaccccagcaacgaggaggcccccaaggccatcaagcccaccagcaaggagttcagaaagacctggggcttcagaagaaccaccatcgccaagagagagggcgccggcgacgccgaggccgaccccctggagcccccccccccccagcagcagctgggcctgagcctgagaagaagcggcagacagcccaagagaaccgagagagtggagcagttcctgaccatcgccagaagaagaggcagaagaagcatgcccgtgagcctggaggacagcggcgagcccaccagctgccccgccaccgacgccgagaccgccagcgagggcagcgtggagagcgccagcgagaccagaagcggcccccagagcgccagcaccgccgtgaaggagagacccgccagcagcgagaaggtgaagggcggcgacgaccacgacgacaccagcgacagcgacagcgacggcctgaccctgaaggagctgcagaacagactgagaagaaagagagagcaggagcccaccgagagacccctgaagggcatccagagcagactgagaaagaagagaagagaggagggccccgccgagaccgtgggcagcgaggccagcgacaccgtggagggcgtgctgcccagcaagcaggagcccgagaacgaccagggcgtggtgagccaggccggcaaggacgacagagagagcaagctggagggcaaggccgcccaggacatcaaggacgaggagcccggcgacctgggcagacccaagcccgagtgcgagggctacgaccccaacgccctgtactgcatctgcagacagccccacaacaacagattcatgatctgctgcgacagatgcgaggagtggttccacggcgactgcgtgggcatcagcgaggccagaggcagactgctggagagaaacggcgaggactacatctgccccaactgcaccatcctgcaggtgcaggacgagacccacagcgagaccgccgaccagcaggaggccaagtggagacccggcgacgccgacggcaccgactgcaccagcatcggcaccatcgagcagaagagcagcgaggaccagggcatcaagggcagaatcgagaaggccgccaaccccagcggcaagaagaagctgaagatcttccagcccgtgatcgaggcccccggcgccagcaagtgcatcggccccggctgctgccacgtggcccagcccgacagcgtgtactgcagcaacgactgcatcctgaagcacgccgccgccaccatgaagttcctgagcagcggcaaggagcagaagcccaagcccaaggagaagatgaagatgaagcccgagaagcccagcctgcccaagtgcggcgcccaggccggcatcaagatcagcagcgtgcacaagagacccgcccccgagaagaaggagaccaccgtgaagaaggccgtggtggtgcccgccagaagcgaggccctgggcaaggaggccgcctgcgagagcagcacccccagctgggccagcgaccacaactacaacgccgtgaagcccgagaagaccgccgcccccagccccagcctgctgtacaagagcaccaaggaggacagaagaagcgaggagaaggccgccgccatggccgccagcaagaagaccgccccccccggcagcgccgtgggcaagcagcccgcccccagaaacctggtgcccaagaagagcagcttcgccaacgtggccgccgccacccccgccatcaagaagccccccagcggcttcaagggcaccatccccaagagaccctggctgagcgccacccccagcagcggcgccagcgccgccagacaggccggccccgcccccgccgccgccaccgccgccagcaagaagttccccggcagcgccgccctggtgggcgccgtgagaaagcccgtggtgcccagcgtgcccatggccagccccgcccccggcagactgggcgccatgagcgccgcccccagccagcccaacagccagatcagacagaacatcagaagaagcctgaaggagatcctgtggaagagagtgaacgacagcgacgacctgatcatgaccgagaacgaggtgggcaagatcgccctgcacatcgagaaggagatgttcaacctgttccaggtgaccgacaacagatacaagagcaagtacagaagcatcatgttcaacctgaaggaccccaagaaccagggcctgttccacagagtgctgagagaggagatcagcctggccaagctggtgagactgaagcccgaggagctggtgagcaaggagctgagcacctggaaggagagacccgccagaagcgtgatggagagcagaaccaagctgcacaacgagagcaagaagaccgcccccagacaggaggccatccccgacctggaggacagcccccccgtgagcgacagcgaggagcagcaggagagcgccagagccgtgcccgagaagagcaccgcccccctgctggacgtgttcagcagcatgctgaaggacaccaccagccagcacagagcccacctgttcgacctgaactgcaagatctgcaccggccaggtgcccagcgccgaggacgagcccgcccccaagaagcagaagctgagcgccagcgtgaagaaggaggacctgaagagcaagcacgacagcagcgcccccgaccccgcccccgacagcgccgacgaggtgatgcccgaggccgtgcccgaggtggccagcgagcccggcctggagagcgccagccaccccaacgtggacagaacctacttccccggcccccccggcgacggccaccccgagcccagccccctggaggacctgagcccctgccccgccagctgcggcagcggcgtggtgaccaccgtgaccgtgagcggcagagaccccagaaccgcccccagcagcagctgcaccgccgtggccagcgccgccagcagacccgacagcacccacatggtggaggccagacaggacgtgcccaagcccgtgctgaccagcgtgatggtgcccaagagcatcctggccaagcccagcagcagccccgaccccagatacctgagcgtgccccccagccccaacatcagcaccagcgagagcagaagcccccccgagggcgacaccaccctgttcctgagcagactgagcaccatctggaagggcttcatcaacatgcagagcgtggccaagttcgtgaccaaggcctaccccgtgagcggctgcttcgactacctgagcgaggacctgcccgacaccatccacatcggcggcagaatcgcccccaagaccgtgtgggactacgtgggcaagctgaagagcagcgtgagcaaggagctgtgcctgatcagattccaccccgccaccgaggaggaggaggtggcctacatcagcctgtacagctacttcagcagcagaggcagattcggcgtggtggccaacaacaacagacacgtgaaggacctgtacctgatccccctgagcgcccaggaccccgtgcccagcaagctgctgcccttcgagggccccggcaagagaagactgagcggctggagatag

SEQ ID NO: 233135 - DNA, 3570 bp, Artificial Sequence
  derived and/or modified sequence
atggatgataaaggcgatccatctaacgaggaggcacccaaggcaatcaagccaactagcaaagagttccgcaaaacgtggggctttagaagaacgacaattgctaagagggagggggctggggatgccgaagccgatcccctggaacctcccccacctcaacagcagttagggctaagtctgcgccgcagtggaaggcagcccaaacgcaccgagcgggttgagcagtttctcaccatagctcggcggagaggacggagaagcatgccggtttctctggaagattctggagaacctacctcgtgtccagctaccgatgccgagaccgcctccgaggggagtgtggaaagcgcctcggagacacgctccgggccccagtctgcttccacagctgttaaggaacgccccgctagctctgaaaaagtgaaaggcggtgacgaccatgatgatacctccgactccgattccgacgggctgaccttgaaagaactacagaaccgactgaggcggaagagggagcaggaaccgacagaacgccctctgaagggtatccagagtcgccttagaaaaaaacgcagggaagaggggcccgcagagaccgtggggagcgaagcatccgataccgttgagggcgtgcttccgtccaagcaagagccggaaaatgatcagggggtggtgagccaggcagggaaagatgatagggaatccaagcttgagggcaaggccgctcaagacatcaaagacgaagagcctggcgatctcggtagacccaagccagaatgtgaaggatacgacccaaacgcgttgtactgcatctgtaggcagcctcataacaatagattcatgatatgctgtgatcggtgcgaagaatggttccatggggattgcgtcggaatctctgaggcgagaggaagactccttgagcgtaatggtgaggactacatttgccccaactgcacgattttacaggtccaggacgaaacccattcggagacagcagatcagcaagaggccaagtggagacctggcgacgctgacggcactgactgcacatctatcgggaccatagaacaaaaatcgtctgaagaccaaggcattaaggggagaattgagaaagctgccaacccgtcgggcaaaaagaagttaaagatttttcagcccgttatcgaggccccgggagcaagcaagtgtatcggcccaggatgctgtcacgttgcacagcccgattcagtgtattgcagcaatgactgtatcttgaagcatgcagcggcaacaatgaaatttctaagctcaggcaaggagcagaaacctaaaccaaaagaaaagatgaagatgaagcccgaaaagccttccctccctaagtgtggcgcacaggctggcattaaaatcagtagcgtgcataagcgacctgccccagagaagaaagaaactaccgtgaagaaagcagtggtcgttcctgcaaggagcgaagcgcttggaaaggaggctgcttgcgagtccagcaccccatcttgggctagtgatcataactacaatgccgtgaaacccgagaaaacagctgccccgagcccttctctgttgtataagtccacaaaggaggacagacgatctgaagagaaggctgcagcgatggccgccagcaagaaaacggcacctcccggctcagctgttggaaaacagcctgccccccgaaacctggtacccaagaaatcctcctttgcaaatgtcgccgctgctactccagccataaaaaaacctcccagcggcttcaaagggactatccccaaaagaccttggctctcagccacaccctcctcaggcgcctctgccgctagacaagctgggccagcaccagcggccgccacagccgcatctaagaagtttccggggtctgctgccctagtcggggccgttcgaaaacccgttgtccctagtgttcccatggcctctcccgctcctggccgcctgggcgctatgagcgccgcacctagccaaccaaattcccagataaggcagaacataaggagaagtctaaaggagatcttatggaagagagttaacgactctgacgatcttattatgacagaaaacgaagtgggcaagatcgccttgcatatcgagaaggaaatgtttaatctcttccaggtgactgacaatcgctataagtcaaaatacagaagcattatgttcaacctgaaagatcctaagaatcagggtctttttcatagagttctcagggaggaaatctctttagctaaactcgtcaggctgaagccagaagaactcgtgtctaaagaactgtctacctggaaggagcgccctgcacggtcagtcatggagtctcgaactaagctgcacaatgagtcgaagaaaactgcgcccaggcaagaggctatcccagacttggaggattctcctcctgtgtccgatagcgaggagcagcaagagtccgcacgtgccgtcccagagaagtccaccgcccctttgctggacgtcttttcatccatgcttaaagatacaacaagccagcatagggctcatctcttcgatcttaattgtaagatatgtactggccaggttccgtcggctgaggacgagcccgctcccaagaaacagaagctttccgcctctgttaagaaggaggatctgaaatccaagcacgattcatcggcccccgatccagcacccgacagcgccgatgaggtgatgcccgaggccgtgccagaagtcgcttccgaaccagggctggagtccgccagccaccccaacgtagatcgcacatacttcccaggaccccccggcgacgggcaccctgaaccctcacctctggaagacctgtctccttgccccgcatcttgtgggtccggggtcgttaccactgttaccgtgtcaggtcgtgaccccagaacagccccatcgtcctcctgtaccgccgtggccagtgctgcgagccgacccgactctacacacatggtggaagcacggcaggatgtccctaaaccggtcctgaccagtgtaatggtaccgaaaagtatcctcgcgaaaccaagctcttcccccgatcccagatacctttccgtcccccctagccctaatattagcaccagcgagtccaggagtccaccggagggagacaccacattgtttctgtctcgcctgagcactatctggaaaggctttattaacatgcagagcgtcgcaaaatttgttacaaaagcctacccagtgtcaggttgcttcgattacttgagtgaagatcttccagacactatccacatcggcggccgtatcgcccctaagacagtatgggactacgtggggaagttgaagtcaagcgtgtcaaaggaattgtgcctaattaggtttcaccctgccaccgaggaggaagaggttgcctatatatccctgtatagttacttttcaagtaggggcagattcggggtggtggctaataataacagacatgtcaaggacctgtacctcattccactgagcgcacaagatccagtcccttctaagctgctaccattcgagggccccggcaagagaaggctgtccggctggcggtag

SEQ ID NO: 233136 - DNA, 3570 bp, Artificial Sequence
  derived and/or modified sequence
atggacgataagggcgatccttccaacgaagaggcccctaaggcgatcaagccaacctctaaggaattccgcaaaacttggggtttccggagaacgactatcgctaagagagagggggcaggagatgctgaggccgatcctctggagcctcctccccctcaacagcagctgggcctgtccctcaggaggtctggccgtcagccgaagaggactgaacgagttgagcaattcctgaccatagcccgccgacggggcagacggagcatgcctgtttccctcgaagactcaggggaacctactagttgcccagctacggatgctgagaccgcttctgaaggaagtgtagagtctgccagcgaaacccggtccgggccacagagcgctagcacagccgtgaaagaacgcccagcatcgtcagagaaggtgaagggcggggacgaccacgacgacacatcagattcagactctgacggcctcactctaaaggagctccagaataggctgaggaggaaaagggaacaagagcccactgagcggccacttaaaggcattcagagtaggttgcgaaaaaagagaagagaagaggggccagcggaaaccgtgggttcagaggcttccgatacggtggaaggggtacttcctagcaaacaggagccagaaaatgatcagggcgtggtgtcccaagccggtaaagatgatcgtgaatctaaactggagggtaaggccgcccaagatatcaaggatgaagagcctggtgatctaggtagaccaaaacctgaatgtgagggttatgatccaaacgcattgtactgcatatgtagacagccacacaacaaccgctttatgatctgctgcgaccgatgcgaggaatggtttcatggagactgtgtcggcatcagcgaggccaggggtcgccttcttgaacgtaacggagaggattatatctgccctaactgtacaatcctccaggtgcaggacgaaactcattccgaaacagcagaccaacaggaggccaaatggaggccaggcgatgccgatggcaccgattgtacaagcattggtactattgaacagaagtccagtgaagaccagggaatcaaaggaagaatcgaaaaggccgcgaacccgtcaggcaagaagaaacttaaaatatttcaacctgtcatcgaggcgcctggcgcctcaaaatgcatcgggcccgggtgttgccatgtggcccagccagatagtgtttattgttctaatgactgtatacttaagcacgcggcagcgaccatgaaattcctttcgagcgggaaagaacagaagccaaaacccaaagaaaagatgaagatgaaaccagagaaacccagcttgccaaagtgcggtgcccaggccggtatcaagatctccagcgtccataaacggcccgctcctgagaaaaaggagactacagtcaagaaagcggtcgtcgtccccgcacggtcagaggcccttgggaaagaagccgcctgtgagtcctccacaccttcttgggctagcgaccacaattataacgcagtgaagcccgagaagactgccgcgcctagcccatcgctcctgtataaaagcaccaaggaggatcggaggagcgaagaaaaagctgccgccatggccgccagcaagaagacagcaccaccagggtccgccgtcggcaaacaaccagccccgcgcaacttagtcccaaaaaagtcatcctttgccaacgtggcagccgccacccctgcaataaaaaaacccccgtctggatttaagggcaccattccaaagcggccatggctctctgccactccctcaagtggagccagtgccgcaagacaggccggtcctgcgcccgccgccgccaccgccgcctcaaaaaaattccccggaagcgccgccctcgtgggagccgtaagaaagcccgttgtgccttctgttcccatggcatcaccagctccaggccgactgggcgccatgtcagccgctccgagtcagcccaatagccagatccgtcaaaatataaggagatctctgaaggagattttgtggaaacgggtgaatgacagtgacgatttgatcatgaccgagaatgaggtgggaaagatcgccctccacattgagaaagagatgttcaacctgtttcaggttaccgataaccgatacaaatccaaataccggtccatcatgttcaatttgaaagatcccaagaaccaagggctgttccatagagttctgagagaggagatcagtctggctaagctagtgagactgaagcctgaggagctcgtgtctaaagaattatcaacatggaaggaaaggcctgctcgatcggttatggagagtcgcacaaagttgcacaacgagagtaagaagactgcccctagacaggaggccatccccgacttggaggactccccccctgtgtcagactcagaggaacagcaggaatccgctagggctgttcctgaaaaatcaactgcgccactgctagatgttttcagctcgatgctgaaagataccacaagccagcaccgcgcccacctgtttgatcttaactgcaagatatgtactggacaggtgcccagcgctgaggacgaacccgccccgaagaaacagaagctctcagcttctgtgaagaaggaagatctgaagtcaaaacacgactcctcagcacctgatcctgctcctgactcagccgatgaggtgatgccagaagccgttcctgaggtggccagcgaacccgggctggagagtgcatcccacccaaacgtcgatcggacctatttccctggaccacctggagacggacacccagaaccgagccccctggaggatctctcaccatgccctgcaagttgtgggtccggtgtagtgactacagtgacggtgtctggccgggaccctcggactgccccctcctcctcttgcacggccgtggcctcagccgcatccaggccagacagcactcacatggtggaagcaaggcaggacgtgcctaagcccgtcctcacatccgtcatggtccctaagtctattctggccaagccctctagttcccctgacccgcggtacctctctgtacctccaagtcctaatatcagcacatctgagtctcggtccccacctgagggggatacaaccctgtttctctcccggttgtcaaccatctggaagggatttattaatatgcagtctgttgccaagttcgtgactaaggcctatcctgtgagcgggtgctttgattatttatcggaagatctccccgataccatccatatcggaggcagaatcgctcctaagacagtatgggattatgtgggaaagctgaagtcttccgtaagcaaggagttatgcctgataaggtttcatccagccactgaggaggaagaagtggcttacatctcactctacagttacttttcatccaggggtcgattcggcgtagttgccaacaataaccggcatgtcaaagatctgtatctcattcctctgagtgctcaggacccagtgccctccaagctcctccctttcgaaggccctggaaagcgccggctcagtggctggcggtag

SEQ ID NO: 233137 - DNA, 3570 bp, Artificial Sequence
  derived and/or modified sequence
atggatgacaagggggaccccagcaatgaggaggcccccaaggccatcaagcccaccagcaaggagttcaggaagacctggggcttccggaggaccaccatcgccaagcgggagggcgctggagatgctgaggccgaccccctggagcccccaccaccccagcagcagctgggcctgagcctgcggcgcagcggccggcagcccaagaggacagagcgggtggagcagttcctgaccatcgccaggagaagaggccgccgctccatgcctgtgtccctggaggacagcggggagcccaccagctgcccagccacagatgctgagacagccagcgagggctctgtggagagcgccagcgagaccaggagcggcccccagagcgccagcacagctgtgaaggagaggcctgccagcagcgagaaggtgaagggaggagatgaccatgatgacaccagtgacagcgacagtgatggcctgaccctgaaggagctgcagaaccggctgcggaggaagcgggagcaggagcccacagagcggcccctgaagggcatccagagccggctgaggaagaagaggcgggaggagggccctgctgagaccgtgggcagcgaggccagtgacacagtggagggcgtgctgcccagcaagcaggagccagaaaatgaccagggcgtggtgtcccaggccggcaaggatgaccgggagagcaagctggagggcaaggccgcccaggacatcaaggatgaggagcccggggacctgggccggcccaagccagaatgtgagggctatgaccccaatgccctgtactgcatctgccggcagccccacaacaaccgcttcatgatctgctgtgacagatgtgaggagtggttccatggagactgtgtgggcatcagcgaggcccggggccgcctgctggagagaaatggagaggactacatctgccccaactgcaccatcctgcaggtgcaggatgagacccacagcgagacagctgaccagcaggaggccaagtggaggcctggagatgctgatggaacagactgcaccagcatcggcaccatcgagcagaagagcagcgaggaccagggcatcaagggccgcatcgagaaggccgccaaccccagcggcaagaagaagctgaagatcttccagcctgtgattgaggcccctggggccagcaagtgcatcggccctggctgctgccacgtggcccagcctgacagcgtgtactgcagcaatgactgcatcctgaagcacgccgccgccaccatgaagttcctgagcagcggcaaggagcagaagcccaagcccaaggagaagatgaagatgaagccagagaagcccagcctgcccaagtgtggggcccaggccggcatcaagatcagctctgtgcacaagaggcctgcccctgagaagaaggagaccaccgtgaagaaggctgtggtggtgcctgcccggtctgaggccctgggcaaggaggccgcctgtgagagcagcacccccagctgggccagtgaccacaactacaatgctgtgaagccagagaagacagctgcccccagccccagcctgctgtacaagagcaccaaggaggacagaagaagtgaggagaaggccgccgccatggccgccagcaagaagacagcccctcctggcagcgctgtgggcaagcagcctgcccccaggaacctggtgcccaagaagagcagctttgccaacgtggccgccgccaccccagccatcaagaagccacccagcggcttcaagggcaccatccccaagaggccctggctgagcgccacccccagcagcggggccagcgctgcccggcaggccggccctgccccagctgctgccacagctgccagcaagaagtttcctggcagcgctgccctggtgggcgctgtgaggaagcctgtggtgcccagcgtgcccatggccagccctgcccctggccgcctgggcgccatgtctgctgcccccagccagcccaacagccagatccggcagaacatcagaagaagcctgaaggagatcctgtggaagagggtgaatgacagtgatgacctgatcatgacagaaaatgaggtgggcaagatcgccctgcacatcgagaaggagatgttcaacctcttccaggtgacagacaaccgctacaagagcaagtaccgcagcatcatgttcaacctgaaggaccccaagaaccagggcctcttccaccgggtgctgcgggaggagatcagcctggccaagctggtgcggctgaagccagaggagctggtgtccaaggagctgagcacctggaaggagaggcctgcccggtctgtgatggagagcaggaccaagctgcacaatgaaagcaagaagacagccccccggcaggaggccatcccagacctggaggacagcccccctgtgtctgattctgaggagcagcaggagagcgcccgggctgtgcctgagaagagcacagcccccctgctggatgtgttcagctccatgctgaaggacaccaccagccagcaccgggcccacctgtttgacctgaactgcaagatctgcaccggccaggtgcccagcgcagaagatgagcccgcccccaagaagcagaagctgagcgcctctgtgaagaaggaggacctgaagagcaagcatgacagcagcgccccagaccctgccccagacagcgcagatgaggtgatgcctgaggccgtgcctgaggtggccagcgagcccggcctggagagcgccagccaccccaacgtggacaggacctacttccctggccccccaggagatggccaccctgagcccagccccctggaggacctgagcccctgcccagccagctgtggcagcggcgtggtgaccaccgtgacagtgtctggccgggaccccaggacagcccccagcagcagctgcacagctgtggccagcgctgccagcaggccagacagcacccacatggtggaggcccggcaggatgtgcccaagcctgtgctgacctctgtgatggtgcccaagagcatcctggccaagcccagcagcagcccagacccccgctacctgtctgtgccccccagccccaacatcagcaccagcgagagccgcagccccccagagggggacaccaccctcttcctgagccggctgagcaccatctggaagggcttcatcaacatgcagagcgtggccaagtttgtgaccaaggcctaccctgtgtctggctgctttgactacctgtctgaggacctgcctgacaccatccacatcggcggcagaattgcccccaagacagtgtgggactatgtgggcaagctgaagagctctgtgtccaaggagctgtgcctgatccgcttccacccagccacagaggaggaggaggtggcctacatcagcctgtacagctacttcagcagccggggccgcttcggcgtggtggccaacaacaacagacatgtgaaggacctgtacctgatccccctgagcgcccaggaccctgtgcccagcaagctgctgccctttgagggccctgggaagaggcggctgagcggctggaggtag

SEQ ID NO: 233138 - DNA, 7610 bp, Artificial Sequence
  derived and/or modified sequence
cacgcactacgggttggcgccagagtcaaaaggcgtcggccctctggcaagatggctgctgcggaggcgttggagcgcggaaatctggaaccgggatggcgacgtctacactgagtcggaggcgaaggagcttactccacgggaacagcctctagataatctgagttgttgaaaatacgaagcctgttactcgtgaacagtggctgacaacagtgttgttgtgagcctggctgtctgcttggacccagaggtttcgtctgccagggtttttggttgtatttaggatttcagggaaaagtgtccaagctttcagtgttggagcaggtatggacgacaaaggcgacccgagcaatgaggaggcacctaaggccatcaaacccaccagcaaagagttcaggaaaacatggggttttcgaaggaccactatcgccaagcgagagggcgcaggggacgcggaggctgacccactggagccgccacccccacagcagcagctgggcctgtccctgcggcgcagtgggaggcagcccaagcgcactgagcgcgtggagcagttcctgaccattgcgcggcgccgcggcaggaggagcatgcctgtctccctggaggattctggtgagcccacgtcctgccccgccacagacgccgagacagcctccgagggcagcgtggaaagcgcttctgagaccagaagcggcccccagtctgcttccacagctgtgaaggaacgaccagcctcttctgaaaaggtgaaaggaggggatgaccacgatgacacctccgatagtgacagcgatggcctgaccttgaaagagcttcagaatcgccttcgcaggaagcgggaacaggagcccactgagaggcccctgaaagggatccagagtcgcctgcggaagaagcgccgggaggagggtcccgccgagactgtgggctccgaggccagtgacactgtggagggcgtcctgcccagtaagcaggagcccgagaacgatcagggggttgtgtcccaggctgggaaagatgacagagagagtaagttggagggaaaggcggctcaggacatcaaagatgaggagcctggagacttgggccgaccgaagcctgaatgtgagggttacgaccccaacgccctgtattgcatttgccgccagcctcacaacaacaggtttatgatttgctgtgaccgctgtgaagaatggtttcatggcgattgtgtgggcatttctgaggctcgagggaggcttttggaaaggaatggggaagactatatctgcccaaactgcaccattctgcaagtgcaggatgagactcattcagaaacggcagatcagcaggaagctaaatggagacctggagatgctgatggcaccgattgtacaagtataggaacaatagagcagaagtctagcgaagaccaagggataaagggtagaattgagaaagctgcaaatccaagtggcaagaagaaactcaagatcttccagcctgtgatagaggcgcctggtgcctcaaaatgtattggccccgggtgctgtcacgtggcgcagcccgactcggtgtactgcagtaatgactgtatcctcaaacacgccgcagcgacaatgaagtttctaagctcaggtaaagaacagaagccaaagcctaaagaaaagatgaagatgaagccagagaagcccagtcttccgaaatgcggtgctcaggcaggtattaaaatctcttctgtgcacaagagaccagctccagaaaaaaaagagaccacagtgaagaaggcagtggtggtccctgcgcggagtgaagcactcgggaaggaagcagcttgtgagagcagcacgccgtcgtgggcgagcgatcacaattacaatgcagtaaagccagaaaagactgctgctccctcgccgtcactgttgtataaatccacgaaggaagacaggaggtccgaggagaaagcggcagccatggcagcctcaaagaaaacagcccctccaggctccgcggtgggcaagcagcctgcacctagaaacctcgtgccaaagaagtcttcttttgctaatgtggcagcagccacaccagccattaaaaagccaccctcaggtttcaagggcaccatccccaagaggccatggctctccgctaccccatcgagtggtgcttcagctgccaggcaggccggaccggcacctgcagcggcaacggctgcctccaagaagttccctggctccgctgctttggtgggagccgtaaggaagccagtggtaccttctgttccaatggcctcgccagccccaggacgccttggggctatgagtgctgcaccatcgcagccaaattcacaaattcggcaaaatatcagacgctccttaaaagagattttgtggaaaagagtcaatgacagcgatgacttaatcatgacagaaaacgaagtaggaaaaattgccctccatattgagaaggagatgtttaacttgtttcaagttacagataatcgctacaagagtaaatatcgcagcatcatgttcaacctgaaggaccctaaaaatcagggactcttccatcgtgttctgcgtgaggaaatctctttggcgaaacttgtgagactgaagccagaagaacttgtatctaaagagctttccacgtggaaagagaggccagcgagatctgtgatggagtccagaactaaactgcacaatgaaagcaagaagacggcccccaggcaggaggccatccccgatctggaggactctccgccagtgtcggattcagaggaacagcaagagtcagcacgtgctgtccctgagaagagcacagcgccgcttctcgacgtcttcagcagcatgttgaaagacaccaccagtcagcaccgcgcacacctcttcgatctcaactgtaaaatttgcacaggccaggttccctccgcagaagatgagccagctccgaaaaaacaaaaattgtcagcttctgttaagaaagaagacttaaaatcaaagcatgacagctctgcacctgacccagctccggattcagctgatgaggtgatgccggaggctgtgcctgaagttgcctctgagccaggcctagaaagtgcttctcatccaaatgtggacagaacgtatttccctgggcctccaggagatggccatcccgagccctccccgctggaagacctgtccccctgcccagcctcctgtgggagcggggtggtcaccaccgtcacagtgtccggccgggaccccaggaccgctccaagcagttcatgcacagccgtggcctccgcagcatcccgcccagacagcacccacatggtggaagccagacaggatgtgccgaagcctgtcttgacttctgtgatggtgcccaagtccatactagctaagccatcctcatctcctgacccaagatacctgtcagttcctccgtcaccaaatatcagcacttcagaatcacgttcccctccagagggagacacgaccctctttttgtctcgactcagcaccatttggaaaggatttattaacatgcagagtgtggcaaaatttgtcactaaggcgtatcctgtctctgggtgttttgattacctcagtgaggatttgcctgacacaattcacattggtgggaggatcgcaccgaagacagtttgggattatgttggcaaactcaagtcttctgtgtctaaggagctctgtctgatccgcttccaccccgccacagaggaagaggaggtcgcctatatctctctctactcctatttcagcagccgtggccgctttggtgttgtagctaataacaacaggcacgtcaaggacctctacctgatcccgctgagcgcccaggaccctgttccatccaaactcttgccctttgagggaccaggtaagcgccggctttctgggtggaggtgaggcccacctgcacctgcacccctcctcccactgacatgccctgctgagtcctgaccagcccagggctctctgggagcaggagttaggagcacagacgcagcggttagcaataggattcatctttgagggcgtaggactgtggcacgagaagtacccctgattcacagcataaattgtcttaggagagttttttagagagggaaaaacccacagcctgcaaccagctcatcttggcctcaggtcagagaagactcagtgcccagaagcccaaggctcagccagaaagggaggtgacactcccagcggccctgctctttcctctagacagactcgggagccagcacacaccgggaagtggctccatcagggatcacttctctaacagggatggatttccaggagacttaacaataatgacatagaaaactatttctagaaataattattttaaaatctgcagctcaaattgtaataggttcattcatctttggcaagctattttgtgtttgcacgttccttggaaagtactgtatttaaacgattatttacaaatagcctaaaatacatctttgtcaagggttgagggtgattccaggggccacgtgctctgttagtgaccagctctttcatagccccttagaagaagctgatgtgacttcagttaggggttagtatctgatgcccaactgaagtgtctccgtggccatgcagtccccagaggattggtgttctctcaaagcgggtgtgtggatcacacagtgtcctctgaagtgcttcgtcataaaggcaggtgctgtctggaccctgtgcctcagtgccctctgtccctgtcaccaggcctcggcgggtgttcctgccatagctgtgcagggtgttcccacccacacccctcatgccgcaccctagctagctggggtcctgtaggggccactccacatcttgggcgggacttctgtcgccccaggcacagcccacgttcctactggagcccattcttcacagctggagtgggctcagcctatgcctgtgttgtggaattatatgtccataaagggattggttggtatcagtaatttcagggttaaatatttgctggcgtggtgcattaaattattttagtgccagataaatttttaaaagcaaagtgctttagtgtgtcccctcaaatcctacttgggataaagagatgccacctaatgggtggcagaaaggaccctggtagaggttcttggtgttgcttgtgaagagctctggccagctccacgtgaccagggagaggaaaagcccggccctcctggaggtgaagaccgagaagctggcctctccgcacctgtgaagacccactggtcagttgcaagtgcgacagtgtgtgcactcagtgcagacactgcagcacctcagcacctccctaccggggtggaaagagcactttttctttacagaaacatgattcttagatagcgagcctcccctttttaaaacaattgaggcgatatttcatcctttcttgagcttctctccctgctcatctccaaacttggagctgtcaggtgagcacggttgtagggtgttgagcgagccccggcgcatgccgggcaccgggttccccacactgggcagtgacggggcccagggaggccaccagaggagcggcgcctccattctccccacagcaagggctggctgtgcaggtgcagccccggggcagagggaaaggacaggtctcccagcacctcccggatggcaccgggacaaggagggctgggctggggtcactcaccttgtctgctgagtgcgatggcaccaaccacccacactgtcagctccgcgaccagctgggggaacgtcacactcgcccaccaaggcacttgctgaggccacgacgccgcctgacggggacacacaaaagccccagggactttgatccacgataaagagcagaggcgtctgggtaaagtaacacagggcaagggactttagaaaagtaacagctagtgaaacctttccatacacttcagaaatgttttaacttaagacttcagtataatgttaacttctcctgatgtccttgttgacatgaatgcgtgtgcgtgaaatctcacacacttccatggtcactaaacagccttcaccccgggccaggccatcgggtactcggcccgcttcacgtactgattacttgacttggcgttttctagatataaacatgtacatgtgtgtcctggctttgtggtgtaaatgtgtagtgcgtgtgcatgtgcgcgcgtgtgtgtgtgtaaggctaggtcctggcatgtttcccctgtctcagcggaccctgtcctcacggagatagcccagaagcccttggacagcacaggccacacctgagggtgctgatggtggtgactccacagagctgtggtcaggggtgagcgtgtgctgcgcagcttggagtcacgcccccagaagtgctgggtgagggtctgcaggacccagctccattccacagcctcagttctctgcggcacatgcagcacaggcctgaaggagacctggcgccccagccttgagctgcccgtctgcatcagggcactgatgtgggagcatcttcccctggggatgttaaggagaaggtcctgttgggggtagagattcacgcagaaaagagtgactgactcgtccatgtgcctcagtttataccacacaattgcaggtgtccatgcctcccacacatggggacctagtgggttttgacagcgtggtgtccagtcctagccccctcagtgcttgctgttcacacttaagcaagtgaaggcctgaaggtgcccagctgtgccctcaggggaaacttaagtcacccgccctgtcagcacttggcccttgtcgggcagtgagagtggagctgcccccgcagcaccctcaggagccatgcagttcacagcagtagctggatctccctgaggacatttgtccttgcatatcttaatgatttgtccacagaaacaccgggttgtcttcctctgcccctctgccccgcagtgggggcactctctgtaactcagcatcacggtggggggcagctgggaggcctggttccaggtgaccttctccacctagatgttcaccccactcagttccagctttaccaacagggccccccgcagggacttggggtcgcagagtcccggcctgtctcagggccttgttcatggaagggagatgagtcaggttgaaagctcatcgtgtagggttctgtgcagggcccttacaggactggaccgcagccaagatgcctgcctgttaaccatgcccagcccccgtcatttccgcgtgaagccgcaggcctcggagccttggtctgaaatgcctgtggagtaacctcggtccataaacatgggtgcacagtctgttctccccaagtacagggcaggaggaaacaccgccctctgtagctgctcgaatggaaagggctcttttctctgaggtctttatacattagaaagctcttctgggaagaatgtttgaatccatagtgtctttctgtattcacttttaattgctttctaaattagctgagaaattctgacttgaaatattgtcaggtaagcatttcttcagttttcatgtgtgtatgtaacagtagctttgcatggaaattgtaatcagagtcaaatacagtattgaatggaatgtactgccttctcctcctaaatcaataaacatctttcatgg

SEQ ID NO: 233139 - DNA, 7551 bp, Artificial Sequence
  derived and/or modified sequence
ctcggtggccgtccgcccactccgcggcgttcggggaaatggctgcgagaccctagaggcctgcggagcttactccacgggaacagcctctagataatctgagttgttgaaaatacgaagcctgttactcgtgaacagtggctgacaacagtgttgttgtgagcctggctgtctgcttggacccagaggtttcgtctgccagggtttttggttgtatttaggatttcagggaaaagtgtccaagctttcagtgttggagcaggtatggacgacaaaggcgacccgagcaatgaggaggcacctaaggccatcaaacccaccagcaaagagttcaggaaaacatggggttttcgaaggaccactatcgccaagcgagagggcgcaggggacgcggaggctgacccactggagccgccacccccacagcagcagctgggcctgtccctgcggcgcagtgggaggcagcccaagcgcactgagcgcgtggagcagttcctgaccattgcgcggcgccgcggcaggaggagcatgcctgtctccctggaggattctggtgagcccacgtcctgccccgccacagacgccgagacagcctccgagggcagcgtggaaagcgcttctgagaccagaagcggcccccagtctgcttccacagctgtgaaggaacgaccagcctcttctgaaaaggtgaaaggaggggatgaccacgatgacacctccgatagtgacagcgatggcctgaccttgaaagagcttcagaatcgccttcgcaggaagcgggaacaggagcccactgagaggcccctgaaagggatccagagtcgcctgcggaagaagcgccgggaggagggtcccgccgagactgtgggctccgaggccagtgacactgtggagggcgtcctgcccagtaagcaggagcccgagaacgatcagggggttgtgtcccaggctgggaaagatgacagagagagtaagttggagggaaaggcggctcaggacatcaaagatgaggagcctggagacttgggccgaccgaagcctgaatgtgagggttacgaccccaacgccctgtattgcatttgccgccagcctcacaacaacaggtttatgatttgctgtgaccgctgtgaagaatggtttcatggcgattgtgtgggcatttctgaggctcgagggaggcttttggaaaggaatggggaagactatatctgcccaaactgcaccattctgcaagtgcaggatgagactcattcagaaacggcagatcagcaggaagctaaatggagacctggagatgctgatggcaccgattgtacaagtataggaacaatagagcagaagtctagcgaagaccaagggataaagggtagaattgagaaagctgcaaatccaagtggcaagaagaaactcaagatcttccagcctgtgatagaggcgcctggtgcctcaaaatgtattggccccgggtgctgtcacgtggcgcagcccgactcggtgtactgcagtaatgactgtatcctcaaacacgccgcagcgacaatgaagtttctaagctcaggtaaagaacagaagccaaagcctaaagaaaagatgaagatgaagccagagaagcccagtcttccgaaatgcggtgctcaggcaggtattaaaatctcttctgtgcacaagagaccagctccagaaaaaaaagagaccacagtgaagaaggcagtggtggtccctgcgcggagtgaagcactcgggaaggaagcagcttgtgagagcagcacgccgtcgtgggcgagcgatcacaattacaatgcagtaaagccagaaaagactgctgctccctcgccgtcactgttgtataaatccacgaaggaagacaggaggtccgaggagaaagcggcagccatggcagcctcaaagaaaacagcccctccaggctccgcggtgggcaagcagcctgcacctagaaacctcgtgccaaagaagtcttcttttgctaatgtggcagcagccacaccagccattaaaaagccaccctcaggtttcaagggcaccatccccaagaggccatggctctccgctaccccatcgagtggtgcttcagctgccaggcaggccggaccggcacctgcagcggcaacggctgcctccaagaagttccctggctccgctgctttggtgggagccgtaaggaagccagtggtaccttctgttccaatggcctcgccagccccaggacgccttggggctatgagtgctgcaccatcgcagccaaattcacaaattcggcaaaatatcagacgctccttaaaagagattttgtggaaaagagtcaatgacagcgatgacttaatcatgacagaaaacgaagtaggaaaaattgccctccatattgagaaggagatgtttaacttgtttcaagttacagataatcgctacaagagtaaatatcgcagcatcatgttcaacctgaaggaccctaaaaatcagggactcttccatcgtgttctgcgtgaggaaatctctttggcgaaacttgtgagactgaagccagaagaacttgtatctaaagagctttccacgtggaaagagaggccagcgagatctgtgatggagtccagaactaaactgcacaatgaaagcaagaagacggcccccaggcaggaggccatccccgatctggaggactctccgccagtgtcggattcagaggaacagcaagagtcagcacgtgctgtccctgagaagagcacagcgccgcttctcgacgtcttcagcagcatgttgaaagacaccaccagtcagcaccgcgcacacctcttcgatctcaactgtaaaatttgcacaggccaggttccctccgcagaagatgagccagctccgaaaaaacaaaaattgtcagcttctgttaagaaagaagacttaaaatcaaagcatgacagctctgcacctgacccagctccggattcagctgatgaggtgatgccggaggctgtgcctgaagttgcctctgagccaggcctagaaagtgcttctcatccaaatgtggacagaacgtatttccctgggcctccaggagatggccatcccgagccctccccgctggaagacctgtccccctgcccagcctcctgtgggagcggggtggtcaccaccgtcacagtgtccggccgggaccccaggaccgctccaagcagttcatgcacagccgtggcctccgcagcatcccgcccagacagcacccacatggtggaagccagacaggatgtgccgaagcctgtcttgacttctgtgatggtgcccaagtccatactagctaagccatcctcatctcctgacccaagatacctgtcagttcctccgtcaccaaatatcagcacttcagaatcacgttcccctccagagggagacacgaccctctttttgtctcgactcagcaccatttggaaaggatttattaacatgcagagtgtggcaaaatttgtcactaaggcgtatcctgtctctgggtgttttgattacctcagtgaggatttgcctgacacaattcacattggtgggaggatcgcaccgaagacagtttgggattatgttggcaaactcaagtcttctgtgtctaaggagctctgtctgatccgcttccaccccgccacagaggaagaggaggtcgcctatatctctctctactcctatttcagcagccgtggccgctttggtgttgtagctaataacaacaggcacgtcaaggacctctacctgatcccgctgagcgcccaggaccctgttccatccaaactcttgccctttgagggaccaggtaagcgccggctttctgggtggaggtgaggcccacctgcacctgcacccctcctcccactgacatgccctgctgagtcctgaccagcccagggctctctgggagcaggagttaggagcacagacgcagcggttagcaataggattcatctttgagggcgtaggactgtggcacgagaagtacccctgattcacagcataaattgtcttaggagagttttttagagagggaaaaacccacagcctgcaaccagctcatcttggcctcaggtcagagaagactcagtgcccagaagcccaaggctcagccagaaagggaggtgacactcccagcggccctgctctttcctctagacagactcgggagccagcacacaccgggaagtggctccatcagggatcacttctctaacagggatggatttccaggagacttaacaataatgacatagaaaactatttctagaaataattattttaaaatctgcagctcaaattgtaataggttcattcatctttggcaagctattttgtgtttgcacgttccttggaaagtactgtatttaaacgattatttacaaatagcctaaaatacatctttgtcaagggttgagggtgattccaggggccacgtgctctgttagtgaccagctctttcatagccccttagaagaagctgatgtgacttcagttaggggttagtatctgatgcccaactgaagtgtctccgtggccatgcagtccccagaggattggtgttctctcaaagcgggtgtgtggatcacacagtgtcctctgaagtgcttcgtcataaaggcaggtgctgtctggaccctgtgcctcagtgccctctgtccctgtcaccaggcctcggcgggtgttcctgccatagctgtgcagggtgttcccacccacacccctcatgccgcaccctagctagctggggtcctgtaggggccactccacatcttgggcgggacttctgtcgccccaggcacagcccacgttcctactggagcccattcttcacagctggagtgggctcagcctatgcctgtgttgtggaattatatgtccataaagggattggttggtatcagtaatttcagggttaaatatttgctggcgtggtgcattaaattattttagtgccagataaatttttaaaagcaaagtgctttagtgtgtcccctcaaatcctacttgggataaagagatgccacctaatgggtggcagaaaggaccctggtagaggttcttggtgttgcttgtgaagagctctggccagctccacgtgaccagggagaggaaaagcccggccctcctggaggtgaagaccgagaagctggcctctccgcacctgtgaagacccactggtcagttgcaagtgcgacagtgtgtgcactcagtgcagacactgcagcacctcagcacctccctaccggggtggaaagagcactttttctttacagaaacatgattcttagatagcgagcctcccctttttaaaacaattgaggcgatatttcatcctttcttgagcttctctccctgctcatctccaaacttggagctgtcaggtgagcacggttgtagggtgttgagcgagccccggcgcatgccgggcaccgggttccccacactgggcagtgacggggcccagggaggccaccagaggagcggcgcctccattctccccacagcaagggctggctgtgcaggtgcagccccggggcagagggaaaggacaggtctcccagcacctcccggatggcaccgggacaaggagggctgggctggggtcactcaccttgtctgctgagtgcgatggcaccaaccacccacactgtcagctccgcgaccagctgggggaacgtcacactcgcccaccaaggcacttgctgaggccacgacgccgcctgacggggacacacaaaagccccagggactttgatccacgataaagagcagaggcgtctgggtaaagtaacacagggcaagggactttagaaaagtaacagctagtgaaacctttccatacacttcagaaatgttttaacttaagacttcagtataatgttaacttctcctgatgtccttgttgacatgaatgcgtgtgcgtgaaatctcacacacttccatggtcactaaacagccttcaccccgggccaggccatcgggtactcggcccgcttcacgtactgattacttgacttggcgttttctagatataaacatgtacatgtgtgtcctggctttgtggtgtaaatgtgtagtgcgtgtgcatgtgcgcgcgtgtgtgtgtgtaaggctaggtcctggcatgtttcccctgtctcagcggaccctgtcctcacggagatagcccagaagcccttggacagcacaggccacacctgagggtgctgatggtggtgactccacagagctgtggtcaggggtgagcgtgtgctgcgcagcttggagtcacgcccccagaagtgctgggtgagggtctgcaggacccagctccattccacagcctcagttctctgcggcacatgcagcacaggcctgaaggagacctggcgccccagccttgagctgcccgtctgcatcagggcactgatgtgggagcatcttcccctggggatgttaaggagaaggtcctgttgggggtagagattcacgcagaaaagagtgactgactcgtccatgtgcctcagtttataccacacaattgcaggtgtccatgcctcccacacatggggacctagtgggttttgacagcgtggtgtccagtcctagccccctcagtgcttgctgttcacacttaagcaagtgaaggcctgaaggtgcccagctgtgccctcaggggaaacttaagtcacccgccctgtcagcacttggcccttgtcgggcagtgagagtggagctgcccccgcagcaccctcaggagccatgcagttcacagcagtagctggatctccctgaggacatttgtccttgcatatcttaatgatttgtccacagaaacaccgggttgtcttcctctgcccctctgccccgcagtgggggcactctctgtaactcagcatcacggtggggggcagctgggaggcctggttccaggtgaccttctccacctagatgttcaccccactcagttccagctttaccaacagggccccccgcagggacttggggtcgcagagtcccggcctgtctcagggccttgttcatggaagggagatgagtcaggttgaaagctcatcgtgtagggttctgtgcagggcccttacaggactggaccgcagccaagatgcctgcctgttaaccatgcccagcccccgtcatttccgcgtgaagccgcaggcctcggagccttggtctgaaatgcctgtggagtaacctcggtccataaacatgggtgcacagtctgttctccccaagtacagggcaggaggaaacaccgccctctgtagctgctcgaatggaaagggctcttttctctgaggtctttatacattagaaagctcttctgggaagaatgtttgaatccatagtgtctttctgtattcacttttaattgctttctaaattagctgagaaattctgacttgaaatattgtcaggtaagcatttcttcagttttcatgtgtgtatgtaacagtagctttgcatggaaattgtaatcagagtcaaatacagtattgaatggaatgtactgccttctcctcctaaatcaataaacatctttcatggaaa

SEQ ID NO: 233140 - DNA, 3570 bp, Artificial Sequence
  derived and/or modified sequence
atggacgacaagggcgaccccagcaacgaggaggcccccaaggccatcaagccgaccagtaaagagttccgaaagacttggggattccgccgaactacgatcgccaagagggaaggcgcgggagacgcagaagctgacccccttgagccccccccaccacaacagcagttgggactgtcacttagaagaagcggccggcagcctaagcgcactgaacgcgttgaacagtttttgaccatcgcacgccggaggggtcgtaggtcaatgccagttagcctggaggactcgggggagcccacttcgtgccccgcaacagatgccgaaacagcttctgaaggatccgtcgaaagcgcctcggaaacacgctccggaccacagtcggctagcaccgccgttaaagagaggcctgctagcagcgagaaggtgaaaggaggagacgaccacgatgacactagcgattctgatagcgacggtctgaccttgaaggaacttcagaataggttgcggagaaaaagggagcaagagccgaccgaaaggcctctcaaaggaatccagtctagactgcgcaaaaaacgaagagaggaggggccagccgagaccgtcgggtccgaagctagcgataccgtcgaaggagtgttgcctagcaagcaggaaccagaaaatgaccaaggtgttgtttctcaggcaggcaaggatgaccgggagagcaagcttgaaggtaaagccgctcaagatatcaaggacgaggagcccggtgatctgggacgcccaaaaccggaatgtgagggatacgaccccaatgctttgtactgtatctgccgccagccccacaacaatcgatttatgatttgttgtgaccgctgtgaagagtggttccacggcgattgcgttggcataagtgaagcccgcggccgcctcctagaacggaacggtgaggattatatttgccccaattgcaccatcctgcaggtacaggacgaaacccatagtgagacggctgatcagcaagaggcaaagtggcgccccggcgatgcggatggcacagattgtacgtcaatcggtacaattgaacagaagagttccgaagatcaaggaataaaggggcggatcgagaaagccgcaaatcccagcggtaaaaaaaagctgaagattttccagcccgtcatcgaggcaccaggtgctagtaagtgtattggccctggctgttgtcatgtcgctcagcccgatagcgtgtattgctctaacgactgtatactgaaacacgccgccgcaaccatgaagtttctgtcttctggtaaggaacagaagccaaagccaaaagaaaaaatgaagatgaagcccgagaaaccctccctgcctaagtgcggcgctcaggcaggaataaaaataagctccgtccataagagacccgctccggagaaaaaggaaacaactgtgaaaaaagccgtggttgtgcccgccaggtccgaggccctgggcaaggaggccgcttgcgaatcctcaacaccctcctgggcctctgaccacaactacaatgccgtgaagcctgagaagaccgctgcaccaagtccttctttactgtataagtcaaccaaagaggatcgccgttccgaggagaaggccgcagctatggccgccagtaagaaaactgcgccacccgggagtgcagtgggaaagcagcctgccccaagaaatctagtgccgaaaaagagctcctttgctaatgtggcagccgctacacctgccataaaaaagccaccatcagggtttaaaggtaccatacccaagaggccctggttaagtgctacgccaagcagtggggcatcggccgcacggcaggcaggaccagcaccagctgccgccaccgctgccagtaaaaagttcccaggcagcgcagcgttggtaggagccgtgagaaagccagtcgtgccgtccgtccctatggcctccccagccccaggacgcctgggagctatgagcgcagcgccctcgcaacctaacagccaaatcagacagaacatcagacggtccttgaaggaaatcctgtggaaacgtgtgaatgacagtgatgacctcattatgacagagaacgaagttggcaaaattgcacttcacatcgagaaggaaatgttcaaccttttccaagtgacagacaacagatacaagagcaaataccgatcaatcatgtttaatttgaaggatccaaaaaaccagggactttttcatagggtgctccgtgaggaaatctctctcgccaaattagttcgacttaaacccgaagagctcgtctccaaggagctgtctacctggaaggaacgaccagcgcgaagtgtgatggagtccaggacgaaacttcacaatgaatcaaaaaagacagccccgagacaggaagcaatccctgacctggaagactcccctcctgtgagcgacagcgaggagcaacaagaaagcgccagagccgtgcctgagaagtccactgccccattgttggatgtgttttcaagtatgctgaaagacactacatcccagcatagagcgcatctatttgatttgaattgtaagatctgcacaggccaggtgccaagcgcagaggatgaaccagcgccaaaaaagcaaaaactgagcgctagcgtcaaaaaggaggacctaaagtcaaaacacgactcatccgcaccagatcccgcccctgactcagcagacgaggtgatgcccgaagcggtcccggaggtggcatctgagccggggctagaatctgccagccatccaaacgtggatcgaacgtattttcctgggccccccggggatggacatccggagcccagcccattagaggacctgagcccatgcccagcctcctgcgggagtggggtggtgactacagtgaccgtctctggcagggatcctcgtaccgcccccagtagttcatgtaccgcagttgcctccgctgcatcccggccagactccactcatatggtggaagctcggcaggatgtccccaaaccagtgctcacgtccgtgatggtgccaaagagcatactggccaaacccagtagtagtcctgaccccaggtacctgagcgtgcccccctctccaaacatatccacctcagaatcgaggagccccccagagggggatacgaccctcttcctgagccggttatccaccatttggaaagggtttataaacatgcagagtgtagcaaagtttgtgaccaaagcatatcctgtgtccggctgtttcgattatctgagcgaggatctgcctgacactattcacattggaggtaggattgcgccaaagaccgtctgggactatgttggtaaactcaagtcctcagtttccaaggaattgtgtttgattcgatttcatcctgccacagaagaggaggaggtcgcctatataagcctatacagctacttcagcagccgaggccgtttcggagtggtggctaataacaaccgccatgtgaaagatttgtacctgattcccctctcggctcaagaccctgtaccctccaaactacttccgtttgagggccctggcaagaggaggctatctggctggcgttag

SEQ ID NO: 233141 - DNA, 3570 bp, Artificial Sequence
  derived and/or modified sequence
atggacgacaagggcgaccccagcaacgaggaggcccccaaggccatcaaacccacaagcaaagaattcagaaaaacatggggatttcgaagaacaacaattgcgaaaagggaaggtgctggtgacgccgaggcagaccccctggaacctccaccaccccagcagcaactcggcctcagtctgcgaaggagcggaagacaacccaagcggaccgagcgcgttgaacaatttcttactatagctcggcgacgcggcagaaggtccatgcccgttagcctggaagactcaggggagcctacttcctgtcctgcgactgatgcggaaaccgcctcagaggggtcggttgagagcgcgtctgaaacaaggtccggaccccaatctgcctccaccgcggtgaaggagcggccggcaagctcagagaaggttaaaggcggcgacgatcatgacgatacgtcagactcagattccgacggcttaaccttaaaagaacttcagaatcgacttagacgaaaacgcgagcaggagcctacggaacgccccctcaaaggaatccagtcccggctgagaaaaaaacgccgcgaggaggggccagcagagaccgtaggctccgaggcttctgacacagtagaaggagtgctgccctccaaacaagagcccgagaatgatcagggtgtggtatctcaggcaggtaaggacgatcgggagagcaaactcgaggggaaagccgcccaggacattaaagacgaagaacctggcgatctgggacgtcctaagcctgaatgtgaaggttacgatcctaacgccctctattgtatctgccgccaaccccataacaataggttcatgatttgctgtgatagatgcgaagaatggtttcatggagattgcgtgggaattagcgaagctagaggcaggctgctcgaacgtaacggggaggattatatctgccctaattgcaccatcctgcaagtgcaggacgaaacccacagtgagacagcagaccagcaagaggctaaatggcgcccaggagatgcagacggcacagactgcacgagcattggcactattgagcagaagtctagcgaggatcagggcataaagggacggatagagaaagctgccaatcctagcggtaaaaagaaattaaaaatctttcaaccggttattgaggctcctggcgcctccaagtgcattggaccgggctgttgtcatgttgcccagcctgacagcgtgtattgttctaatgactgcattctcaagcacgccgcagctactatgaagttcctgagctctggcaaggagcaaaaacccaaaccgaaggagaaaatgaagatgaagccagagaaaccaagcctccctaagtgcggggcacaggccggtataaagattagctcagtccacaaacgcccagctccagagaagaaggagaccaccgtcaaaaaagctgtcgtagttccagcccgctctgaagcgttgggcaaggaagccgcctgcgaaagcagcaccccatcatgggctagcgatcacaactataatgctgtgaaaccagaaaagaccgcagctccaagtccgagtcttctgtacaaatctaccaaggaggatagacgctcagaggaaaaggctgctgcgatggccgccagtaaaaaaactgccccgcctggttccgcagttggcaagcagcccgctccccgaaacctggtgcctaagaaaagttccttcgccaacgtggcagccgctaccccagccatcaaaaagccacccagtggctttaaaggaacaattcccaagcggccatggctcagcgctacaccatcttccggtgcctctgctgcacggcaggctggacctgcaccggctgctgccaccgcagcctccaagaagttccccggttcagccgctctggtgggagctgtcaggaagcccgtcgtaccttctgtcccaatggcctctcccgctccgggcagattaggcgccatgagtgctgccccctctcaacctaacagccagatccgtcagaacatccggagatcgcttaaggaaattctgtggaaacgcgtcaacgattcggacgatctcattatgaccgagaacgaggttgggaaaatcgccctgcacattgagaaggagatgtttaatctgtttcaggtgactgataatcgctacaaaagcaaatatcggagcatcatgttcaatctgaaggacccaaagaaccaggggctttttcatcgcgtgttgagagaggagatctctcttgcaaaacttgtacgcctaaaacccgaagagctggtgtctaaagaactgtccacctggaaagagcgcccagctaggagtgtgatggagagtagaacaaaactgcacaacgagtctaaaaaaaccgcaccacgtcaggaggctatcccagacctggaagactccccccccgtgtcggactccgaggaacagcaagaatccgcacgggcggtgccagaaaagtcaaccgctccccttcttgatgtgttctcctctatgctgaaggacacaacgtcccaacacagagcccacctgttcgacttaaattgtaagatttgtacagggcaagtgccaagtgcagaggatgagcccgccccgaagaaacaaaaactgtctgcatccgtgaaaaaagaagaccttaagtccaagcacgattcttccgctcccgacccagcccctgactctgctgacgaggtaatgcccgaagccgtgccagaggtggcctcggaacctggcttggaaagtgcttctcatcctaacgtggatagaacatatttcccaggcccacccggtgatgggcacccagaaccatcccccctggaagatttaagtccctgtcctgcttcttgcggctccggagtggtgaccacagtcaccgtgagcgggcgagacccgcgcaccgcacctagttctagctgcacagcagtggctagcgcagcctctcgacccgattctacacacatggtggaagcccggcaagacgtcccaaagcccgttctgacatcagtcatggttcctaagagcatactcgctaaaccttcttcaagccctgacccgagatatctcagcgtccctcccagtcctaacattagtacaagtgaatccaggtctccccctgagggagataccaccctctttctgagccggctctcaactatatggaaggggtttataaatatgcagagcgtggccaagttcgtcactaaagcctatccagtcagtgggtgctttgactacctgtcggaggacttgccggatacaattcatattggtggacgcattgccccaaagacagtatgggattatgttggaaaactaaaaagctctgtttctaaggaactgtgtctcatccgattccatcccgcaacagaggaagaagaggttgcctatatttcactctatagctatttttcatcacgcggccgattcggtgtggtggccaataataatcgccacgtgaaagatctatacttaatcccgcttagtgcccaggaccctgtgccttccaagttattaccatttgaaggtcccgggaaacgaaggttgtcgggttggcgctag

SEQ ID NO: 233142 - DNA, 3570 bp, Artificial Sequence
  derived and/or modified sequence
atggacgacaaaggggatcccagtaacgaggaggctccaaaggccattaaacccactagcaaagaatttaggaagacctggggtttccggagaactacgattgccaagcgagagggtgccggagatgccgaagccgaccccttagaaccccctcctccccagcagcaactcggcctgtctctccggaggtcaggtcggcaacctaagaggactgagagggtagagcagttcctgacgatagctagaaggagggggaggcggagtatgccagtgtcgttggaagattccggagagccaacctcctgccctgccactgatgcagaaacagcgagcgagggaagtgtggagtcagcttctgagaccaggagcggccctcagtctgcttctaccgccgtgaaggaacggcctgcctctagcgagaaggtgaagggtggcgacgatcacgacgacacctcagatagtgactcagatggtttgacactgaaagaactccagaaccgcctgaggcgcaagagggaacaagagcccaccgaaaggcccctgaaaggcattcagtctcggctgagaaagaaaaggcgagaggaaggtccagccgaaacagtcgggagcgaggctagcgacaccgtcgaaggcgtgttgccaagcaagcaggaacccgaaaatgatcagggggtggtgtcccaggccggaaaagatgatcgggagtcaaagctggaaggtaaagccgctcaagacataaaagatgaggaacccggtgaccttgggagaccgaaacctgagtgcgaggggtatgaccccaacgctctttactgcatttgccgacagccccacaataatcgatttatgatatgctgcgaccgctgtgaggaatggttccatggcgactgcgtgggaatcagtgaggcgagaggcaggctcctggagagaaatggtgaggattacatctgtccaaattgtaccatcctgcaggtgcaagatgagacacatagtgaaacagctgaccaacaagaggctaagtggcgcccaggtgatgcggatggcacagactgcaccagcatcggtacaatcgagcaaaaaagctctgaggaccagggaataaagggcagaatcgagaaggccgctaacccctcaggtaagaaaaagctgaagatcttccagccagtgattgaggcacccggagcctccaaatgtataggaccaggctgttgccatgtcgcccagcccgattctgtttactgtagcaacgactgtatcttaaagcacgccgcagcgacaatgaagttcttgtcctcagggaaggaacagaagccgaaaccaaaggaaaaaatgaagatgaagcctgagaagccatccttgcctaagtgtggagctcaagctgggattaaaatatccagtgtgcacaaaaggcccgctcctgaaaaaaaagagacaaccgtaaagaaggccgtcgtcgtccctgccagaagcgaagcccttgggaaggaagcggcttgcgaatcatcgacacccagctgggcaagcgatcataattataacgctgtgaagccagagaagacagccgcaccatcaccatcacttctctacaaatctaccaaggaagaccggcgatcagaggagaaggccgctgccatggccgcaagcaaaaagacggctccgccaggcagcgctgttggtaagcagccggctcccaggaacttggtccccaagaaaagtagtttcgctaatgttgccgctgcaacccccgctataaagaaacccccttctggattcaaaggaaccatcccaaagagaccttggctctcagcaactccatcatctggcgcaagcgctgcccgacaggctggaccggctccagccgcagctaccgcagcctcaaaaaagtttccaggcagcgcagccttggtaggtgctgtccgcaagcctgtggtgccaagcgtgccaatggcatcccccgctcccggacgacttggtgccatgtctgctgctccctcacaaccaaacagtcaaattcggcagaacatccggagaagcttaaaggaaattctgtggaagcgggtgaatgactccgatgacctgatcatgaccgaaaacgaagttggaaaaatcgccttgcatattgagaaggagatgttcaacttgtttcaggtgactgataataggtacaaaagcaagtatcgaagcattatgtttaacctcaaagaccccaaaaatcagggcctgtttcatcgtgtccttcgagaagagatcagcctggctaaactggtgcgtcttaagcccgaagaactggtcagcaaggagctgtctacgtggaaggaaaggcccgcacgatccgtgatggaatctaggaccaaattgcataacgaatcgaagaaaacagccccacggcaagaggcaataccggatttggaggactctccccctgtgtccgattctgaagagcagcaagaatccgcccgagcagtgcccgagaaatcaactgcgccactcctggacgtcttttctagtatgttaaaggatactacatctcagcaccgagcccacctgtttgacttaaattgcaagatatgtaccggacaggttccaagcgccgaggacgagcccgctccaaagaagcagaagttaagcgctagtgtgaaaaaggaagacctgaaaagtaagcatgatagcagtgcccctgacccagcccctgactctgcagacgaagttatgcccgaggcagtgcctgaagtcgcttccgaacccggactggaatcagctagtcaccctaatgttgaccggacctacttccccggtcctcctggggatgggcaccctgagccttcacctctggaggatctcagcccatgcccagcgtcatgtgggagcggggttgtgacgacggtgacggtttccggacgggacccacgcacggctcctagttcttcatgcaccgctgtagcctcagctgcgtcgagaccggacagtactcacatggttgaggctaggcaggatgtgcccaaacctgtgcttacgagcgtgatggtgcccaagagcatactcgcaaagccctctagttccccagaccctcggtatctgagtgttcccccttcccccaatatatctaccagcgagtctcgcagtccaccagagggcgacactacattgtttctgagcaggctcagtactatttggaaggggtttatcaacatgcagtccgttgccaagtttgtaactaaggcctatcccgtctccggatgtttcgactatctgtccgaagacttgcctgataccattcacattggtggacgcatcgccccaaaaacagtgtgggactatgtgggcaagctgaagtccagcgtgtccaaagaactctgtttaatcaggttccacccagctaccgaggaggaggaggttgcatatattagtctgtacagttatttcagtagtagggggagatttggcgtcgtcgctaacaacaatcgacatgtcaaggacctctacctgatccctttaagcgcccaagaccccgtgccctccaagttactccctttcgagggccctggtaagcgcagactatccggctggcgctag

SEQ ID NO: 233143 - DNA, 3570 bp, Artificial Sequence
  derived and/or modified sequence
atggacgacaaaggggatcccagcaatgaggaggccccaaaagccattaagccgacctcaaaggagttcaggaaaacctggggcttcagaagaacgaccatcgccaaaagagaaggcgcaggggacgctgaagctgacccgttggaaccacctcctccgcagcagcaacttggacttagtctgaggagatctggcaggcaacctaagcgcacagagagagttgagcaattcttaactattgcgagacggaggggacgcagaagcatgcctgtatcactggaagactccggagagcctacctcctgcccggctacagacgccgagaccgccagcgaaggtagtgtcgaatccgcctctgagaccagatccgggcctcagagtgccagtacagctgtaaaggagcgacctgcgtcatctgagaaagtgaagggcggagacgatcacgacgatacgtctgacagtgacagcgatggcttaacattaaaggaactgcaaaataggctgcgacgaaagcgcgaacaggagccaaccgagagacccctgaagggaatccaatcgcgactgcggaagaagagaagagaagaaggtcccgcagagaccgtggggtctgaggcctctgatacggtggaaggagtgctacctagtaagcaggaacccgagaacgatcagggggttgtgagccaggcgggaaaggacgaccgagagtcgaaactcgaggggaaagccgcacaggacattaaggacgaagagcccggtgacctgggtcggcctaaacccgagtgtgaggggtatgaccccaacgctctgtactgcatatgtagacagccccacaataatcgctttatgatttgctgcgaccgttgcgaggagtggtttcacggggactgcgtgggcatatccgaagccaggggtaggctgctggaaagaaacggagaagattacatctgtcccaactgtaccattttgcaggtccaggatgagactcactctgagaccgccgaccagcaggaagctaagtggaggccaggggacgctgatggcacagattgtaccagtattgggaccatcgaacagaagagcagcgaggaccagggcattaagggacggatcgaaaaggctgcaaatccgtcaggcaagaaaaagctgaaaatcttccaacccgtcatcgaagcccctggagcttccaagtgcatagggccaggttgctgtcatgtggctcaaccagactctgtctactgtagcaacgattgcatcctgaaacacgctgctgcgacaatgaagttcctgagctccggcaaagagcagaaaccgaaacccaaagaaaagatgaagatgaaaccagaaaaaccctctctccccaaatgcggggctcaggccggaattaagataagtagcgtgcacaagcgccctgcccctgagaagaaggagactacagtgaaaaaggctgttgtagtgcctgctcgttcagaagctttgggaaaggaagcagcttgtgagagctctacaccatcttgggcaagcgatcacaattataacgcggtgaagccagaaaagaccgcggctccatctcccagtctcctgtataaatctactaaggaagaccgcaggagcgaagagaaagctgcggcaatggccgcttctaaaaaaactgccccaccgggtagcgcagtgggtaagcaacccgctccccgaaacttagttcccaagaagagcagcttcgcgaacgtggccgcagccacccccgcaatcaagaagccacccagtggtttcaaaggcacaatacccaagcgcccatggctgtcagctacaccctcatcaggtgcctctgcagccagacaagcgggacccgctcccgctgcagccaccgctgcctccaagaagttccctggaagtgccgctctggtgggagctgtgaggaagccagtggtgccatcagtgcctatggcaagccccgctcctggtcggctcggggcaatgagcgccgctcctagccagcctaatagtcaaatcagacagaacattaggcgcagccttaaggagattttatggaaacgcgttaatgatagcgatgatcttataatgaccgagaacgaggtcggaaagatcgctctccatatagagaaggagatgtttaacctattccaagtgacggacaatagatacaaaagcaaataccgcagtatcatgttcaatctgaaagatcctaagaatcaggggttgtttcacagggtgctacgggaagagattagtctcgcaaagttggtgaggctgaagcctgaggaactggtgagcaaagagctgtccacctggaaggagcggccagcaagaagcgttatggagagcagaaccaagctgcacaatgagtccaagaaaacagccccacggcaggaagctataccagatcttgaggattcgcctcctgtctccgattccgaggagcaacaggagtctgcgagagcagtccctgaaaagtccacagctccacttctggatgttttcagcagcatgctgaaggatactaccagtcaacatcgggctcacctctttgatttgaattgtaagatctgcacaggccaggtgccctcggccgaggatgaacctgccccaaagaagcagaagttgagcgcgagcgtgaagaaggaagatctgaagagcaagcacgattcctcagcgccagaccccgcacccgattcagcggacgaggttatgcccgaggctgtcccagaagtagcgagcgaacctgggctcgagtctgcttctcacccaaacgtcgaccgtacttattttccagggccaccgggtgacggccaccccgaaccttctcccctggaggacctctcgccatgcccagcatcctgcgggtctggcgtcgtgacgacagtgactgtctctgggagggaccccaggacagctccttcttcctcatgcaccgccgtggcaagtgccgcatcccgacctgacagtacccacatggtggaggctcggcaggatgtgccaaaacccgtgctgacatctgtcatggtgccaaaaagtatcctggcaaaacctagctcatcaccggatcccaggtaccttagcgttcctccaagtcccaatatttcaacatctgagagtagatctccacctgaaggagataccacgctgttcctttcccgcctgagtacaatctggaagggcttcattaatatgcagtctgtcgctaagttcgtgacaaaagcctaccctgtgtctggctgttttgattacctctctgaggaccttccagacactattcacattgggggaagaatagccccaaagaccgtgtgggactacgtgggcaagctgaaatcttcagtctctaaagaattgtgcctgattaggttccatccggctaccgaggaggaggaagtagcatacattagtctgtatagttatttttcatcacggggtagatttggcgtagtggctaacaataatcgtcacgtgaaggatctgtacctgatccccctcagcgcgcaggaccccgtaccctctaaactcctgccattcgagggtcccggtaaaagacggctgagcggatggaggtag

SEQ ID NO: 233144 - protein, 645 aa, Artificial Sequence
  derived and/or modified sequence
MVAERTHKAAATGARGPGELGAPGTVALVAARAERGARLPSPGSCGLLTLALCSLALSLLAHFRTAELQARVLRLEAERGEQQMETAILGRVNQLLDEKWKLHSRRRREAPKTSPGCNCPPGPPGQPGTRGFPGFPGPIGLDGKPGHPGPKGDMGLTGPPGQPGPQGQKGEKGQCGEYPHRLLPLLNSVRLAPPPVIKRRTFQGEQSQASIQGPPGPPGPPGPSGPLGHPGLPGPMGPPGLPGPPGPKGDPGIQGYHGRKGERGMPGMPGKHGAKGAPGIAVAGMKGEPGIPGTKGEKGAEGSPGLPGLLGQKGEKGDAGNSIGGGRGEPGPPGLPGPPGPKGEAGVDGQVGPPGQPGDKGERGAAGEQGPDGPKGSKGEPGKGEMVDYNGNINEALQPSRGPALRGPPGLPGQIGPPGAPGIPGQKGEIGLPGPPGHDGEKGPRGKPGDMGPPGPQGPPGKDGPPGVKGENGHPGSPGEKGEKGETGQAGSPVPGLPGPEGPPGPPGLQGVPGPKGEAGLDGAKGEKGFQGEKGDRGPLGLPGASGLDGRPGPPGTPGPIGVPGPAGPKGERGSKGDPGMTGPTGAAGLPGLHGPPGDKGNRGERGKKGSRGPKGDKGDQGAPGLDAPCPLGEDGLPVQGCWNK

SEQ ID NO: 233145 - protein, 645 aa, Artificial Sequence
  derived and/or modified sequence
MVAERTHKAAATGARGPGELGAPGTVALVAARAERGARLPSPGSCGLLTLALCSLALSLLAHFRTAELQARVLRLEAERGEQQMETAILGRVNQLLDEKWKLHSRRRREAPKTSPGCNCPPGPPGQPGTRGFPGFPGPIGLDGKPGHPGPKGDMGLTGPPGQPGPQGQKGEKGQCGEYPHRLLPLLNSVRLAPPPVIKRRTFQGEQSQASIQGPPGPPGPPGPSGPLGHPGLPGPMGPPGLPGPPGPKGDPGIQGYHGRKGERGMPGMPGKHGAKGAPGIAVAGMKGEPGIPGTKGEKGAEGSPGLPGLLGQKGEKGDAGNSIGGGRGEPGPPGLPGPPGPKGEAGVDGQVGPPGQPGDKGERGAAGEQGPDGPKGSKGEPGKGEMVDYNGNINEALQEIRTLALMGPPGLPGQIGPPGAPGIPGQKGEIGLPGPPGHDGEKGPRGKPGDMGPPGPQGPPGKDGPPGVKGENGHPGSPGEKGEKGETGQAGSPVPGLPGPEGPPGPPGLQGVPGPKGEAGLDGAKGEKGFQGEKGDRGPLGLPGASGLDGRPGPPGTPGPIGVPGPAGPKGERGSKGDPGMTGPTGAAGLPGLHGPPGDKGNRGERGKKGSRGPKGDKGDQGAPGLDAPCPLGEDGLPVQGCWNK

SEQ ID NO: 233146 - DNA, 1938 bp, Artificial Sequence
  derived and/or modified sequence
atggtggccgagagaacccacaaggccgccgccaccggcgccagaggccccggcgagctgggcgcccccggcaccgtggccctggtggccgccagagccgagagaggcgccagactgcccagccccggcagctgcggcctgctgaccctggccctgtgcagcctggccctgagcctgctggcccacttcagaaccgccgagctgcaggccagagtgctgagactggaggccgagagaggcgagcagcagatggagaccgccatcctgggcagagtgaaccagctgctggacgagaagtggaagctgcacagcagaagaagaagagaggcccccaagaccagccccggctgcaactgcccccccggcccccccggccagcccggcaccagaggcttccccggcttccccggccccatcggcctggacggcaagcccggccaccccggccccaagggcgacatgggcctgaccggcccccccggccagcccggcccccagggccagaagggcgagaagggccagtgcggcgagtacccccacagactgctgcccctgctgaacagcgtgagactggcccccccccccgtgatcaagagaagaaccttccagggcgagcagagccaggccagcatccagggcccccccggcccccccggcccccccggccccagcggccccctgggccaccccggcctgcccggccccatgggcccccccggcctgcccggcccccccggccccaagggcgaccccggcatccagggctaccacggcagaaagggcgagagaggcatgcccggcatgcccggcaagcacggcgccaagggcgcccccggcatcgccgtggccggcatgaagggcgagcccggcatccccggcaccaagggcgagaagggcgccgagggcagccccggcctgcccggcctgctgggccagaagggcgagaagggcgacgccggcaacagcatcggcggcggcagaggcgagcccggcccccccggcctgcccggcccccccggccccaagggcgaggccggcgtggacggccaggtgggcccccccggccagcccggcgacaagggcgagagaggcgccgccggcgagcagggccccgacggccccaagggcagcaagggcgagcccggcaagggcgagatggtggactacaacggcaacatcaacgaggccctgcagcccagcagaggccccgccctgagaggcccccccggcctgcccggccagatcggcccccccggcgcccccggcatccccggccagaagggcgagatcggcctgcccggcccccccggccacgacggcgagaagggccccagaggcaagcccggcgacatgggcccccccggcccccagggcccccccggcaaggacggcccccccggcgtgaagggcgagaacggccaccccggcagccccggcgagaagggcgagaagggcgagaccggccaggccggcagccccgtgcccggcctgcccggccccgagggcccccccggcccccccggcctgcagggcgtgcccggccccaagggcgaggccggcctggacggcgccaagggcgagaagggcttccagggcgagaagggcgacagaggccccctgggcctgcccggcgccagcggcctggacggcagacccggcccccccggcacccccggccccatcggcgtgcccggccccgccggccccaagggcgagagaggcagcaagggcgaccccggcatgaccggccccaccggcgccgccggcctgcccggcctgcacggcccccccggcgacaagggcaacagaggcgagagaggcaagaagggcagcagaggccccaagggcgacaagggcgaccagggcgcccccggcctggacgccccctgccccctgggcgaggacggcctgcccgtgcagggctgctggaacaagtag

SEQ ID NO: 233147 - DNA, 1938 bp, Artificial Sequence
  derived and/or modified sequence
atggtggccgagagaacccacaaggccgccgccaccggcgccagaggccccggcgagctgggcgcccccggcaccgtggccctggtggccgccagagccgagagaggcgccagactgcccagccccggcagctgcggcctgctgaccctggccctgtgcagcctggccctgagcctgctggcccacttcagaaccgccgagctgcaggccagagtgctgagactggaggccgagagaggcgagcagcagatggagaccgccatcctgggcagagtgaaccagctgctggacgagaagtggaagctgcacagcagaagaagaagagaggcccccaagaccagccccggctgcaactgcccccccggcccccccggccagcccggcaccagaggcttccccggcttccccggccccatcggcctggacggcaagcccggccaccccggccccaagggcgacatgggcctgaccggcccccccggccagcccggcccccagggccagaagggcgagaagggccagtgcggcgagtacccccacagactgctgcccctgctgaacagcgtgagactggcccccccccccgtgatcaagagaagaaccttccagggcgagcagagccaggccagcatccagggcccccccggcccccccggcccccccggccccagcggccccctgggccaccccggcctgcccggccccatgggcccccccggcctgcccggcccccccggccccaagggcgaccccggcatccagggctaccacggcagaaagggcgagagaggcatgcccggcatgcccggcaagcacggcgccaagggcgcccccggcatcgccgtggccggcatgaagggcgagcccggcatccccggcaccaagggcgagaagggcgccgagggcagccccggcctgcccggcctgctgggccagaagggcgagaagggcgacgccggcaacagcatcggcggcggcagaggcgagcccggcccccccggcctgcccggcccccccggccccaagggcgaggccggcgtggacggccaggtgggcccccccggccagcccggcgacaagggcgagagaggcgccgccggcgagcagggccccgacggccccaagggcagcaagggcgagcccggcaagggcgagatggtggactacaacggcaacatcaacgaggccctgcaggagatcagaaccctggccctgatgggcccccccggcctgcccggccagatcggcccccccggcgcccccggcatccccggccagaagggcgagatcggcctgcccggcccccccggccacgacggcgagaagggccccagaggcaagcccggcgacatgggcccccccggcccccagggcccccccggcaaggacggcccccccggcgtgaagggcgagaacggccaccccggcagccccggcgagaagggcgagaagggcgagaccggccaggccggcagccccgtgcccggcctgcccggccccgagggcccccccggcccccccggcctgcagggcgtgcccggccccaagggcgaggccggcctggacggcgccaagggcgagaagggcttccagggcgagaagggcgacagaggccccctgggcctgcccggcgccagcggcctggacggcagacccggcccccccggcacccccggccccatcggcgtgcccggccccgccggccccaagggcgagagaggcagcaagggcgaccccggcatgaccggccccaccggcgccgccggcctgcccggcctgcacggcccccccggcgacaagggcaacagaggcgagagaggcaagaagggcagcagaggccccaagggcgacaagggcgaccagggcgcccccggcctggacgccccctgccccctgggcgaggacggcctgcccgtgcagggctgctggaacaagtag

SEQ ID NO: 233148 - DNA, 1938 bp, Artificial Sequence
  derived and/or modified sequence
atggttgccgaacgcacacataaggccgcggctacaggggcaagaggccctggtgaacttggcgctcccggcactgtggcactcgtcgctgctcgagccgaaaggggggcgcggctgccatcacctggctcctgtggcctcttgactctcgccctttgttctctggcgctttctctcctggcccactttagaaccgctgagctgcaggctagagttctcaggttagaggctgaaagaggcgaacagcagatggaaaccgctatcctgggccgggtgaatcagctgctggacgaaaaatggaaactacatagccgccggaggcgggaagcaccgaagacatctccaggatgtaattgcccgcccggtccgccaggccaacctggaactagaggatttcccgggttcccgggcccaataggcttggacggcaaaccggggcatcccggcccaaagggggacatgggactgaccggaccccctggacagcccgggcctcagggtcagaaaggcgaaaaggggcaatgcggagaatatccccacagactacttcctctcctgaacagcgttcgtcttgctcctccacccgtgatcaaaagaagaactttccagggcgagcagtctcaggccagcatccaagggccccctggcccgccagggcccccaggcccgtccggacccctgggacatcccgggctccctgggcccatggggccaccgggccttcctggccccccggggcccaagggtgaccccgggattcagggttatcatggtcgcaagggggagagaggaatgccaggcatgccgggtaagcatggggccaagggcgcccctggcatcgcagtcgcaggcatgaaaggcgagcctggcatccctggtacaaagggggaaaagggcgcggagggtagcccaggtctgccaggcctgctaggccaaaaaggcgaaaaaggagatgccgggaatagtattggcggaggcagaggggagcctgggcctcctggcttgcccggcccacccgggccaaaaggagaggctggggttgacggccaggtggggccaccaggccagcctggggacaagggagaacgcggcgccgccggagagcagggccctgatggtcctaaggggtccaagggcgaaccaggaaagggtgagatggtcgattataacggaaacatcaacgaagctctgcaacccagccgcggcccggccctgaggggtcctcccgggctgcccggacagatcggaccaccaggcgccccgggtatcccaggacagaagggtgaaattggactccccgggccccctggtcatgacggagagaaaggcccccggggtaagcccggcgacatgggtcctcctggccctcagggcccccctgggaaagatggccccccaggggtcaagggcgaaaacggccacccaggttcccctggtgaaaaaggagaaaagggcgaaaccggacaagcgggcagtcccgtgcctgggctgcccggtccggaggggcctccaggaccaccggggttgcaaggagtgcccggccccaaaggagaggccggccttgacggggcaaagggcgagaaaggattccaaggagagaagggcgatagaggaccactcggtcttcccggtgcgtccggactcgacggccggcccggcccacctggcacccctggccccatcggagtgcccggccccgccgggcccaagggcgagcgcggctccaaaggcgaccccggcatgaccggacccacaggcgcggctggtctcccaggcctgcatggtccgcctggtgataagggcaatagaggggagaggggcaaaaaaggatcccgaggcccgaagggcgacaagggggaccagggcgccccaggactggacgctccgtgcccactcggagaagatgggttgcctgtacagggctgctggaacaaatag

SEQ ID NO: 233149 - DNA, 1938 bp, Artificial Sequence
  derived and/or modified sequence
atggttgctgaaaggacccataaggccgccgctacaggggctcgcgggcccggcgaactgggcgccccaggtacagtggcactggtggccgcaagagcagaacgcggtgcccgcctgccctcaccggggagttgcgggctgcttactctagcgttgtgctcactggccctcagcctgctcgcccattttcgtacggctgagctccaggcacgcgtgctccggttggaagcagaacggggcgagcaacagatggagaccgctatccttggaagagtgaaccagctcctcgatgagaaatggaaactgcacagtagacgcaggcgcgaagcccccaagaccagcccagggtgcaactgcccccccggacctcctgggcaacccggaacacggggattccccgggtttccaggtcccatcggcctggatggaaaaccgggccaccctggccccaagggcgacatgggactcaccgggccccctgggcagccagggccccagggccagaagggcgaaaaggggcagtgcggtgagtaccctcatcggttgctgcccttactcaattctgtgcggctggctccacctccagtgatcaagagaagaactttccaaggagaacaatctcaggcctctatccagggaccaccaggccctcccggaccccctggtccctctggccctttgggccacccaggcctcccaggcccaatggggccaccggggttgccaggtcctcccggtcccaaaggggaccccggtatccagggctatcatggacgaaagggtgagagggggatgccgggcatgcctggcaagcatggcgccaaaggtgctccggggatcgctgtagcaggaatgaaaggcgagccaggtattccaggaacaaaaggagagaaaggggccgagggttctcctggattacccgggcttctgggacagaaaggagagaaaggagacgctggaaactccattgggggcggacggggcgagcctgggcctcccggcctgcctggtccacccggcccgaaaggcgaagccggtgtggacggtcaggtcggcccccctggtcagcctggagacaagggcgagaggggtgctgcgggtgaacaaggccccgacggtcctaagggaagtaagggggagcctgggaaaggggaaatggtggattataacgggaacatcaacgaagccctgcaggagatcaggactctggccctgatgggtccccccggcttacccgggcagatcggacctcctggagcccctggtattccgggacagaaaggcgagattggtctaccgggcccgcctggacatgacggcgaaaaaggacccaggggcaagccaggcgatatggggcccccggggcctcaaggccccccaggtaaggatggccctcccggggtgaagggcgagaatggccaccctggaagcccaggtgagaagggggaaaagggggagaccggacaggccggctctcctgtgcctgggctgcccggcccagaggggcctccgggcccccctggactgcagggcgtacctgggccgaagggcgaagcaggccttgacggcgccaagggtgaaaaggggtttcagggggagaagggagacagggggcctctagggcttcccggggcctcagggttagatggacgacctggacctcccggaacccctggccccatcggcgtccctggccctgctggaccaaagggggaacgcggctccaagggagaccccggtatgacagggcctaccggagccgctgggctgcctggcctgcacggcccccccggcgataaaggaaacaggggagagcgggggaagaaaggcagcagaggcccaaaaggcgataaaggcgaccaaggggctcctggactcgatgctccttgtcccctaggagaagacgggctacccgtccagggttgctggaacaagtag

SEQ ID NO: 233150 - DNA, 1938 bp, Artificial Sequence
  derived and/or modified sequence
atggtggccgagaggacccacaaggccgccgccaccggggcccggggccctggagagctgggcgcccctggcaccgtggccctggtggccgcccgggcagagcggggggcccggctgcccagccctggcagctgtggcctgctgaccctggccctgtgcagcctggccctgagcctgctggcccacttcagaacagctgagctgcaggcccgggtgctgcggctggaggccgagcggggggagcagcagatggagacagccatcctgggccgggtgaaccagctgctggatgagaagtggaagctgcacagcagaagaagaagagaggcccccaagaccagccctggctgcaactgccccccaggccccccaggccagcccggcacccggggcttccctggcttccctggccccatcggcctggatggcaagccaggccaccctggccccaagggggacatgggcctgactggacctcctggccagcccggcccccagggccagaagggggagaagggccagtgtggggagtacccccaccggctgctgcccctgctgaacagcgtgcggctggcccctcctcctgtgatcaagaggaggaccttccagggcgagcagagccaggccagcatccagggccccccaggccccccaggccccccaggccccagcggccccctgggccaccctggcctgcccggccccatgggccccccaggcctgcccggccccccaggccccaagggggaccccggcatccagggctaccacggcaggaagggggagcggggcatgcctggcatgcctgggaagcacggggccaagggggcccctggcattgctgtggccggcatgaagggggagcccggcatccctggcaccaagggggagaagggagctgagggcagccctggcctgcccggcctgctgggccagaagggggagaagggagatgctggcaacagcattggaggcggccgcggggagcccggccccccaggcctgcccggccccccaggccccaagggggaggccggcgtggatggccaggtgggccccccaggccagcccggggacaagggggagagaggagctgctggggagcagggcccagatggccccaagggcagcaagggggagcctggaaaaggagagatggtggactacaacggcaacatcaatgaggccctgcagcccagccggggccctgccctgcggggccccccaggcctgcccggccagatcggccccccaggggcccctggcatccctggccagaagggggagatcggcctgcccggccccccaggccatgatggagagaagggcccccggggcaagccaggggacatgggccccccaggcccccagggccccccaggcaaggatggccccccaggagtgaagggagaaaatggccaccctggcagccctggagagaagggggagaagggggagaccggccaggccggcagccctgtgcccggcctgcccggccctgagggccccccaggccccccaggcctgcagggcgtgcccggccccaagggggaggccggcctggatggagccaagggggagaagggcttccagggcgagaagggggaccggggccccctgggcctgcccggggccagcggcctggatggccggcccggccccccaggcaccccaggccccatcggcgtgcccggccctgctggccccaagggggagcggggcagcaagggggaccccggcatgacaggccccactggagctgctggcctgcccggcctgcacggccccccaggggacaagggcaacagaggagagcggggcaagaagggcagccggggccccaagggggacaagggggaccagggcgcccctggcctggatgccccctgccccctgggggaggatggcctgcctgtgcagggctgctggaacaagtag

SEQ ID NO: 233151 - DNA, 1938 bp, Artificial Sequence
  derived and/or modified sequence
atggtggccgagaggacccacaaggccgccgccaccggggcccggggccctggagagctgggcgcccctggcaccgtggccctggtggccgcccgggcagagcggggggcccggctgcccagccctggcagctgtggcctgctgaccctggccctgtgcagcctggccctgagcctgctggcccacttcagaacagctgagctgcaggcccgggtgctgcggctggaggccgagcggggggagcagcagatggagacagccatcctgggccgggtgaaccagctgctggatgagaagtggaagctgcacagcagaagaagaagagaggcccccaagaccagccctggctgcaactgccccccaggccccccaggccagcccggcacccggggcttccctggcttccctggccccatcggcctggatggcaagccaggccaccctggccccaagggggacatgggcctgactggacctcctggccagcccggcccccagggccagaagggggagaagggccagtgtggggagtacccccaccggctgctgcccctgctgaacagcgtgcggctggcccctcctcctgtgatcaagaggaggaccttccagggcgagcagagccaggccagcatccagggccccccaggccccccaggccccccaggccccagcggccccctgggccaccctggcctgcccggccccatgggccccccaggcctgcccggccccccaggccccaagggggaccccggcatccagggctaccacggcaggaagggggagcggggcatgcctggcatgcctgggaagcacggggccaagggggcccctggcattgctgtggccggcatgaagggggagcccggcatccctggcaccaagggggagaagggagctgagggcagccctggcctgcccggcctgctgggccagaagggggagaagggagatgctggcaacagcattggaggcggccgcggggagcccggccccccaggcctgcccggccccccaggccccaagggggaggccggcgtggatggccaggtgggccccccaggccagcccggggacaagggggagagaggagctgctggggagcagggcccagatggccccaagggcagcaagggggagcctggaaaaggagagatggtggactacaacggcaacatcaatgaggccctgcaggagatccgcaccctggccctgatgggccccccaggcctgcccggccagatcggccccccaggggcccctggcatccctggccagaagggggagatcggcctgcccggccccccaggccatgatggagagaagggcccccggggcaagccaggggacatgggccccccaggcccccagggccccccaggcaaggatggccccccaggagtgaagggagaaaatggccaccctggcagccctggagagaagggggagaagggggagaccggccaggccggcagccctgtgcccggcctgcccggccctgagggccccccaggccccccaggcctgcagggcgtgcccggccccaagggggaggccggcctggatggagccaagggggagaagggcttccagggcgagaagggggaccggggccccctgggcctgcccggggccagcggcctggatggccggcccggccccccaggcaccccaggccccatcggcgtgcccggccctgctggccccaagggggagcggggcagcaagggggaccccggcatgacaggccccactggagctgctggcctgcccggcctgcacggccccccaggggacaagggcaacagaggagagcggggcaagaagggcagccggggccccaagggggacaagggggaccagggcgcccctggcctggatgccccctgccccctgggggaggatggcctgcctgtgcagggctgctggaacaagtag

SEQ ID NO: 233152 - DNA, 1938 bp, Artificial Sequence
  derived and/or modified sequence
atggtggccgagcggacccacaaggccgccgccaccggcgcccggggccctggcgaacttggggcgcccggtactgtagccctggtagccgctcgcgctgaacgcggtgcaagacttcccagtccggggtcgtgtgggttacttaccttggcactgtgtagcctagccctcagtttactagcccactttcgcactgcagagttgcaggcccgagtgctgaggttggaagccgaaaggggagaacagcagatggagactgccatcctcgggcgggttaaccaactgttggacgagaaatggaagttacactcacgccgccggcgcgaagctcccaaaacatctccaggctgtaactgcccgcctggacccccgggccaacccggcactcgaggcttcccggggttccctggtcccattggattagacggtaaaccgggccatccaggaccaaagggtgatatgggcctcaccggccccccaggccaaccggggcctcagggtcagaagggtgagaaggggcagtgtggcgaataccctcatcgcctgcttccactactcaattctgtgcgtctggcaccaccaccagttatcaagcgcagaacattccaaggcgaacagagccaggcctctatccaggggccacccggtccccccgggcctcccggaccctccggccccctcggacatcctggactgcctggaccaatgggtcctcctgggttgccgggcccccctggtccgaagggagaccctggaatccaaggctatcacggccgtaagggggaaagaggaatgcccggaatgccagggaagcacggcgccaagggggctcccggtattgcagttgccggcatgaaaggagaacccggaattccgggcaccaagggagaaaaaggggcagaaggatcacccgggttaccaggcctgctgggccagaagggcgagaaaggagacgctggcaattccatcggcgggggtagaggggagcctggcccacccggcctgccagggccccccgggcccaagggggaggcaggggtggatgggcaagtggggccaccgggccaacccggcgacaagggcgaacggggagctgccggagaacagggacctgatggtcccaaaggcagcaagggagagccgggaaagggagaaatggtggattacaacggaaatattaacgaagctctgcagccctctaggggacctgccctgcgcgggccgccagggttgccgggtcagattggaccaccaggagctccgggaatcccagggcaaaagggagagatcggtctgcctggtcccccaggccacgacggtgagaagggacctaggggcaaacctggcgatatgggtcccccaggaccccagggcccccctggcaaagacgggccccccggggttaagggcgaaaatgggcaccctgggagcccgggcgagaagggcgaaaaaggagaaacggggcaggccggatcacccgttcctggattacccgggcccgagggaccacctgggccacccggcctccagggagtccccggcccaaagggtgaggccggcttagatggtgccaagggcgagaaaggcttccagggggagaagggcgacagagggccattggggctaccaggggcgagtggtcttgacggaagaccagggccacccggcactccagggcctataggagtgcccggccctgctgggcccaagggcgaacggggaagtaagggcgatcccgggatgactggcccaacaggggcagcgggccttcctggattacatggacctccaggagataaggggaacaggggcgaaaggggcaagaagggtagcaggggacccaagggcgacaaaggagatcaaggcgcccctggactcgacgccccctgtcctttgggagaggacggcctgcctgtccaaggatgttggaacaagtag

SEQ ID NO: 233153 - DNA, 1938 bp, Artificial Sequence
  derived and/or modified sequence
atggtggccgagcggacccacaaggccgccgccaccggcgcccggggacctggcgaactgggcgctcccggaactgtggccctggtggctgcccgtgcggaacgcggggcacgcctgcccagtccaggtagttgtgggcttctgacccttgcgctctgttcgctggcattgtccctgctcgctcacttcagaaccgctgaactgcaggccagggtgctcaggcttgaagccgagagaggagagcaacaaatggagaccgccattctgggccgggtgaaccagctgctggacgagaagtggaagctgcattccagacggagacgcgaagcacctaagacttcaccgggatgcaattgccctcccggaccaccaggccagcctgggacgaggggattcccagggtttccgggtcctattggcctggacgggaaacctggtcaccccggcccaaaaggcgacatgggtttaacagggccccccgggcagcctggcccccaggggcagaaaggcgagaagggccagtgcggggagtatccccacaggttgctaccgctcttaaactccgtgcgtcttgcgcctcccccagtgatcaaacgcagaacattccagggggaacagtctcaggcaagcatacaaggacctcccggcccccctggtcccccaggtccatccgggccgcttggtcaccccggattaccgggcccaatgggacctcccggccttccaggaccacctggcccaaaaggggacccaggcatccagggttaccatgggaggaaaggtgaacgtggaatgcccgggatgcccggaaagcatggggctaaaggagcaccaggcatcgcggtagccggaatgaagggcgagcctggtattccaggaacgaagggtgagaaaggggcagagggaagccccggtctgccagggctgttgggccagaagggagaaaagggggatgctggcaactcaattgggggcgggaggggggaaccgggccccccgggcttgccaggccctcctggcccaaaaggtgaagctggcgtggacggccaagtgggcccccctgggcagccgggcgataagggggagagaggtgccgccggcgaacagggcccagacggacctaaaggaagcaagggggaacctggcaaaggcgaaatggtggattataatggaaacattaatgaggctctacaggagattagaacgctcgcattgatgggccctccgggtctgccaggacagatcggaccgcctggagctccagggatcccaggtcagaaaggagagatcgggctcccgggaccccccggccatgatggagagaaaggcccacgtggtaaaccaggcgacatgggccctcctggcccacaggggccccccggaaaagacggtccacctggcgtgaagggggaaaacggtcatcctggtagtccaggcgagaaaggggaaaaaggtgagacagggcaagctggttctcccgtgcccggcctccctggaccagaaggacctccgggacctccggggctccagggagtcccagggcccaagggtgaagctggactggatggcgctaaaggggagaaggggtttcagggcgagaaaggggataggggtccattagggctcccgggcgcatccggcctcgatggacgacctggacctccaggcacccctggccccatcggagtccccgggcccgccggaccaaagggagagcgggggagcaagggagaccctggcatgactgggcctactggggctgctggactccccggcctacacggaccgccaggagacaagggaaataggggggagagaggaaagaagggaagtcgcggccctaaaggtgataagggtgaccagggagccccaggcctggacgccccgtgtcctcttggtgaagatggcctgcctgtccagggctgctggaacaaatag

SEQ ID NO: 233154 - DNA, 2921 bp, Artificial Sequence
  derived and/or modified sequence
aagtagcacggattgctcatccgatccgtgccgccgcagggagtgtgtcaagttacagaggcgccggaatcggcccctgcgctcctcgccagccgccacgacccacctctgcccatggggccctccgtgtgcgccccttcgcccggggactgaaactgactggcccgggagacacgaggcgcccagaaggactgacagcgcggcaccaactgctctgcagacacttgaagggaaagactgggcggagagaaggagagccggtcagattcccctaactttcctggacttggaacgttcttcgaaataacttttttctcacctaggtgtaccccaattaccgctggttgtgctttttcggcacttcctctcctactgctaatttttccgtcctctttgccgggagcagcggaaagggacgttttccagcgatacaagccctttccccctgccccgcagtttggatagagccttttggcagcggctgtcgcctttatttattctatttatttatttattggttctcaagacgcgagaggatggtagcggagcgcacccacaaagcggcagccaccggtgcccgcggccctggggagttgggcgcgcccgggacggtggctctggtggcggcgcgggcggagcgcggcgcacggctgccgagtccagggtcgtgcgggctgctgacgctggccctctgctcgctggcactcagcctgctcgcccactttcggacggccgagctgcaggcccgggtgctgcgcctggaagcggagcgcggggagcagcaaatggagacggctattttgggacgagtcaatcaactgctggacgagaaatggaagctccactcaaggaggcgccgggaggccccaaagacatctccaggatgtaactgcccaccaggcccccctggtcaaccaggaactagaggtttccctggatttccgggtcccattgggctggacggcaaaccgggccacccaggaccaaagggcgacatgggtctgacgggtcccccaggacagccgggaccccagggacaaaaaggagaaaagggtcagtgtggagagtacccacaccggctgctgcctctcctcaattcagtgcgactggctccacccccggtcataaaaaggcggacgttccagggcgaacagagccaggccagcatccaaggtccaccagggcccccaggcccccctggaccaagtggacctctggggcacccaggactgccagggcctatggggccacctggcttacctgggcctcctggaccaaagggagacccagggatccagggctaccacggccggaagggagaacggggcatgccagggatgccaggcaagcatggagccaagggggcgcccggaattgccgtggctgggatgaagggtgagccagggatcccaggaaccaagggtgagaagggggctgaaggctcccctgggcttcctggcctcctggggcagaagggagagaaaggcgatgctggcaactccattggaggaggcagaggggaacctggccctccagggctccctgggcccccagggccaaagggagaagcaggtgtcgatggccaggttggccccccagggcagccaggagacaagggggagcgtggagcagctggagaacagggaccagatggccccaagggctccaagggagaaccagggaaaggagagatggtggattacaatggaaacatcaatgaggctctccagccgagtaggggccctgccctcagggggcctcctggtcttcctgggcaaattggcccacctggagctccagggattccaggccagaagggggagattggactgccaggccctccaggacacgatggggaaaagggacctcgcggtaaaccaggagacatgggccctcctggtccccaaggccccccaggaaaggatggacctccaggagtgaagggagaaaacgggcacccagggagcccaggagagaagggggaaaaaggggagacaggacaagcaggctcaccggttcctgggctgccagggccagaggggcctcccggacctccggggctccaaggtgttcctggaccaaagggggaagcaggactagatggagcaaaaggagagaaaggcttccagggagaaaaaggagaccgtggtcccctgggactacccggagcttcaggtttggacggcaggcctgggccaccgggtactccaggaccaattggagttccaggcccagcgggaccaaagggcgagaggggcagcaaaggagaccctgggatgacaggaccaacgggagcagctgggcttcctggtttacatggaccacccggggacaagggaaaccggggggagagggggaagaaaggctctagagggcctaaaggggataagggagaccaaggagcgcctggattagatgccccctgcccattgggcgaagatggcttaccagtccaaggctgctggaacaagtgatgcctctaaccttggattggcctgtgtgtgtgtttgtacatagaatatttatttttatacagttttcactttttgaaaatgccagaagtatgatgcatcttacagattattaaaaaagaaagaaaaacctgcatattttgtacagaaaatatcaacctcttcccttttgtttacaagatgttttgtataagcctatgtctctaatacattttttgtttggtcgtaatgtctgcatgatatttgtgcacatttattaagtatcgaagcttaataaattattgtgtcctggtgccaaagggggccagccagaactgaggtgctggctagctcatgtgtgaattcacataaatgtagaggtccatgatatttgctaagctaggtgtgtctaagagtattttaaacccttatggattttcattattaaaggaaatgaaacatggcaattca

SEQ ID NO: 233155 - DNA, 2276 bp, Artificial Sequence
  derived and/or modified sequence
ggaaagactgggcggagagaaggagagccggtcagattcccctaactttcctggacttggaacgttcttcgaaataacttttttctcacctaggtgtaccccaattaccgctggttgtgctttttcggcacttcctctcctactgctaatttttccgtcctctttgccgggagcagcggaaagggacgttttccagcgatacaagccctttccccctgccccgcagtttggatagagccttttggcagcggctgtcgcctttatttattctatttatttatttattggttctcaagacgcgagaggatggtagcggagcgcacccacaaagcggcagccaccggtgcccgcggccctggggagttgggcgcgcccgggacggtggctctggtggcggcgcgggcggagcgcggcgcacggctgccgagtccagggtcgtgcgggctgctgacgctggccctctgctcgctggcactcagcctgctcgcccactttcggacggccgagctgcaggcccgggtgctgcgcctggaagcggagcgcggggagcagcaaatggagacggctattttgggacgagtcaatcaactgctggacgagaaatggaagctccactcaaggaggcgccgggaggccccaaagacatctccaggatgtaactgcccaccaggacctcctggtcaaccaggaactagaggtttccctggatttccgggtcccattgggctggacggcaaaccgggccacccaggaccaaagggcgacatgggtctgacgggtcccccaggacagccgggaccccagggacaaaaaggagaaaagggtcagtgtggagagtacccacaccggctgctgcctctcctcaattcagtgcgactggctccacccccggtcataaaaaggcggacgttccagggcgaacagagccaggccagcatccaaggtccaccagggcccccaggcccccctggaccaagtggacctctggggcacccaggactgccagggcctatggggccacctggcttacctgggcctcctggaccaaagggagacccagggatccagggctaccacggccggaagggagaacggggcatgccagggatgccaggcaagcatggagccaagggggcgcccggaattgccgtggctgggatgaagggtgagccagggatcccaggaaccaagggtgagaagggggctgaaggctcccctgggcttcctggcctcctggggcagaagggagagaaaggcgatgctggcaactccattggaggaggcagaggggaacctggccctccagggctccctgggcccccagggccaaagggagaagcaggtgtcgatggccaggttggccccccagggcagccaggagacaagggggagcgtggagcagctggagaacagggaccagatggccccaagggctccaagggagaaccagggaaaggagagatggtggattacaatggaaacatcaatgaggctctccaggagatccggacgctggccttgatggggcctcctggtcttcctgggcaaattggcccacctggagctccagggattccaggccagaagggggagattggactgccaggccctccaggacacgatggggaaaagggacctcgcggtaaaccaggagacatgggccctcctggtccccaaggccccccaggaaaggatggacctccaggagtgaagggagaaaacgggcacccagggagcccaggagagaagggggaaaaaggggagacaggacaagcaggctcaccggttcctgggctgccagggccagaggggcctcccggacctccggggctccaaggtgttcctggaccaaagggggaagcaggactagatggagcaaaaggagagaaaggcttccagggagaaaaaggagaccgtggtcccctgggactacccggagcttcaggtttggacggcaggcctgggccaccgggtactccaggaccaattggagttccaggcccagcgggaccaaagggcgagaggggcagcaaaggagaccctgggatgacaggaccaacgggagcagctgggcttcctggtttacatggaccacccggggacaagggaaaccggggggagagggggaagaaaggctctagagggcctaaaggggataagggagaccaaggagcgcctggattagatgccccctgcccattgggcgaagatggcttaccagtccaaggctgctggaacaagtgatgcctctaaccttggattggcctgtgtgtgtg

SEQ ID NO: 233156 - DNA, 1938 bp, Artificial Sequence
  derived and/or modified sequence
atggttgcagaaagaactcataaagcagccgctacaggcgctcgagggcctggagagctgggtgcaccaggaacagtagcactggtggcagctcgagcagaacggggagctagactgccgtctcctggatcctgcggcctcttgactctcgccctgtgttctttggcactttcactcctggcccactttaggacagcagagctccaggccagggtgctgagactggaggccgagcgcggagaacagcagatggagaccgcgatcctcggacgcgttaaccagctgctagacgagaaatggaaactgcattctcgccgaaggagggaggcacctaagactagtcctggctgtaattgcccacccggacctccgggacagcccggaacgcgcggttttcccggattcccgggtcccatcgggctggacggcaagcccggacaccctgggcctaaaggggatatgggcttaaccggtccaccgggtcaacccggaccccagggacagaagggagaaaagggacaatgcggggagtatccccaccgcctgctgcccctgttgaatagtgtcaggctggcacccccaccggtcatcaagcgacgtacattccaaggagagcaatctcaagctagtatccaaggcccacccggtcctccaggtccacccggtcccagcggtccattaggtcaccccggactccctggacctatggggccacccggactgccaggccctcccggaccgaagggggaccccggtatccagggctaccacggcagaaagggtgaacgtggcatgccaggcatgcccggtaaacacggggcaaagggagccccaggcatcgctgtggccggtatgaaaggggagcccggaatcccaggaaccaagggagaaaagggagctgagggttcccccggacttcccggactgttgggccagaagggggaaaagggcgatgctggaaacagtataggcggtggaaggggggagcccggacctcctgggctaccgggtcccccaggcccaaagggagaggcaggcgtggacgggcaggtaggcccacccggacagcccggagacaaaggcgaacgtggcgcagcaggcgaacaggggcctgatggaccgaagggctccaaaggggaacctgggaaaggcgaaatggtggattacaacggaaacatcaacgaggctttgcagccatcccggggacccgcactgcgtggtccccctggtctgcctggccagattggaccgcctggggctccgggaatccctggccaaaaaggtgaaataggacttccaggccctcctggccatgacggtgaaaaaggtccaagaggaaagcccggagacatgggaccgccaggtcctcaaggcccaccaggaaaggacggacctcctggcgtcaaaggcgagaatggccaccctgggagcccgggagaaaaaggggagaagggggagacaggtcaagcgggaagtccagtgcccggattgccagggcctgagggcccacccggacctcccggtttgcagggggtgcctgggccaaagggagaggctggtttggatggtgcaaaaggcgaaaaaggcttccagggggaaaaaggcgacagggggccactaggactaccgggagcctcaggtctcgacgggaggcccggaccaccaggcacaccagggcctatcggtgtgcctgggccagcgggtcctaaaggtgagagagggtctaagggagacccgggaatgaccggccctaccggtgctgccggtcttccaggtcttcacgggccacccggagacaagggcaataggggcgaacggggtaaaaaggggagccgcggtcctaaaggggacaagggcgatcagggagccccagggctggacgccccttgtcctctgggcgaggatgggctccctgtgcagggttgttggaacaagtag

SEQ ID NO: 233157 - DNA, 1938 bp, Artificial Sequence
  derived and/or modified sequence
atggtagccgagcgtacacataaggcagctgcaacaggggctaggggaccaggagagctgggagctcccggaactgtcgctttggttgccgctcgcgcagaacgcggagccagactgcccagccctggaagttgcggcctgttaactctcgccctgtgcagtctggccctctcactcctagcccactttcgcactgccgaactgcaagccagagttcttcgactcgaagctgaacggggagagcaacagatggagactgccatattaggtcgagttaatcagctgcttgatgaaaaatggaaacttcattcccgcaggcgtcgagaggcaccaaagaccagtcccggatgcaactgcccacctgggcctccgggacaaccaggaaccaggggcttccccggattcccgggtcccatcggtttggatgggaagcccggacacccaggccctaaaggcgatatggggctgacaggaccccctggccagcccggacctcaagggcagaagggagagaaggggcaatgcggggaatacccacatcggctgctccccctccttaacagtgtgaggctagccccacctcctgtcatcaagcgtaggactttccagggagagcaatctcaggctagtattcagggcccaccaggaccaccaggacctcccggtccctctggaccgcttgggcaccctggtctgcctgggccaatgggaccacccggtctcccgggtcctccaggtcctaagggggatcccggaatccaaggataccacgggaggaagggcgagcggggaatgcccggtatgccgggtaaacacggtgctaaaggcgctcccggtatagctgtcgccggaatgaagggggagcccggaatcccaggcaccaagggcgagaaaggtgctgagggatcaccaggcctgcccggactgctcggccaaaagggcgaaaaaggtgacgcaggaaactccattgggggaggaaggggcgagccaggccctccaggtcttccagggcctcctggtccaaagggcgaggcgggtgtcgacggacaggttgggccaccaggccagccaggagataaaggtgaacgaggcgcagctggagaacagggacctgacggccctaaaggcagcaaaggcgaacccggaaagggagaaatggttgactataatggaaatattaacgaagccctgcaggaaatccgtactctggcactgatgggccctccgggactccctggacagatcggtcccccaggggcacccggtattcccggtcagaagggtgagatcgggctcccagggcctccagggcatgacggcgaaaagggacctcggggaaagcctggggacatggggcctcctggtccccagggtcccccaggaaaggacggcccacccggagtgaagggcgaaaacggtcatccaggatcgcctggggagaagggggagaagggcgagaccgggcaggccggaagccccgttccaggccttcccggaccagaggggccaccgggtccgccaggccttcagggcgtgcccggaccaaagggagaggccggactggatggtgccaaaggcgaaaaaggatttcagggtgagaagggcgaccggggacctttggggctacctggagcgtctggtctggacgggaggcctgggcctcctggcacacccggacccattggtgtgccgggacctgctggccctaaaggagaaagagggtctaaaggggatccaggcatgacagggcctacgggagctgctggactgcccggattgcacggtccgccaggtgataaggggaataggggggagaggggtaaaaaaggcagtcgcggtcctaagggagacaaaggtgaccagggcgcacccggacttgacgcaccatgtcctctaggggaggacggcctcccagtccagggctgctggaataagtag

SEQ ID NO: 233158 - protein, 698 aa, Artificial Sequence
  derived and/or modified sequence
MVAERTHKAAATGARGPGELGAPGTVALVAARAERGARLPSPGSCGLLTLALCSLALSLLAHFRTAELQARVLRLEAERGEQQMETAILGRVNQLLDEKWKLHSRRRREAPKTSPGCNCPPAFQGPTGRPGLPGDKGAIGMPGRVGSPGDAGLSIIGPRGPPGQPGTRGFPGFPGPIGLDGKPGHPGPKGDMGLTGPPGQPGPQGQKGEKGQCGEYPHRLLPLLNSVRLAPPPVIKRRTFQGEQSQASIQGPPGPPGPPGPSGPLGHPGLPGPMGPPGLPGPPGPKGDPGIQGYHGRKGERGMPGMPGKHGAKGAPGIAVAGMKGEPGIPGTKGEKGAEGSPGLPGLLGQKGEKGDAGNSIGGGRGEPGPPGLPGPPGPKGEAGVDGQVGPPGQPGDKGERGAAGEQGPDGPKGSKGEPGKGEMVDYNGNINEALQEIRTLALMGPPGLPGQIGPPGAPGIPGQKGEIGLPGPPGHDGEKGPRGKPGDMGPPGPQGPPGKDGPPGVKGENGHPGSPGEKGEKGETGQAGSPGEKGEAGEKGNPGAEVPGLPGPEGPPGPPGLQGVPGPKGEAGLDGAKGEKGFQGEKGDRGPLGLPGASGLDGRPGPPGTPGPIGVPGPAGPKGERGSKGDPGMTGPTGAAGLPGLHGPPGDKGNRGERGKKGSRGPKGDKGDQGAPGLDAPCPLGEDGLPVQGCWNK

SEQ ID NO: 233159 - protein, 686 aa, Artificial Sequence
  derived and/or modified sequence
MVAERTHKAAATGARGPGELGAPGTVALVAARAERGARLPSPGSCGLLTLALCSLALSLLAHFRTAELQARVLRLEAERGEQQMETAILGRVNQLLDEKWKLHSRRRREAPKTSPGCNCPPGPPGPTGRPGLPGDKGAIGMPGRVGSPGDAGLSIIGPRGPPGQPGTRGFPGFPGPIGLDGKPGHPGPKGDMGLTGPPGQPGPQGQKGEKGQCGEYPHRLLPLLNSVRLAPPPVIKRRTFQGEQSQASIQGPPGPPGPPGPSGPLGHPGLPGPMGPPGLPGPPGPKGDPGIQGYHGRKGERGMPGMPGKHGAKGAPGIAVAGMKGEPGIPGTKGEKGAEGSPGLPGLLGQKGEKGDAGNSIGGGRGEPGPPGLPGPPGPKGEAGVDGQVGPPGQPGDKGERGAAGEQGPDGPKGSKGEPGKGEMVDYNGNINEALQEIRTLALMGPPGLPGQIGPPGAPGIPGQKGEIGLPGPPGHDGEKGPRGKPGDMGPPGPQGPPGKDGPPGVKGENGHPGSPGEKGEKGETGQAGSPGEKGEAGEKGNPGAEVPGLPGPEGPPGPPGLQGVPGPKGEAGLDGAKGEKGFQGEKGDRGPLGLPGTPGPIGVPGPAGPKGERGSKGDPGMTGPTGAAGLPGLHGPPGDKGNRGERGKKGSRGPKGDKGDQGAPGLDAPCPLGEDGLPVQGCWNK

SEQ ID NO: 233160 - DNA, 2097 bp, Artificial Sequence
  derived and/or modified sequence
atggtggccgagagaacccacaaggccgccgccaccggcgccagaggccccggcgagctgggcgcccccggcaccgtggccctggtggccgccagagccgagagaggcgccagactgcccagccccggcagctgcggcctgctgaccctggccctgtgcagcctggccctgagcctgctggcccacttcagaaccgccgagctgcaggccagagtgctgagactggaggccgagagaggcgagcagcagatggagaccgccatcctgggcagagtgaaccagctgctggacgagaagtggaagctgcacagcagaagaagaagagaggcccccaagaccagccccggctgcaactgcccccccgccttccagggccccaccggcagacccggcctgcccggcgacaagggcgccatcggcatgcccggcagagtgggcagccccggcgacgccggcctgagcatcatcggccccagaggcccccccggccagcccggcaccagaggcttccccggcttccccggccccatcggcctggacggcaagcccggccaccccggccccaagggcgacatgggcctgaccggcccccccggccagcccggcccccagggccagaagggcgagaagggccagtgcggcgagtacccccacagactgctgcccctgctgaacagcgtgagactggcccccccccccgtgatcaagagaagaaccttccagggcgagcagagccaggccagcatccagggcccccccggcccccccggcccccccggccccagcggccccctgggccaccccggcctgcccggccccatgggcccccccggcctgcccggcccccccggccccaagggcgaccccggcatccagggctaccacggcagaaagggcgagagaggcatgcccggcatgcccggcaagcacggcgccaagggcgcccccggcatcgccgtggccggcatgaagggcgagcccggcatccccggcaccaagggcgagaagggcgccgagggcagccccggcctgcccggcctgctgggccagaagggcgagaagggcgacgccggcaacagcatcggcggcggcagaggcgagcccggcccccccggcctgcccggcccccccggccccaagggcgaggccggcgtggacggccaggtgggcccccccggccagcccggcgacaagggcgagagaggcgccgccggcgagcagggccccgacggccccaagggcagcaagggcgagcccggcaagggcgagatggtggactacaacggcaacatcaacgaggccctgcaggagatcagaaccctggccctgatgggcccccccggcctgcccggccagatcggcccccccggcgcccccggcatccccggccagaagggcgagatcggcctgcccggcccccccggccacgacggcgagaagggccccagaggcaagcccggcgacatgggcccccccggcccccagggcccccccggcaaggacggcccccccggcgtgaagggcgagaacggccaccccggcagccccggcgagaagggcgagaagggcgagaccggccaggccggcagccccggcgagaagggcgaggccggcgagaagggcaaccccggcgccgaggtgcccggcctgcccggccccgagggcccccccggcccccccggcctgcagggcgtgcccggccccaagggcgaggccggcctggacggcgccaagggcgagaagggcttccagggcgagaagggcgacagaggccccctgggcctgcccggcgccagcggcctggacggcagacccggcccccccggcacccccggccccatcggcgtgcccggccccgccggccccaagggcgagagaggcagcaagggcgaccccggcatgaccggccccaccggcgccgccggcctgcccggcctgcacggcccccccggcgacaagggcaacagaggcgagagaggcaagaagggcagcagaggccccaagggcgacaagggcgaccagggcgcccccggcctggacgccccctgccccctgggcgaggacggcctgcccgtgcagggctgctggaacaagtag

SEQ ID NO: 233161 - DNA, 2097 bp, Artificial Sequence
  derived and/or modified sequence
atggtcgccgagcgtacccacaaagctgctgctaccggcgccaggggccccggggagctcggagcccccgggacggtggccctggtagcagccagagccgagcgcggagcacgtttaccctcccccggcagctgtggactactcacactggcattgtgcagtctggcactctcactactcgcacactttcgaacagctgagctgcaagcccgtgtgctccgtctcgaggcagaaagaggtgagcagcagatggaaacagccatcctgggacgggtaaaccaactgctcgacgagaagtggaagctgcattcaagaaggaggagggaagcccctaagacatctcccggatgtaattgcccccccgcctttcaaggtcccactggccggcccggactgcccggcgacaaaggcgcaataggaatgccaggaagagtcggttccccgggcgacgccggactaagcatcataggtccaaggggccctcccgggcagcccggaacaaggggtttccctgggttccctggtccaattggtctcgacgggaagcccgggcatcctgggcccaaaggtgacatgggactgaccggcccacctggccagcccggaccccagggccagaagggcgagaagggtcagtgtggtgagtacccacaccgtctccttcctctcttaaattccgtgcgcttggctcctccacccgttataaaaagaaggacatttcagggagagcaatcgcaggccagcattcagggtcctccgggtcctcccggacctcctggaccttccggaccacttgggcaccccggtctgccgggcccaatgggcccacccgggcttcctggacctcccggacccaaaggcgaccctggtatccaaggctatcatggtcgcaaaggtgagaggggaatgcccggtatgcctgggaaacatggcgctaagggcgctcctgggattgcggtggctgggatgaagggcgagcccggaatcccgggtaccaagggagaaaaaggggcagaaggttctcccggtctgccaggcctgctcggccaaaagggcgaaaagggggacgctgggaatagcatcgggggcgggaggggtgaacccggacccccaggcctccccggtccccccggccctaaaggggaggctggcgtggatgggcaggtaggaccgcccgggcagccaggggacaaaggggagcggggggccgcaggcgagcagggacccgacggtcccaagggaagtaagggggaaccaggtaaaggcgagatggtcgactataacggcaatataaacgaggctctacaagaaattagaactctggccctgatgggtccacccggtttgcctggccagattggaccgcctggagcccccggaatcccaggccagaagggtgaaataggacttcccggcccgccaggtcatgacggagagaagggcccgcggggcaaaccgggcgatatgggcccaccaggaccccagggcccacctgggaaggacggcccgcccggcgtgaaaggggaaaacggccaccctggctcccctggtgagaaaggagagaagggagagacagggcaggcaggcagtccaggggagaagggcgaagctggcgaaaaggggaatcccggcgcagaggtcccaggactccccgggcctgagggaccccccgggccccctggccttcagggtgtacccggaccgaaaggagaggctgggcttgatggtgcaaagggggaaaaaggttttcagggcgaaaagggggatcgaggaccactgggtctgccaggagcctcaggcctggacggacgtccaggtccccctggcaccccggggcctatcggagtgcccgggcccgctggccctaaaggcgagaggggatctaaaggagatccggggatgacaggccctacaggagccgccggcctcccagggctacatgggccaccaggcgacaaggggaatcgaggggaacggggcaaaaagggctcacgcggccctaaaggcgataagggcgaccaaggggccccgggactggacgccccgtgtcctttgggcgaggatgggctacccgttcaagggtgttggaataaatag

SEQ ID NO: 233162 - DNA, 2097 bp, Artificial Sequence
  derived and/or modified sequence
atggtggccgagaggacccacaaggccgccgccaccggggcccggggccctggagagctgggcgcccctggcaccgtggccctggtggccgcccgggcagagcggggggcccggctgcccagccctggcagctgtggcctgctgaccctggccctgtgcagcctggccctgagcctgctggcccacttcagaacagctgagctgcaggcccgggtgctgcggctggaggccgagcggggggagcagcagatggagacagccatcctgggccgggtgaaccagctgctggatgagaagtggaagctgcacagcagaagaagaagagaggcccccaagaccagccctggctgcaactgccccccagccttccagggccccaccggccggcccggcctgcccggggacaagggggccatcggcatgcctggccgggtgggcagccctggagatgctggcctgagcatcatcggcccccggggccccccaggccagcccggcacccggggcttccctggcttccctggccccatcggcctggatggcaagccaggccaccctggccccaagggggacatgggcctgactggacctcctggccagcccggcccccagggccagaagggggagaagggccagtgtggggagtacccccaccggctgctgcccctgctgaacagcgtgcggctggcccctcctcctgtgatcaagaggaggaccttccagggcgagcagagccaggccagcatccagggccccccaggccccccaggccccccaggccccagcggccccctgggccaccctggcctgcccggccccatgggccccccaggcctgcccggccccccaggccccaagggggaccccggcatccagggctaccacggcaggaagggggagcggggcatgcctggcatgcctgggaagcacggggccaagggggcccctggcattgctgtggccggcatgaagggggagcccggcatccctggcaccaagggggagaagggagctgagggcagccctggcctgcccggcctgctgggccagaagggggagaagggagatgctggcaacagcattggaggcggccgcggggagcccggccccccaggcctgcccggccccccaggccccaagggggaggccggcgtggatggccaggtgggccccccaggccagcccggggacaagggggagagaggagctgctggggagcagggcccagatggccccaagggcagcaagggggagcctggaaaaggagagatggtggactacaacggcaacatcaatgaggccctgcaggagatccgcaccctggccctgatgggccccccaggcctgcccggccagatcggccccccaggggcccctggcatccctggccagaagggggagatcggcctgcccggccccccaggccatgatggagagaagggcccccggggcaagccaggggacatgggccccccaggcccccagggccccccaggcaaggatggccccccaggagtgaagggagaaaatggccaccctggcagccctggagagaagggggagaagggggagaccggccaggccggcagccctggagagaagggggaggccggggagaagggcaaccctggagctgaggtgcccggcctgcccggccctgagggccccccaggccccccaggcctgcagggcgtgcccggccccaagggggaggccggcctggatggagccaagggggagaagggcttccagggcgagaagggggaccggggccccctgggcctgcccggggccagcggcctggatggccggcccggccccccaggcaccccaggccccatcggcgtgcccggccctgctggccccaagggggagcggggcagcaaaggagaccccggcatgacaggccccaccggggctgctggcctgcccggcctgcacggccccccaggggacaagggcaacagaggagagcggggcaagaagggcagccggggccccaagggggacaagggggaccagggcgcccctggcctggatgccccctgccccctgggagaagatggcctgcctgtgcagggctgctggaacaagtag

SEQ ID NO: 233163 - DNA, 2097 bp, Artificial Sequence
  derived and/or modified sequence
atggtggccgagcggacccacaaggccgccgccaccggcgcccggggccctggcgaactgggcgctcccgggactgttgctctcgtggctgcacgcgctgagagaggcgctcgcttacccagtcccggatcatgcggactgctgacactggcgctgtgctcattggccctgagcctgctggctcactttagaaccgcagaattgcaggccagagttctgagactcgaggcagagaggggcgaacagcaaatggagaccgccattttggggcgggtaaatcagctccttgacgagaagtggaagctgcattcgcgccgtagaagggaagctccgaaaaccagcccgggttgcaactgtccgcccgcgtttcaggggcctaccggtcgccctgggttgcccggggacaaaggtgccattggtatgccgggcagggtgggcagcccaggcgatgccggtctttctatcatagggccccgcgggcctcccggccagcctggaacaaggggattccctggctttcccggtccaatcgggttggacggcaagcccggtcacccggggcccaaaggcgatatgggcttgaccggacccccgggccagccgggaccccagggtcaaaagggagaaaaaggccagtgtggggagtatccacaccgactgctgccactactaaactcagtgaggctcgcccctccacctgtgatcaaaagaaggacattccagggagagcaaagtcaagcctctattcaaggaccccctgggccccctgggccacccggaccatcaggacccctcggtcaccccggactgccggggcctatgggtccccctggcttgccaggcccaccgggacctaaaggagaccctggaatccaaggataccacgggagaaaaggagagcgtgggatgccgggcatgccgggtaagcatggggccaaaggagccccaggcatcgctgtcgcgggcatgaaaggcgagcctggaatacccggtacgaaaggggagaaaggtgccgaagggagccccgggctgcctggtctgctggggcagaagggcgagaagggagacgctggaaactcaattggcggaggacgcggcgaacccggtcctccagggctgcccggaccccctggccctaaaggcgaagccggcgtcgacggccaagtcggccctcctggccaaccgggcgacaagggagagcggggggctgcaggcgagcagggccccgatggacctaagggatcaaagggcgaaccaggcaaaggggaaatggttgactacaacgggaatatcaatgaggcactccaggaaattcggaccctagcgttgatggggccaccaggccttccaggccaaattggaccgcccggagccccaggaattcccggccagaagggtgaaatcggactccctggacctccaggccatgacggcgaaaagggtccaagagggaagcccggggatatggggccgccaggccctcaagggccacctggcaaggacggaccaccgggggtgaagggagagaacggccaccccggtagccctggggagaaaggtgagaagggagagaccggccaggcgggaagccccggtgaaaaaggcgaagcaggcgaaaagggaaatcctggtgccgaagtcccagggctccctggcccagaaggaccaccaggccccccaggcttgcagggtgtgcctggccccaaaggagaagccggtctggatggagccaagggggaaaaaggttttcaaggggaaaagggcgatagagggcccctgggactgcccggagccagtgggcttgatggtaggcccggccctccggggacccctggaccaataggagtacccgggcctgctggaccgaagggcgaaaggggtagcaagggcgatccgggcatgaccggccctaccggcgcagctggcctgcctggacttcacggtccgccaggtgacaaaggtaatcgcggagagcggggcaagaaaggctccagggggcccaagggggacaagggtgaccagggcgcccccggactggatgccccatgtccactaggcgaggatggactgcctgtacagggttgctggaataaatag

SEQ ID NO: 233164 - DNA, 3080 bp, Artificial Sequence
  derived and/or modified sequence
aagtagcacggattgctcatccgatccgtgccgccgcagggagtgtgtcaagttacagaggcgccggaatcggcccctgcgctcctcgccagccgccacgacccacctctgcccatggggccctccgtgtgcgccccttcgcccggggactgaaactgactggcccgggagacacgaggcgcccagaaggactgacagcgcggcaccaactgctctgcagacacttgaagggaaagactgggcggagagaaggagagccggtcagattcccctaactttcctggacttggaacgttcttcgaaataacttttttctcacctaggtgtaccccaattaccgctggttgtgctttttcggcacttcctctcctactgctaatttttccgtcctctttgccgggagcagcggaaagggacgttttccagcgatacaagccctttccccctgccccgcagtttggatagagccttttggcagcggctgtcgcctttatttattctatttatttatttattggttctcaagacgcgagaggatggtagcggagcgcacccacaaagcggcagccaccggtgcccgcggccctggggagttgggcgcgcccgggacggtggctctggtggcggcgcgggcggagcgcggcgcacggctgccgagtccagggtcgtgcgggctgctgacgctggccctctgctcgctggcactcagcctgctcgcccactttcggacggccgagctgcaggcccgggtgctgcgcctggaagcggagcgcggggagcagcaaatggagacggctattttgggacgagtcaatcaactgctggacgagaaatggaagctccactcaaggaggcgccgggaggccccaaagacatctccaggatgtaactgcccaccagcatttcagggtcccactggaagacccggactcccaggggacaaaggtgccattgggatgcctggacgtgtggggtcccccggagacgctgggctgtccatcattggtccccgcggcccccctggtcaaccaggaactagaggtttccctggatttccgggtcccattgggctggacggcaaaccgggccacccaggaccaaagggcgacatgggtctgacgggtcccccaggacagccgggaccccagggacaaaaaggagaaaagggtcagtgtggagagtacccacaccggctgctgcctctcctcaattcagtgcgactggctccacccccggtcataaaaaggcggacgttccagggcgaacagagccaggccagcatccaaggtccaccagggcccccaggcccccctggaccaagtggacctctggggcacccaggactgccagggcctatggggccacctggcttacctgggcctcctggaccaaagggagacccagggatccagggctaccacggccggaagggagaacggggcatgccagggatgccaggcaagcatggagccaagggggcgcccggaattgccgtggctgggatgaagggtgagccagggatcccaggaaccaagggtgagaagggggctgaaggctcccctgggcttcctggcctcctggggcagaagggagagaaaggcgatgctggcaactccattggaggaggcagaggggaacctggccctccagggctccctgggcccccagggccaaagggagaagcaggtgtcgatggccaggttggccccccagggcagccaggagacaagggggagcgtggagcagctggagaacagggaccagatggccccaagggctccaagggagaaccagggaaaggagagatggtggattacaatggaaacatcaatgaggctctccaggagatccggacgctggccttgatggggcctcctggtcttcctgggcaaattggcccacctggagctccagggattccaggccagaagggggagattggactgccaggccctccaggacacgatggggaaaagggacctcgcggtaaaccaggagacatgggccctcctggtccccaaggccccccaggaaaggatggacctccaggagtgaagggagaaaacgggcacccagggagcccaggagagaagggggaaaaaggggagacaggacaagcaggctcaccgggagagaaaggagaagccggggagaagggcaatccaggagcagaggttcctgggctgccagggccagaggggcctcccggacctccggggctccaaggtgttcctggaccaaagggggaagcaggactagatggagcaaaaggagagaaaggcttccagggagaaaaaggagaccgtggtcccctgggactacccggagcttcaggtttggacggcaggcctgggccaccgggtactccaggaccaattggagttccaggcccagcgggaccaaagggcgagaggggcagcaaaggagaccctgggatgacaggaccaacgggagcagctgggcttcctggtttacatggaccacccggggacaagggaaaccggggggagagggggaagaaaggctctagagggcctaaaggggataagggagaccaaggagcgcctggattagatgccccctgcccattgggcgaagatggcttaccagtccaaggctgctggaacaagtgatgcctctaaccttggattggcctgtgtgtgtgtttgtacatagaatatttatttttatacagttttcactttttgaaaatgccagaagtatgatgcatcttacagattattaaaaaagaaagaaaaacctgcatattttgtacagaaaatatcaacctcttcccttttgtttacaagatgttttgtataagcctatgtctctaatacattttttgtttggtcgtaatgtctgcatgatatttgtgcacatttattaagtatcgaagcttaataaattattgtgtcctggtgccaaagggggccagccagaactgaggtgctggctagctcatgtgtgaattcacataaatgtagaggtccatgatatttgctaagctaggtgtgtctaagagtattttaaacccttatggattttcattattaaaggaaatgaaacatggcaattca

SEQ ID NO: 233165 - DNA, 2097 bp, Artificial Sequence
  derived and/or modified sequence
atggtagctgagcgaactcacaaggcagctgcgacgggcgcaaggggtcctggagaactcggggcaccaggaaccgtggcactggtggccgcacgagctgaacgaggcgctcggttgccatcaccaggctcttgtggcctgctcacgttggccctttgttcactcgcactctcactcctcgctcacttccgaactgctgagttgcaggcacgagtactgaggctggaggccgagcgaggcgagcagcagatggaaactgctattctcggtcgagtgaatcagttgctcgatgagaagtggaagttacactctagaagacgtagggaggctccaaaaacttcccccggatgtaattgccccccagccttccaagggcctactgggaggccaggcttgcccggagacaagggtgccattgggatgccgggacgagtgggatccccaggagacgccggactgagtattattgggccacgaggccctccagggcagcccggaacaagaggtttcccaggattccccggacccattggcctcgatggtaagcctggccaccctgggccaaagggcgacatgggcctgacagggccaccaggacaacccggacctcaggggcagaagggggagaagggccaatgtggagaatacccacacagactactgccattattgaattccgtgcgcctagcaccaccccctgttattaagcgtagaactttccaaggtgaacagagtcaggcatccatacaaggccctcctggcccaccaggtccgcctggtccctcaggccctctgggccatcccggacttcccggtccaatgggacctcccggtctgcctggccctcctggccctaagggtgaccccggaatccagggctaccatggtcgaaagggagagcgtggaatgccaggtatgcccggtaagcacggcgctaagggggcacctgggattgctgtcgcaggcatgaagggagagcccggtattccaggtacaaagggagaaaagggagccgagggatctcctgggttgcccggtctcctcggccagaaaggggaaaaaggagacgccggaaattccataggcggtggacgtggtgagcccggacccccagggttacctggacccccaggacccaaaggcgaagcaggtgtggatggccaggttggacccccaggacaacctggggacaagggagagcgcggagccgctggcgaacagggccctgatggaccaaagggctctaagggagagcccggaaaaggcgagatggtcgattataatggcaatattaatgaagctcttcaggaaataagaacgctggcgctcatgggccctccgggtcttccgggacagatcggtccaccaggagcccctggaattccaggtcaaaaaggcgagatcgggttgccaggcccacccggtcatgacggagagaagggaccacgtgggaagccaggagacatgggaccgccaggccctcagggacccccaggcaaggatggtccaccaggtgtaaagggagaaaacgggcatccagggagccccggagagaagggcgagaaaggggagacgggacaagccggatcccccggtgagaaaggcgaggctggggaaaagggcaacccgggagctgaggtgcctggtttgcctggaccagaaggcccacccggaccacccggactgcagggcgtccccggacccaagggggaggcaggcctcgacggtgctaaaggcgaaaaagggttccagggcgagaaaggagacaggggtcccctgggcctgcccggagcctccggtttagatgggcgtccaggtccccctgggactccgggacctatcggtgtgcctggcccagccggtcccaagggagaacgaggcagcaaaggagatcccggtatgactggtcctaccggggctgcgggtctgccagggctacatggtcctccaggcgacaaaggcaatcgcggagagcgcggaaagaaaggttctcgcggacccaaaggcgataaaggagatcagggcgcaccaggcctcgacgctccctgcccactgggcgaggatggcctgcccgtacagggctgttggaataagtag

SEQ ID NO: 233166 - DNA, 2061 bp, Artificial Sequence
  derived and/or modified sequence
atggttgccgagcgcactcacaaagcagctgctaccggtgctcgagggccgggagagttgggagctccaggaactgtcgccttagtcgccgctcgagcagagagaggagcgcgcttaccctctcctgggtcttgcggcctgttgacattggctctttgtagcctcgctttatcgctcctcgcacactttagaaccgccgagctccaggcccgggtgctccggctagaggctgaaagaggcgaacagcagatggaaactgccattctgggtagagtgaatcagctgctggacgaaaagtggaagctgcactcgcgccgacggcgcgaggctccgaagacctcacctggatgtaactgtccgcccggtcctccgggacccactgggcgcccaggcctgcccggtgataagggagctattgggatgcctggtcgcgttggctcccctggcgacgctggcctcagcattataggacccagaggaccaccagggcagcccggcacaaggggttttccagggtttcccggccctatcgggctggatgggaagcctggccatcctggaccaaagggtgacatgggccttaccggcccacccggtcagccagggccacaaggacaaaagggggaaaaagggcagtgtggtgagtatcctcataggcttcttccccttcttaatagtgtacggttggctcctcctcccgtgatcaaacgccggaccttccagggggagcaatcgcaggcttctatccaggggccaccaggtcctcctgggccaccaggtccgtcggggcccctaggtcaccccggactccctggaccaatgggtccacctggactcccaggcccccccgggccgaagggggatccgggcatacagggctatcacggccgcaagggcgagaggggcatgcctgggatgcccggaaagcacggtgcaaaaggtgctccaggaattgcggtggccggtatgaagggggagccaggaatccctggcaccaagggtgaaaaaggggccgagggtagtcccggacttcctggactccttgggcagaagggcgagaagggggatgccggaaatagtatagggggcggtcgtggcgaaccagggcccccgggcctgcccgggccacccggaccaaagggcgaggccggtgtagatggtcaggttggacctcccggccagcccggcgacaagggcgagcgcggcgcagcaggcgagcaggggccagacggaccaaagggttcaaaaggggagccagggaagggagagatggtggactacaatggcaacataaatgaggcccttcaagaaatccgaacacttgctctgatgggaccacccggactgccagggcagatcggccccccgggagcccctggtatcccaggtcagaaaggtgaaatcggacttcccggcccccccggccacgatggagagaagggcccgcgggggaagcccggtgatatgggccccccaggcccccaaggccctcccggcaaagacggcccccctggggtgaagggagaaaacggccatcccggctcaccgggcgagaagggtgagaagggcgaaactggacaggcaggatcgcctggggaaaaaggcgaagcaggagagaagggcaatccaggagccgaagttccagggctgccgggcccggaaggacctccgggaccccccggcttgcagggagtgcccgggccaaagggtgaggccgggttggatggcgctaaaggggaaaaggggtttcagggggagaaaggagatcgtggaccccttgggctaccagggactcctgggcctatcggagtccccggacctgctggcccgaagggagagaggggttctaagggggatccaggcatgaccgggcctacaggcgccgccggcctgcctgggttgcatgggcctccaggggacaaggggaacaggggcgagagaggcaagaagggatcgagaggccccaagggggacaaaggcgaccagggcgcacccggtctcgacgccccctgccctttaggagaggatggactgcctgttcagggctgctggaacaaatag

SEQ ID NO: 233167 - DNA, 2061 bp, Artificial Sequence
  derived and/or modified sequence
atggtggccgagaggacccacaaggccgccgccaccggggcccggggccctggagagctgggcgcccctggcaccgtggccctggtggccgcccgggcagagcggggggcccggctgcccagccctggcagctgtggcctgctgaccctggccctgtgcagcctggccctgagcctgctggcccacttcagaacagctgagctgcaggcccgggtgctgcggctggaggccgagcggggggagcagcagatggagacagccatcctgggccgggtgaaccagctgctggatgagaagtggaagctgcacagcagaagaagaagagaggcccccaagaccagccctggctgcaactgccccccaggccccccaggccccaccggccggcccggcctgcccggggacaagggggccatcggcatgcctggccgggtgggcagccctggagatgctggcctgagcatcatcggcccccggggccccccaggccagcccggcacccggggcttccctggcttccctggccccatcggcctggatggcaagccaggccaccctggccccaagggggacatgggcctgactggacctcctggccagcccggcccccagggccagaagggggagaagggccagtgtggggagtacccccaccggctgctgcccctgctgaacagcgtgcggctggcccctcctcctgtgatcaagaggaggaccttccagggcgagcagagccaggccagcatccagggccccccaggccccccaggccccccaggccccagcggccccctgggccaccctggcctgcccggccccatgggccccccaggcctgcccggccccccaggccccaagggggaccccggcatccagggctaccacggcaggaagggggagcggggcatgcctggcatgcctgggaagcacggggccaagggggcccctggcattgctgtggccggcatgaagggggagcccggcatccctggcaccaagggggagaagggagctgagggcagccctggcctgcccggcctgctgggccagaagggggagaagggagatgctggcaacagcattggaggcggccgcggggagcccggccccccaggcctgcccggccccccaggccccaagggggaggccggcgtggatggccaggtgggccccccaggccagcccggggacaagggggagagaggagctgctggggagcagggcccagatggccccaagggcagcaagggggagcctggaaaaggagagatggtggactacaacggcaacatcaatgaggccctgcaggagatccgcaccctggccctgatgggccccccaggcctgcccggccagatcggccccccaggggcccctggcatccctggccagaagggggagatcggcctgcccggccccccaggccatgatggagagaagggcccccggggcaagccaggggacatgggccccccaggcccccagggccccccaggcaaggatggccccccaggagtgaagggagaaaatggccaccctggcagccctggagagaagggggagaagggggagaccggccaggccggcagccctggagagaagggggaggccggggagaagggcaaccctggagctgaggtgcccggcctgcccggccctgagggccccccaggccccccaggcctgcagggcgtgcccggccccaagggggaggccggcctggatggagccaagggggagaagggcttccagggcgagaagggggaccggggccccctgggcctgcccggcaccccaggccccatcggcgtgcccggccctgctggccccaagggggagcggggcagcaaaggagaccccggcatgacaggccccaccggggctgctggcctgcccggcctgcacggccccccaggggacaagggcaacagaggagagcggggcaagaagggcagccggggccccaagggggacaagggggaccagggcgcccctggcctggatgccccctgccccctgggagaagatggcctgcctgtgcagggctgctggaacaagtag

SEQ ID NO: 233168 - DNA, 2061 bp, Artificial Sequence
  derived and/or modified sequence
atggtggccgagcggacccacaaggccgccgccaccggcgcccgggggcccggagagctcggtgccccgggaacagtagcgctggtggctgctcgcgctgagaggggggcccgacttccttcacctgggtcctgcgggctgctgaccttggccctctgctctttggctttgagcctgttggcgcattttcgaactgcagaactgcaagctcgggttctgcgccttgaagccgagagaggggaacagcagatggaaaccgcgatcctgggacgagtcaatcagctgcttgatgagaagtggaagctgcattcacgccggcggcgtgaagctccaaaaacttctcctggatgtaactgccccccgggaccgcctggtccaacaggaagacctggcctgcccggagacaagggcgccattggcatgccaggccgcgtcgggtcgcccggcgacgcgggtctctccattatcgggccccggggccctcctggtcagcccggaactcgcgggttccccgggtttcccggacctatcgggttagacggaaagcccggccatcctggtccaaaaggcgacatgggactgacggggccgccaggacagcccggaccacagggtcagaaaggcgagaaaggccagtgcggagagtacccacatagacttttacccctacttaattccgtacgcctggctccaccccccgttatcaaaagacgaacattccagggagagcaatcacaagcctccattcagggcccacctggccctccaggccccccagggcccagcggccccctcggccaccctggactgcccggcccaatgggtcctcctggcttgccaggtcccccaggtcctaaaggcgacccaggtattcagggttaccatgggcgcaagggcgagagggggatgcccgggatgcccgggaagcatggagcaaagggagctccaggcatcgccgttgctggcatgaagggcgagcctggtattcccggtactaagggcgagaagggcgctgagggctctcctgggctgcccggcctgctggggcagaagggcgaaaaaggcgacgcaggtaatagcatcggcggcgggcgtggggaacctgggcctcccggtctcccgggcccccctggcccaaagggagaagctggcgtggacgggcaggttggccctcccgggcaacctggcgacaagggcgagaggggcgccgcaggcgaacaaggtcctgatggccctaagggttccaagggagaaccaggtaaaggagaaatggtcgactataacggaaatattaacgaggccctgcaggagataagaaccctggcactgatggggcccccggggctgccaggacagatcggccctccgggcgctcctggaatccctggacagaagggcgagatcggactccccggcccccccggacatgatggggaaaaaggccctcggggtaagccaggtgatatgggccccccgggcccacaaggcccaccaggtaaggatggaccccccggagtcaaaggtgaaaacggccatcccggcagccctggagagaaaggggaaaagggtgagacaggacaggctgggtcccccggtgagaagggcgaagcaggggagaaaggcaatcccggtgccgaagtgccagggctgcccggcccggaaggacctcccgggcccccaggtctccaaggcgtgcccggcccaaagggggaggctgggcttgatggcgcaaaaggcgagaaaggtttccagggtgagaagggggaccgtggtcccctgggcctgcctgggacacccggacccataggggtccctgggccagccggacccaaaggagaacgcggtagtaagggcgaccccggtatgaccgggcctaccggtgccgccggtcttccgggcctccatgggccccctggagacaagggtaatcgcggcgagagaggcaagaagggctccaggggaccaaaaggagataagggcgaccaaggggcgcccgggttggacgcaccttgtcccctgggcgaggacggattgcccgtgcaggggtgttggaataaatag

SEQ ID NO: 233169 - DNA, 2061 bp, Artificial Sequence
  derived and/or modified sequence
atggtggcagaacgcacgcacaaagccgctgctaccggggcacgtggcccaggagagttgggagctcccggtaccgtggctttagtagctgccagggctgaaaggggagccagattgcctagccctggtagttgcggccttctgaccctcgcgttgtgctctttggctctgtcccttctggcccattttaggacagctgaactgcaagctagggttcttcggctggaagctgaaagaggtgaacaacagatggagaccgcaattttaggtcgggttaatcaactgttggacgagaaatggaaactccattctcggagacggagagaagcgcctaagacctcccccggatgtaactgcccccctggcccacccggtccgaccggccgtccaggactccccggtgacaagggtgccatcgggatgccaggacgagtgggcagcccaggcgatgctgggctatcaatcatcggccctcggggtcccccaggccagccaggtactcggggattcccagggtttcctgggcctattggcctcgacggtaaacccggacatcctggcccaaagggggatatgggtctcacggggcctcctggccagccagggccacaggggcagaagggcgaaaagggtcagtgcggtgaatacccacacaggctcttgcccctgctaaatagcgtcagactggctccaccaccagtaatcaagcgaagaactttccagggtgagcagtctcaggcctccatccaaggccctcccggtccccctggaccacctggaccttccgggcctctgggccatcctggcctccctggaccgatggggccaccagggctccctggacccccaggccctaaaggagacccaggaattcagggttaccacggcaggaaaggggagcggggaatgccaggtatgcctggtaagcacggagctaagggagctcctgggattgctgtggctggcatgaagggcgaacccggtattcctggcacaaaaggagagaagggggctgaaggctccccgggtctgcctgggcttttgggccaaaaaggggaaaaaggtgacgcaggcaacagcatcggcggtgggcgaggagaaccaggtccacccggtcttcccggacctccaggcccaaaaggcgaggctggcgtagacggacaggtgggtccacccggacagccaggcgataaaggtgagcggggagctgccggagagcaggggccagatgggccaaagggaagtaaaggagaacctgggaagggggagatggtggattacaacggcaacatcaacgaggctctgcaggaaatcaggacacttgccctgatgggaccgccaggcctccccggtcagatcggaccgcctggcgctcccggtatccctggccagaagggagaaatcgggcttcctggccctcctgggcatgacggagaaaaagggccacggggaaagccaggagatatgggcccacccggtccccagggtcccccagggaaggacgggccacctggcgttaaaggtgagaatggtcacccgggaagcccaggtgagaaaggtgagaaaggcgagacagggcaggcgggaagtccaggtgagaagggggaagctggtgaaaaaggcaatcccggtgccgaggtcccaggcctgcccggtcctgagggcccacctggtccaccaggtctacaaggtgttcctgggccaaaaggggaggcagggctcgatggcgcaaaaggggagaaaggattccagggcgaaaaaggggatagggggcctctagggctccctgggacccccggtcccatcggagttcctgggcctgctggcccaaagggggaacgcggttctaaaggtgacccaggcatgacaggccctacaggggcagcgggtttgcccggactgcacgggccacccggtgacaaagggaaccggggtgagagaggtaaaaagggatcccgcggaccaaagggggataagggtgatcagggggcaccaggcctggacgccccatgtcctttgggggaggatgggctccctgtccagggatgctggaacaaatag

SEQ ID NO: 233170 - DNA, 2061 bp, Artificial Sequence
  derived and/or modified sequence
atggtagcggagcgcacccacaaagcggcagccaccggtgcccgcggccctggggagttgggcgcgcccgggacggtggctctggtggcggcgcgggcggagcgcggcgcacggctgccgagtccagggtcgtgcgggctgctgacgctggccctctgctcgctggcactcagcctgctcgcccactttcggacggccgagctgcaggcccgggtgctgcgcctggaagcggagcgcggggagcagcaaatggagacggctattttgggacgagtcaatcaactgctggacgagaaatggaagctccactcaaggaggcgccgggaggccccaaagacatctccaggatgtaactgcccaccaggacctcctggtcccactggaagacccggactcccaggggacaaaggtgccattgggatgcctggacgtgtggggtcccccggagacgctgggctgtccatcattggtccccgcggcccccctggtcaaccaggaactagaggtttccctggatttccgggtcccattgggctggacggcaaaccgggccacccaggaccaaagggcgacatgggtctgacgggtcccccaggacagccgggaccccagggacaaaaaggagaaaagggtcagtgtggagagtacccacaccggctgctgcctctcctcaattcagtgcgactggctccacccccggtcataaaaaggcggacgttccagggcgaacagagccaggccagcatccaaggtccaccagggcccccaggcccccctggaccaagtggacctctggggcacccaggactgccagggcctatggggccacctggcttacctgggcctcctggaccaaagggagacccagggatccagggctaccacggccggaagggagaacggggcatgccagggatgccaggcaagcatggagccaagggggcgcccggaattgccgtggctgggatgaagggtgagccagggatcccaggaaccaagggtgagaagggggctgaaggctcccctgggcttcctggcctcctggggcagaagggagagaaaggcgatgctggcaactccattggaggaggcagaggggaacctggccctccagggctccctgggcccccagggccaaagggagaagcaggtgtcgatggccaggttggccccccagggcagccaggagacaagggggagcgtggagcagctggagaacagggaccagatggccccaagggctccaagggagaaccagggaaaggagagatggtggattacaatggaaacatcaatgaggctctccaggagatccggacgctggccttgatggggcctcctggtcttcctgggcaaattggcccacctggagctccagggattccaggccagaagggggagattggactgccaggccctccaggacacgatggggaaaagggacctcgcggtaaaccaggagacatgggccctcctggtccccaaggccccccaggaaaggatggacctccaggagtgaagggagaaaacgggcacccagggagcccaggagagaagggggaaaaaggggagacaggacaagcaggctcaccgggagagaaaggagaagccggggagaagggcaatccaggagcagaggttcctgggctgccagggccagaggggcctcccggacctccggggctccaaggtgttcctggaccaaagggggaagcaggactagatggagcaaaaggagagaaaggcttccagggagaaaaaggagaccgtggtcccctgggactacccggtactccaggaccaattggagttccaggcccagcgggaccaaagggcgagaggggcagcaaaggagaccctgggatgacaggaccaacgggagcagctgggcttcctggtttacatggaccacccggggacaagggaaaccggggggagagggggaagaaaggctctagagggcctaaaggggataagggagaccaaggagcgcctggattagatgccccctgcccattgggcgaagatggcttaccagtccaaggctgctggaacaagtga

SEQ ID NO: 233171 - DNA, 2061 bp, Artificial Sequence
  derived and/or modified sequence
atggtggccgagagaacccacaaggccgccgccaccggcgccagaggccccggcgagctgggcgcccccggcaccgtggccctggtggccgccagagccgagagaggcgccagactgcccagccccggcagctgcggcctgctgaccctggccctgtgcagcctggccctgagcctgctggcccacttcagaaccgccgagctgcaggccagagtgctgagactggaggccgagagaggcgagcagcagatggagaccgccatcctgggcagagtgaaccagctgctggacgagaagtggaagctgcacagcagaagaagaagagaggcccccaagaccagccccggctgcaactgcccccccggcccccccggccccaccggcagacccggcctgcccggcgacaagggcgccatcggcatgcccggcagagtgggcagccccggcgacgccggcctgagcatcatcggccccagaggcccccccggccagcccggcaccagaggcttccccggcttccccggccccatcggcctggacggcaagcccggccaccccggccccaagggcgacatgggcctgaccggcccccccggccagcccggcccccagggccagaagggcgagaagggccagtgcggcgagtacccccacagactgctgcccctgctgaacagcgtgagactggcccccccccccgtgatcaagagaagaaccttccagggcgagcagagccaggccagcatccagggcccccccggcccccccggcccccccggccccagcggccccctgggccaccccggcctgcccggccccatgggcccccccggcctgcccggcccccccggccccaagggcgaccccggcatccagggctaccacggcagaaagggcgagagaggcatgcccggcatgcccggcaagcacggcgccaagggcgcccccggcatcgccgtggccggcatgaagggcgagcccggcatccccggcaccaagggcgagaagggcgccgagggcagccccggcctgcccggcctgctgggccagaagggcgagaagggcgacgccggcaacagcatcggcggcggcagaggcgagcccggcccccccggcctgcccggcccccccggccccaagggcgaggccggcgtggacggccaggtgggcccccccggccagcccggcgacaagggcgagagaggcgccgccggcgagcagggccccgacggccccaagggcagcaagggcgagcccggcaagggcgagatggtggactacaacggcaacatcaacgaggccctgcaggagatcagaaccctggccctgatgggcccccccggcctgcccggccagatcggcccccccggcgcccccggcatccccggccagaagggcgagatcggcctgcccggcccccccggccacgacggcgagaagggccccagaggcaagcccggcgacatgggcccccccggcccccagggcccccccggcaaggacggcccccccggcgtgaagggcgagaacggccaccccggcagccccggcgagaagggcgagaagggcgagaccggccaggccggcagccccggcgagaagggcgaggccggcgagaagggcaaccccggcgccgaggtgcccggcctgcccggccccgagggcccccccggcccccccggcctgcagggcgtgcccggccccaagggcgaggccggcctggacggcgccaagggcgagaagggcttccagggcgagaagggcgacagaggccccctgggcctgcccggcacccccggccccatcggcgtgcccggccccgccggccccaagggcgagagaggcagcaagggcgaccccggcatgaccggccccaccggcgccgccggcctgcccggcctgcacggcccccccggcgacaagggcaacagaggcgagagaggcaagaagggcagcagaggccccaagggcgacaagggcgaccagggcgcccccggcctggacgccccctgccccctgggcgaggacggcctgcccgtgcagggctgctggaacaagtag

SEQ ID NO: 233172 - protein, 695 aa, Artificial Sequence
  derived and/or modified sequence
MVAERTHKAAATGARGPGELGAPGTVALVAARAERGARLPSPGSCGLLTLALCSLALSLLAHFRTAELQARVLRLEAERGEQQMETAILGRVNQLLDEKWKLHSRRRREAPKTSPGCNCPPGPPGPTGRPGLPGDKGAIGMPGRVGSPGDAGLSIIGPRGPPGQPGTRGFPGFPGPIGLDGKPGHPGPKGDMGLTGPPGQPGPQGQKGEKGQCGEYPHRECLSSMPAALRSSQIIALKGEQSQASIQGPPGPPGPPGPSGPLGHPGLPGPMGPPGLPGPPGPKGDPGIQGYHGRKGERGMPGMPGKHGAKGAPGIAVAGMKGEPGIPGTKGEKGAEGSPGLPGLLGQKGEKGDAGNSIGGGRGEPGPPGLPGPPGPKGEAGVDGQVGPPGQPGDKGERGAAGEQGPDGPKGSKGEPGKGEMVDYNGNINEALQEIRTLALMGPPGLPGQIGPPGAPGIPGQKGEIGLPGPPGHDGEKGPRGKPGDMGPPGPQGPPGKDGPPGVKGENGHPGSPGEKGEKGETGQAGSPGEKGEAGEKGNPGAEVPGLPGPEGPPGPPGLQGVPGPKGEAGLDGAKGEKGFQGEKGDRGPLGLPGASGLDGRPGPPGTPGPIGVPGPAGPKGERGSKGDPGMTGPTGAAGLPGLHGPPGDKGNRGERGKKGSRGPKGDKGDQGAPGLDAPCPLGEDGLPVQGCWNK

SEQ ID NO: 233173 - protein, 683 aa, Artificial Sequence
  derived and/or modified sequence
MVAERTHKAAATGARGPGELGAPGTVALVAARAERGARLPSPGSCGLLTLALCSLALSLLAHFRTAELQARVLRLEAERGEQQMETAILGRVNQLLDEKWKLHSRRRREAPKTSPGCNCPPGPPGPTGRPGLPGDKGAIGMPGRVGSPGDAGLSIIGPRGPPGQPGTRGFPGFPGPIGLDGKPGHPGPKGDMGLTGPPGQPGPQGQKGEKGQCGEYPHRECLSSMPAALRSSQIIALKGEQSQASIQGPPGPPGPPGPSGPLGHPGLPGPMGPPGLPGPPGPKGDPGIQGYHGRKGERGMPGMPGKHGAKGAPGIAVAGMKGEPGIPGTKGEKGAEGSPGLPGLLGQKGEKGDAGNSIGGGRGEPGPPGLPGPPGPKGEAGVDGQVGPPGQPGDKGERGAAGEQGPDGPKGSKGEPGKGEMVDYNGNINEALQEIRTLALMGPPGLPGQIGPPGAPGIPGQKGEIGLPGPPGHDGEKGPRGKPGDMGPPGPQGPPGKDGPPGVKGENGHPGSPGEKGEKGETGQAGSPGEKGEAGEKGNPGAEVPGLPGPEGPPGPPGLQGVPGPKGEAGLDGAKGEKGFQGEKGDRGPLGLPGTPGPIGVPGPAGPKGERGSKGDPGMTGPTGAAGLPGLHGPPGDKGNRGERGKKGSRGPKGDKGDQGAPGLDAPCPLGEDGLPVQGCWNK

SEQ ID NO: 233174 - protein, 695 aa, Artificial Sequence
  derived and/or modified sequence
MVAERTHKAAATGARGPGELGAPGTVALVAARAERGARLPSPGSCGLLTLALCSLALSLLAHFRTAELQARVLRLEAERGEQQMETAILGRVNQLLDEKWKLHSRRRREAPKTSPGCNCPPAFQGPTGRPGLPGDKGAIGMPGRVGSPGDAGLSIIGPRGPPGQPGTRGFPGFPGPIGLDGKPGHPGPKGDMGLTGPPGQPGPQGQKGEKGQCGEYPHRECLSSMPAALRSSQIIALKGEQSQASIQGPPGPPGPPGPSGPLGHPGLPGPMGPPGLPGPPGPKGDPGIQGYHGRKGERGMPGMPGKHGAKGAPGIAVAGMKGEPGIPGTKGEKGAEGSPGLPGLLGQKGEKGDAGNSIGGGRGEPGPPGLPGPPGPKGEAGVDGQVGPPGQPGDKGERGAAGEQGPDGPKGSKGEPGKGEMVDYNGNINEALQEIRTLALMGPPGLPGQIGPPGAPGIPGQKGEIGLPGPPGHDGEKGPRGKPGDMGPPGPQGPPGKDGPPGVKGENGHPGSPGEKGEKGETGQAGSPGEKGEAGEKGNPGAEVPGLPGPEGPPGPPGLQGVPGPKGEAGLDGAKGEKGFQGEKGDRGPLGLPGASGLDGRPGPPGTPGPIGVPGPAGPKGERGSKGDPGMTGPTGAAGLPGLHGPPGDKGNRGERGKKGSRGPKGDKGDQGAPGLDAPCPLGEDGLPVQGCWNK

SEQ ID NO: 233175 - DNA, 2088 bp, Artificial Sequence
  derived and/or modified sequence
atggtggccgagagaacccacaaggccgccgccaccggcgccagaggccccggcgagctgggcgcccccggcaccgtggccctggtggccgccagagccgagagaggcgccagactgcccagccccggcagctgcggcctgctgaccctggccctgtgcagcctggccctgagcctgctggcccacttcagaaccgccgagctgcaggccagagtgctgagactggaggccgagagaggcgagcagcagatggagaccgccatcctgggcagagtgaaccagctgctggacgagaagtggaagctgcacagcagaagaagaagagaggcccccaagaccagccccggctgcaactgcccccccggcccccccggccccaccggcagacccggcctgcccggcgacaagggcgccatcggcatgcccggcagagtgggcagccccggcgacgccggcctgagcatcatcggccccagaggcccccccggccagcccggcaccagaggcttccccggcttccccggccccatcggcctggacggcaagcccggccaccccggccccaagggcgacatgggcctgaccggcccccccggccagcccggcccccagggccagaagggcgagaagggccagtgcggcgagtacccccacagagagtgcctgagcagcatgcccgccgccctgagaagcagccagatcatcgccctgaagggcgagcagagccaggccagcatccagggcccccccggcccccccggcccccccggccccagcggccccctgggccaccccggcctgcccggccccatgggcccccccggcctgcccggcccccccggccccaagggcgaccccggcatccagggctaccacggcagaaagggcgagagaggcatgcccggcatgcccggcaagcacggcgccaagggcgcccccggcatcgccgtggccggcatgaagggcgagcccggcatccccggcaccaagggcgagaagggcgccgagggcagccccggcctgcccggcctgctgggccagaagggcgagaagggcgacgccggcaacagcatcggcggcggcagaggcgagcccggcccccccggcctgcccggcccccccggccccaagggcgaggccggcgtggacggccaggtgggcccccccggccagcccggcgacaagggcgagagaggcgccgccggcgagcagggccccgacggccccaagggcagcaagggcgagcccggcaagggcgagatggtggactacaacggcaacatcaacgaggccctgcaggagatcagaaccctggccctgatgggcccccccggcctgcccggccagatcggcccccccggcgcccccggcatccccggccagaagggcgagatcggcctgcccggcccccccggccacgacggcgagaagggccccagaggcaagcccggcgacatgggcccccccggcccccagggcccccccggcaaggacggcccccccggcgtgaagggcgagaacggccaccccggcagccccggcgagaagggcgagaagggcgagaccggccaggccggcagccccggcgagaagggcgaggccggcgagaagggcaaccccggcgccgaggtgcccggcctgcccggccccgagggcccccccggcccccccggcctgcagggcgtgcccggccccaagggcgaggccggcctggacggcgccaagggcgagaagggcttccagggcgagaagggcgacagaggccccctgggcctgcccggcgccagcggcctggacggcagacccggcccccccggcacccccggccccatcggcgtgcccggccccgccggccccaagggcgagagaggcagcaagggcgaccccggcatgaccggccccaccggcgccgccggcctgcccggcctgcacggcccccccggcgacaagggcaacagaggcgagagaggcaagaagggcagcagaggccccaagggcgacaagggcgaccagggcgcccccggcctggacgccccctgccccctgggcgaggacggcctgcccgtgcagggctgctggaacaagtag

SEQ ID NO: 233176 - DNA, 2052 bp, Artificial Sequence
  derived and/or modified sequence
atggtggccgagagaacccacaaggccgccgccaccggcgccagaggccccggcgagctgggcgcccccggcaccgtggccctggtggccgccagagccgagagaggcgccagactgcccagccccggcagctgcggcctgctgaccctggccctgtgcagcctggccctgagcctgctggcccacttcagaaccgccgagctgcaggccagagtgctgagactggaggccgagagaggcgagcagcagatggagaccgccatcctgggcagagtgaaccagctgctggacgagaagtggaagctgcacagcagaagaagaagagaggcccccaagaccagccccggctgcaactgcccccccggcccccccggccccaccggcagacccggcctgcccggcgacaagggcgccatcggcatgcccggcagagtgggcagccccggcgacgccggcctgagcatcatcggccccagaggcccccccggccagcccggcaccagaggcttccccggcttccccggccccatcggcctggacggcaagcccggccaccccggccccaagggcgacatgggcctgaccggcccccccggccagcccggcccccagggccagaagggcgagaagggccagtgcggcgagtacccccacagagagtgcctgagcagcatgcccgccgccctgagaagcagccagatcatcgccctgaagggcgagcagagccaggccagcatccagggcccccccggcccccccggcccccccggccccagcggccccctgggccaccccggcctgcccggccccatgggcccccccggcctgcccggcccccccggccccaagggcgaccccggcatccagggctaccacggcagaaagggcgagagaggcatgcccggcatgcccggcaagcacggcgccaagggcgcccccggcatcgccgtggccggcatgaagggcgagcccggcatccccggcaccaagggcgagaagggcgccgagggcagccccggcctgcccggcctgctgggccagaagggcgagaagggcgacgccggcaacagcatcggcggcggcagaggcgagcccggcccccccggcctgcccggcccccccggccccaagggcgaggccggcgtggacggccaggtgggcccccccggccagcccggcgacaagggcgagagaggcgccgccggcgagcagggccccgacggccccaagggcagcaagggcgagcccggcaagggcgagatggtggactacaacggcaacatcaacgaggccctgcaggagatcagaaccctggccctgatgggcccccccggcctgcccggccagatcggcccccccggcgcccccggcatccccggccagaagggcgagatcggcctgcccggcccccccggccacgacggcgagaagggccccagaggcaagcccggcgacatgggcccccccggcccccagggcccccccggcaaggacggcccccccggcgtgaagggcgagaacggccaccccggcagccccggcgagaagggcgagaagggcgagaccggccaggccggcagccccggcgagaagggcgaggccggcgagaagggcaaccccggcgccgaggtgcccggcctgcccggccccgagggcccccccggcccccccggcctgcagggcgtgcccggccccaagggcgaggccggcctggacggcgccaagggcgagaagggcttccagggcgagaagggcgacagaggccccctgggcctgcccggcacccccggccccatcggcgtgcccggccccgccggccccaagggcgagagaggcagcaagggcgaccccggcatgaccggccccaccggcgccgccggcctgcccggcctgcacggcccccccggcgacaagggcaacagaggcgagagaggcaagaagggcagcagaggccccaagggcgacaagggcgaccagggcgcccccggcctggacgccccctgccccctgggcgaggacggcctgcccgtgcagggctgctggaacaagtag

SEQ ID NO: 233177 - DNA, 2088 bp, Artificial Sequence
  derived and/or modified sequence
atggtggccgagagaacccacaaggccgccgccaccggcgccagaggccccggcgagctgggcgcccccggcaccgtggccctggtggccgccagagccgagagaggcgccagactgcccagccccggcagctgcggcctgctgaccctggccctgtgcagcctggccctgagcctgctggcccacttcagaaccgccgagctgcaggccagagtgctgagactggaggccgagagaggcgagcagcagatggagaccgccatcctgggcagagtgaaccagctgctggacgagaagtggaagctgcacagcagaagaagaagagaggcccccaagaccagccccggctgcaactgcccccccgccttccagggccccaccggcagacccggcctgcccggcgacaagggcgccatcggcatgcccggcagagtgggcagccccggcgacgccggcctgagcatcatcggccccagaggcccccccggccagcccggcaccagaggcttccccggcttccccggccccatcggcctggacggcaagcccggccaccccggccccaagggcgacatgggcctgaccggcccccccggccagcccggcccccagggccagaagggcgagaagggccagtgcggcgagtacccccacagagagtgcctgagcagcatgcccgccgccctgagaagcagccagatcatcgccctgaagggcgagcagagccaggccagcatccagggcccccccggcccccccggcccccccggccccagcggccccctgggccaccccggcctgcccggccccatgggcccccccggcctgcccggcccccccggccccaagggcgaccccggcatccagggctaccacggcagaaagggcgagagaggcatgcccggcatgcccggcaagcacggcgccaagggcgcccccggcatcgccgtggccggcatgaagggcgagcccggcatccccggcaccaagggcgagaagggcgccgagggcagccccggcctgcccggcctgctgggccagaagggcgagaagggcgacgccggcaacagcatcggcggcggcagaggcgagcccggcccccccggcctgcccggcccccccggccccaagggcgaggccggcgtggacggccaggtgggcccccccggccagcccggcgacaagggcgagagaggcgccgccggcgagcagggccccgacggccccaagggcagcaagggcgagcccggcaagggcgagatggtggactacaacggcaacatcaacgaggccctgcaggagatcagaaccctggccctgatgggcccccccggcctgcccggccagatcggcccccccggcgcccccggcatccccggccagaagggcgagatcggcctgcccggcccccccggccacgacggcgagaagggccccagaggcaagcccggcgacatgggcccccccggcccccagggcccccccggcaaggacggcccccccggcgtgaagggcgagaacggccaccccggcagccccggcgagaagggcgagaagggcgagaccggccaggccggcagccccggcgagaagggcgaggccggcgagaagggcaaccccggcgccgaggtgcccggcctgcccggccccgagggcccccccggcccccccggcctgcagggcgtgcccggccccaagggcgaggccggcctggacggcgccaagggcgagaagggcttccagggcgagaagggcgacagaggccccctgggcctgcccggcgccagcggcctggacggcagacccggcccccccggcacccccggccccatcggcgtgcccggccccgccggccccaagggcgagagaggcagcaagggcgaccccggcatgaccggccccaccggcgccgccggcctgcccggcctgcacggcccccccggcgacaagggcaacagaggcgagagaggcaagaagggcagcagaggccccaagggcgacaagggcgaccagggcgcccccggcctggacgccccctgccccctgggcgaggacggcctgcccgtgcagggctgctggaacaagtag

SEQ ID NO: 233178 - DNA, 2088 bp, Artificial Sequence
  derived and/or modified sequence
atggtcgccgaaaggacccataaggcagctgccacaggggccagaggacctggtgaattgggtgcacccggcactgtggccctggtggctgctagagcggagcgcggcgccaggttgcccagcccgggatcatgtgggctcttgacactagcgttatgtagcttagcactgagtttattagcacacttccgaacagccgagctccaggctcgcgtcttgcgccttgaggccgaaagaggggaacagcagatggagacggctatcctcggcagagtgaaccaactgctggatgaaaaatggaagctgcacagtcggcggcgccgagaggctccaaagacctctcccgggtgtaattgcccgccgggcccaccaggacccacaggccgtcccggtcttccaggagacaaaggcgccatcggtatgccgggcagagtgggcagcccaggcgacgcaggcctctcaattattgggccccgtggacctccaggacagcccggcaccaggggctttccagggtttccaggccctattgggcttgatggcaaaccgggtcatccaggcccaaaaggcgacatgggcctgaccgggccaccaggacaacccggcccacaaggtcagaagggagagaaaggacagtgcggcgaatacccacatagagagtgtctgtcctctatgccagctgcccttagaagcagccagattattgctctgaaaggggagcagtcacaggcctcgatacagggcccacctggtccccctggcccaccaggcccatccggaccattaggacatcccggactccctgggcctatgggtcccccaggactgcctgggcctccaggtcctaaaggcgacccgggcattcagggctatcacggacgcaagggtgagaggggaatgcccggtatgcccggaaagcacggagccaagggcgctccagggattgcagtagccggcatgaaaggggagcctggcattccaggaactaagggtgaaaagggcgcagaggggtctcctgggctccctgggcttttgggccagaagggcgagaagggagatgcagggaattccataggcggagggaggggtgagcccggcccaccaggactaccgggaccccctggccctaagggcgaagccggtgtagacggccaagtgggcccacctggccagcccggagacaaaggcgagagaggagccgccggagaacagggcccggacgggcctaagggctccaaaggggagccaggaaaaggtgagatggtggattataatggaaacatcaatgaggctctccaagagattcgaaccctggcactaatggggcccccaggactgcctggtcagattggaccacccggggccccaggcattcccggacagaagggggaaattggcctgccaggcccacccgggcatgatggcgagaaggggcctcggggcaagcctggcgacatgggccctcccggaccccagggccctccaggtaaggacggccctccgggagtgaaaggcgagaacggccacccgggaagccctggtgagaagggagagaagggggagactggacaggctggctcccctggggagaaaggggaggccggggagaagggcaatcccggggccgaggtccccggattgcccgggcctgaaggcccgcctgggccacctggacttcagggcgtaccaggtcccaagggagaggctggattggatggggccaagggagaaaagggctttcagggggagaaaggagatcgcggcccgctggggctccccggggctagcggtctcgatggcaggcctggtcctccaggaacccccgggccaattggggtgcccggaccagccggccctaagggcgagaggggatcgaaaggcgaccctgggatgacagggccaactggcgcagccgggctgccaggcttacatggccctcccggggacaagggcaaccgtggcgaaagagggaagaagggctcgaggggcccgaaaggcgataagggagaccagggcgcgccaggcctggatgctccctgccccctcggcgaggatggccttccagtgcagggatgctggaataagtag

SEQ ID NO: 233179 - DNA, 2052 bp, Artificial Sequence
  derived and/or modified sequence
atggtggccgagcggacacataaggcagcggcaactggggctaggggacccggcgagttgggggctccggggacggtggcactggtggccgcccgagcagagaggggtgctcggctcccaagccccggttcttgcggtctgttaacgctggcactatgtagcttggcactgtctttgcttgcccattttcggaccgccgaactccaggccagggtcctgagactcgaggccgaacggggtgagcaacaaatggaaactgcaatcctcggtagggttaatcagcttttggatgaaaagtggaagctccactcaagacgcagaagggaggcacctaaaacgagtcctggatgcaattgtcctcctggtccacctggccctaccgggcgcccaggcttgcctggagacaaaggcgccattgggatgcccggccgcgtgggcagtcctggtgacgccggactgtcaataatcggccctagaggtcctcccggccaaccaggaacccgggggtttccaggattccccggtcccataggattggatggaaaaccaggacaccctgggcccaagggggatatgggtcttacaggcccaccaggacaaccagggccccaggggcagaagggagagaagggccagtgcggagagtaccctcatagggaatgtctgtccagtatgcccgccgccctgcgctctagccagattattgccctgaagggagagcaatcacaggcctctatccagggccccccaggccccccggggcctcccgggcccagcggccctctgggccatcctggcttgcctggacctatggggcctcccggtctcccaggtccccccggacctaagggagatccaggcattcaaggttatcatggacgcaagggtgaacgcggcatgcccggaatgccaggcaagcacggtgccaagggggcgcccggtattgccgtcgcaggtatgaagggcgagccagggatccctgggaccaagggcgagaagggggccgaggggtcccctggccttcccggcttgttgggccagaagggcgagaagggcgacgcaggaaattccattggcgggggcagaggggagccagggccccccggcctcccaggtccacccggtcctaagggagaggccggtgtagacggacaagtgggccccccaggccagcctggcgacaaaggagagagaggagccgcaggtgagcaaggccccgatggacccaagggttctaagggcgaaccgggaaagggcgagatggtcgattacaatggaaatatcaacgaggccttgcaagagatacgcactcttgcactaatggggccacccgggctcccgggacaaattggcccaccaggagcacccggcataccagggcaaaagggggaaatcggattgcccggaccacccggccatgatggggaaaagggcccacgcggaaagcccggcgatatgggacccccaggacctcaggggccacccggtaaggacgggcctcccggagtcaagggcgagaatggtcaccccggcagccctggcgaaaagggagaaaaaggcgaaactggccaggcagggtcgccgggggagaaaggcgaagctggagagaaagggaaccccggtgccgaagtgccagggctgcctggtcccgagggaccgcccggcccccctggcctacaaggcgtgcccggcccaaaaggcgaagctggattggatggggccaaaggagagaagggcttccaaggggagaagggagacaggggccctctgggcctgcctggcaccccaggtcctatcggagtgcctggccctgccggccctaagggagaacggggcagtaagggcgacccaggtatgacgggccccaccggggcagctggattacctggcctgcacggtccaccaggagacaaaggaaaccgtggagaaagaggtaaaaaaggatctcggggtccaaaaggagacaagggcgaccaaggggctcccgggctagacgcaccatgtcccttaggagaagatggtctcccggtccagggttgttggaacaagtag

SEQ ID NO: 233180 - DNA, 2088 bp, Artificial Sequence
  derived and/or modified sequence
atggtggctgagcgcacccacaaggccgctgcaaccggggctaggggccctggtgaattgggtgcgcctggtacagttgctctggtggccgcaagagctgaaaggggcgcccggctcccctccccaggatcgtgcggcctgttgacattggccctttgtagtttggctctgtcactactggcccactttcgaacggcagagctacaggctagggtactgagactggaggcggagcgcggggaacagcagatggagacagctatcctcggacgcgtcaatcaactgttggacgagaagtggaagcttcacagcaggaggaggcgggaagctcccaaaaccagccccgggtgtaattgtccgcctgctttccagggtccgaccggacgtccaggccttcctggcgacaagggtgcaatcggcatgccgggtcgggtgggttcgccaggcgatgccggactgtcaattatcggacccagaggtcccccagggcagccaggtacgcgtggattcccaggctttccaggccccatcggcttggacggcaaaccagggcacccaggcccaaagggggatatgggtttgacgggacctccaggccaaccaggtcctcaggggcagaagggcgaaaagggccagtgcggcgagtatcctcacagagagtgcctttcctcaatgcccgccgcactgcggagctctcagattatcgcgctaaaaggtgagcagagccaagccagtatccagggtcccccagggccccctggacccccagggccaagcggccccctgggccacccagggctgccaggccctatggggccacctggattgccgggaccccctggaccaaagggagatcccggaatacaagggtaccatggtcgtaagggagagcgtgggatgcctggcatgcctgggaagcacggtgccaagggagcaccaggaatagctgtagcgggcatgaagggcgaaccaggaatcccggggactaagggggaaaaaggagcagaaggtagccccggtttgcccgggttgctcgggcagaagggtgaaaagggggacgctggcaactctattggcgggggaaggggcgaacccggccctcctggcctgcctgggcccccaggacctaagggcgaagcgggagtcgacgggcaggttggcccacctggccagcccggagataaaggagagcgcggcgcagccggtgaacaaggacccgatggccccaaaggatccaagggagaaccaggcaaaggagagatggtggactacaatggcaacataaacgaggccttgcaggagattaggaccctcgccttgatgggcccaccaggtctgcccgggcaaatcggtcccccgggcgcaccaggtattcctgggcagaaaggggagattggattgcctggcccacctggacatgacggagagaaaggaccacgaggaaagcccggcgacatggggcctcccgggccccaagggcctcccggcaaggatggccctcctggagtgaaaggcgaaaatggccatcctggttcccctggggaaaaaggcgagaagggcgaaactggtcaggctgggagccctggcgaaaaaggggaggccggggagaagggcaatccaggcgccgaagtgcccggcctgcctggccctgaggggcctccaggccctcccgggttgcagggtgtgcccggccccaagggggaagccggactggacggtgctaagggcgagaaaggatttcagggagagaagggtgacagaggccccctgggtttgccgggtgcatccggcttggacgggaggccgggcccaccagggacccccggtcccattggggtgcccggtccagccggcccgaaaggcgagcgcggctctaagggagaccccggaatgacgggccccactggggctgcagggctaccggggttgcatggtccccctggtgataaggggaatagaggcgaaaggggtaaaaaaggaagccgagggcccaagggagataaaggggaccagggtgccccaggtctggacgccccctgtccgttgggtgaggacggcttgcccgtgcagggctgttggaataagtag

SEQ ID NO: 233181 - DNA, 2088 bp, Artificial Sequence
  derived and/or modified sequence
atggtggccgagaggacccacaaggccgccgccaccggggcccggggccctggagagctgggcgcccctggcaccgtggccctggtggccgcccgggcagagcggggggcccggctgcccagccctggcagctgtggcctgctgaccctggccctgtgcagcctggccctgagcctgctggcccacttcagaacagctgagctgcaggcccgggtgctgcggctggaggccgagcggggggagcagcagatggagacagccatcctgggccgggtgaaccagctgctggatgagaagtggaagctgcacagcagaagaagaagagaggcccccaagaccagccctggctgcaactgccccccaggccccccaggccccaccggccggcccggcctgcccggggacaagggggccatcggcatgcctggccgggtgggcagccctggagatgctggcctgagcatcatcggcccccggggccccccaggccagcccggcacccggggcttccctggcttccctggccccatcggcctggatggcaagccaggccaccctggccccaagggggacatgggcctgactggacctcctggccagcccggcccccagggccagaagggggagaagggccagtgtggggagtacccccaccgggagtgcctgagctccatgcctgctgccctgcggagcagccagatcatcgccctgaagggggagcagagccaggccagcatccagggccccccaggccccccaggccccccaggccccagcggccccctgggccaccctggcctgcccggccccatgggccccccaggcctgcccggccccccaggccccaagggggaccccggcatccagggctaccacggcaggaaaggagagcggggcatgcctggcatgcctgggaagcatggagccaagggggcccctggcattgctgtggccggcatgaagggggagcccggcatccctggcaccaagggggagaagggagctgagggcagccctggcctgcccggcctgctgggccagaagggggagaagggagatgctggcaacagcatcggcggcggccgcggggagcccggccccccaggcctgcccggccccccaggccccaagggggaggccggcgtggatggccaggtgggccccccaggccagcccggggacaagggggagagaggagctgctggggagcagggcccagatggccccaagggcagcaaaggagagcccgggaagggggagatggtggactacaatggaaacatcaatgaggccctgcaggagatccgcaccctggccctgatgggccccccaggcctgcccggccagatcggccccccaggggcccctggcatccctggccagaagggggagatcggcctgcccggccccccaggccatgatggagagaagggcccccggggcaagccaggggacatgggccccccaggcccccagggccccccaggcaaggatggccccccaggagtgaagggggagaatggccaccctggcagccctggagagaagggggagaagggggagaccggccaggccggcagccctggagagaagggggaggccggggagaagggcaaccctggagctgaggtgcccggcctgcccggccctgagggccccccaggccccccaggcctgcagggcgtgcccggccccaagggggaggccggcctggatggagccaagggggagaagggcttccagggcgagaagggggaccggggccccctgggcctgcccggggccagcggcctggatggccggcccggccccccaggcaccccaggccccatcggcgtgcccggccctgctggccccaagggggagcggggcagcaagggggaccccggcatgacaggccccactggagctgctggcctgcccggcctgcacggccccccaggggacaagggcaacagaggagagcggggcaagaagggcagccggggccccaagggggacaagggggaccagggcgcccctggcctggatgccccctgccccctgggggaggatggcctgcctgtgcagggctgctggaacaagtag

SEQ ID NO: 233182 - DNA, 2052 bp, Artificial Sequence
  derived and/or modified sequence
atggtggccgagaggacccacaaggccgccgccaccggggcccggggccctggagagctgggcgcccctggcaccgtggccctggtggccgcccgggcagagcggggggcccggctgcccagccctggcagctgtggcctgctgaccctggccctgtgcagcctggccctgagcctgctggcccacttcagaacagctgagctgcaggcccgggtgctgcggctggaggccgagcggggggagcagcagatggagacagccatcctgggccgggtgaaccagctgctggatgagaagtggaagctgcacagcagaagaagaagagaggcccccaagaccagccctggctgcaactgccccccaggccccccaggccccaccggccggcccggcctgcccggggacaagggggccatcggcatgcctggccgggtgggcagccctggagatgctggcctgagcatcatcggcccccggggccccccaggccagcccggcacccggggcttccctggcttccctggccccatcggcctggatggcaagccaggccaccctggccccaagggggacatgggcctgactggacctcctggccagcccggcccccagggccagaagggggagaagggccagtgtggggagtacccccaccgggagtgcctgagctccatgcctgctgccctgcggagcagccagatcatcgccctgaagggggagcagagccaggccagcatccagggccccccaggccccccaggccccccaggccccagcggccccctgggccaccctggcctgcccggccccatgggccccccaggcctgcccggccccccaggccccaagggggaccccggcatccagggctaccacggcaggaaaggagagcggggcatgcctggcatgcctgggaagcatggagccaagggggcccctggcattgctgtggccggcatgaagggggagcccggcatccctggcaccaagggggagaagggagctgagggcagccctggcctgcccggcctgctgggccagaagggggagaagggagatgctggcaacagcatcggcggcggccgcggggagcccggccccccaggcctgcccggccccccaggccccaagggggaggccggcgtggatggccaggtgggccccccaggccagcccggggacaagggggagagaggagctgctggggagcagggcccagatggccccaagggcagcaaaggagagcccgggaagggggagatggtggactacaatggaaacatcaatgaggccctgcaggagatccgcaccctggccctgatgggccccccaggcctgcccggccagatcggccccccaggggcccctggcatccctggccagaagggggagatcggcctgcccggccccccaggccatgatggagagaagggcccccggggcaagccaggggacatgggccccccaggcccccagggccccccaggcaaggatggccccccaggagtgaagggggagaatggccaccctggcagccctggagagaagggggagaagggggagaccggccaggccggcagccctggagagaagggggaggccggggagaagggcaaccctggagctgaggtgcccggcctgcccggccctgagggccccccaggccccccaggcctgcagggcgtgcccggccccaagggggaggccggcctggatggagccaagggggagaagggcttccagggcgagaagggggaccggggccccctgggcctgcccggcaccccaggccccatcggcgtgcccggccctgctggccccaagggggagcggggcagcaagggggaccccggcatgacaggccccactggagctgctggcctgcccggcctgcacggccccccaggggacaagggcaacagaggagagcggggcaagaagggcagccggggccccaagggggacaagggggaccagggcgcccctggcctggatgccccctgccccctgggggaggatggcctgcctgtgcagggctgctggaacaagtag

SEQ ID NO: 233183 - DNA, 2088 bp, Artificial Sequence
  derived and/or modified sequence
atggtggccgagaggacccacaaggccgccgccaccggggcccggggccctggagagctgggcgcccctggcaccgtggccctggtggccgcccgggcagagcggggggcccggctgcccagccctggcagctgtggcctgctgaccctggccctgtgcagcctggccctgagcctgctggcccacttcagaacagctgagctgcaggcccgggtgctgcggctggaggccgagcggggggagcagcagatggagacagccatcctgggccgggtgaaccagctgctggatgagaagtggaagctgcacagcagaagaagaagagaggcccccaagaccagccctggctgcaactgccccccagccttccagggccccaccggccggcccggcctgcccggggacaagggggccatcggcatgcctggccgggtgggcagccctggagatgctggcctgagcatcatcggcccccggggccccccaggccagcccggcacccggggcttccctggcttccctggccccatcggcctggatggcaagccaggccaccctggccccaagggggacatgggcctgactggacctcctggccagcccggcccccagggccagaagggggagaagggccagtgtggggagtacccccaccgggagtgcctgagctccatgcctgctgccctgcggagcagccagatcatcgccctgaagggggagcagagccaggccagcatccagggccccccaggccccccaggccccccaggccccagcggccccctgggccaccctggcctgcccggccccatgggccccccaggcctgcccggccccccaggccccaagggggaccccggcatccagggctaccacggcaggaaaggagagcggggcatgcctggcatgcctgggaagcatggagccaagggggcccctggcattgctgtggccggcatgaagggggagcccggcatccctggcaccaagggggagaagggagctgagggcagccctggcctgcccggcctgctgggccagaagggggagaagggagatgctggcaacagcatcggcggcggccgcggggagcccggccccccaggcctgcccggccccccaggccccaagggggaggccggcgtggatggccaggtgggccccccaggccagcccggggacaagggggagagaggagctgctggggagcagggcccagatggccccaagggcagcaaaggagagcccgggaagggggagatggtggactacaatggaaacatcaatgaggccctgcaggagatccgcaccctggccctgatgggccccccaggcctgcccggccagatcggccccccaggggcccctggcatccctggccagaagggggagatcggcctgcccggccccccaggccatgatggagagaagggcccccggggcaagccaggggacatgggccccccaggcccccagggccccccaggcaaggatggccccccaggagtgaagggggagaatggccaccctggcagccctggagagaagggggagaagggggagaccggccaggccggcagccctggagagaagggggaggccggggagaagggcaaccctggagctgaggtgcccggcctgcccggccctgagggccccccaggccccccaggcctgcagggcgtgcccggccccaagggggaggccggcctggatggagccaagggggagaagggcttccagggcgagaagggggaccggggccccctgggcctgcccggggccagcggcctggatggccggcccggccccccaggcaccccaggccccatcggcgtgcccggccctgctggccccaagggggagcggggcagcaagggggaccccggcatgacaggccccactggagctgctggcctgcccggcctgcacggccccccaggggacaagggcaacagaggagagcggggcaagaagggcagccggggccccaagggggacaagggggaccagggcgcccctggcctggatgccccctgccccctgggggaggatggcctgcctgtgcagggctgctggaacaagtag

SEQ ID NO: 233184 - DNA, 2088 bp, Artificial Sequence
  derived and/or modified sequence
atggtggccgagcggacccacaaggccgccgccaccggcgcccgggggccaggcgagttgggagccccgggaacggtagctttggtcgccgcccgcgccgagaggggagcccgactcccaagtcccggtagttgtgggcttctgaccctggcattgtgtagcctcgctctatcgctgctggcacatttccgtacagcggaacttcaggctcgggtactgagactggaggcggagaggggcgaacagcaaatggaaacggctatacttgggcgggtcaaccagttgctagatgaaaagtggaagctgcacagtcgacggcgtcgggaggcccctaaaactagtccaggctgtaactgccctccaggcccaccaggacctactgggcgacctggactccctggggataagggggctatcggtatgcccggaagggtaggttcacccggtgacgctgggttgtccatcatagggcctcgtggaccacctggacagcctggtacaaggggcttcccagggttcccagggcctataggactggatgggaagccaggacatccgggccccaagggcgatatggggttaacagggcctcccggtcaaccagggccacagggccagaagggcgagaagggacagtgtggcgagtacccccaccgcgagtgcctgtcatcaatgccagcagccctgaggtcttctcagatcattgccctgaaaggcgaacaaagtcaggccagcatacaaggacctcctgggccccccggaccgcccggtccctcaggtcctctgggccaccccgggctgccaggtcccatggggccccctggtcttcctgggccacccggtccaaaaggggatcctggcattcagggctaccacggaagaaagggcgagcggggtatgccaggaatgcccggaaaacacggggcgaaaggagctccaggtattgcggtagctggtatgaagggcgaaccgggtataccaggaacaaagggggagaagggcgccgaggggtcacctggcctccccggactactgggacagaagggggagaaaggggacgccggcaactctataggggggggacgaggtgaacccggccctcccggacttccgggccccccagggcccaaaggcgaggcgggggttgacggacaggtcggcccccccggtcagcctggcgacaaaggagagcggggagccgcaggtgaacaaggtccggatggccccaagggctctaagggtgagccaggtaagggagagatggtggactacaatgggaacattaacgaggccctccaggagatccgtacactggctctgatgggtcctcctggactaccgggccagatcgggccgccaggcgctcccggaatccctgggcagaaaggtgagatcgggttaccaggcccacccgggcatgacggggaaaagggacctcgggggaagcctggggacatgggaccaccaggaccccagggaccccctggcaaagacggcccaccaggagtgaagggcgaaaatgggcacccggggtcaccaggggagaagggtgaaaaaggcgagactggacaggcaggaagccccggcgagaaaggggaagccggcgaaaaagggaaccccggggcggaggtccctggtctgcccgggccggaaggtccacctgggcctcctgggctacagggggtccctggtccaaaaggtgaagcaggcttggacggcgccaagggtgaaaagggatttcagggggagaagggagatcgtggccccctcgggctgccgggcgctagcggtcttgacggacggcctggccctcccggcaccccaggacccatcggagttccagggcccgctggacccaagggggaacgcgggagtaagggcgaccccggcatgacaggtcccacaggagcggctggcctgccaggcctacacggacctcctggcgacaaaggaaacagaggcgaaagagggaaaaaggggagtcgaggtcccaagggagataaaggcgaccagggggctccagggctcgacgcgccctgtcccttaggggaggatggtctccccgtgcaagggtgttggaacaaatag

SEQ ID NO: 233185 - DNA, 2052 bp, Artificial Sequence
  derived and/or modified sequence
atggtggccgagcggacccacaaggccgccgccaccggcgcccgggggcccggagaactgggggctcctgggacagtggctctcgtggcggcacgcgcagaaaggggagcccgcctaccttccccaggatcttgcggcctgttgacactggccctgtgctctctggccctcagcttgctggcccacttccgcactgcagaactgcaggctcgcgtgctacgtctagaggcggagagaggcgaacagcagatggagacagccatcttgggccgagtgaatcaactgctcgacgagaagtggaagctgcatagcaggagaaggagagaagcgcccaaaacttccccaggctgtaactgccccccaggacctccgggacccactggcaggcctggcctgccaggtgataagggcgcgatagggatgcctggccgggtgggatctcctggcgatgctgggctatcaataatagggcctagaggccctccaggccagcccggaacccggggatttccaggattcccgggtcctattgggttggacggcaaacccggtcaccccggacccaaaggcgacatgggcttgacaggaccccctgggcagccagggccccaggggcaaaaaggagagaagggacagtgtggggaatatccgcatcgggaatgtctgagtagcatgccagccgcactgcgaagttctcagatcatagctctgaaaggtgagcagagccaagccagcatacaagggcctcccggaccccccggtccacctggcccaagcggtcctctgggccaccccgggctccccgggcctatgggtccgcctggtctaccaggccccccagggccaaagggggatcctggaatccagggttaccatggcagaaaaggcgagcgagggatgccgggcatgccagggaaacacggcgcaaagggcgctccggggatagctgtggctggaatgaagggagagcccgggatcccaggcacgaaaggagagaagggggcggaagggagtcctgggctgccaggactcctgggacaaaagggcgaaaagggtgatgccggaaactccatcggaggcggcaggggagaacccgggccacctggccttccaggcccccccggtcctaaaggcgaggcaggggttgacggtcaggtcggtccaccaggacaaccaggagataaaggggagaggggggcggcaggggaacaaggaccagacggacctaagggaagtaagggcgagccggggaaaggggaaatggtggactataatggcaacattaatgaagcccttcaggaaatcagaacactagcactcatgggtcctcctggtctgcccgggcagatcggtccccctggtgccccaggcatcccagggcagaagggcgagatcggtctcccggggcctccagggcacgatggagagaagggcccaagaggaaagccaggagatatgggcccccccggaccccaaggccctccaggaaaagatggcccacctggagtcaagggcgaaaacgggcatcccgggagcccaggtgagaaaggtgaaaaaggcgagaccggacaggccggatcacccggcgaaaaaggagaggccggcgaaaaagggaatcccggagccgaagtgcccgggctgcccgggcctgagggaccacccggtcctccaggactgcagggcgtcccaggcccaaagggggaggccggcctggatggggccaagggtgaaaagggctttcagggtgagaaaggtgacagaggtcctttaggactccccgggacccccggccccatcggagtgccaggtcctgcgggccccaaaggcgagcgagggtcaaaaggtgatcccgggatgactggacctacaggagccgccggtctccccggcctgcacgggccccccggtgacaaaggtaaccgaggtgagaggggtaagaagggctcgaggggcccgaagggcgacaaaggagaccagggggctcccggattggatgcaccttgtcctctcggagaggacgggctgcctgtccaggggtgctggaacaaatag

SEQ ID NO: 233186 - DNA, 2088 bp, Artificial Sequence
  derived and/or modified sequence
atggtggccgagcggacccacaaggccgccgccaccggcgcccggggccccggcgagctcggggctccaggtacagtggcacttgtggctgcgagggcagaacggggcgctcgcttgccatcccccgggtcctgtggcttactgaccctcgcactctgtagcctggccctgagcctgctggcccactttcggacagcagagctccaggcccgagtgctgaggctggaagcagagcggggcgaacagcagatggagaccgccattttaggtagggtgaaccagcttctagatgaaaaatggaagttgcattcccgccgccgccgggaagctcctaaaacaagccccggctgcaactgccctcctgcctttcagggaccaaccggccgccccggcctgcccggcgataaaggggccataggaatgccaggcagagtcgggagtccaggtgatgcggggctgagtatcataggacctcgtgggccaccaggccagcctgggaccagaggatttccaggtttcccagggcctattggactagatggcaagcctggccaccctggaccaaagggcgacatggggctaaccggccctcctggccaaccgggaccgcagggtcaaaagggcgaaaaaggccaatgtggcgagtaccctcacagagaatgtctttcatccatgccagccgccctgaggagtagtcagatcattgccttgaagggagagcagagccaggctagcatccaaggcccgcccggacctccaggccctcccggaccatcaggaccactgggacacccaggtcttcccgggcccatgggccctcctggattacccggaccgccgggtccaaaaggggatccaggtattcaagggtatcacggaagaaaaggggaaaggggcatgccggggatgcccgggaagcacggggcaaagggggctccaggaattgcggtcgcagggatgaaaggtgaaccgggcatcccaggcacaaagggagagaagggggccgagggatctcccgggctgcccggacttttgggacagaagggcgagaagggcgacgcaggaaactcaattggcggggggcggggagagcctgggcccccaggcctgccaggtcctcccggacccaagggcgaagccggggtggacggacaagtcggccctccaggacagcccggcgacaaaggtgaacgcggcgccgccggagagcagggcccggacggtcccaaaggctctaagggggagcctgggaaaggagaaatggtggactacaacggaaacataaatgaagccttgcaggaaatcaggactctggcactcatggggcctcccggcctgcctggtcagataggaccccccggggctcctggcattccaggtcaaaagggcgagatcgggctccccggtcctccgggacacgacggtgagaaaggaccaagagggaagcccggcgacatgggacctcctgggccgcaggggccacccggaaaggacggaccaccaggcgtcaagggcgaaaacggtcatcctggctctccaggagagaaaggcgagaagggggaaaccggacaggccggctctcccggagaaaagggagaggccggagaaaaaggaaaccctggagcagaggtgcctggtctgcccggaccggaagggccaccaggcccgccaggcctgcagggcgtacccggccccaaaggtgaagccggactcgatggcgccaaaggggagaaaggatttcaaggtgaaaagggggatcggggcccgctcggcctccccggagcatcaggcctagacgggaggcccgggccacccggcacccctgggccaattggcgtgccaggcccagccggaccaaagggtgaacgcggcagcaaaggggatccaggaatgaccggacccactggtgccgctggacttccgggattgcatggaccccctggagataaagggaatcgcggtgaacgcggaaaaaaaggctctcggggaccgaagggcgataaaggagatcagggagcccctggtctcgatgctccctgccctttgggggaagatggcctgcccgtgcaggggtgctggaacaaatag

SEQ ID NO: 233187 - DNA, 3027 bp, Artificial Sequence
  derived and/or modified sequence
gtgtcaagttacagaggcgccggaatcggcccctgcgctcctcgccagccgccacgacccacctctgcccatggggccctccgtgtgcgccccttcgcccggggactgaaactgactggcccgggagacacgaggcgcccagaaggactgacagcgcggcaccaactgctctgcagacacttgaagggaaagactgggcggagagaaggagagccggtcagattcccctaactttcctggacttggaacgttcttcgaaataacttttttctcacctaggtgtaccccaattaccgctggttgtgctttttcggcacttcctctcctactgctaatttttccgtcctctttgccgggagcagcggaaagggacgttttccagcgatacaagccctttccccctgccccgcagtttggatagagccttttggcagcggctgtcgcctttatttattctatttatttatttattggttctcaagacgcgagaggatggtagcggagcgcacccacaaagcggcagccaccggtgcccgcggccctggggagttgggcgcgcccgggacggtggctctggtggcggcgcgggcggagcgcggcgcacggctgccgagtccagggtcgtgcgggctgctgacgctggccctctgctcgctggcactcagcctgctcgcccactttcggacggccgagctgcaggcccgggtgctgcgcctggaagcggagcgcggggagcagcaaatggagacggctattttgggacgagtcaatcaactgctggacgagaaatggaagctccactcaaggaggcgccgggaggccccaaagacatctccaggatgtaactgcccaccaggacctcctggtcccactggaagacccggactcccaggggacaaaggtgccattgggatgcctggacgtgtggggtcccccggagacgctgggctgtccatcattggtccccgcggcccccctggtcaaccaggaactagaggtttccctggatttccgggtcccattgggctggacggcaaaccgggccacccaggaccaaagggcgacatgggtctgacgggtcccccaggacagccgggaccccagggacaaaaaggagaaaagggtcagtgtggagagtacccacaccgggagtgcctaagcagcatgccagcagctctgcgctccagccaaataattgccctgaagggcgaacagagccaggccagcatccaaggtccaccagggcccccaggcccccctggaccaagtggacctctggggcacccaggactgccagggcctatggggccacctggcttacctgggcctcctggaccaaagggagacccagggatccagggctaccacggccggaagggagaacggggcatgccagggatgccaggcaagcatggagccaagggggcgcccggaattgccgtggctgggatgaagggtgagccagggatcccaggaaccaagggtgagaagggggctgaaggctcccctgggcttcctggcctcctggggcagaagggagagaaaggcgatgctggcaactccattggaggaggcagaggggaacctggccctccagggctccctgggcccccagggccaaagggagaagcaggtgtcgatggccaggttggccccccagggcagccaggagacaagggggagcgtggagcagctggagaacagggaccagatggccccaagggctccaagggagaaccagggaaaggagagatggtggattacaatggaaacatcaatgaggctctccaggagatccggacgctggccttgatggggcctcctggtcttcctgggcaaattggcccacctggagctccagggattccaggccagaagggggagattggactgccaggccctccaggacacgatggggaaaagggacctcgcggtaaaccaggagacatgggccctcctggtccccaaggccccccaggaaaggatggacctccaggagtgaagggagaaaacgggcacccagggagcccaggagagaagggggaaaaaggggagacaggacaagcaggctcaccgggagagaaaggagaagccggggagaagggcaatccaggagcagaggttcctgggctgccagggccagaggggcctcccggacctccggggctccaaggtgttcctggaccaaagggggaagcaggactagatggagcaaaaggagagaaaggcttccagggagaaaaaggagaccgtggtcccctgggactacccggagcttcaggtttggacggcaggcctgggccaccgggtactccaggaccaattggagttccaggcccagcgggaccaaagggcgagaggggcagcaaaggagaccctgggatgacaggaccaacgggagcagctgggcttcctggtttacatggaccacccggggacaagggaaaccggggggagagggggaagaaaggctctagagggcctaaaggggataagggagaccaaggagcgcctggattagatgccccctgcccattgggcgaagatggcttaccagtccaaggctgctggaacaagtgatgcctctaaccttggattggcctgtgtgtgtgtttgtacatagaatatttatttttatacagttttcactttttgaaaatgccagaagtatgatgcatcttacagattattaaaaaagaaagaaaaacctgcatattttgtacagaaaatatcaacctcttcccttttgtttacaagatgttttgtataagcctatgtctctaatacattttttgtttggtcgtaatgtctgcatgatatttgtgcacatttattaagtatcgaagcttaataaattattgtgtcctggtgccaaagggggccagccagaactgaggtgctggctagctcatgtgtgaattcacataaatgtagaggtccatgatatttgctaagctaggtgtgtctaagagtattttaaacccttatggattttcattattaaaggaaatgaaacatggcaattca

SEQ ID NO: 233188 - DNA, 2991 bp, Artificial Sequence
  derived and/or modified sequence
gtgtcaagttacagaggcgccggaatcggcccctgcgctcctcgccagccgccacgacccacctctgcccatggggccctccgtgtgcgccccttcgcccggggactgaaactgactggcccgggagacacgaggcgcccagaaggactgacagcgcggcaccaactgctctgcagacacttgaagggaaagactgggcggagagaaggagagccggtcagattcccctaactttcctggacttggaacgttcttcgaaataacttttttctcacctaggtgtaccccaattaccgctggttgtgctttttcggcacttcctctcctactgctaatttttccgtcctctttgccgggagcagcggaaagggacgttttccagcgatacaagccctttccccctgccccgcagtttggatagagccttttggcagcggctgtcgcctttatttattctatttatttatttattggttctcaagacgcgagaggatggtagcggagcgcacccacaaagcggcagccaccggtgcccgcggccctggggagttgggcgcgcccgggacggtggctctggtggcggcgcgggcggagcgcggcgcacggctgccgagtccagggtcgtgcgggctgctgacgctggccctctgctcgctggcactcagcctgctcgcccactttcggacggccgagctgcaggcccgggtgctgcgcctggaagcggagcgcggggagcagcaaatggagacggctattttgggacgagtcaatcaactgctggacgagaaatggaagctccactcaaggaggcgccgggaggccccaaagacatctccaggatgtaactgcccaccaggacctcctggtcccactggaagacccggactcccaggggacaaaggtgccattgggatgcctggacgtgtggggtcccccggagacgctgggctgtccatcattggtccccgcggcccccctggtcaaccaggaactagaggtttccctggatttccgggtcccattgggctggacggcaaaccgggccacccaggaccaaagggcgacatgggtctgacgggtcccccaggacagccgggaccccagggacaaaaaggagaaaagggtcagtgtggagagtacccacaccgggagtgcctaagcagcatgccagcagctctgcgctccagccaaataattgccctgaagggcgaacagagccaggccagcatccaaggtccaccagggcccccaggcccccctggaccaagtggacctctggggcacccaggactgccagggcctatggggccacctggcttacctgggcctcctggaccaaagggagacccagggatccagggctaccacggccggaagggagaacggggcatgccagggatgccaggcaagcatggagccaagggggcgcccggaattgccgtggctgggatgaagggtgagccagggatcccaggaaccaagggtgagaagggggctgaaggctcccctgggcttcctggcctcctggggcagaagggagagaaaggcgatgctggcaactccattggaggaggcagaggggaacctggccctccagggctccctgggcccccagggccaaagggagaagcaggtgtcgatggccaggttggccccccagggcagccaggagacaagggggagcgtggagcagctggagaacagggaccagatggccccaagggctccaagggagaaccagggaaaggagagatggtggattacaatggaaacatcaatgaggctctccaggagatccggacgctggccttgatggggcctcctggtcttcctgggcaaattggcccacctggagctccagggattccaggccagaagggggagattggactgccaggccctccaggacacgatggggaaaagggacctcgcggtaaaccaggagacatgggccctcctggtccccaaggccccccaggaaaggatggacctccaggagtgaagggagaaaacgggcacccagggagcccaggagagaagggggaaaaaggggagacaggacaagcaggctcaccgggagagaaaggagaagccggggagaagggcaatccaggagcagaggttcctgggctgccagggccagaggggcctcccggacctccggggctccaaggtgttcctggaccaaagggggaagcaggactagatggagcaaaaggagagaaaggcttccagggagaaaaaggagaccgtggtcccctgggactacccggtactccaggaccaattggagttccaggcccagcgggaccaaagggcgagaggggcagcaaaggagaccctgggatgacaggaccaacgggagcagctgggcttcctggtttacatggaccacccggggacaagggaaaccggggggagagggggaagaaaggctctagagggcctaaaggggataagggagaccaaggagcgcctggattagatgccccctgcccattgggcgaagatggcttaccagtccaaggctgctggaacaagtgatgcctctaaccttggattggcctgtgtgtgtgtttgtacatagaatatttatttttatacagttttcactttttgaaaatgccagaagtatgatgcatcttacagattattaaaaaagaaagaaaaacctgcatattttgtacagaaaatatcaacctcttcccttttgtttacaagatgttttgtataagcctatgtctctaatacattttttgtttggtcgtaatgtctgcatgatatttgtgcacatttattaagtatcgaagcttaataaattattgtgtcctggtgccaaagggggccagccagaactgaggtgctggctagctcatgtgtgaattcacataaatgtagaggtccatgatatttgctaagctaggtgtgtctaagagtattttaaacccttatggattttcattattaaaggaaatgaaacatggcaattca

SEQ ID NO: 233189 - DNA, 3071 bp, Artificial Sequence
  derived and/or modified sequence
aagtagcacggattgctcatccgatccgtgccgccgcagggagtgtgtcaagttacagaggcgccggaatcggcccctgcgctcctcgccagccgccacgacccacctctgcccatggggccctccgtgtgcgccccttcgcccggggactgaaactgactggcccgggagacacgaggcgcccagaaggactgacagcgcggcaccaactgctctgcagacacttgaagggaaagactgggcggagagaaggagagccggtcagattcccctaactttcctggacttggaacgttcttcgaaataacttttttctcacctaggtgtaccccaattaccgctggttgtgctttttcggcacttcctctcctactgctaatttttccgtcctctttgccgggagcagcggaaagggacgttttccagcgatacaagccctttccccctgccccgcagtttggatagagccttttggcagcggctgtcgcctttatttattctatttatttatttattggttctcaagacgcgagaggatggtagcggagcgcacccacaaagcggcagccaccggtgcccgcggccctggggagttgggcgcgcccgggacggtggctctggtggcggcgcgggcggagcgcggcgcacggctgccgagtccagggtcgtgcgggctgctgacgctggccctctgctcgctggcactcagcctgctcgcccactttcggacggccgagctgcaggcccgggtgctgcgcctggaagcggagcgcggggagcagcaaatggagacggctattttgggacgagtcaatcaactgctggacgagaaatggaagctccactcaaggaggcgccgggaggccccaaagacatctccaggatgtaactgcccaccagcatttcagggtcccactggaagacccggactcccaggggacaaaggtgccattgggatgcctggacgtgtggggtcccccggagacgctgggctgtccatcattggtccccgcggcccccctggtcaaccaggaactagaggtttccctggatttccgggtcccattgggctggacggcaaaccgggccacccaggaccaaagggcgacatgggtctgacgggtcccccaggacagccgggaccccagggacaaaaaggagaaaagggtcagtgtggagagtacccacaccgggagtgcctaagcagcatgccagcagctctgcgctccagccaaataattgccctgaagggcgaacagagccaggccagcatccaaggtccaccagggcccccaggcccccctggaccaagtggacctctggggcacccaggactgccagggcctatggggccacctggcttacctgggcctcctggaccaaagggagacccagggatccagggctaccacggccggaagggagaacggggcatgccagggatgccaggcaagcatggagccaagggggcgcccggaattgccgtggctgggatgaagggtgagccagggatcccaggaaccaagggtgagaagggggctgaaggctcccctgggcttcctggcctcctggggcagaagggagagaaaggcgatgctggcaactccattggaggaggcagaggggaacctggccctccagggctccctgggcccccagggccaaagggagaagcaggtgtcgatggccaggttggccccccagggcagccaggagacaagggggagcgtggagcagctggagaacagggaccagatggccccaagggctccaagggagaaccagggaaaggagagatggtggattacaatggaaacatcaatgaggctctccaggagatccggacgctggccttgatggggcctcctggtcttcctgggcaaattggcccacctggagctccagggattccaggccagaagggggagattggactgccaggccctccaggacacgatggggaaaagggacctcgcggtaaaccaggagacatgggccctcctggtccccaaggccccccaggaaaggatggacctccaggagtgaagggagaaaacgggcacccagggagcccaggagagaagggggaaaaaggggagacaggacaagcaggctcaccgggagagaaaggagaagccggggagaagggcaatccaggagcagaggttcctgggctgccagggccagaggggcctcccggacctccggggctccaaggtgttcctggaccaaagggggaagcaggactagatggagcaaaaggagagaaaggcttccagggagaaaaaggagaccgtggtcccctgggactacccggagcttcaggtttggacggcaggcctgggccaccgggtactccaggaccaattggagttccaggcccagcgggaccaaagggcgagaggggcagcaaaggagaccctgggatgacaggaccaacgggagcagctgggcttcctggtttacatggaccacccggggacaagggaaaccggggggagagggggaagaaaggctctagagggcctaaaggggataagggagaccaaggagcgcctggattagatgccccctgcccattgggcgaagatggcttaccagtccaaggctgctggaacaagtgatgcctctaaccttggattggcctgtgtgtgtgtttgtacatagaatatttatttttatacagttttcactttttgaaaatgccagaagtatgatgcatcttacagattattaaaaaagaaagaaaaacctgcatattttgtacagaaaatatcaacctcttcccttttgtttacaagatgttttgtataagcctatgtctctaatacattttttgtttggtcgtaatgtctgcatgatatttgtgcacatttattaagtatcgaagcttaataaattattgtgtcctggtgccaaagggggccagccagaactgaggtgctggctagctcatgtgtgaattcacataaatgtagaggtccatgatatttgctaagctaggtgtgtctaagagtattttaaacccttatggattttcattattaaaggaaatgaaacatggcaattca

SEQ ID NO: 233190 - DNA, 2088 bp, Artificial Sequence
  derived and/or modified sequence
atggtggccgaacggactcataaagcagccgctacgggtgcacgcggtccaggggagctcggggcacccggaaccgtggccctggtagctgctagggccgagaggggcgctaggctcccctcacccggaagctgtggcctactcactctcgctttatgctctctggctctgtcacttttggcacatttccggactgccgagctgcaggccagggttctccgacttgaagcagagagaggcgagcagcagatggagaccgcaattcttggtagagttaaccagctgctggacgagaagtggaagttacactctaggcgcaggagggaagcccctaaaacaagcccaggctgcaactgtccacccggtcccccaggaccaactgggaggcctgggttgcctggggataagggcgctatcggaatgcccggtcgggtcggaagcccaggtgacgccggtctcagcattatcggtcccaggggtccccctggacagccaggaaccagaggttttccaggcttccccggtcccatcggcttggatgggaaaccaggccaccccggtcctaaaggcgatatgggtctcaccgggcctcccggacagcctggaccacaaggacaaaagggagagaaaggccagtgcggagaataccctcatcgggaatgtttaagcagtatgcccgcagcccttcgaagctctcagatcatagctctcaagggggagcaatcacaggcgagtattcaagggcctcccggtcctccaggccctccgggacctagcggcccactggggcatcctggcctcccgggaccaatgggcccacccggactcccaggccctcctggaccaaaaggagatcccggaatccagggatatcatgggcgaaaaggagagaggggaatgcccggaatgcctggtaagcacggcgcaaagggagcccctggcatcgccgttgccggtatgaagggcgaaccagggatccccggaaccaagggcgagaaaggagctgaagggtcccccggactgcctggattgttggggcagaaaggggagaaaggagatgcaggcaacagcatcgggggtggcagaggcgaaccagggcctccgggtctgccaggcccacccggaccaaagggtgaagctggggttgatggccaagtgggaccgcctggtcagccaggagacaagggggaaaggggcgctgcgggagaacagggacctgacgggcctaaaggttctaagggcgaacccggtaagggggagatggttgattataacggtaacataaatgaggctctccaggagataagaacgctagcgctgatgggaccacctggcctgcctggccagataggcccaccaggcgcacctgggattcctggtcagaaaggcgagattggcctgccaggtcccccaggccacgacggcgagaaagggccaagaggcaagccgggagatatggggccaccgggaccccagggtccgccaggtaaagacggacctcctggagttaagggcgagaatggccaccccggatcacctggcgagaaaggggagaagggagagaccggacaggccggatcaccgggagagaagggagaggctggcgaaaagggcaacccgggagcagaggtgcccggactgcctggccctgaaggacccccaggaccacccggacttcagggagtacccggacctaaaggcgaagctggattagacggtgcaaagggtgaaaagggctttcagggagagaagggggatcgaggcccactaggtctccctggtgccagcggactggacggtaggcccggtccaccaggaacgcctggacctattggcgtaccgggaccagcgggaccgaagggcgagcggggaagtaagggcgaccccggaatgacgggcccaaccggagcagcagggctccccggtctgcacggcccacccggagataagggtaatagaggtgagcggggaaagaaggggtctcggggacctaagggagataaaggcgatcagggcgcacccggtctggatgctccttgtcccctaggcgaagacggtttgccagtgcaggggtgctggaataagtag

SEQ ID NO: 233191 - DNA, 2052 bp, Artificial Sequence
  derived and/or modified sequence
atggtggcagaaaggacccacaaggcagccgctactggtgcgagaggcccaggcgagttgggcgctccgggtactgtggctctagtggcggcaagggccgaacgcggtgcaaggttaccaagccccggtagctgtgggttgcttacactcgcactgtgcagcctggcactaagccttctggcccatttcaggaccgccgagctgcaagctcgagtgctgaggctggaggcagaacgcggagaacagcagatggagaccgcgattctcggtcgagttaaccagttgctggacgagaaatggaagctccactcaagacgacggcgagaggcccctaagacttcccctggatgcaactgtccccctggccctcccggaccaaccggccgaccagggttacccggagacaagggtgcaatcggcatgcccggacgcgtgggatccccaggagatgctggccttagtatcattgggcctagggggcctccagggcagcccggtaccaggggattccctggcttcccgggtccaatcggtcttgacggaaagccaggtcaccctggacccaaaggagatatgggcctaactgggccaccaggacagccagggccacagggccagaagggagaaaagggccagtgcggcgaatacccccatcgggagtgtctttccagtatgccggctgccctccgatcgtctcaaatcattgctcttaagggagaacagtctcaggctagtattcagggtccaccaggacctccaggcccacctgggccttcaggacccctgggacaccctggtcttccaggccctatgggtccccctgggctgccaggccctcctgggcctaagggtgaccctggaatccagggttaccacggcagaaagggcgaaaggggaatgccaggcatgcctggcaagcacggagccaagggcgctcctggtatagctgtggccggaatgaaaggagaacccggtatcccgggtacgaagggggagaagggcgctgaggggtcccccggtcttcccggtctgttgggacagaagggtgaaaaaggtgacgccggaaattccataggcggtggaagaggggagcctggcccaccaggcctcccgggacctcccggtccaaagggagaggccggagtggacggtcaagtgggacctcccggtcagcctggggacaagggcgagaggggggctgcgggagagcagggccctgatggaccaaagggttcaaagggagagccaggcaagggtgaaatggtggactacaatgggaacataaatgaagcccttcaggagatccggactttagcgttgatggggccacctgggcttcctggacaaataggcccaccgggagctcccggtattcctgggcagaagggagagattggactcccaggtcccccagggcatgatggagagaagggaccccgaggtaaacccggtgatatgggaccacctggccctcagggcccaccaggcaaggacgggccaccgggagtaaagggagagaacggccacccaggctcccccggtgagaagggcgaaaaaggcgagacaggacaggctggttccccaggagagaagggcgaggctggggagaagggcaaccctggcgcagaggttcctggactcccgggacccgagggacccccaggccctcctgggcttcagggcgtgccaggcccaaaaggcgaagcaggtctggacggagcaaaaggcgagaaaggattccagggcgagaagggcgaccggggacctttgggtctgcctggtacaccagggccaattggggtgccaggccctgcaggtccaaaaggtgaaagagggagtaaaggggaccctggtatgactggcccaaccggggctgcgggacttcccggtctgcatgggcctccaggtgacaagggcaaccgcggagaaagagggaagaaaggatcgaggggcccaaagggagataagggcgaccaaggcgctcctgggctggacgcaccatgcccgttgggcgaggacgggctgcccgtgcaaggatgctggaataaatag

SEQ ID NO: 233192 - DNA, 2088 bp, Artificial Sequence
  derived and/or modified sequence
atggtagccgagaggacccataaagccgcagccacaggtgcacgcggtccaggggagctgggggctccagggaccgtggcactcgtagccgcacgcgcagagcgaggagcgcgactgcctagtccaggctcatgcggacttctgactctcgcactgtgctcactagctttatcactgcttgcacatttcagaacggcagagctgcaggcccgtgttctgcgactggaggccgagcggggtgaacagcagatggaaacagctatactaggacgggttaaccagctgctggacgagaaatggaagctccattctagaagacggcgagaggcgcctaagacgtcccctggatgtaactgtcctccagcctttcagggaccgacgggaaggcctggactgcctggggataagggagcaattgggatgcccggacgggtgggctcccctggggatgctgggttgtccattataggacctcgcggaccccctggacagcctggtactagagggttcccagggttcccagggcctatcggtctggacggcaaaccagggcacccagggcctaaaggagatatgggcctgacaggtccacctgggcagccgggaccccagggccagaagggggagaagggccagtgcggcgagtatccacacagagaatgccttagtagcatgccagccgctctgcggagctcacagatcatcgccctgaagggagaacaatcgcaggcttctatccagggcccaccgggacctcccggaccccctggaccctccggcccactaggccatcctggacttcctgggcctatgggtccaccagggctaccaggacctccgggtcccaaaggagatcccggaatccagggctatcatggccgaaagggtgagcgcggaatgcccggaatgcctgggaaacatggagccaagggcgcacctggaattgccgtcgcaggaatgaagggcgagcctgggattccaggcacaaagggagagaagggtgctgaaggatccccagggttgcctggcctactgggacagaagggggaaaagggggatgctgggaattccattggcggaggcagaggggagcccggtcctcctggactgccgggaccacctggccctaagggcgaagcaggagtggacggacaggtgggtccaccaggtcagccaggtgacaagggtgaaaggggggctgccggagagcagggacctgacggacctaaggggagcaaaggagagcctggaaagggagaaatggtggactacaacggcaacatcaatgaggccctgcaggagatcagaactctggctctgatgggccctcctggcctgcctggacagatcggccctcctggcgctcccggaataccaggtcagaagggggaaatcgggctgcccggacccccagggcatgatggcgagaagggaccacggggtaagcctggggacatgggtcctcccggtcctcagggcccacccggtaaggatggccctccaggcgtgaagggtgaaaacgggcatcccggtagccctggggagaagggcgagaagggagagactggccaagccggatctccaggagagaagggggaagcgggagagaaggggaacccaggggctgaagtacccggactgcccggacccgaggggcctcctggcccaccaggactgcagggagtgccgggaccaaagggagaggccggactcgatggtgcaaagggcgagaagggcttccagggtgaaaagggagacagaggaccccttgggctgcctggtgcatcaggccttgatggtagacccggtcccccaggaacccctgggcctattggagtgcctggaccagcaggcccaaaaggggaaagaggttccaaaggggatcctgggatgacggggccaacaggggctgctggcctgcctggcctgcatggaccaccaggggacaaaggcaatcgcggagagcgcggaaagaaggggtcacgcggacccaaaggcgataaaggagatcagggcgctccaggcttggatgcgccttgtccactgggagaagatggtcttcctgtgcaaggatgttggaacaaatag

SEQ ID NO: 233193 - protein, 668 aa, Artificial Sequence
  derived and/or modified sequence
MVAERTHKAAATGARGPGELGAPGTVALVAARAERGARLPSPGSCGLLTLALCSLALSLLAHFRTAELQARVLRLEAERGEQQMETAILGRVNQLLDEKWKLHSRRRREAPKTSPGCNCPPGPPGPTGRPGLPGDKGAIGMPGRVGSPGDAGLSIIGPRGPPGQPGTRGFPGFPGPIGLDGKPGHPGPKGDMGLTGPPGQPGPQGQKGEKGQCGEYPHRECLSSMPAALRSSQIIALKGEQSQASIQGPPGPPGPPGPSGPLGHPGLPGPMGPPGLPGPPGPKGDPGIQGYHGRKGERGMPGMPGKHGAKGAPGIAVAGMKGEPGIPGTKGEKGAEGSPGLPGLLGQKGEKGDAGNSIGGGRGEPGPPGLPGPPGPKGEAGVDGQVGPPGQPGDKGERGAAGEQGPDGPKGSKGEPGKGEMVDYNGNINEALQEIRTLALMGPPGLPGQIGPPGAPGIPGQKGEIGLPGPPGHDGEKGPRGKPGDMGPPGPQGPPGKDGPPGVKGENGHPGSPGEKGEKGETGQAGSPVPGLPGPEGPPGPPGLQGVPGPKGEAGLDGAKGEKGFQGEKGDRGPLGLPGTPGPIGVPGPAGPKGERGSKGDPGMTGPTGAAGLPGLHGPPGDKGNRGERGKKGSRGPKGDKGDQGAPGLDAPCPLGEDGLPVQGCWNK

SEQ ID NO: 233194 - DNA, 511 bp, Artificial Sequence
  derived and/or modified sequence
cagccgggccctgccttccagagctcctggagcggcctgtcccccgggacaccgggacccacctgcagagggcttaccgctcaggagagcagaacaaggccaacctggagaggtaggcagtggctacctccactttacagatgaagacactgaggctcaggaggtggcgtgactgctccgggtctcacgcttagtaaacggccgcagaaccctggtcggtttgacgcaagaccctggcggatcccagagccaaacagagctggcctgaacctccaggacttcagcccttctaggagaatctgatcccaggtgagggaggtcacttggggtgtggcccagcaggcaggcgggactccagactgggaacggaagtcagccctgctggggctgggagctgaagcatctgttccttcctcgcgggtgtgagacaaggaagagtgatcattgccacaccaggagctgaagccatggcctcaaagcctgagaagagggtggcatcgtctgtctttat

SEQ ID NO: 233195 - DNA, 2109 bp, Artificial Sequence
  derived and/or modified sequence
atggtggccgagagaacccacaaggccgccgccaccggcgccagaggccccggcgagctgggcgcccccggcaccgtggccctggtggccgccagagccgagagaggcgccagactgcccagccccggcagctgcggcctgctgaccctggccctgtgcagcctggccctgagcctgctggcccacttcagaaccgccgagctgcaggccagagtgctgagactggaggccgagagaggcgagcagcagatggagaccgccatcctgggcagagtgaaccagctgctggacgagaagtggaagctgcacagcagaagaagaagagaggcccccaagaccagccccggctgcaactgcccccccgccttccagggccccaccggcagacccggcctgcccggcgacaagggcgccatcggcatgcccggcagagtgggcagccccggcgacgccggcctgagcatcatcggccccagaggcccccccggccagcccggcaccagaggcttccccggcttccccggccccatcggcctggacggcaagcccggccaccccggccccaagggcgacatgggcctgaccggcccccccggccagcccggcccccagggccagaagggcgagaagggccagtgcggcgagtacccccacagagagtgcctgagcagcatgcccgccgccctgagaagcagccagatcatcgccctgaagctgctgcccctgctgaacagcgtgagactggcccccccccccgtgatcaagagaagaaccttccagggcgagcagagccaggccagcatccagggcccccccggcccccccggcccccccggccccagcggccccctgggccaccccggcctgcccggccccatgggcccccccggcctgcccggcccccccggccccaagggcgaccccggcatccagggctaccacggcagaaagggcgagagaggcatgcccggcatgcccggcaagcacggcgccaagggcgcccccggcatcgccgtggccggcatgaagggcgagcccggcatccccggcaccaagggcgagaagggcgccgagggcagccccggcctgcccggcctgctgggccagaagggcgagaagggcgacgccggcaacagcatcggcggcggcagaggcgagcccggcccccccggcctgcccggcccccccggccccaagggcgaggccggcgtggacggccaggtgggcccccccggccagcccggcgacaagggcgagagaggcgccgccggcgagcagggccccgacggccccaagggcagcaagggcgagcccggcaagggcgagatggtggactacaacggcaacatcaacgaggccctgcaggagatcagaaccctggccctgatgggcccccccggcctgcccggccagatcggcccccccggcgcccccggcatccccggccagaagggcgagatcggcctgcccggcccccccggccacgacggcgagaagggccccagaggcaagcccggcgacatgggcccccccggcccccagggcccccccggcaaggacggcccccccggcgtgaagggcgagaacggccaccccggcagccccggcgagaagggcgagaagggcgagaccggccaggccggcagccccgtgcccggcctgcccggccccgagggcccccccggcccccccggcctgcagggcgtgcccggccccaagggcgaggccggcctggacggcgccaagggcgagaagggcttccagggcgagaagggcgacagaggccccctgggcctgcccggcgccagcggcctggacggcagacccggcccccccggcacccccggccccatcggcgtgcccggccccgccggccccaagggcgagagaggcagcaagggcgaccccggcatgaccggccccaccggcgccgccggcctgcccggcctgcacggcccccccggcgacaagggcaacagaggcgagagaggcaagaagggcagcagaggccccaagggcgacaagggcgaccagggcgcccccggcctggacgccccctgccccctgggcgaggacggcctgcccgtgcagggctgctggaacaagtag

SEQ ID NO: 233196 - DNA, 2007 bp, Artificial Sequence
  derived and/or modified sequence
atggtggccgagagaacccacaaggccgccgccaccggcgccagaggccccggcgagctgggcgcccccggcaccgtggccctggtggccgccagagccgagagaggcgccagactgcccagccccggcagctgcggcctgctgaccctggccctgtgcagcctggccctgagcctgctggcccacttcagaaccgccgagctgcaggccagagtgctgagactggaggccgagagaggcgagcagcagatggagaccgccatcctgggcagagtgaaccagctgctggacgagaagtggaagctgcacagcagaagaagaagagaggcccccaagaccagccccggctgcaactgcccccccggcccccccggccccaccggcagacccggcctgcccggcgacaagggcgccatcggcatgcccggcagagtgggcagccccggcgacgccggcctgagcatcatcggccccagaggcccccccggccagcccggcaccagaggcttccccggcttccccggccccatcggcctggacggcaagcccggccaccccggccccaagggcgacatgggcctgaccggcccccccggccagcccggcccccagggccagaagggcgagaagggccagtgcggcgagtacccccacagagagtgcctgagcagcatgcccgccgccctgagaagcagccagatcatcgccctgaagggcgagcagagccaggccagcatccagggcccccccggcccccccggcccccccggccccagcggccccctgggccaccccggcctgcccggccccatgggcccccccggcctgcccggcccccccggccccaagggcgaccccggcatccagggctaccacggcagaaagggcgagagaggcatgcccggcatgcccggcaagcacggcgccaagggcgcccccggcatcgccgtggccggcatgaagggcgagcccggcatccccggcaccaagggcgagaagggcgccgagggcagccccggcctgcccggcctgctgggccagaagggcgagaagggcgacgccggcaacagcatcggcggcggcagaggcgagcccggcccccccggcctgcccggcccccccggccccaagggcgaggccggcgtggacggccaggtgggcccccccggccagcccggcgacaagggcgagagaggcgccgccggcgagcagggccccgacggccccaagggcagcaagggcgagcccggcaagggcgagatggtggactacaacggcaacatcaacgaggccctgcaggagatcagaaccctggccctgatgggcccccccggcctgcccggccagatcggcccccccggcgcccccggcatccccggccagaagggcgagatcggcctgcccggcccccccggccacgacggcgagaagggccccagaggcaagcccggcgacatgggcccccccggcccccagggcccccccggcaaggacggcccccccggcgtgaagggcgagaacggccaccccggcagccccggcgagaagggcgagaagggcgagaccggccaggccggcagccccgtgcccggcctgcccggccccgagggcccccccggcccccccggcctgcagggcgtgcccggccccaagggcgaggccggcctggacggcgccaagggcgagaagggcttccagggcgagaagggcgacagaggccccctgggcctgcccggcacccccggccccatcggcgtgcccggccccgccggccccaagggcgagagaggcagcaagggcgaccccggcatgaccggccccaccggcgccgccggcctgcccggcctgcacggcccccccggcgacaagggcaacagaggcgagagaggcaagaagggcagcagaggccccaagggcgacaagggcgaccagggcgcccccggcctggacgccccctgccccctgggcgaggacggcctgcccgtgcagggctgctggaacaagtag

SEQ ID NO: 233197 - DNA, 2109 bp, Artificial Sequence
  derived and/or modified sequence
atggtagcggagcgcacacacaaggcagcggcaacaggcgctcgcgggccgggcgaactcggcgccccaggcacagtggccctggttgcggcaagggcggagaggggcgcacggttaccaagccccgggagctgtggattactgaccctggccctatgttctcttgctctgagtctgctcgctcatttcagaactgcagagctgcaagctcgagtgctgcggctagaagcagagcggggagagcagcagatggagactgccatcctgggtagagtaaatcagcttctagacgagaagtggaagcttcactctcgacgtaggcgagaggcgcccaaaacatccccgggctgtaactgtccacctgcatttcaaggacctacaggccgccccggtctccccggggataaaggcgcaatagggatgccagggcgggtaggtagtcctggggatgctggcttatctattattggcccgcgggggcctcctggtcagcccgggactagaggatttccaggatttcccggtccgatcggactggatgggaaaccaggtcacccaggccccaaaggagatatggggctgactggccctccagggcagcccggaccacaagggcagaagggggagaaaggccaatgcggagaatacccacacagagaatgtctctctagtatgcccgctgcgctgagatccagtcagattatcgcgctgaaactgttgcccttgctgaacagcgtgcgcctggctcctcctccagtcattaaaagaaggacattccagggcgagcaatcccaggcctcgattcaaggcccccccggtccacctggaccaccaggaccttccgggcccttgggtcaccctggactcccaggtccgatggggcctcctggcctgcctggtcccccaggaccgaaaggcgaccctggcatccagggctatcacggccggaagggagaacggggcatgcccggtatgcctggaaaacacggcgccaaaggtgcacctggaattgctgtagccggaatgaagggagagccagggatcccggggactaaaggggaaaaaggcgccgaaggttctcctggactgcctggcctgctaggtcagaaaggagagaaaggagatgcgggaaattcaatcggtggcgggcgtggagagccgggacccccaggactgcccggcccgcctggacctaaaggcgaagccggcgtcgatggccaggtgggacctcctgggcagccaggtgacaagggagagagaggggccgcaggggagcagggccccgacggccccaaaggcagcaaaggcgagcctggaaaaggggaaatggttgactacaatggtaatataaacgaagccctgcaggagatcagaactttagccctgatgggccctccagggttgccaggtcaaatcgggcccccgggcgcgccaggcatacccggccaaaagggtgagattgggctgcccgggcctcccggccacgacggcgagaaaggaccacgtggtaagcctggggacatgggaccaccagggccccaggggcctccaggcaaggacggccctccaggcgtcaagggggagaacggacaccccggctcccccggggaaaagggcgagaagggcgagaccggccaagccggcagccccgtgcctggcttgcctggccctgaggggccacccggacctcctgggctgcaaggggttcctggtcctaagggtgaggcaggactagacggagctaaaggcgaaaagggctttcagggagaaaaaggggatagaggcccactggggttacccggagcaagtggacttgacggccgcccaggtccacctggcacccctggacccattggtgtgcccggcccagctggtccaaagggagagagaggatcaaaaggcgatccaggaatgactgggccgaccggagcggccggcctgccagggttgcacggaccacccggagataaaggtaatcgtggcgagcggggcaaaaagggatcaaggggcccaaagggcgacaaaggagaccagggggcacccgggttagatgctccatgtcctttaggcgaggatggactcccagttcaggggtgttggaataaatag

SEQ ID NO: 233198 - DNA, 2007 bp, Artificial Sequence
  derived and/or modified sequence
atggtcgcagaaaggactcacaaggctgccgccacaggtgcaaggggcccgggcgagctgggcgctcccgggactgttgccctggtagccgcgagagcagaaaggggtgctcgattgccctctccagggagctgcggcctgctcacactagcactttgttccctagctctcagtctgctagcccacttcagaacagctgaactgcaggcacgcgtcctaaggctggaggcagaacgaggcgagcagcagatggaaactgccatccttggtcgcgtgaaccagctgttagacgagaagtggaagcttcattctcggaggagacgggaggcccccaagacctcaccagggtgcaattgccccccagggcctcccggccccaccggaagacctggacttcctggagacaagggtgctatcgggatgcccggccgcgttgggtccccgggcgacgctggattatcaattataggacctcgtggaccaccagggcagcctgggaccagaggattccctggttttcccggtcccatcggcctcgatgggaagcctggtcatcccggaccaaaaggcgacatgggcctgactggacctccaggccagcccggacctcagggccagaaaggcgagaagggccagtgcggggagtatccacacagggagtgcttgagcagtatgcctgcagccctcaggtcctcccagattatagcgcttaagggcgagcagtctcaggcctcaatacagggccccccaggtccccccgggcctcccggaccctccggccctctgggtcatcctggtctgcccggccccatgggtcctccaggcctgccagggcctcccggcccaaagggcgatcccggaatacagggataccatgggcggaaaggcgagcgcgggatgcccggaatgccaggcaagcacggcgcaaagggcgctcccggtatagctgtggccggaatgaaaggagagcctggcatccccggtacaaagggagagaagggcgccgaggggagtcctggcctcccgggtctgcttgggcagaagggcgagaaaggtgatgccggtaacagcattggtggcggcaggggtgagccaggtcctccaggcctgccgggccccccaggaccaaaaggtgaggccggcgtggacggacaggtggggcctcccggccagccaggcgacaagggggaacggggtgctgcaggtgaacaagggccagatggacccaaaggctcgaaaggtgagcctggcaagggggagatggtcgactacaatggaaatatcaacgaggccctgcaggaaattcggactctggcactgatgggtccgccgggccttcccgggcaaattggccctcctggtgcaccgggcataccaggtcagaagggggaaatcggcctccccggaccccctggacatgacggagagaagggaccccgcggaaaaccgggcgatatgggtccccccggaccccagggaccaccggggaaagatgggcccccaggggtgaaaggcgagaacggtcaccccggctccccaggagaaaaaggggagaaaggtgaaaccgggcaagccggatcacccgtccccggcctgccaggcccagaagggccaccaggcccccctggactgcagggcgttcctggacccaagggagaggctggcctagacggcgcgaaaggtgaaaaaggcttccagggcgagaaaggtgatagggggccactcgggctgcctggaaccccggggccaatcggtgtacctgggccagcgggccccaaaggcgaacggggaagcaaaggggacccaggcatgaccggcccaactggggcagctggattgcccggattgcatggccctcctggggacaaggggaatcgcggggagaggggcaaaaagggttctagagggcccaagggagacaagggcgatcaaggcgcaccaggacttgacgccccttgccctttgggggaggatggactcccagtgcagggctgctggaataagtag

SEQ ID NO: 233199 - DNA, 2109 bp, Artificial Sequence
  derived and/or modified sequence
atggtggccgagaggacccacaaggccgccgccaccggggcccggggccctggagagctgggcgcccctggcaccgtggccctggtggccgcccgggcagagcggggggcccggctgcccagccctggcagctgtggcctgctgaccctggccctgtgcagcctggccctgagcctgctggcccacttcagaacagctgagctgcaggcccgggtgctgcggctggaggccgagcggggggagcagcagatggagacagccatcctgggccgggtgaaccagctgctggatgagaagtggaagctgcacagcagaagaagaagagaggcccccaagaccagccctggctgcaactgccccccagccttccagggccccaccggccggcccggcctgcccggggacaagggggccatcggcatgcctggccgggtgggcagccctggagatgctggcctgagcatcatcggcccccggggccccccaggccagcccggcacccggggcttccctggcttccctggccccatcggcctggatggcaagccaggccaccctggccccaagggggacatgggcctgactggacctcctggccagcccggcccccagggccagaagggggagaagggccagtgtggggagtacccccaccgggagtgcctgagctccatgcctgctgccctgcggagcagccagatcatcgccctgaagctgctgcccctgctgaacagcgtgcggctggcccctcctcctgtgatcaagaggaggaccttccagggcgagcagagccaggccagcatccagggccccccaggccccccaggccccccaggccccagcggccccctgggccaccctggcctgcccggccccatgggccccccaggcctgcccggccccccaggccccaagggggaccccggcatccagggctaccacggcaggaaaggagagcggggcatgcctggcatgcctgggaagcatggagccaagggggcccctggcattgctgtggccggcatgaagggggagcccggcatccctggcaccaagggggagaagggagctgagggcagccctggcctgcccggcctgctgggccagaagggggagaagggagatgctggcaacagcatcggcggcggccgcggggagcccggccccccaggcctgcccggccccccaggccccaagggggaggccggcgtggatggccaggtgggccccccaggccagcccggggacaagggggagagaggagctgctggggagcagggcccagatggccccaagggcagcaaaggagagcccgggaagggggagatggtggactacaatggaaacatcaatgaggccctgcaggagatccgcaccctggccctgatgggccccccaggcctgcccggccagatcggccccccaggggcccctggcatccctggccagaagggggagatcggcctgcccggccccccaggccatgatggagagaagggcccccggggcaagccaggggacatgggccccccaggcccccagggccccccaggcaaggatggccccccaggagtgaagggggagaatggccaccctggcagccctggagagaagggggagaagggggagaccggccaggccggcagccctgtgcccggcctgcccggccctgagggccccccaggccccccaggcctgcagggcgtgcccggccccaagggggaggccggcctggatggagccaagggggagaagggcttccagggcgagaagggggaccggggccccctgggcctgcccggggccagcggcctggatggccggcccggccccccaggcaccccaggccccatcggcgtgcccggccctgctggccccaagggggagcggggcagcaaaggagaccccggcatgacaggccccaccggggctgctggcctgcccggcctgcacggccccccaggggacaagggcaacagaggagagcggggcaagaagggcagccggggccccaagggggacaagggggaccagggcgcccctggcctggatgccccctgccccctgggagaagatggcctgcctgtgcagggctgctggaacaagtag

SEQ ID NO: 233200 - DNA, 2007 bp, Artificial Sequence
  derived and/or modified sequence
atggtggccgagaggacccacaaggccgccgccaccggggcccggggccctggagagctgggcgcccctggcaccgtggccctggtggccgcccgggcagagcggggggcccggctgcccagccctggcagctgtggcctgctgaccctggccctgtgcagcctggccctgagcctgctggcccacttcagaacagctgagctgcaggcccgggtgctgcggctggaggccgagcggggggagcagcagatggagacagccatcctgggccgggtgaaccagctgctggatgagaagtggaagctgcacagcagaagaagaagagaggcccccaagaccagccctggctgcaactgccccccaggccccccaggccccaccggccggcccggcctgcccggggacaagggggccatcggcatgcctggccgggtgggcagccctggagatgctggcctgagcatcatcggcccccggggccccccaggccagcccggcacccggggcttccctggcttccctggccccatcggcctggatggcaagccaggccaccctggccccaagggggacatgggcctgactggacctcctggccagcccggcccccagggccagaagggggagaagggccagtgtggggagtacccccaccgggagtgcctgagctccatgcctgctgccctgcggagcagccagatcatcgccctgaagggggagcagagccaggccagcatccagggccccccaggccccccaggccccccaggccccagcggccccctgggccaccctggcctgcccggccccatgggccccccaggcctgcccggccccccaggccccaagggggaccccggcatccagggctaccacggcaggaaaggagagcggggcatgcctggcatgcctgggaagcatggagccaagggggcccctggcattgctgtggccggcatgaagggggagcccggcatccctggcaccaagggggagaagggagctgagggcagccctggcctgcccggcctgctgggccagaagggggagaagggagatgctggcaacagcatcggcggcggccgcggggagcccggccccccaggcctgcccggccccccaggccccaagggggaggccggcgtggatggccaggtgggccccccaggccagcccggggacaagggggagagaggagctgctggggagcagggcccagatggccccaagggcagcaaaggagagcccgggaagggggagatggtggactacaatggaaacatcaatgaggccctgcaggagatccgcaccctggccctgatgggccccccaggcctgcccggccagatcggccccccaggggcccctggcatccctggccagaagggggagatcggcctgcccggccccccaggccatgatggagagaagggcccccggggcaagccaggggacatgggccccccaggcccccagggccccccaggcaaggatggccccccaggagtgaagggggagaatggccaccctggcagccctggagagaagggggagaagggggagaccggccaggccggcagccctgtgcccggcctgcccggccctgagggccccccaggccccccaggcctgcagggcgtgcccggccccaagggggaggccggcctggatggagccaagggggagaagggcttccagggcgagaagggggaccggggccccctgggcctgcccggcaccccaggccccatcggcgtgcccggccctgctggccccaagggggagcggggcagcaaaggagaccccggcatgacaggccccaccggggctgctggcctgcccggcctgcacggccccccaggggacaagggcaacagaggagagcggggcaagaagggcagccggggccccaagggggacaagggggaccagggcgcccctggcctggatgccccctgccccctgggagaagatggcctgcctgtgcagggctgctggaacaagtag

SEQ ID NO: 233201 - DNA, 2109 bp, Artificial Sequence
  derived and/or modified sequence
atggtggccgagcggacccacaaggccgccgccaccggcgcccggggaccaggggagctgggcgcacccggaactgtcgctctggtggctgcccgggcagagcgtggcgctcgcctgccatccccgggcagctgcgggctgttgacgctggcactttgttcgttggccctctctttgctggctcattttagaacggcagagttacaggcaagggtgctcagactggaggctgagaggggtgagcagcaaatggagacagccattctcggccgtgttaatcagctgcttgatgaaaaatggaagttgcactcacgaaggcgtcgggaggcccccaaaacttccccaggctgtaactgtcctcccgctttccagggaccgacagggcgcccagggttgcccggagacaaaggcgcaattggcatgccggggcgggtgggctcccctggcgatgccggcctgagcattatcggtcctagaggtcccccagggcagccaggcacccgtgggtttcctggctttcctggacctataggcctcgacgggaaacccggccaccctgggccaaagggcgacatgggacttactgggcctcccggccagcctggaccacaagggcaaaagggagagaagggccaatgtggggaatatcctcatcgtgagtgcctttcctctatgcccgcagcactgcggagtagtcagattatcgccctcaagctcctacctctccttaatagcgtccgtctagcgcctcctccagtgatcaaacgaagaacattccaaggagaacagtcccaggcgtccatccagggcccacctgggccaccgggaccacccgggccgtccgggcctctgggacatccaggattgccagggcccatgggccctcctggccttcctggtccacccggcccaaaaggcgatcctgggattcagggttaccatggcagaaagggtgagcggggcatgcccgggatgcctggcaaacatggcgcgaagggggctccagggatcgcagtggctgggatgaagggcgagcctgggattccgggcactaaaggcgagaaaggagcagaagggtcaccagggctccccggcttgcttggacagaagggtgaaaagggggacgctggcaatagcatcggcggcgggaggggggaaccgggtccccccggactcccgggccccccaggaccgaagggtgaagctggcgtcgatggacaggtgggtcctcccggacagccaggtgataagggggagcggggagctgcaggcgaacagggaccagatggacctaaaggcagcaagggagaacctggaaagggggagatggtagattataacgggaacattaatgaggccttgcaggaaatcaggacgctggctttgatgggccctcctggtctaccaggccagattggccccccaggcgcacccggaattccgggtcagaagggcgaaatcggattgcctgggcccccaggacatgatggagagaagggacctagaggaaagcctggggatatgggtcctcccggaccacagggaccacccggcaaagacggacccccaggagtgaagggggaaaatggccacccagggtctcccggggagaagggcgaaaagggcgaaactggccaagccgggtcaccggtgccaggccttcctggacccgagggcccccccggcccccccggacttcagggggtgcccgggccgaagggagaagccgggttggatggggcaaaaggcgagaagggcttccaaggcgaaaaaggagaccggggacccctgggactgcccggggctagtgggctggacggacgacctggcccccccggtacacccggcccgatcggagttcctggtccagcaggccccaaaggggagcgcggaagtaaaggggacccagggatgacaggcccgaccggtgccgcaggcctaccaggtctgcacggcccacccggcgataaaggcaatcggggtgagagaggcaaaaagggttccagagggcccaaaggcgacaaaggtgaccaaggcgccccaggcctggacgctccttgccccctgggcgaggatggccttccagtccaaggatgctggaacaagtag

SEQ ID NO: 233202 - DNA, 2007 bp, Artificial Sequence
  derived and/or modified sequence
atggtggccgagcggacccacaaggccgccgccaccggcgcccggggacccggggagcttggtgccccaggcacagtcgccctggttgctgccagagccgaaaggggcgctcgattgcctagtccaggatcatgcggccttctcacactggctctctgttcgcttgcactgtccctgctggctcattttcggactgccgagctccaggctagggttctacggctggaagctgagcgcggcgagcagcagatggagaccgccattctaggccgcgtcaatcagctcctcgacgagaaatggaagctacactctcggcgccggcgggaggcgccaaaaacctctcccggatgcaactgtcccccgggtcctcctgggccaacaggtcgcccggggttaccgggcgacaaaggagctattggaatgcccggacgagtgggaagcccaggcgacgccggcctgagtattatcggacccaggggtccgcccggccagcctggaactagaggtttcccaggtttcccggggccaattggtctggatggtaagccaggacaccccggtccaaagggggacatgggtctcaccggtcctcccggacagcccggacctcagggccaaaagggagagaagggccagtgtggtgagtaccctcacagagagtgcttatcatccatgcccgcagcgttgcgctccagtcagatcattgccttgaaaggggagcaatcccaggcttctatccagggcccgcccgggcctcctggcccccccggaccctcaggcccactgggccacccggggttacccggtccgatgggcccacctgggctgcccggtcctcccgggccaaaaggcgatcctggcattcagggctatcacggacgcaaaggagagagggggatgcccggcatgccgggtaagcatggcgccaaaggtgccccaggcattgccgtggctggaatgaaaggggaacccggcatccctggcacaaagggcgagaagggagcagaagggagcccaggtctgccgggcttgttaggccagaagggggagaagggggatgccgggaacagtattgggggcgggcggggggaacctggcccgccggggctccctgggccccccggtcctaagggcgaagctggggtagacggccaggtcgggcctccgggccaaccaggagacaaaggcgagcggggggcagcaggtgaacagggaccagacggccccaaaggctctaaaggagagcccggcaagggtgaaatggtggattacaatgggaacatcaatgaggccctccaggagatccgtacattggcactcatgggtccaccgggtttacccgggcagatcgggccgccaggcgctccagggattccggggcagaagggggaaatcggactcccaggaccacccggccacgatggtgagaagggaccgcgcggtaagccaggtgatatggggcccccagggccccaaggccctccagggaaagacggacctcccggggttaagggcgaaaatggccatcctggatcaccgggcgagaaaggagagaagggtgaaaccgggcaagctggctcacccgttccgggtttgcctggtccagaggggccccccggccctcccggccttcaaggggtgcctggacccaagggggaggcaggactcgatggcgccaagggtgagaaaggcttccagggagagaaaggagaccgcggcccattaggactccctggtacacctggtccaatcggggttccagggccagccggccccaagggagagcgaggctcgaaaggtgaccccggaatgaccggtcccaccggggctgccggcttgcctggattacatggccccccaggcgataagggcaatagaggcgagcggggcaaaaaaggaagcaggggacctaagggcgacaaaggtgaccagggtgctcctgggcttgacgccccctgccctcttggggaggatggactgcctgtgcaggggtgctggaataaatag

SEQ ID NO: 233203 - DNA, 3092 bp, Artificial Sequence
  derived and/or modified sequence
aagtagcacggattgctcatccgatccgtgccgccgcagggagtgtgtcaagttacagaggcgccggaatcggcccctgcgctcctcgccagccgccacgacccacctctgcccatggggccctccgtgtgcgccccttcgcccggggactgaaactgactggcccgggagacacgaggcgcccagaaggactgacagcgcggcaccaactgctctgcagacacttgaagggaaagactgggcggagagaaggagagccggtcagattcccctaactttcctggacttggaacgttcttcgaaataacttttttctcacctaggtgtaccccaattaccgctggttgtgctttttcggcacttcctctcctactgctaatttttccgtcctctttgccgggagcagcggaaagggacgttttccagcgatacaagccctttccccctgccccgcagtttggatagagccttttggcagcggctgtcgcctttatttattctatttatttatttattggttctcaagacgcgagaggatggtagcggagcgcacccacaaagcggcagccaccggtgcccgcggccctggggagttgggcgcgcccgggacggtggctctggtggcggcgcgggcggagcgcggcgcacggctgccgagtccagggtcgtgcgggctgctgacgctggccctctgctcgctggcactcagcctgctcgcccactttcggacggccgagctgcaggcccgggtgctgcgcctggaagcggagcgcggggagcagcaaatggagacggctattttgggacgagtcaatcaactgctggacgagaaatggaagctccactcaaggaggcgccgggaggccccaaagacatctccaggatgtaactgcccaccagcatttcagggtcccactggaagacccggactcccaggggacaaaggtgccattgggatgcctggacgtgtggggtcccccggagacgctgggctgtccatcattggtccccgcggcccccctggtcaaccaggaactagaggtttccctggatttccgggtcccattgggctggacggcaaaccgggccacccaggaccaaagggcgacatgggtctgacgggtcccccaggacagccgggaccccagggacaaaaaggagaaaagggtcagtgtggagagtacccacaccgggagtgcctaagcagcatgccagcagctctgcgctccagccaaataattgccctgaagctgctgcctctcctcaattcagtgcgactggctccacccccggtcataaaaaggcggacgttccagggcgaacagagccaggccagcatccaaggtccaccagggcccccaggcccccctggaccaagtggacctctggggcacccaggactgccagggcctatggggccacctggcttacctgggcctcctggaccaaagggagacccagggatccagggctaccacggccggaagggagaacggggcatgccagggatgccaggcaagcatggagccaagggggcgcccggaattgccgtggctgggatgaagggtgagccagggatcccaggaaccaagggtgagaagggggctgaaggctcccctgggcttcctggcctcctggggcagaagggagagaaaggcgatgctggcaactccattggaggaggcagaggggaacctggccctccagggctccctgggcccccagggccaaagggagaagcaggtgtcgatggccaggttggccccccagggcagccaggagacaagggggagcgtggagcagctggagaacagggaccagatggccccaagggctccaagggagaaccagggaaaggagagatggtggattacaatggaaacatcaatgaggctctccaggagatccggacgctggccttgatggggcctcctggtcttcctgggcaaattggcccacctggagctccagggattccaggccagaagggggagattggactgccaggccctccaggacacgatggggaaaagggacctcgcggtaaaccaggagacatgggccctcctggtccccaaggccccccaggaaaggatggacctccaggagtgaagggagaaaacgggcacccagggagcccaggagagaagggggaaaaaggggagacaggacaagcaggctcaccggttcctgggctgccagggccagaggggcctcccggacctccggggctccaaggtgttcctggaccaaagggggaagcaggactagatggagcaaaaggagagaaaggcttccagggagaaaaaggagaccgtggtcccctgggactacccggagcttcaggtttggacggcaggcctgggccaccgggtactccaggaccaattggagttccaggcccagcgggaccaaagggcgagaggggcagcaaaggagaccctgggatgacaggaccaacgggagcagctgggcttcctggtttacatggaccacccggggacaagggaaaccggggggagagggggaagaaaggctctagagggcctaaaggggataagggagaccaaggagcgcctggattagatgccccctgcccattgggcgaagatggcttaccagtccaaggctgctggaacaagtgatgcctctaaccttggattggcctgtgtgtgtgtttgtacatagaatatttatttttatacagttttcactttttgaaaatgccagaagtatgatgcatcttacagattattaaaaaagaaagaaaaacctgcatattttgtacagaaaatatcaacctcttcccttttgtttacaagatgttttgtataagcctatgtctctaatacattttttgtttggtcgtaatgtctgcatgatatttgtgcacatttattaagtatcgaagcttaataaattattgtgtcctggtgccaaagggggccagccagaactgaggtgctggctagctcatgtgtgaattcacataaatgtagaggtccatgatatttgctaagctaggtgtgtctaagagtattttaaacccttatggattttcattattaaaggaaatgaaacatggcaattca

SEQ ID NO: 233204 - DNA, 2007 bp, Artificial Sequence
  derived and/or modified sequence
atggtagcggagcgcacccacaaagcggcagccaccggtgcccgcggccctggggagttgggcgcgcccgggacggtggctctggtggcggcgcgggcggagcgcggcgcacggctgccgagtccagggtcgtgcgggctgctgacgctggccctctgctcgctggcactcagcctgctcgcccactttcggacggccgagctgcaggcccgggtgctgcgcctggaagcggagcgcggggagcagcaaatggagacggctattttgggacgagtcaatcaactgctggacgagaaatggaagctccactcaaggaggcgccgggaggccccaaagacatctccaggatgtaactgcccaccaggacctcctggtcccactggaagacccggactcccaggggacaaaggtgccattgggatgcctggacgtgtggggtcccccggagacgctgggctgtccatcattggtccccgcggcccccctggtcaaccaggaactagaggtttccctggatttccgggtcccattgggctggacggcaaaccgggccacccaggaccaaagggcgacatgggtctgacgggtcccccaggacagccgggaccccagggacaaaaaggagaaaagggtcagtgtggagagtacccacaccgggagtgcctaagcagcatgccagcagctctgcgctccagccaaataattgccctgaagggcgaacagagccaggccagcatccaaggtccaccagggcccccaggcccccctggaccaagtggacctctggggcacccaggactgccagggcctatggggccacctggcttacctgggcctcctggaccaaagggagacccagggatccagggctaccacggccggaagggagaacggggcatgccagggatgccaggcaagcatggagccaagggggcgcccggaattgccgtggctgggatgaagggtgagccagggatcccaggaaccaagggtgagaagggggctgaaggctcccctgggcttcctggcctcctggggcagaagggagagaaaggcgatgctggcaactccattggaggaggcagaggggaacctggccctccagggctccctgggcccccagggccaaagggagaagcaggtgtcgatggccaggttggccccccagggcagccaggagacaagggggagcgtggagcagctggagaacagggaccagatggccccaagggctccaagggagaaccagggaaaggagagatggtggattacaatggaaacatcaatgaggctctccaggagatccggacgctggccttgatggggcctcctggtcttcctgggcaaattggcccacctggagctccagggattccaggccagaagggggagattggactgccaggccctccaggacacgatggggaaaagggacctcgcggtaaaccaggagacatgggccctcctggtccccaaggccccccaggaaaggatggacctccaggagtgaagggagaaaacgggcacccagggagcccaggagagaagggggaaaaaggggagacaggacaagcaggctcaccggttcctgggctgccagggccagaggggcctcccggacctccggggctccaaggtgttcctggaccaaagggggaagcaggactagatggagcaaaaggagagaaaggcttccagggagaaaaaggagaccgtggtcccctgggactacccggtactccaggaccaattggagttccaggcccagcgggaccaaagggcgagaggggcagcaaaggagaccctgggatgacaggaccaacgggagcagctgggcttcctggtttacatggaccacccggggacaagggaaaccggggggagagggggaagaaaggctctagagggcctaaaggggataagggagaccaaggagcgcctggattagatgccccctgcccattgggcgaagatggcttaccagtccaaggctgctggaacaagtga

SEQ ID NO: 233205 - DNA, 2109 bp, Artificial Sequence
  derived and/or modified sequence
atggtggccgaacgcactcacaaagcagcagccaccggagccaggggtcccggagagcttggagctcctggcactgtcgccctggtcgcagctcgggcagagcggggagcaaggctgccctcgccaggctcctgcggactgctgaccttggctctctgctctctggctcttagtcttctcgcccacttcagaacggccgaactgcaggcgcgagtgctgaggctcgaggcagaacgtggagagcaacagatggagacagctattctgggacgcgtcaaccaactgcttgatgagaagtggaaactgcacagtaggagacggcgagaagctcctaagaccagccccggatgcaattgtccaccagcattccaagggccaaccgggaggccaggccttccaggcgataaaggcgctattggcatgccagggagagtgggctcaccgggagatgcaggactgtcaataattgggccaagaggaccacccggtcagccagggacaaggggatttcccggatttcctggaccaatcgggctggacggaaaacccggtcaccccggaccaaaaggtgatatgggattgacaggaccccctgggcaacctgggcctcaaggacagaaaggagagaaaggccagtgtggggagtacccccacagagaatgtttgagtagtatgcctgctgccctccgttcctctcagattatcgctttaaaactactgcccctgttaaactcagttcggttggccccacccccagtcatcaagcgaagaaccttccagggcgagcagagccaggcctctatccagggtccaccaggcccacccggtccgccaggtccttccgggccattggggcaccccggattacctggccctatgggcccacccggactgccaggccctcccggacctaagggcgatcctgggatccagggataccacggaaggaaaggggaaagaggaatgccagggatgccaggtaagcatggcgcaaaaggggcaccaggcattgcggtggcagggatgaaaggtgagcctggtattccaggcaccaagggcgagaagggggcagaagggtcgcctggactacccggtctgcttgggcagaagggcgagaagggcgacgcgggtaactccatcggaggtggcagaggagaacctgggcctccagggctgcccggacctcctggcccaaaaggagaagccggagtggatggtcaggttggccctcctggccagccaggtgataagggtgaacggggagccgctggcgagcagggaccagatggacctaaggggtctaaaggggagcccggaaagggggagatggtagactacaatggaaatattaacgaggctctgcaggaaattcgcactctggccctgatgggaccacctggtctgcccggtcaaattggcccacccggtgctcccggaatccctgggcaaaaaggagaaattggtcttccaggccctcctgggcacgatggtgaaaagggaccgaggggtaagccgggagatatggggccacccggacctcaaggtcccccaggcaaagacggtccacccggagtcaaaggggagaatggacatccgggaagcccaggggagaaaggagagaagggggagactggacaagctggctctccagtgcccggattgcctggcccagagggccctcccggtccgcctggactgcagggcgtccctgggccaaagggagaggcaggcctcgatggagcaaagggtgagaagggctttcagggcgagaagggggacagaggcccactcgggttacctggcgcttcaggtttggacggccgtcccggacccccaggaaccccaggtcctattggagtccctggcccagccggtccaaagggagagcgaggctctaagggcgaccctggaatgaccggacctaccggcgctgcagggctgccagggcttcatgggccaccgggagataagggaaatagaggcgagagaggcaagaaaggatctaggggaccgaaaggggacaaaggcgaccagggagcaccaggacttgatgccccttgtcctctaggagaggacggattgcctgttcaaggatgttggaacaagtag

SEQ ID NO: 233206 - DNA, 2007 bp, Artificial Sequence
  derived and/or modified sequence
atggtggcagagcgaactcacaaggcggcagctaccggtgctcgtgggcctggcgaactcggggcacccggaacggttgccctggtagccgcacgggctgaaaggggcgcacgcctgcccagccctgggagctgtggactgctgacactggccctgtgttcactcgcactgtcccttctggctcacttcagaaccgctgaacttcaggcacgcgtccttaggctcgaggcagagcggggagagcagcagatggagaccgctattctgggacgcgtaaatcaactcctcgatgagaagtggaaattacacagtcggagacgcagagaggcgcctaagaccagcccagggtgcaactgcccacctggaccaccaggcccaactggaaggccaggcctgcccggagataaaggagcaattggcatgccaggccgtgtcggatcccccggagacgcgggactctccattatcggaccacgaggacccccagggcaaccaggcacacgcggattccccggtttccctggtccgattggcttggacggcaagccgggacacccgggtccaaaaggagacatgggactcaccggtccccctggccaacctggaccacaggggcagaagggagagaaaggccaatgcggagaataccctcacagggagtgtctgtcctctatgcctgcggctctgaggtcgagccagataattgccctgaagggtgaacagagccaggccagtatccaagggcctcctggtcctccaggccctccgggaccttccggacctttaggccacccagggttgccaggacccatggggcctccaggattgcccggtccccctggccctaaaggagatccagggatccaaggctatcatggtagaaaaggagaacggggtatgccaggaatgccaggcaagcatggcgctaagggggctcctgggatcgcagttgcaggaatgaagggcgaacccggtatccccggaacgaagggagagaaaggagccgaggggtcccccggactgcccggactgctggggcagaaaggtgagaaaggggacgccggtaattctattggaggaggccgaggggagccaggccctcctggcctgcctggcccacccggtccaaagggggaagcaggagtcgacggacaagtgggtcccccaggacagccaggcgacaaaggggagcgcggtgccgcaggcgaacagggtcctgacggaccaaaaggctccaaaggtgagccaggcaaaggcgagatggttgattataacggcaacatcaatgaggcgttacaggaaattcggacgctggcattgatgggcccacccggactgcctgggcaaatagggccaccaggagcacccggtattcccggacagaagggggaaatcggactgccaggtccgcctggccacgacggggagaaaggcccacggggaaaaccaggggacatggggccacccggtccccagggacctcctggtaaggacgggcctcctggcgtgaagggtgaaaacgggcatcccggaagccctggcgaaaaaggcgagaaaggtgagactggacaagctggtagtccggtacccggtttgccaggacctgagggtccccctgggccacccggacttcagggggtacccggtcctaaaggcgaagccggattggatggagctaagggcgaaaaagggtttcaaggagaaaagggggacagaggccctctcggtctccctgggactcctgggcctattggcgtccccggaccagccggaccaaaaggcgagaggggaagcaaaggcgacccaggcatgaccgggcctacaggcgctgctggattgccaggcttgcacggcccacctggcgacaaaggaaatcggggagaaagaggcaagaaaggctccaggggccctaagggcgacaaaggtgaccagggcgctcccggtctggacgccccatgtccgttgggagaagatgggcttcctgtgcagggctgttggaacaagtag

SEQ ID NO: 233207 - protein, 610 aa, Artificial Sequence
  derived and/or modified sequence
MVAERTHKAAATGARGPGELGAPGTVALVAARAERGARLPSPGSCGLLTLALCSLALSLLAHFRTAELQARVLRLEAERGEQQMETAILGRVNQLLDEKWKLHSRRRREAPKTSPGCNCPPGPPGPTGRPGLPGQPGTRGFPGFPGPIGLDGKPGHPGPKGDMGLTGPPGQPGPQGQKGEKGQCGEYPHRECLSSMPAALRSSQIIALKGEQSQASIQGPPGPPGPPGPSGPLGHPGLPGPMGPPGLPGPPGPKGDPGIQGYHGRKGERGMPGMPGKHGAKGAPGIAVAGMKGEPGIPGTKGEKGAEGSPGLPGLLGQKGEKGDAGNSIGGGRGEPGPPGLPGPPGPKGEAGVDGQVGPPGQPGDKGERGAAGEQGPDGPKGSKGEPGKGEMVDYNGNINEALQEIRTLALMGPPGLPGQIGPPGAPGIPGQKGEIGLPGPPGHDGEKGPRGKPGDMGPPGPQGPPGKDGPPGVKGENGHPGSPGEKGEKGETGQAGSPVPGLPGPEGPPGPPGLQGVPGPKGEAGLDGAKGEKGFQGEKGDRGPLGLPGTPGPIGVPGPAGPKGERGSKGDPGMTGPTGAAGLPGLHGPPGDKGNRGEDGLPVQGCWNK

SEQ ID NO: 233208 - DNA, 231 bp, Artificial Sequence
  derived and/or modified sequence
atgagcgccagctgcgacggctgcgtgggcagcagaccccccgtgcacctggccagcggctacagcctggccgacctgctggtgctggagatgggcatgggcacccagtgctggaccgaggaccagagaagatggagcagcctgtggccctggagccacctgagcagcgaccccagcctgcccaacgtgcaggtgaccagactgaccctgctgagcgagcaggccccctag

SEQ ID NO: 233209 - DNA, 1833 bp, Artificial Sequence
  derived and/or modified sequence
atggtggccgagagaacccacaaggccgccgccaccggcgccagaggccccggcgagctgggcgcccccggcaccgtggccctggtggccgccagagccgagagaggcgccagactgcccagccccggcagctgcggcctgctgaccctggccctgtgcagcctggccctgagcctgctggcccacttcagaaccgccgagctgcaggccagagtgctgagactggaggccgagagaggcgagcagcagatggagaccgccatcctgggcagagtgaaccagctgctggacgagaagtggaagctgcacagcagaagaagaagagaggcccccaagaccagccccggctgcaactgcccccccggcccccccggccccaccggcagacccggcctgcccggccagcccggcaccagaggcttccccggcttccccggccccatcggcctggacggcaagcccggccaccccggccccaagggcgacatgggcctgaccggcccccccggccagcccggcccccagggccagaagggcgagaagggccagtgcggcgagtacccccacagagagtgcctgagcagcatgcccgccgccctgagaagcagccagatcatcgccctgaagggcgagcagagccaggccagcatccagggcccccccggcccccccggcccccccggccccagcggccccctgggccaccccggcctgcccggccccatgggcccccccggcctgcccggcccccccggccccaagggcgaccccggcatccagggctaccacggcagaaagggcgagagaggcatgcccggcatgcccggcaagcacggcgccaagggcgcccccggcatcgccgtggccggcatgaagggcgagcccggcatccccggcaccaagggcgagaagggcgccgagggcagccccggcctgcccggcctgctgggccagaagggcgagaagggcgacgccggcaacagcatcggcggcggcagaggcgagcccggcccccccggcctgcccggcccccccggccccaagggcgaggccggcgtggacggccaggtgggcccccccggccagcccggcgacaagggcgagagaggcgccgccggcgagcagggccccgacggccccaagggcagcaagggcgagcccggcaagggcgagatggtggactacaacggcaacatcaacgaggccctgcaggagatcagaaccctggccctgatgggcccccccggcctgcccggccagatcggcccccccggcgcccccggcatccccggccagaagggcgagatcggcctgcccggcccccccggccacgacggcgagaagggccccagaggcaagcccggcgacatgggcccccccggcccccagggcccccccggcaaggacggcccccccggcgtgaagggcgagaacggccaccccggcagccccggcgagaagggcgagaagggcgagaccggccaggccggcagccccgtgcccggcctgcccggccccgagggcccccccggcccccccggcctgcagggcgtgcccggccccaagggcgaggccggcctggacggcgccaagggcgagaagggcttccagggcgagaagggcgacagaggccccctgggcctgcccggcacccccggccccatcggcgtgcccggccccgccggccccaagggcgagagaggcagcaagggcgaccccggcatgaccggccccaccggcgccgccggcctgcccggcctgcacggcccccccggcgacaagggcaacagaggcgaggacggcctgcccgtgcagggctgctggaacaagtag

SEQ ID NO: 233210 - DNA, 1833 bp, Artificial Sequence
  derived and/or modified sequence
atggtggctgagcggactcataaggccgccgcaacaggtgcgcggggccccggcgaattgggagctcccggcacagtcgccctggtagccgcccgagccgagcgcggtgcccggttgccctcacctggctcctgcgggctgctgacacttgccctctgcagtttggccctcagtttactggcccactttagaaccgccgagctgcaggcgagagtgcttcgtttagaagccgaaagaggcgaacagcagatggagaccgctatcctcggcagagtgaaccagctcttagacgagaaatggaaactccatagccgccgtagaagagaagcccccaagacctcacctgggtgtaactgtccccccggaccccctgggccaacaggccgcccgggcctccctgggcagcctggtactcgcgggttccccggttttcccggacctattggactggatggtaagcctgggcaccctggccccaaaggcgatatgggcttaaccggcccacccggtcagcccgggccgcaaggccagaaaggagaaaaggggcagtgtggcgaatatcctcatcgagaatgcttatctagcatgcccgcagccttacggtcgagtcagatcattgctcttaagggagagcagtctcaggctagcatccagggacccccaggaccccctggaccgcccggccctagtggccccctgggacatccaggcctcccggggcctatgggcccaccaggtctgccaggccccccaggaccgaagggagatcctggcatccagggatatcacggtcgaaagggggagagagggatgccaggcatgcctggaaagcatggagccaagggagccccggggatcgctgtcgcgggcatgaagggagaaccaggaattccaggaaccaaaggtgagaagggcgccgagggtagccctggccttccgggccttctgggccaaaagggggaaaaaggcgacgctggcaacagcataggaggcggccgcggcgagcctggccctcccgggctgcctggccctccagggccaaagggcgaagcaggcgtggatggacaggtgggacctccaggccaaccaggagataagggcgagcggggggctgcgggggaacagggcccggacggccctaaaggcagtaaaggggaacccggtaagggggaaatggtagattataatgggaacattaacgaggcattgcaggaaatccggaccctagcactcatgggcccccctggactacctgggcagattggacctccaggcgcgcctggcattccagggcagaagggcgaaatcggtctccctggaccccctggacacgacggcgagaaagggccccgcgggaagccaggagatatgggccccccaggcccccagggcccacctggtaaagacggacccccaggagtgaagggtgaaaacggccaccccgggtcacctggcgagaagggagaaaaaggcgaaacaggccaagccggtagtccagttcccggactccctgggcctgaaggacctccagggcccccaggtttacaaggggtgccagggccaaagggcgaggccggactggatggggctaagggcgagaagggattccagggagaaaagggagacagaggaccactggggctgccaggaacaccaggcccaattggtgtccccggtcctgctggcccaaagggagagaggggatcaaagggagatcctgggatgacgggccctactggagccgcaggactgcctgggctccatggcccccccggagataagggaaatcgcggtgaggacggcctgccagttcagggctgctggaacaagtag

SEQ ID NO: 233211 - DNA, 1833 bp, Artificial Sequence
  derived and/or modified sequence
atggtggccgagaggacccacaaggccgccgccaccggggcccggggccctggagagctgggcgcccctggcaccgtggccctggtggccgcccgggcagagcggggggcccggctgcccagccctggcagctgtggcctgctgaccctggccctgtgcagcctggccctgagcctgctggcccacttcagaacagctgagctgcaggcccgggtgctgcggctggaggccgagcggggggagcagcagatggagacagccatcctgggccgggtgaaccagctgctggatgagaagtggaagctgcacagcagaagaagaagagaggcccccaagaccagccctggctgcaactgccccccaggccccccaggccccaccggccggcccggcctgcccggccagcccggcacccggggcttccctggcttccctggccccatcggcctggatggcaagccaggccaccctggccccaagggggacatgggcctgaccggccccccaggccagcccggcccccagggccagaagggggagaagggccagtgtggggagtacccccacagagaatgtctgagctccatgcctgctgccctgcggagcagccagatcatcgccctgaagggggagcagagccaggccagcatccagggccccccaggccccccaggccccccaggccccagcggccccctgggccaccctggcctgcccggccccatgggccccccaggcctgcccggccccccaggccccaagggggaccccggcatccagggctaccacggcaggaagggggagcggggcatgcctggcatgcctgggaagcacggggccaagggggcccctggcattgctgtggccggcatgaagggggagcccggcatccctggcaccaagggggagaagggagctgagggcagccctggcctgcccggcctgctgggccagaagggggagaagggagatgctggcaacagcattggaggcggccgcggggagcccggccccccaggcctgcccggccccccaggccccaagggggaggccggcgtggatggccaggtgggccccccaggccagcccggggacaagggggagagaggagctgctggggagcagggcccagatggccccaagggcagcaagggggagcctggaaaaggagagatggtggactacaacggcaacatcaatgaggccctgcaggagatccgcaccctggccctgatgggccccccaggcctgcccggccagatcggccccccaggggcccctggcatccctggccagaagggggagatcggcctgcccggccccccaggccatgatggagagaagggcccccggggcaagccaggggacatgggccccccaggcccccagggccccccaggcaaggatggccccccaggagtgaagggagaaaatggccaccctggcagccctggagagaagggggagaagggggagaccggccaggccggcagccctgtgcccggcctgcccggccctgagggccccccaggccccccaggcctgcagggcgtgcccggccccaagggggaggccggcctggatggagccaagggggagaagggcttccagggcgagaagggggaccggggccccctgggcctgcccggcaccccaggccccatcggcgtgcccggccctgctggccccaagggggagcggggcagcaagggggaccccggcatgacaggccccactggagctgctggcctgcccggcctgcacggccccccaggggacaagggcaacagaggagaagatggcctgcctgtgcagggctgctggaacaagtag

SEQ ID NO: 233212 - DNA, 1833 bp, Artificial Sequence
  derived and/or modified sequence
atggtggccgagcggacccacaaggccgccgccaccggcgcccggggtcccggcgagctgggagcacctgggactgtggcactcgtggccgcgcgcgctgaaagaggagctcggttacctagtcccggatcttgtggacttctgacactggccctgtgcagcttggctctctctcttttggcccacttccggactgctgagctgcaagctcgagtgttacggttggaggctgagcgcggggaacagcagatggagaccgctatactcgggcgggtcaatcagcttcttgacgagaagtggaaactgcactcaagaagacggagagaggcgcctaaaacctctcccgggtgcaattgtcctccaggtccaccaggacctactgggcgtcctggcttaccaggtcaacccggcacccgtgggttccccggattccccggccccataggcctggatggaaagccggggcatccggggcctaaaggtgacatgggcctaacaggtccacccggacagcccggaccacaggggcaaaaaggcgaaaaagggcagtgtggcgaatatccgcacagagagtgcttaagctccatgccagccgctttgaggtcttcgcagatcattgccctcaagggcgaacagagccaggcatccattcaaggacctcccggcccacccgggccgcccggcccctcgggccccttgggccatcccgggttgcccggccccatggggcctcccgggctgccagggccccccgggcctaaaggagatcctgggattcagggataccacggtcggaaaggagagaggggtatgccaggcatgcctggcaaacacggcgctaaaggcgctcctggaatcgcggtggccggaatgaaaggcgagcctggcattcctggcaccaagggcgagaagggggctgaaggctcccctggcctgcctggactgcttggccagaaaggagagaagggagatgccggtaattctattggcggaggtagaggggaacccgggcctcctggactgccggggcctccgggccccaagggagaagcaggagttgacgggcaggtggggccacccggccagcccggcgacaagggagaaagaggggccgctggcgaacagggaccagacgggccgaaaggctcaaaaggtgaaccagggaaaggggaaatggtggactacaatgggaatatcaacgaggcccttcaggagattagaacactagccctgatgggcccacccgggttgcccgggcagataggaccgccgggggcaccgggcattccaggacagaagggggagattggtctccctgggcctccaggtcacgatggcgaaaaaggaccccgtggcaagcccggcgatatgggcccccccggcccacaaggcccgcctggaaaggatggtcccccaggagtgaagggcgaaaacggtcacccaggtagcccaggcgagaaaggagagaaaggtgaaaccggccaggccggcagtcccgtcccaggactgcccgggccggaggggccgcctgggccccccggactgcagggcgtccccggacccaaaggagaagccggactggacggagccaagggcgagaaagggtttcagggagaaaaaggtgaccgcggcccccttggactgcctggcactccaggcccaatcggcgtgcccggtccggcagggcctaagggcgaacgaggttccaaaggagatccgggcatgaccggacccactggggcggccggccttccgggcttacacgggcctcccggtgacaagggcaacaggggtgaagatggcctgcccgtccaagggtgttggaacaagtag

SEQ ID NO: 233213 - DNA, 1833 bp, Artificial Sequence
  derived and/or modified sequence
atggtagcggagcgcacccacaaagcggcagccaccggtgcccgcggccctggggagttgggcgcgcccgggacggtggctctggtggcggcgcgggcggagcgcggcgcacggctgccgagtccagggtcgtgcgggctgctgacgctggccctctgctcgctggcactcagcctgctcgcccactttcggacggccgagctgcaggcccgggtgctgcgcctggaagcggagcgcggggagcagcaaatggagacggctattttgggacgagtcaatcaactgctggacgagaaatggaagctccactcaaggaggcgccgggaggccccaaagacatctccaggatgtaactgcccaccaggacctcctggtcccactggaagacccggactcccaggtcaaccaggaactagaggtttccctggatttccgggtcccattgggctggacggcaaaccgggccacccaggaccaaagggcgacatgggtctgacgggtcccccaggacagccgggaccccagggacaaaaaggagaaaagggtcagtgtggagagtacccacaccgggagtgcctaagcagcatgccagcagctctgcgctccagccaaataattgccctgaagggcgaacagagccaggccagcatccaaggtccaccagggcccccaggcccccctggaccaagtggacctctggggcacccaggactgccagggcctatggggccacctggcttacctgggcctcctggaccaaagggagacccagggatccagggctaccacggccggaagggagaacggggcatgccagggatgccaggcaagcatggagccaagggggcgcccggaattgccgtggctgggatgaagggtgagccagggatcccaggaaccaagggtgagaagggggctgaaggctcccctgggcttcctggcctcctggggcagaagggagagaaaggcgatgctggcaactccattggaggaggcagaggggaacctggccctccagggctccctgggcccccagggccaaagggagaagcaggtgtcgatggccaggttggccccccagggcagccaggagacaagggggagcgtggagcagctggagaacagggaccagatggccccaagggctccaagggagaaccagggaaaggagagatggtggattacaatggaaacatcaatgaggctctccaggagatccggacgctggccttgatggggcctcctggtcttcctgggcaaattggcccacctggagctccagggattccaggccagaagggggagattggactgccaggccctccaggacacgatggggaaaagggacctcgcggtaaaccaggagacatgggccctcctggtccccaaggccccccaggaaaggatggacctccaggagtgaagggagaaaacgggcacccagggagcccaggagagaagggggaaaaaggggagacaggacaagcaggctcaccggttcctgggctgccagggccagaggggcctcccggacctccggggctccaaggtgttcctggaccaaagggggaagcaggactagatggagcaaaaggagagaaaggcttccagggagaaaaaggagaccgtggtcccctgggactacccggtactccaggaccaattggagttccaggcccagcgggaccaaagggcgagaggggcagcaaaggagaccctgggatgacaggaccaacgggagcagctgggcttcctggtttacatggaccacccggggacaagggaaaccggggcgaagatggcttaccagtccaaggctgctggaacaagtga

SEQ ID NO: 233214 - DNA, 1833 bp, Artificial Sequence
  derived and/or modified sequence
atggtcgccgagcgtactcacaaggctgcagccacgggggctcggggacccggtgaactcggggctccaggtaccgtggccctcgtcgcagctcgcgcagagagaggggctagactgccgtcccctggctcttgcggtctccttacactggctctgtgttctctggccctgtcgctcctcgctcattttcgaacggcggagctgcaagctagggtgttgcgcctcgaagccgaacggggagaacaacagatggagaccgcgatactagggagagtgaaccaactcctggacgaaaaatggaagctccattcacggcgaaggagagaagcaccgaagacctctccgggatgtaattgcccgcctggacctcctggtcctaccggaaggcctggacttcccggacagccaggtacacggggatttcctggcttccccggacccatcggactcgacgggaagcccggacatcccggacccaagggcgacatggggttgaccggccctccgggtcagcccggtcctcaggggcagaagggcgagaaaggccagtgcggtgagtacccccacagagagtgcctttcctctatgccagccgcactgaggtcatcccaaatcattgcactgaaaggggaacagtcccaggccagcatccaggggcctccgggtcccccaggcccaccaggccctagtggacctctgggacacccgggattgcctggacctatgggccctcccggtctgcctggccctcctggccctaagggggacccagggattcaggggtatcatggtagaaaaggggaaaggggcatgcccggaatgccagggaaacacggcgctaaaggcgctcccggaatcgccgtcgccggaatgaaaggtgaacctggcatccccggaaccaagggagagaaaggcgcagaagggtcaccaggcctgcccggtctgctgggtcagaaaggtgagaagggcgacgctggcaacagcataggcggtggcaggggggagcccggaccacccggtctgccaggccctccgggtcctaagggcgaggcaggggtcgacggccaggtgggccctccaggacagcctggcgataagggtgaaagaggcgctgcaggcgagcaaggacccgatggccctaaagggagcaagggggaacccggtaaaggcgagatggtggactacaacggtaatataaacgaggctctgcaggaaattcggaccctggcgttgatgggacctcccggattaccgggacagattggccctccaggggctccaggcatacccggtcagaaaggggaaatcggactgcctggccctcccggtcacgatggtgagaaaggacctaggggcaagccaggtgacatgggaccccctggaccccagggccctccaggaaaggatgggcctcccggtgttaagggcgaaaacggacaccccggatccccaggcgagaaaggtgaaaaaggagagacagggcaggcgggtagccccgtcccaggcctcccgggacccgaaggaccgccaggccctcccggtctccagggcgtgcctggtcccaagggggaagctggcttggatggagctaagggggaaaaaggcttccagggagagaagggtgacagggggcctctgggtctgcctgggacccctgggccaatcggtgttcccggtcccgcaggtccaaagggtgagcggggatccaagggggaccccggtatgactggaccaaccggcgcagcaggtttgccaggcctgcatgggcctccaggcgacaagggcaatcgcggagaggatggattgcccgttcaaggatgctggaacaagtag

SEQ ID NO: 233215 - protein, 170 aa, Artificial Sequence
  derived and/or modified sequence
MPVPASWPHPPGPFLLLTLLLGLTEVAGEEELQMIQPEKLLLVTVGKTATLHCTVTSLLPVGPVLWFRGVGPGRELIYNQKEGHFPRVTTVSDLTKRNNMDFSIRISSITPADVGTYYCVKFRKGSPENVEFKSGPGTEMALGGPASSLTALLLIAVLLGPIYVPWKQKT

SEQ ID NO: 233216 - DNA, 513 bp, Artificial Sequence
  derived and/or modified sequence
atgccagttccagccagctggccccaccccccgggaccctttctcttattgacattattgcttggacttacagaggtagccggagaggaggagttacaaatgattcagccagaaaagctgcttctggtaaccgtgggaaagacagccacactacattgtactgtgacatctcttctgcccgtgggcccagtgctctggttccggggggttggccccggcagggagctgatttacaaccaaaaggagggtcacttccctagggttacgacggtgtccgacctgacaaagcgcaacaacatggacttcagcatcagaatttcaagcattactcctgccgatgtgggcacttattattgtgttaagtttaggaaggggtcacctgagaatgtcgagtttaaatcaggccctggcacggagatggctcttggtggccccgcttcctcactaacagcactccttctgattgcagtcttgctagggccgatttatgttccatggaagcagaagacatag

SEQ ID NO: 233217 - DNA, 513 bp, Artificial Sequence
  derived and/or modified sequence
atgcctgtgcctgcctcctggccccaccccccaggccccttcctgctgctgaccctgctgctgggcctgacagaggtggccggggaggaggagctgcagatgatccagcctgagaagctgctgctggtgacagtgggcaagacagccaccctgcactgcaccgtgaccagcctgctgcctgtgggccctgtgctgtggttccggggcgtgggccctggccgggagctgatctacaaccagaaggagggccacttcccccgggtgaccaccgtgtctgacctgaccaagaggaacaacatggacttcagcatccgcatcagcagcatcaccccagcagatgtgggcacctactactgtgtgaagttcaggaagggcagcccagaaaatgtggagttcaagagcggccctggaacagagatggccctgggcggccctgccagcagcctgacagccctgctgctgattgctgtgctgctgggccccatctacgtgccctggaagcagaagacctag

SEQ ID NO: 233218 - DNA, 513 bp, Artificial Sequence
  derived and/or modified sequence
atgcccgtgcccgccagctggccccacccccccggccccttcctgctgctcacccttctattgggacttaccgaggtggccggtgaagaggagctccaaatgatccagcctgagaaactgctcctggttactgtgggcaaaactgccactctccactgcacagtgacaagcttgctgcccgtgggccccgtcttgtggtttagaggcgtgggtccagggcgagaactgatttacaatcaaaaagaggggcatttccccagggttaccacagtttccgatctgaccaaacggaacaacatggacttttccatccgtatttccagcatcacacccgccgacgtcgggacttattactgtgtcaaatttagaaagggaagccctgagaacgtggaattcaaaagcggtccgggaaccgaaatggcccttggaggtccggcatccagtcttaccgccttgttactgattgcagtgctgttggggccaatctatgtcccatggaaacagaagacttag

SEQ ID NO: 233219 - DNA, 513 bp, Artificial Sequence
  derived and/or modified sequence
atgcctgtacccgcatcctggccccatccacccggaccattcctgttactgaccctcctcctcggattaaccgaagttgccggagaggaggaactacagatgatacaaccggaaaagctcttgttagttacggtgggaaaaaccgccacactacactgcacagttacatccctgctgcccgtgggaccagttctttggttcagaggcgtcggtcccggaagggagctcatatataatcagaaggaaggacactttcctagagtgactacagtcagcgacctgaccaagcgcaacaacatggatttcagcatacgcatttcttctattacccctgcggatgtcggaacatactattgcgtcaagttccgcaaaggttcgcctgagaacgtcgagttcaagagtggcccaggcaccgagatggctctgggtgggccagcgagctcattgaccgctctccttcttattgcagtcctcctcggacccatttacgtaccctggaaacaaaagacctag

SEQ ID NO: 233220 - DNA, 1042 bp, Artificial Sequence
  derived and/or modified sequence
agaacagacgtttgaacagagcaggcttctgaggtctccaaaatgcctgtcccagcctcctggccccatcctcctggtcctttcctgcttctgactctactgctgggacttacagaagtggcaggtgaggaggagctacagatgattcagcctgagaagctcctgttggtcacagttggaaagacagccactctgcactgcactgtgacctccctgcttcccgtgggacccgtcctgtggttcagaggagttggaccaggccgggaattaatctacaatcaaaaagaaggccacttccccagggtaacaacagtttcagacctcacaaagagaaacaacatggacttttccatccgcatcagtagcatcaccccagcagatgtcggcacatactactgtgtgaagtttcgaaaagggagccctgagaacgtggagtttaagtctggaccaggcactgagatggctttgggtggcccggcatcatcccttactgcgctgctcctcatagctgtcctcctgggccccatctacgtcccctggaagcagaagacctgactctccttccttcctcccctgccacgtgggaccctcatctctgctgcctccttcctttcctgagaggctcagcttgagagaatgagccagtgagaagcttctctagacttggctccaaacatctcccctcccaagacatctgcctgcccacaggctcctgttgctccttcacacagacctggatgccccagagcaaggtcttcattcatggtcctgagcaggtgccatgggattgggctctgggcactgacttaacggcacctccctagaaggcgagaaacatgccaaatctaaacacaccaggactcccatccatcgccttgagactgaccgtaaaccacagacgctctccaggttctcaagagttatcctgccttccagattcctgcctatcccaactccccagccttgttgaggttctctattgcctcttgaatacaaatgcactcccaaagtggttttaagaaaataaaaagattatccttcc

SEQ ID NO: 233221 - DNA, 513 bp, Artificial Sequence
  derived and/or modified sequence
atgcccgtgcccgccagctggccccacccccccggccccttcctgctgctgaccctgctgctgggcctgaccgaggtggccggcgaggaggagctgcagatgatccagcccgagaagctgctgctggtgaccgtgggcaagaccgccaccctgcactgcaccgtgaccagcctgctgcccgtgggccccgtgctgtggttcagaggcgtgggccccggcagagagctgatctacaaccagaaggagggccacttccccagagtgaccaccgtgagcgacctgaccaagagaaacaacatggacttcagcatcagaatcagcagcatcacccccgccgacgtgggcacctactactgcgtgaagttcagaaagggcagccccgagaacgtggagttcaagagcggccccggcaccgagatggccctgggcggccccgccagcagcctgaccgccctgctgctgatcgccgtgctgctgggccccatctacgtgccctggaagcagaagacctag

SEQ ID NO: 233222 - protein, 363 aa, Artificial Sequence
  derived and/or modified sequence
MGPGEALLAGLLVMVLAVALLSNALVLLCCAYSAELRTRASGVLLVNLSLGHLLLAALDMPFTLLGVMRGRTPSAPGACQVIGFLDTFLASNAALSVAALSADQWLAVGFPLRYAGRLRPRYAGLLLGCAWGQSLAFSGAALGCSWLGYSSAFASCSLRLPPEPERPRFAAFTATLHAVGFVLPLAVLCLTSLQVHRVARRHCQRMDTVTMKALALLADLHPSVRQRCLIQQKRRRHRATRKIGIAIATFLICFAPYVMTRLAELVPFVTVNAQWGILSKCLTYSKAVADPFTYSLLRRPFRQVLAGMVHRLLKRTPRPASTHDSSLDVAGMVHQLLKRTPRPASTHNGSVDTENDSCLQQTH

SEQ ID NO: 233223 - DNA, 1694 bp, Artificial Sequence
  derived and/or modified sequence
agaagcgcgcagagtcccatcctgccacgccacgaggagagaagaaggaaagatacagtgttaggaaagagacctccctcgcccctacgccccgcgcccctgcgcctcgcttcagcctcaggacagtcctgccgggacggtgagcgcattcagcaccctggacagcaccgcggttgcgctgcctccagggcggccccgggctgctcctgctccgcagagctacgccctccccccgggtgccccggaccctgcacttgccgccgctttcctcgcgctgctctggaccttgctagccggctctgcacctcccagaagccgtgggcgcgccgctcagctgctccatcgcctcactttcccaggctcgcgcccgaagcagagccatgagaaccccagggtgcctggcgagccgctagcgccatgggccccggcgaggcgctgctggcgggtctcctggtgatggtactggccgtggcgctgctatccaacgcactggtgctgctttgttgcgcctacagcgctgagctccgcactcgagcctcaggcgtcctcctggtgaatctgtctctgggccacctgctgctggcggcgctggacatgcccttcacgctgctcggtgtgatgcgcgggcggacaccgtcggcgcccggcgcatgccaagtcattggcttcctggacaccttcctggcgtccaacgcggcgctgagcgtggcggcgctgagcgcagaccagtggctggcagtgggcttcccactgcgctacgccggacgcctgcgaccgcgctatgccggcctgctgctgggctgtgcctggggacagtcgctggccttctcaggcgctgcacttggctgctcgtggcttggctacagcagcgccttcgcgtcctgttcgctgcgcctgccgcccgagcctgagcgtccgcgcttcgcagccttcaccgccacgctccatgccgtgggcttcgtgctgccgctggcggtgctctgcctcacctcgctccaggtgcaccgggtggcacgcagacactgccagcgcatggacaccgtcaccatgaaggcgctcgcgctgctcgccgacctgcaccccagtgtgcggcagcgctgcctcatccagcagaagcggcgccgccaccgcgccaccaggaagattggcattgctattgcgaccttcctcatctgctttgccccgtatgtcatgaccaggctggcggagctcgtgcccttcgtcaccgtgaacgcccagtggggcatcctcagcaagtgcctgacctacagcaaggcggtggccgacccgttcacgtactctctgctccgccggccgttccgccaagtcctggccggcatggtgcaccggctgctgaagagaaccccgcgcccagcatccacccatgacagctctctggatgtggccggcatggtgcaccagctgctgaagagaaccccgcgcccagcgtccacccacaacggctctgtggacacagagaatgattcctgcctgcagcagacacactgagggcctggcagggctcatcgcccccaccttctaagaagccctgtggaaagggcactggccctgccacagagatgccactggggacccccagacaccagtggcttgactttgagctaaggctgaagtacaggaggaggaggaggagagggccggatgtgggtgtggacagcagtagtggcggagga

SEQ ID NO: 233224 - DNA, 1092 bp, Artificial Sequence
  derived and/or modified sequence
atgggccctggggaagcactgttagcaggactactggtgatggtgctggctgttgcgttgctgagtaacgcccttgttctgctctgttgtgcatactctgctgagctgagaactagagcttccggggttttgcttgtgaatttgagtctcggacatctcctgctcgctgcattggatatgccattcacactgttaggggtcatgaggggaaggacccccagcgctcctggcgcctgtcaagtgataggatttttggacacattcctggcgagcaatgcagccctttccgtcgccgccctgtcagccgatcaatggctggccgtgggattcccactgcgctatgctgggcggttacgtcccaggtacgcagggctgctcctgggctgcgcgtggggtcagagcctggcattttcaggcgcggccctcggttgctcttggctcggttattctagcgcgttcgcgtcatgttcactccggctacctcctgaacctgagcggccccgctttgctgcattcacagcaactctgcacgctgtgggctttgtcttaccgctggccgtactctgcctgacctctttgcaggttcatagagtagcccgcaggcactgtcagagaatggacactgtgaccatgaaggccttagccctgttagccgacctgcatcccagtgtcagacagagatgcctgatccaacaaaaaagaagacggcaccgggccactcgcaagattggcatcgctattgccacttttctcatatgcttcgcgccatacgtgatgaccagattggcagaattggtgccattcgtgactgttaacgctcagtgggggatcctcagtaagtgtctgacctactcaaaagccgtagccgaccctttcacctactctttactccgccgacccttccgtcaagtgctggctggcatggtacatagactcctaaaaagaacaccacggccagcctccacgcacgattccagcttagacgtcgctggaatggtgcaccaactactgaagagaacgcctcgtcctgctagcacacacaatgggtcagtcgataccgagaacgattcttgcctgcagcaaacccattag

SEQ ID NO: 233225 - DNA, 1092 bp, Artificial Sequence
  derived and/or modified sequence
atgggccctggagaggccctgctggccggcctgctggtgatggtgctggccgtggccctgctgagcaatgccctggtgctgctgtgctgtgcctacagcgctgagctgcggacccgggccagcggcgtgctgctggtgaacctgagcctgggccacctgctgctggccgccctggacatgcccttcaccctgctgggcgtgatgaggggccgcacccccagcgcccctggggcctgccaggtgattggcttcctggacaccttcctggccagcaatgctgccctgtctgtggccgccctgtctgctgaccagtggctggccgtgggcttccccctgcgctatgccggccgcctgcggcccaggtatgccggcctgctgctgggctgtgcctggggccagagcctggccttcagcggggccgccctgggctgctcctggctgggctacagcagcgcctttgccagctgcagcctgcggctgcccccagagcctgagcggcccaggtttgctgccttcaccgccaccctgcatgctgtgggctttgtgctgcccctggccgtgctgtgcctgaccagcctgcaggtgcaccgggtggcccggcggcactgccagaggatggacacagtgaccatgaaggccctggccctgctggccgacctgcaccccagcgtgcggcagcgctgcctgatccagcagaagagaagaagacaccgggccaccaggaagattggaattgccatcgccaccttcctgatctgctttgccccctacgtgatgacccggctggccgagctggtgccctttgtgacagtgaatgcccagtggggcatcctgagcaagtgcctgacctacagcaaggctgtggccgaccccttcacctacagcctgctgcggcggcccttccggcaggtgctggccggcatggtgcaccggctgctgaagaggacccccaggcctgccagcacccatgacagcagcctggatgtggccggcatggtgcaccagctgctgaagaggacccccaggcctgccagcacccacaacggctctgtggacacagaaaatgacagctgcctgcagcagacccactag

SEQ ID NO: 233226 - DNA, 1092 bp, Artificial Sequence
  derived and/or modified sequence
atgggccccggcgaggccctgctggccggcctgctggtgatggtgctcgccgtggctttgctgtctaatgcccttgtattactgtgttgtgcatattccgctgagctgagaaccagggcctcaggtgtccttttagtcaatctctcactaggacacttgctacttgcggcactggacatgccttttaccctcctcggggtcatgcgcggaagaacacccagcgcacccggcgcctgccaggtaatcggattcctagacacctttctggcgagtaatgctgctctaagtgtggccgcactgtccgctgaccagtggctggcggtgggatttcctctgagatacgctggccgactgcgccccagatatgcaggactgttgctaggttgcgcctgggggcaaagtcttgctttttctggtgctgccttaggttgctcctggctgggatatagctccgcatttgcatcttgttcccttcgtctgcccccagagcccgagcggccccgctttgcagcctttactgcaacattacacgctgttggtttcgtgctgcccctggctgtcctctgtctgactagcctgcaggtgcaccgtgtggccagacggcactgccaaagaatggatactgtcaccatgaaggcccttgctctgctcgctgatctacacccttccgtccgccagaggtgccttattcagcagaagagaagacggcaccgggccacgcgcaaaattgggatcgcaatcgccaccttcctcatctgcttcgccccttatgttatgacaagactggctgaactggtgccctttgtgaccgtgaacgcacaatggggtatcctgtccaagtgcctgacatactccaaggctgtggctgacccctttacttattccctcctgaggcgaccatttcgtcaggttttggcaggaatggtccatagacttcttaaacgtaccccaagacctgcaagtactcacgactctagccttgacgtggctggaatggttcaccaactgttgaaaagaacccctcgccctgcctctacacataatgggtcagtagatactgagaacgactcatgtctgcaacagacccattag

SEQ ID NO: 233227 - DNA, 1092 bp, Artificial Sequence
  derived and/or modified sequence
atgggacctggcgaggcactcctggctggcctcctcgttatggttctggcagtcgccctcctgtccaacgctctcgtcctgttgtgttgcgcttattccgccgagctccggacacgagccagcggcgtgctcctggtgaacctctccctcgggcatctattgctggccgctctcgacatgccttttactctgctgggcgtgatgagaggcaggacacccagcgcccctggggcatgccaggtcatagggtttcttgataccttcctcgcgagcaatgctgccttgtcagtagcagctctgagcgcggaccagtggttggcagttggattccctctgcgctatgcaggtcgcttacggccaagatatgccggtctccttttggggtgtgcgtggggtcagagtttggcattctctggagcagctctgggctgtagttggttggggtattccagcgcttttgcctcatgctctctccgattgccacctgagcccgagcgcccacggttcgccgcttttactgcaacgctgcatgctgtcggatttgtactgcctctagcggtgctgtgcttgacctcactgcaggtccaccgcgtggccagaaggcactgtcaacggatggacaccgtcactatgaaagcgctggctcttctcgctgacctgcacccctcagttagacagcgatgtctgattcagcaaaaacggaggcgccacagggccacgcggaagatcggcattgccattgctacattcttaatttgtttcgccccttatgtcatgacccgactggctgagctagtacccttcgtgacagtgaacgctcagtgggggatcctgtctaaatgcctgacctatagcaaagccgtggctgatcccttcacatatagcctgcttcggcgacccttcagacaggtactcgctggcatggtgcacaggctcctgaaaagaacaccacgacctgcctccacccatgatagctcattagacgtggctgggatggtgcaccagctgcttaagcggacaccccgtcctgccagtacccataacggaagcgttgatactgagaatgatagttgtttacaacaaacccattag

SEQ ID NO: 233228 - DNA, 1092 bp, Artificial Sequence
  derived and/or modified sequence
atgggccccggcgaggccctgctggccggcctgctggtgatggtgctggccgtggccctgctgagcaacgccctggtgctgctgtgctgcgcctacagcgccgagctgagaaccagagccagcggcgtgctgctggtgaacctgagcctgggccacctgctgctggccgccctggacatgcccttcaccctgctgggcgtgatgagaggcagaacccccagcgcccccggcgcctgccaggtgatcggcttcctggacaccttcctggccagcaacgccgccctgagcgtggccgccctgagcgccgaccagtggctggccgtgggcttccccctgagatacgccggcagactgagacccagatacgccggcctgctgctgggctgcgcctggggccagagcctggccttcagcggcgccgccctgggctgcagctggctgggctacagcagcgccttcgccagctgcagcctgagactgccccccgagcccgagagacccagattcgccgccttcaccgccaccctgcacgccgtgggcttcgtgctgcccctggccgtgctgtgcctgaccagcctgcaggtgcacagagtggccagaagacactgccagagaatggacaccgtgaccatgaaggccctggccctgctggccgacctgcaccccagcgtgagacagagatgcctgatccagcagaagagaagaagacacagagccaccagaaagatcggcatcgccatcgccaccttcctgatctgcttcgccccctacgtgatgaccagactggccgagctggtgcccttcgtgaccgtgaacgcccagtggggcatcctgagcaagtgcctgacctacagcaaggccgtggccgaccccttcacctacagcctgctgagaagacccttcagacaggtgctggccggcatggtgcacagactgctgaagagaacccccagacccgccagcacccacgacagcagcctggacgtggccggcatggtgcaccagctgctgaagagaacccccagacccgccagcacccacaacggcagcgtggacaccgagaacgacagctgcctgcagcagacccactag

SEQ ID NO: 233229 - protein, 209 aa, Artificial Sequence
  derived and/or modified sequence
MKAVVQRVTRASVTVGGEQISAIGRGICVLLGISLEDTQKELEHMVRKILNLRVFEDESGKHWSKSVMDKQYEILCVSQFTLQCVLKGNKPDFHLAMPTEQAEGFYNSFLEQLRKTYRPELIKDGKFGAYMQVHIQNDGPVTIELESPAPGTATSDPKQLSKLEKQQQRKEKTRAKGPSESSKERNTPRKEDRSASSGAEGDVSSEREP

SEQ ID NO: 233230 - DNA, 630 bp, Artificial Sequence
  derived and/or modified sequence
atgaaagccgtcgtgcagcgggttacacgcgcatccgtgaccgtgggaggcgagcagatctctgcaattggccgggggatctgcgtgcttttggggattagccttgaggatacccagaaggaactggaacacatggtgcgcaagattctcaatttacgagttttcgaagatgagtcaggaaagcattggagtaaatctgtcatggataaacaatacgagattctctgtgtgtctcaatttactttacagtgcgtgctgaaggggaacaagccagacttccatctggctatgcctactgagcaagcggagggcttctataatagcttcctggagcaattaaggaagacgtatcgaccagagctgataaaggatggcaagttcggagcgtacatgcaggttcatatacagaatgacggtcccgtgacgatagaattagaaagcccagctccagggacagcgacatcggatccaaaacagcttagtaaactggaaaagcaacaacagcgcaaagagaagacacgagccaagggtccgtccgaaagttctaaggagcggaatactcctagaaaggaggataggtcagcttcctctggggcagaaggagacgtgtccagcgaaagagaaccttag

SEQ ID NO: 233231 - DNA, 630 bp, Artificial Sequence
  derived and/or modified sequence
atgaaggctgtggtgcagagggtgacccgggcctctgtgacagtgggcggggagcagatcagcgccatcggccggggcatctgtgtgctgctgggcatcagcctggaggacacccagaaggagctggagcacatggtgaggaagatcctgaacctgcgggtgtttgaagatgaaagtggcaagcactggagcaagtctgtgatggacaagcagtatgagatcctgtgtgtgtcccagttcaccctgcagtgtgtgctgaagggcaacaagccagacttccacctggccatgcccacagagcaggccgagggcttctacaacagcttcctggagcagctgaggaagacctacagacctgagctgatcaaggatggcaagtttggagcctacatgcaggtgcacatccagaatgatggccctgtgaccatcgagctggagagccctgcccctggaacagccaccagtgaccccaagcagctgagcaagctggagaagcagcagcagaggaaggagaagacccgggccaagggccccagcgagagcagcaaggagaggaacacccccaggaaagaagatagaagtgccagcagtggagcagaaggagatgtgtcctctgagcgggagccctag

SEQ ID NO: 233232 - DNA, 630 bp, Artificial Sequence
  derived and/or modified sequence
atgaaggccgtggtgcagcgggtgacccgggccagcgtgaccgtggggggcgaacagatttcggccattggccgaggcatttgtgtgctcctcggaatcagccttgaagacacccagaaggaactggagcacatggtccgcaagattctgaacctccgcgtattcgaggacgagtctggcaaacactggagcaagtccgttatggacaagcaatacgaaatactctgtgtatctcagttcacactgcagtgcgtgctgaagggcaataagcctgacttccacctggcaatgccgaccgagcaggctgaaggtttctataacagcttcctagaacagctcagaaagacataccggccagaacttatcaaagatggcaagtttggggcctacatgcaagtccacattcagaacgacggtccagtgacaatagaactggaaagccccgctccaggtaccgccacatccgatccaaagcaattgtccaagctggaaaagcagcagcagcgaaaagaaaagacccgggctaagggtccgagcgagagcagcaaggaaagaaatacacctcgaaaggaagatagaagtgcttcttcgggtgcagaaggcgacgtcagctcggagagagaaccgtag

SEQ ID NO: 233233 - DNA, 630 bp, Artificial Sequence
  derived and/or modified sequence
atgaaggcagtggtgcaacgggtgacccgggcttcagtaacagtgggtggagaacagatctctgccattggtcggggtatctgcgttctcctcggaattagccttgaagatacacagaaggagctggagcacatggtgcggaagatcctgaacctgcgggtgttcgaagatgaatcagggaagcactggtctaaatccgtgatggataagcagtatgaaattctgtgtgtgagtcagttcaccctgcagtgcgtcctgaagggcaacaagccggacttccacctagcaatgcctactgagcaggccgaaggtttttacaatagctttctggagcagctccgaaaaacctaccgccctgaactgatcaaggacggaaaatttggtgcctacatgcaggtccacatccaaaatgatgggcctgtgacaatagagcttgaatcaccagcgcctggcaccgctacctccgaccctaaacagcttagtaaacttgaaaagcagcaacagaggaaagagaaaactcgtgccaaaggtccatcggagtcatcaaaagagcgaaacacaccaaggaaagaggatcgcagcgcctcatcaggtgcagaaggggatgttagcagtgagcgagagccctag

SEQ ID NO: 233234 - DNA, 630 bp, Artificial Sequence
  derived and/or modified sequence
atgaaggccgtggtgcagagagtgaccagagccagcgtgaccgtgggcggcgagcagatcagcgccatcggcagaggcatctgcgtgctgctgggcatcagcctggaggacacccagaaggagctggagcacatggtgagaaagatcctgaacctgagagtgttcgaggacgagagcggcaagcactggagcaagagcgtgatggacaagcagtacgagatcctgtgcgtgagccagttcaccctgcagtgcgtgctgaagggcaacaagcccgacttccacctggccatgcccaccgagcaggccgagggcttctacaacagcttcctggagcagctgagaaagacctacagacccgagctgatcaaggacggcaagttcggcgcctacatgcaggtgcacatccagaacgacggccccgtgaccatcgagctggagagccccgcccccggcaccgccaccagcgaccccaagcagctgagcaagctggagaagcagcagcagagaaaggagaagaccagagccaagggccccagcgagagcagcaaggagagaaacacccccagaaaggaggacagaagcgccagcagcggcgccgagggcgacgtgagcagcgagagagagccctag

SEQ ID NO: 233235 - DNA, 1387 bp, Artificial Sequence
  derived and/or modified sequence
ctatcgccaggccgagagtgggcgtggccgacgtggggtgggtagcagccgaccgagtcggaccggccagttgggcgcgcttccgggtgtcacctccagagggcgccggctgcggagccgccctcagagtcgcgaggccggacgcagcgcggcgccgccccactcgccccagccgccgccatgaaggccgtggtgcagcgcgtcacccgggccagcgtcacagttggaggagagcagattagtgccattggaaggggcatatgtgtgttgctgggtatttccctggaggatacgcagaaggaactggaacacatggtccgaaagattctaaacctgcgtgtatttgaggatgagagtgggaagcactggtcgaagagtgtgatggacaaacagtacgagattctgtgtgtcagccagtttaccctccagtgtgtcctgaagggaaacaagcctgatttccacctagcaatgcccacggagcaggcagagggcttctacaacagcttcctggagcagctgcgtaaaacatacaggccggagcttatcaaagatggcaagtttggggcctacatgcaggtgcacattcagaatgatgggcctgtgaccatagagctggaatcgccagctcccggcactgctacctctgacccaaagcagctgtcaaagctcgaaaaacagcagcagaggaaagaaaagaccagagctaagggaccttctgaatcaagcaaggaaagaaacactccccgaaaagaagaccgcagtgccagcagcggggctgagggcgacgtgtcctctgaacgggagccgtagctcaggaggcagaattcagtgtgttatcattgggcagaactggatcctgaaaaattcaagatgctaagcacctacactactttaagaatttggaactgaaacatgaagaggaagacagaaataagaatttgggaacctgaatagctctgcaaaaaacaccaaaggaccgttttatcgttttctgttgttgctgtggtggagtgatgcagtgggcactgccggtgggccagggggcgggtgcgcatgtggtagaaggtgtgcgctcgtgcctcccccacagaaaggctttgttggtttctaccacatcttggcttgcttttggaacaggctggcccagcatcatttgtcatcaagtccactgtggtgtattctgcgtgtccatggcgggggttctccaatacactcacactgtccatgttctttttattgccagggcccgtgttgaagtgtcaagagagcaatcatcaatgataatgtattgtgtgagacctttgcatcttgtaaattttctcttttttctaaaaataaataataataaaatcctaaatctcaacaaaccactttattatcaaacaaa

SEQ ID NO: 233236 - protein, 192 aa, Artificial Sequence
  derived and/or modified sequence
MAGLLALLGPAGRVGARVRPRATWLLGATAPCAPPPLALALLPPRLDARLLRTARGDCRGHQDPSQATGTTGSSVSCTEEKKQSKSQQLKKIFQEYGTVGVSLHIGISLISLGIFYMVVSSGVDMPAILLKLGFKESLVQSKMAAGTSTFVVAYAIHKLFAPVRISITLVSVPLIVRYFRKVGFFKPPAAKP

SEQ ID NO: 233237 - DNA, 579 bp, Artificial Sequence
  derived and/or modified sequence
atggccggcctgctggccctgctgggccccgccggcagagtgggcgccagagtgagacccagagccacctggctgctgggcgccaccgccccctgcgcccccccccccctggccctggccctgctgccccccagactggacgccagactgctgagaaccgccagaggcgactgcagaggccaccaggaccccagccaggccaccggcaccaccggcagcagcgtgagctgcaccgaggagaagaagcagagcaagagccagcagctgaagaagatcttccaggagtacggcaccgtgggcgtgagcctgcacatcggcatcagcctgatcagcctgggcatcttctacatggtggtgagcagcggcgtggacatgcccgccatcctgctgaagctgggcttcaaggagagcctggtgcagagcaagatggccgccggcaccagcaccttcgtggtggcctacgccatccacaagctgttcgcccccgtgagaatcagcatcaccctggtgagcgtgcccctgatcgtgagatacttcagaaaggtgggcttcttcaagccccccgccgccaagccctag

SEQ ID NO: 233238 - DNA, 3046 bp, Artificial Sequence
  derived and/or modified sequence
agggccctcgccgggtcagctccgcccaccctccccggcctccgcccgcctcccgggtcagcggcgcgggtgctgcgcctagctgcgcaccatggccgggttgctggcgttgctgggtccggcaggcagggtgggcgcccgggtccggcctcgcgccacctggctcctgggcgccaccgccccctgcgccccgccgcccctggccctggccctgctcccgcccaggctagacgcccggctgctccgcacggcgcgcggggactgccgcggccaccaggaccccagccaggccacggggacaacaggcagcagcgtcagctgcacagaggagaaaaagcaaagcaagtcacagcaactgaaaaagatttttcaagagtatggcactgttggcgtgtcattgcacattggaatctcattaatttccttgggcatattttacatggttgtgtcaagtggtgtggacatgcctgcaatcctgctgaaactcggatttaaagagtccctggtacagtcaaaaatggcagcaggcacaagtaccttcgtggtggcctatgcaatccacaagctgtttgcgccagtgagaatcagcattacgctagtctctgtgcccttgattgtcagatattttcgaaaagtgggattttttaaacctccagctgcaaaaccttaatgaactcttcagtcgtacacactgaaaacctatttcttctaaattacatgatttggattggttttagggttttagggttgtagggtttcttttggagaggtagggggctaattgctatgttctcatggataaactttgccagcaaaaatcaggcttttgaacaattttaattttttgcctcataaattttgtgaatgctattcattatagggcttgtatatataatctaaaatgtcagcaaggcatcggagatgggttaacatctcaaaacaaaatagcctacaaatgttccttgtgggagactttggcgagggtctgtgggtaaaagcaccagggggttaatcttggctcagtttcctaaaaagcattgattaatttaactggcttttaaatatccccttccgctgatatttgttgtcagctgcctacagtttaatatgcagcgttcacaaaacagctgccagtgctacaattaatgaagcaaaacttaatatgtaatcacaatctaaattagcatcaatactttgacattcattacattggtttgggggaagaaaagtagttctggtatgtttcattgatccccagataccttccaatctggacatgatggggctgattccagatggtttttctgaaatttcattaaggtaggtcagcgtcatttgtctctgtttaggtaaaatataaaaaccctgcccagtagcagtggcatcgcttggttcctgatgcccatgttccagaggaattcggataccacaaacagctaagacaatctcagcttttcttagacaatcttctatctcaaacttcagacattccagaattgtcatgatgtttacactgtctgagttaaaaatcctgttcaagaaaaaaaaagattttgtatcacttcttaaaaaggaatattcatagcacttgtcacaaatagaaggcaaccatgagataatacaagccagggagaggcttgtattacatgacaggtgtaattagtctgctgagccagctttacccaatgaagggcatatgtgttagagagattagctaagagtagaaattcgagcatagaggccaggtgcggtggctcacgcctgtaatcccagcactttgggaggttgaggcaggcgtgtcacttgaggccaggagttcgagaccagcctggccaacatgatgaaaccccgtctctactacaaatacaaaaattagccgggtgtggtggcacacgcctgtagtcccagctactggggaggctgaggcagcattgcttgaacccaggaggtggaggttgcagtgagccaagatcacaccactgcactccagcctgggcgacagagggagacactgtctccaaaagaaagaaatcccagcgtagatccaaactgagacactgaggcttcgtccttatagtagtcaggagcaggcgattgaagtaattctgtcctgcggggttcagcatcatgcacgttccccctgggccattctctgatgcagggcacttgctccacactctgggaacccagattcaccagtctgccctgtcacgtagttgaaggagttgcatttatctttctggctcctaattcctttaaaattacatttgttgcagaacctccacaaggctaaataaaattacatttgtgaccatcagagaactgaataaaccattaactggccatcctggttttgcagagatcaggttgttgacagttcctggttgacccacagctacccatgtcagttatctccactaacatatccaagaatctttgtaggacaatttctccacctgcaaggtctttcaggtagaactcttcttttaaggcaattagcccattgccaaaaggttttactgtcttaaagctgtctttctgagatctaattccaaggacttctccacagctaagtgagatgcctcacaccattaggtgatgctttggacagaacagagtattttcatcttgtgtttaaagcaattccttggcttcggctcctcaccactttctatgccagtctcccatttatgtccctagtaatgcctatgcaaaaaaaaaaaaagaaaaaaaagaaaaactgatggtgaaacctacaggtttaagggcttaaatctcaaactttgttaggagtaacaggagcgtgctgagcgggcaagcaataaaacaaatcataccaaaaagccacattgctctctcctaagccccaaccccactccactcctgtggccaggggtccaaacagaaaataaccggagaagacaaggaggtcaaaggatcagggaactaagcattatgtgaattcaccagcaagatgtacagaacgcctgtgtttacattgtttttatggaactagcagaataaaacatctattttaaaaatgaaa

SEQ ID NO: 233239 - DNA, 579 bp, Artificial Sequence
  derived and/or modified sequence
atggccggcctgctcgccctgctgggccctgcgggtagggtgggagcccgcgtgcgacctcgggcgacttggctgcttggcgccaccgctccatgcgccccacctcccctcgcccttgctctgctgccccccagattggacgcacgcctactgcggacggcacgcggtgattgtaggggccatcaggaccctagtcaggcaacgggcacaaccggttcctccgttagttgtacggaagagaaaaaacagagcaagtcacagcaactaaagaagatttttcaggaatatggtaccgtgggagttagtctgcatatcggcatcagtctgattagtttgggcattttttatatggtggtgtccagcggagtggacatgccagccatacttctgaagctcgggtttaaggaaagtctggttcaatcgaagatggctgccggaacgtccacttttgttgtggcatatgccatccataagttatttgcacccgtccgcataagcattacactcgtgtcagtacctctgatagtgcgttactttagaaaggtcggttttttcaagcccccagccgctaagccctag

SEQ ID NO: 233240 - DNA, 579 bp, Artificial Sequence
  derived and/or modified sequence
atggccggcctgctggccctgctgggccctgctggccgggtgggcgcccgggtgcggccccgggccacctggctgctgggcgccacagccccctgtgcccccccacccctggccctggccctgctgcccccccggctggatgcccggctgctgaggacagcccggggggactgccggggccaccaggaccccagccaggccaccggcaccaccggcagctctgtgtcctgcacagaggagaagaagcagagcaagagccagcagctgaagaagatcttccaggagtatggcaccgtgggcgtgtccctgcacatcggcatcagcctcatcagcctgggcatcttctacatggtggtgtcctctggagtggacatgcctgccatcctgctgaagctgggcttcaaggagagcctggtgcagagcaagatggctgctggcaccagcacctttgtggtggcctatgccatccacaagctgtttgcccctgtgcgcatcagcatcaccctggtgtctgtgcccctgattgtgcgctacttcaggaaggtgggcttcttcaagcccccagctgccaagccctag

SEQ ID NO: 233241 - DNA, 96 bp, Artificial Sequence
  derived and/or modified sequence
atgaggcctggctggagccacctgcccctgtgccccaccctgcaggatgctgtgctgggccacttcctgagccacctgggccgccgccacctgtag

SEQ ID NO: 233242 - DNA, 579 bp, Artificial Sequence
  derived and/or modified sequence
atggccggcctgctggccctgctgggccccgccggccgggtgggcgctcgcgtaaggcctagagcaacctggctgctgggagcaacagctccttgcgccccaccccctctcgcgttggccttgctaccaccccggcttgatgcccgcctacttagaaccgcccgcggcgactgcagaggacatcaggatccatcccaggccacaggaaccaccggtagcagtgtctcttgcactgaggaaaagaagcagtcaaaaagccagcagctgaagaaaatttttcaggagtatggcaccgtgggtgtctcccttcatataggcatctccctgataagcttgggaatcttctatatggtagttagctcaggtgtggacatgcccgctatccttctcaagctgggattcaaggaatcattggtgcagtcgaagatggcagcaggcacctccacatttgtcgtggcttacgccatccacaagctattcgcccctgtgcgtatttccattacgctcgtatctgtgcccttgatcgtacgctactttaggaaggtgggtttctttaagccgccagcggccaaaccatag

SEQ ID NO: 233243 - DNA, 579 bp, Artificial Sequence
  derived and/or modified sequence
atggccggactgttggcgctactcggtcccgctggacgcgttggagccagagtcaggccaagggccacttggctgttgggggctaccgctccttgtgcacctccccctctggctctggccctcctcccaccacgcctggatgcaaggctactacgcacggcgaggggggattgcagggggcatcaggacccctcacaggccactggcaccacaggatcatccgtgagttgtaccgaggaaaaaaaacaatctaagagccagcagctcaaaaagatttttcaagagtacggaacagtcggcgtgagcctccacattggcatctcactgatctcccttggcattttttacatggtggtgagttctggcgtggatatgccggctatccttctgaaattaggctttaaggagtccctcgtgcagagcaaaatggcagccggaacctctacttttgtggtggcgtacgccattcataagctgtttgctcctgttagaatttctataaccctggtgagtgtccccctgatcgttagatatttcagaaaagtcgggttctttaagccgccagccgctaaaccgtag

SEQ ID NO: 233244 - protein, 227 aa, Artificial Sequence
  derived and/or modified sequence
MAAQRPLRVLCLAGFRQSERGFREKTGALRKALRGRAELVCLSGPHPVPDPPGPEGARSDFGSCPPEEQPRGWWFSEQEADVFSALEEPAVCRGLEESLGMVAQALNRLGPFDGLLGFSQGAALAALVCALGQAGDPRFPLPRFILLVSGFCPRGIGFKESILQRPLSLPSLHVFGDTDKVIPSQESVQLASQFPGAITLTHSGGHFIPAAAPQRQAYLKFLDQFAE

SEQ ID NO: 233245 - DNA, 684 bp, Artificial Sequence
  derived and/or modified sequence
atggcagcgcaacggcctctgcgcgtattatgcttggcaggtttcagacagagcgaacgagggtttagggaaaagaccggcgccctgcgcaaagccctaaggggacgtgccgaattggtttgcctgagtggtccccacccggtaccggacccaccaggcccagaaggcgctaggtccgactttgggtcctgccctccggaggagcagccacggggatggtggttctcagagcaggaggccgacgtcttttctgctctggaagaacctgctgtttgcaggggtctcgaggaatctcttggcatggtcgctcaagcccttaaccgactgggcccgtttgatgggctgcttggcttcagtcagggggccgctcttgccgccctggtgtgcgccttgggacaagcaggcgatcctaggttcccactcccacggttcattttactagtgtcaggtttttgtccacgcgggattggcttcaaggagagcatcttacagcgacctctgagcctgccatctctgcatgtctttggggacacagataaagtgattccctcacaggaaagcgtgcagctcgcatcacagttccctggggctatcactttaactcactccggcggccacttcattcccgctgctgccccacagcggcaagcatatcttaagtttctcgatcagttcgcagagtag

SEQ ID NO: 233246 - DNA, 684 bp, Artificial Sequence
  derived and/or modified sequence
atggccgcccagaggcccctgcgggtgctgtgcctggccggcttccggcagagcgagcggggcttccgggagaagacaggagccctgaggaaggccctgcggggccgggcagagctggtgtgcctgagcggcccccaccctgtgcctgaccccccaggccctgagggcgcccggagtgactttggcagctgccccccagaggagcagccccggggctggtggttcagcgagcaggaggctgatgtgttcagcgccctggaggagcctgctgtgtgccggggcctggaggagagcctgggcatggtggcccaggccctgaaccggctgggcccctttgatggcctgctgggcttcagccagggcgccgccctggccgccctggtgtgtgccctgggccaggccggggacccccgcttccccctgccccgcttcatcctgctggtgtctggcttctgcccccggggcatcggcttcaaggagagcatcctgcagaggcccctgagcctgcccagcctgcacgtgtttggagacacagacaaggtgatccccagccaggagagcgtgcagctggccagccagtttcctggggccatcaccctgacccacagcggcggccacttcatcccagctgctgccccccagaggcaggcctacctgaagttcctggaccagtttgctgagtag

SEQ ID NO: 233247 - DNA, 684 bp, Artificial Sequence
  derived and/or modified sequence
atggccgcccagcggcccctgcgggtgctgtgcctggccggcttcaggcagtccgagaggggattcagggagaagaccggcgccctgcgaaaggccctgcgcggcagggcggaactagtttgtttgtccggcccccatcctgtgccagaccccccaggacccgaaggggccaggtccgatttcggttcctgcccaccggaggaacaacccaggggctggtggttttccgagcaggaggcagatgtcttctcagcgctcgaggagcctgccgtgtgccggggactggaagagtcactgggaatggtggcccaggcacttaaccggctgggccccttcgacggactacttggattcagtcagggtgccgcactcgccgccctggtgtgtgccctggggcaggcgggggaccctcggtttcccttgccccggttcatcctcctggtcagcggtttttgtccacgaggcatcgggtttaaagagtctattctgcagcgcccactgtcgctacctagtctgcacgtgttcggagatacagataaggtcatcccatcccaggaaagcgtccagttggcctctcaattcccaggggcaataacattgacacattctggcggccactttatccctgccgctgcccctcagagacaggcttacctgaagttcctggatcagtttgcggagtag

SEQ ID NO: 233248 - DNA, 684 bp, Artificial Sequence
  derived and/or modified sequence
atggcagcccagcggcctttgagagtgctgtgcttggcgggattccgccagtccgagcgcggtttcagggagaagacgggggctctgcgcaaggccttgcggggtagggccgaattagtttgtctgtctgggccacacccagtaccagatcctcccggtcccgagggggcacgctccgacttcggaagctgtcctccagaagagcaacctagaggctggtggttttctgaacaagaggctgacgtcttcagtgccttggaggagccagccgtctgcagaggtctggaagagtcgttaggcatggtggctcaggcactgaacaggctaggtccgttcgatggactgcttggtttctctcagggcgctgctctggctgccctggtctgtgccctaggtcaggctggggacccccgatttcccctgccacgcttcatcctcctggtgtccggcttctgtcctaggggtatcggctttaaggaatccattctgcaaaggcctttgagccttcctagcctgcacgtatttggcgatacagacaaagttatccccagccaggagtcagtccagctcgccagccagttccctggggctattaccctgactcacagtggaggacatttcattccagcagctgcccctcagcggcaggcttatctcaagttcctggatcagttcgccgagtag

SEQ ID NO: 233249 - DNA, 830 bp, Artificial Sequence
  derived and/or modified sequence
gtgcattgtgcttccgctcggggaaagaccgcttccggtgcttccgtcgctccttgccgggcataatggccgcgcagcgacccctgcgggtcctgtgcctggcgggcttccggcagagcgagcggggcttccgtgagaagaccggggcgctgaggaaggcgctgcggggtcgcgccgagctcgtgtgcctcagcggcccgcacccggtccccgaccccccgggccccgagggcgccagatcagacttcgggtcctgccctccggaggagcagcctcgaggctggtggttttcagagcaggaggccgacgttttctccgcattggaagagcccgccgtctgcaggggcctggaggaatcactggggatggtggcacaggcactgaacaggctggggccttttgacggccttcttggtttcagccaaggggctgcgctagcagcccttgtgtgtgccctgggccaggcaggcgatccccgcttccccttgccacggtttatcctcttggtgtctggtttctgtccccggggcattgggttcaaggaatccatcctgcaaaggcccttgtcattgccttcgctccatgtttttggggacactgacaaagtcatcccctctcaggagagtgtgcaactggccagccaatttcccggagccatcaccctcacccactctggtggccacttcattccagcagctgcaccccagcgtcaggcctacctcaagttcttggaccagtttgcagagtgaaagatcaagaaatgtctctgctcctacatccagctcctctaggggcagcctccgtcatccatgccctcccaggaccctcca

SEQ ID NO: 233250 - DNA, 684 bp, Artificial Sequence
  derived and/or modified sequence
atggccgcccagagacccctgagagtgctgtgcctggccggcttcagacagagcgagagaggcttcagagagaagaccggcgccctgagaaaggccctgagaggcagagccgagctggtgtgcctgagcggcccccaccccgtgcccgacccccccggccccgagggcgccagaagcgacttcggcagctgcccccccgaggagcagcccagaggctggtggttcagcgagcaggaggccgacgtgttcagcgccctggaggagcccgccgtgtgcagaggcctggaggagagcctgggcatggtggcccaggccctgaacagactgggccccttcgacggcctgctgggcttcagccagggcgccgccctggccgccctggtgtgcgccctgggccaggccggcgaccccagattccccctgcccagattcatcctgctggtgagcggcttctgccccagaggcatcggcttcaaggagagcatcctgcagagacccctgagcctgcccagcctgcacgtgttcggcgacaccgacaaggtgatccccagccaggagagcgtgcagctggccagccagttccccggcgccatcaccctgacccacagcggcggccacttcatccccgccgccgccccccagagacaggcctacctgaagttcctggaccagttcgccgagtag

SEQ ID NO: 233251 - protein, 488 aa, Artificial Sequence
  derived and/or modified sequence
MEPFLRRRLAFLSFFWDKIWPAGGEPDHGTPGSLDPNTDPVPTLPAEPCSPFPQLFLALYDFTARCGGELSVRRGDRLCALEEGGGYIFARRLSGQPSAGLVPITHVAKASPETLSDQPWYFSGVSRTQAQQLLLSPPNEPGAFLIRPSESSLGGYSLSVRAQAKVCHYRVSMAADGSLYLQKGRLFPGLEELLTYYKANWKLIQNPLLQPCMPQKAPRQDVWERPHSEFALGRKLGEGYFGEVWEGLWLGSLPVAIKVIKSANMKLTDLAKEIQTLKGLRHERLIRLHAVCSGGEPVYIVTELMRKGNLQAFLGTPEGRALRLPPLLGFACQVAEGMSYLEEQRVVHRDLAARNVLVDDGLACKVADFGLARLLKDDIYSPSSSSKIPVKWTAPEAANYRVFSQKSDVWSFGVLLHEVFTYGQCPYEGMTNHETLQQIMRGYRLPRPAACPAEVYVLMLECWRSSPEERPSFATLREKLHAIHRCHP

SEQ ID NO: 233252 - DNA, 1467 bp, Artificial Sequence
  derived and/or modified sequence
atggagcccttcctgagaagaagactggccttcctgagcttcttctgggacaagatctggcccgccggcggcgagcccgaccacggcacccccggcagcctggaccccaacaccgaccccgtgcccaccctgcccgccgagccctgcagccccttcccccagctgttcctggccctgtacgacttcaccgccagatgcggcggcgagctgagcgtgagaagaggcgacagactgtgcgccctggaggagggcggcggctacatcttcgccagaagactgagcggccagcccagcgccggcctggtgcccatcacccacgtggccaaggccagccccgagaccctgagcgaccagccctggtacttcagcggcgtgagcagaacccaggcccagcagctgctgctgagcccccccaacgagcccggcgccttcctgatcagacccagcgagagcagcctgggcggctacagcctgagcgtgagagcccaggccaaggtgtgccactacagagtgagcatggccgccgacggcagcctgtacctgcagaagggcagactgttccccggcctggaggagctgctgacctactacaaggccaactggaagctgatccagaaccccctgctgcagccctgcatgccccagaaggcccccagacaggacgtgtgggagagaccccacagcgagttcgccctgggcagaaagctgggcgagggctacttcggcgaggtgtgggagggcctgtggctgggcagcctgcccgtggccatcaaggtgatcaagagcgccaacatgaagctgaccgacctggccaaggagatccagaccctgaagggcctgagacacgagagactgatcagactgcacgccgtgtgcagcggcggcgagcccgtgtacatcgtgaccgagctgatgagaaagggcaacctgcaggccttcctgggcacccccgagggcagagccctgagactgccccccctgctgggcttcgcctgccaggtggccgagggcatgagctacctggaggagcagagagtggtgcacagagacctggccgccagaaacgtgctggtggacgacggcctggcctgcaaggtggccgacttcggcctggccagactgctgaaggacgacatctacagccccagcagcagcagcaagatccccgtgaagtggaccgcccccgaggccgccaactacagagtgttcagccagaagagcgacgtgtggagcttcggcgtgctgctgcacgaggtgttcacctacggccagtgcccctacgagggcatgaccaaccacgagaccctgcagcagatcatgagaggctacagactgcccagacccgccgcctgccccgccgaggtgtacgtgctgatgctggagtgctggagaagcagccccgaggagagacccagcttcgccaccctgagagagaagctgcacgccatccacagatgccacccctag

SEQ ID NO: 233253 - DNA, 1467 bp, Artificial Sequence
  derived and/or modified sequence
atggagccctttctccggcgaaggctcgctttcctatcctttttttgggataagatatggcccgccggtggagaacctgaccacggaacccccggctcccttgacccgaataccgacccagttccaacgctgccagccgaaccttgctctccatttccccagcttttcctggccctgtacgactttactgcgcgctgcggaggtgagctgtccgtaaggaggggtgaccggctgtgtgctctcgaggagggcggggggtacatctttgccaggaggctatctggccagccttccgccggcttggttcccataacccatgtggccaaggctagtcccgagactctttcagatcagccctggtatttctcgggcgtgtccagaacccaggcgcagcagctactgctctcaccaccgaatgaacccggagcttttttgattagaccttctgagagcagtctgggagggtacagtctctcagtgagagctcaagccaaggtttgtcattaccgagtgtctatggccgctgatggttctttatacttgcagaagggtcggctttttccgggcctcgaggaactcctcacctattacaaagcaaactggaaactgatccagaacccactcctccagccgtgtatgccccagaaagccccccggcaggatgtgtgggaacggccacattcagaattcgcactaggccgtaagctgggcgagggctattttggggaggtttgggagggtctgtggttagggtccctcccggtcgccataaaggtgatcaagagcgccaacatgaaactaacggatttggctaaggagatccagacactcaaaggcctgcgtcacgagaggctgatccggcttcacgctgtatgctctgggggagagcctgtttacatcgtcactgaactgatgcgaaagggtaatctgcaagcttttctggggacgcctgaagggcgagcactccgcctcccccccctgctgggatttgcgtgccaggtggcggaagggatgtcatacctggaggaacagagagtggttcatagggacctggccgcaaggaacgttcttgtggacgacggactcgcttgtaaggtggctgatttcggattggcacgtctcttgaaagatgacatctactcacccagttcttcaagcaagattcccgtcaaatggacagctccagaggccgctaactatagagttttttcccagaagtctgacgtgtggtcctttggcgtcctgctgcatgaggtgttcacatatggccagtgcccatacgaggggatgactaaccatgagacattgcagcagattatgcgcgggtataggttgcctaggcccgcagcctgcccggctgaagtgtatgtgctcatgctggagtgctggaggagtagtcctgaagagcgccctagttttgccaccttaagagagaagcttcatgcaatccataggtgtcacccatag

SEQ ID NO: 233254 - DNA, 1467 bp, Artificial Sequence
  derived and/or modified sequence
atggagcccttcctgcggcggcggctggccttcctgtccttcttctgggacaagatctggccagctggaggagagccagaccacggcaccccaggcagcctggaccccaacacagatcctgtgcccaccctgcctgctgagccctgcagccccttcccccagctgttcctggccctgtatgacttcaccgcccgctgtggcggggagctgtctgtgagaagaggagaccggctgtgtgccctggaggagggcggcggctacatctttgcccggcggctgagcggccagcccagcgctggcctggtgcccatcacccacgtggccaaggccagccctgagaccctgagtgaccagccctggtacttctctggagtgtccaggacccaggcccagcagctgctgctgagccccccaaatgaacctggggccttcctgatccggcccagcgagagcagcctgggcggctacagcctgtctgtgcgggcccaggccaaggtgtgccactacagagtgtccatggctgctgatggcagcctgtacctgcagaagggccgcctcttccctggcctggaggagctgctgacctactacaaggccaactggaagctgatccagaaccccctgctgcagccctgcatgccccagaaggccccccggcaggatgtgtgggagcggccccacagcgagtttgccctgggcaggaagctgggggagggctactttggagaggtgtgggagggcctgtggctgggcagcctgcctgtggccatcaaggtgatcaagagcgccaacatgaagctgacagacctggccaaggagatccagaccctgaagggcctgcggcatgagcggctcatccggctgcatgctgtgtgcagcggcggggagcctgtgtacatcgtgacagagctgatgaggaaaggaaacctgcaggccttcctgggcaccccagagggccgggccctgcggctgccccccctgctgggctttgcctgccaggtggccgagggcatgagctacctggaggagcagagggtggtgcaccgggacctggccgccagaaatgtgctggtggatgatggcctggcctgcaaggtggccgactttggcctggcccggctgctgaaggatgacatctacagccccagcagcagcagcaagatccctgtgaagtggacagcccctgaggccgccaactacagagtcttcagccagaagagtgatgtgtggagctttggagtgctgctgcacgaggtgttcacctacggccagtgcccctatgagggcatgaccaaccacgagaccctgcagcagatcatgaggggctaccgcctgcccaggcctgctgcctgcccagctgaggtgtatgtgctgatgctggagtgctggaggagcagccctgaggagcggcccagctttgccaccctgcgggagaagctgcacgccatccaccgctgccacccctag

SEQ ID NO: 233255 - DNA, 1467 bp, Artificial Sequence
  derived and/or modified sequence
atggagcccttcctgcggcggcggctggccttcctgagcttcttctgggacaagatttggccagccggcggggaacccgatcacggtacgccaggctcattggatccgaataccgatcccgtcccgactctgcccgctgagccctgttcaccatttcctcagctgtttctcgccctatatgattttaccgcccgctgcggcggtgagctgagcgtgcgtcgcggagatcggctgtgcgctttggaggagggcggtggttacattttcgcgaggcgactctctggtcagccgagtgcgggacttgttccgatcactcacgtcgccaaagcctcgccggagaccttgagcgaccagccatggtatttctccggcgttagccggactcaggcgcagcagcttctgttgagcccaccaaacgagccaggcgcttttctgattcgcccatctgaatcgtccctgggagggtactccctgagcgttcgtgcacaggctaaggtttgccattaccgggtgagtatggctgcggatgggtctctgtatctgcaaaaaggcagactctttcctggtttggaggagctgctcacatattacaaagccaattggaaactgatccagaatcccttgctgcagccatgtatgccccaaaaagcaccccgccaggatgtttgggaaagaccgcatagtgaatttgccctgggccgtaagcttggggaaggctacttcggcgaggtgtgggagggcctgtggctggggagcctgcccgtggccataaaggtcattaaaagcgcaaacatgaagctgacagatctcgcgaaggagatccaaacgttgaagggcctgcgtcacgagagattgatccgattgcatgctgtgtgctccggaggcgagccagtatacatagttacggagctgatgagaaaggggaacctgcaggcctttctcggaacacctgaaggtcgcgcactacgcctgccaccccttctgggatttgcttgtcaagttgccgaaggcatgagctacttggaggagcagcgtgtggtccacagggatctcgctgcccgtaatgtgctggttgatgacggccttgcgtgtaaggtcgccgacttcggcctggcacggctactcaaagacgatatctatagtccaagtagcagctcaaaaattcctgtgaagtggactgcacctgaggctgccaattaccgggtattttcccaaaaaagcgacgtttggtctttcggcgtgctcttgcatgaagtgttcacctacgggcagtgcccttacgaaggcatgacaaaccatgagacactgcaacaaattatgcggggctatagactcccacgcccagctgcttgtcccgcagaagtgtacgtgttgatgctggagtgctggcggagctccccagaagagagaccctcatttgctacgctcagggaaaaacttcatgccatccaccggtgccacccatag

SEQ ID NO: 233256 - DNA, 1467 bp, Artificial Sequence
  derived and/or modified sequence
atggagcccttcttgcgcagacgtctggcgttccttagctttttctgggataagatttggcctgcagggggtgagccagatcatggaaccccaggctctctggaccccaatactgatccagtgccaactctgcctgctgaaccgtgttccccttttccacagttattcctggcgctatacgatttcaccgcaaggtgtggcggagaactgagtgtgcggcgtggtgatcggttatgcgctctggaggaaggaggaggctacatttttgccaggcggttaagcgggcagccatccgcgggacttgtgcccattacacacgtcgcaaaggccagccccgaaaccctttctgatcaaccctggtatttcagtggagtatctcggacgcaggcccaacaacttttattgtctccacctaatgagcccggagcgttcttgatacgcccaagcgaaagctccctgggaggttattccctcagcgtgagagcacaggccaaggtatgccattatagagttagcatggcagccgacggaagtctctacctccagaagggtcgactgtttcctggactcgaagagctccttacatattacaaggctaattggaagctgatacagaaccctctgctacaaccatgcatgccgcagaaggccccacgccaggatgtgtgggagagacctcatagtgagttcgctctaggcaggaagctgggcgagggttactttggtgaggtatgggaaggtttgtggcttgggtcactaccagtcgcaataaaagtcatcaagtcagctaacatgaaactcaccgatctggcgaaagaaatacagaccctgaaggggcttcgccacgagcgcttgattagattgcatgccgtttgcagcggaggtgagccggtgtacatcgtgaccgagctaatgagaaaagggaatctgcaggcatttttggggacgcctgagggccgagctctccgtcttcctccattgctgggtttcgcttgtcaagtggccgagggcatgtcatacctcgaggaacagcgggtggtccaccgggatttagctgctagaaacgtgctcgtcgatgatggccttgcttgcaaggtcgctgattttgggctggcacggctgttgaaggacgacatttacagtcccagttcctcaagtaagatcccagtgaaatggactgcccctgaggcggctaattatcgagtgttttctcagaaaagtgacgtctggagcttcggtgtgctgctccatgaagtgttcacttatggtcaatgcccctacgagggtatgaccaaccatgagaccttgcaacagattatgagaggataccggctgcctaggcccgcagcctgccctgcagaggtctacgttttaatgctggagtgctggcggtcatcgcccgaagagagaccaagctttgctacattgcgggagaagctgcatgcgattcaccggtgtcatccttag

SEQ ID NO: 233257 - DNA, 1516 bp, Artificial Sequence
  derived and/or modified sequence
ggctcccatggccctcgggcccagcgtggtgaccccgggggatggagccgttcctcaggaggcggctggccttcctgtccttcttctgggacaagatctggccggcgggcggcgagccggaccatggcacccccgggtccctggaccccaacactgacccagtgcccacgctccccgccgagccttgcagccccttccctcagctcttccttgcgctctatgacttcacggcgcggtgtggcggggagctgagtgtccgccgcggggacaggctctgtgccctcgaagaggggggcggctacatcttcgcacgcaggctttcgggccagcccagcgccgggctcgtgcccatcacccacgtggccaaggcttctcctgagacgctctcagaccaaccctggtactttagcggggtcagtcggacccaggcacagcagctgctcctctccccacccaacgaaccaggggccttcctcatccggcccagcgagagcagcctcgggggctactcactgtcagtccgggcccaggccaaggtctgccactaccgggtctccatggcagctgatggcagcctctacctgcagaagggacggctctttcccggcctggaggagctgctcacctactacaaggccaactggaagctgatccagaaccccctgctgcagccctgcatgccccagaaggccccgaggcaggacgtgtgggagcggccacactccgaattcgcccttgggaggaagctgggtgaaggctactttggggaggtgtgggaaggcctgtggctgggctccctgcccgtggcgatcaaggtcatcaagtcagccaacatgaagctcactgacctcgccaaggagatccagacactgaagggcctgcggcacgagcggctcatccggctgcacgcagtgtgctcgggcggggagcctgtgtacatcgtcacggaactcatgcgcaaggggaacctgcaggccttcctgggcacccccgagggccgggccctgcgtctgccgccactcctgggctttgcctgccaggtggctgagggcatgagctacctggaggagcagcgcgttgtgcaccgggacttggccgcccggaacgtgctcgtggacgacggcctggcctgcaaggtggctgacttcggcctggcccggctgctcaaggacgacatctactccccgagcagcagctccaagatcccggtcaagtggacagcgcctgaggcggccaattatcgtgtcttctcccagaagtcagacgtctggtccttcggcgtcctgctgcacgaggttttcacctatggccagtgtccctatgaagggatgaccaaccacgagacgctgcagcagatcatgcgagggtaccggctgccgcgcccggctgcctgcccggcggaggtctacgtgctcatgctggagtgctggaggagcagccccgaggaacggccctccttcgccacgctgcgggagaagctgcacgccatccacagatgccacccctgagtcctcac

SEQ ID NO: 233258 - protein, 464 aa, Artificial Sequence
  derived and/or modified sequence
MVRLAAELLLLLGLLLLTLHITVLRGSGAADGPDAAAGNASQAQLQNNLNVGSDTTSETSFSLSKEAPREHLDHQAAHQPFPRPRFRQETGHPSLQRDFPRSFLLDLPNFPDLSKADINGQNPNIQVTIEVVDGPDSEADKDQHPENKPSWSVPSPDWRAWWQRSLSLARANSGDQDYKYDSTSDDSNFLNPPRGWDHTAPGHRTFETKDQPEYDSTDGEGDWSLWSVCSVTCGNGNQKRTRSCGYACTATESRTCDRPNCPGIEDTFRTAATEVSLLAGSEEFNATKLFEVDTDSCERWMSCKSEFLKKYMHKVMNDLPSCPCSYPTEVAYSTADIFDRIKRKDFRWKDASGPKEKLEIYKPTARYCIRSMLSLESTTLAAQHCCYGDNMQLITRGKGAGTPNLISTEFSAELHYKVDVLPWIICKGDWSRYNEARPPNNGQKCTESPSDEDYIKQFQEAREY

SEQ ID NO: 233259 - protein, 418 aa, Artificial Sequence
  derived and/or modified sequence
NNLNVGSDTTSETSFSLSKEAPREHLDHQAAHQPFPRPRFRQETGHPSLQRDFPRSFLLDLPNFPDLSKADINGQNPNIQVTIEVVDGPDSEADKDQHPENKPSWSVPSPDWRAWWQRSLSLARANSGDQDYKYDSTSDDSNFLNPPRGWDHTAPGHRTFETKDQPEYDSTDGEGDWSLWSVCSVTCGNGNQKRTRSCGYACTATESRTCDRPNCPGIEDTFRTAATEVSLLAGSEEFNATKLFEVDTDSCERWMSCKSEFLKKYMHKVMNDLPSCPCSYPTEVAYSTADIFDRIKRKDFRWKDASGPKEKLEIYKPTARYCIRSMLSLESTTLAAQHCCYGDNMQLITRGKGAGTPNLISTEFSAELHYKVDVLPWIICKGDWSRYNEARPPNNGQKCTESPSDEDYIKQFQEAREY

SEQ ID NO: 233260 - DNA, 1395 bp, Artificial Sequence
  derived and/or modified sequence
atggtgaggctggccgctgaactcttacttctgctgggacttctattacttaccctgcacatcaccgtactcagaggcagtggcgctgcggatggcccagacgctgcggctggaaatgcatcccaggcccagttgcagaacaacctgaatgtggggtccgataccacctctgaaacatcatttagcctctcaaaggaggcccctagggaacacttggatcatcaggctgcacaccagcccttccccaggccacgatttcggcaggagaccgggcatcccagtttacagcgggacttcccacgctctttcctgctggacctacctaatttccccgacttgtccaaggccgatatcaatgggcagaaccctaatatacaagtgactatagaagtagtcgatggccctgacagtgaggccgacaaggatcagcatcctgaaaataaaccatcttggagcgtgcctagccccgactggcgagcctggtggcagagatcactgtccctcgccagagctaattctggtgatcaagactataagtatgattcaactagcgacgacagtaattttctgaaccctccacggggttgggatcataccgctcccggacaccgtaccttcgagacgaaagatcaaccagaatatgacagtacggatggagagggcgattggagcctgtggtctgtgtgcagcgtgacatgtggtaatggcaaccagaagaggacacggtcatgcggatacgcgtgcaccgctacggaaagccgcacatgtgatcggccaaattgccctggcatcgaggacacattccgaacagccgctacagaggtatcattgctggccggatctgaagaattcaacgctacaaaattgtttgaagtggacactgattcatgcgaaagatggatgtcatgcaagtcagagttcctcaagaagtacatgcataaggttatgaacgacctcccttcatgcccctgttcctaccccaccgaagtagcctacagtaccgcagatatcttcgacagaatcaaacggaaagatttcagatggaaggacgcctcaggcccaaaggagaaactggagatctataaacctaccgccaggtactgtattaggagcatgctatcgctggagagtaccacgcttgccgctcaacattgctgttatggcgacaacatgcagttgataacccgcggtaagggggcaggtacccccaacttaatttcaaccgagttttccgcggagctgcattacaaagttgacgtgctgccttggattatttgtaaaggcgactggtctagatacaatgaggcacgcccaccaaataatggccagaagtgcaccgagtccccaagtgacgaggactatataaaacaattccaggaggctagagagtattag

SEQ ID NO: 233261 - DNA, 1257 bp, Artificial Sequence
  derived and/or modified sequence
aataatctgaatgttggtagcgacaccacaagcgagacctctttcagcctgtccaaagaagcaccgagggaacatctcgatcatcaagccgctcatcagccattcccaagacctaggtttcgacaggaaactggtcatccgagtctccagagagattttcctcggagctttctcttagacctgcccaactttccagatttaagcaaggccgacatcaacggccaaaatcccaatatccaggttaccattgaggtggtcgacgggcctgactccgaagcagataaagaccagcatcctgagaacaaaccatcttggagtgtgcctagtcctgattggagagcatggtggcagcgttcattatccctggcaagagctaattcaggagaccaagattacaaatatgacagtacaagtgatgactctaattttctgaaccctccacggggttgggatcatacagcccctggacaccggacgttcgagaccaaggaccaaccggagtatgactctactgacggcgagggcgactggtccctttggtcagtatgcagcgtgacatgcggtaacgggaaccagaagaggaccaggtcatgtggatatgcctgtactgcaactgagtcaaggacatgcgacaggcccaattgtcccggaattgaagatacatttcgaactgccgctaccgaagtcagcctccttgctggtagcgaagagttcaacgccacaaagctttttgaagttgataccgactcctgtgaacgctggatgtcttgtaagagtgaattcttaaagaagtacatgcacaaagtgatgaacgacttgccttcttgcccgtgttcttatccaaccgaggtcgcctactctacggcagacattttcgatcgcattaagcgcaaggacttcagatggaaagacgcctccggcccaaaggaaaaattagagatttataagccaacagctaggtattgtatccgaagtatgctgtccctggaatctaccacactggctgcccaacattgctgctacggggataacatgcagttaatcacacgcggtaaaggagcaggcactcccaacctgatcagtaccgagttcagtgcggagcttcactacaaggtagatgtgctcccatggatcatctgtaagggtgattggtctaggtataatgaggcccgtccaccgaacaatggccaaaagtgcaccgaatcaccgtcagatgaggactatataaagcagttccaggaagcaagggagtattag

SEQ ID NO: 233262 - DNA, 1395 bp, Artificial Sequence
  derived and/or modified sequence
atggtgcggctggccgctgagctcctgctgcttctgggtctgctactcttaaccctgcacatcaccgtgttacgcgggagcggagccgcagatggacctgatgcagccgccggcaatgcatcccaagcacaactgcagaacaacctaaacgtaggctctgacactacctctgaaacctctttttctcttagcaaagaggcccctagagagcaccttgatcaccaagcggcgcaccagccttttccccggccccgattccggcaggagacagggcatccttcactccagcgagacttccctcgctcttttctcctcgatctccccaattttcctgatctgagtaaggctgatattaacgggcaaaatcccaacattcaagtaaccatcgaggtcgtcgacggcccagacagcgaggccgataaagatcagcaccccgagaataaaccatcttggtctgtaccctctcccgactggcgcgcctggtggcaacggtcattatcattggctagggccaacagtggcgatcaggactacaaatatgactctacgtctgatgatagcaacttcctcaaccctccgaggggatgggaccatacggctccgggacatagaacttttgaaactaaagaccaacccgagtacgattctacagatggagagggcgattggtcattgtggtccgtgtgtagcgtgacatgtggcaatggaaatcagaagcggactcgatcctgcggatacgcctgcacagcgactgagagcagaacctgcgacagaccaaattgtcccggaatcgaggatacctttcgcaccgcagctaccgaggtctctcttctggcaggcagcgaggagttcaacgccacaaagttatttgaagtcgatacagactcttgtgagagatggatgtcctgcaagtcggagtttttgaaaaagtacatgcacaaagttatgaatgaccttccttcttgtccttgcagctatcctaccgaagtggcttatagtaccgccgatatctttgatagaatcaaaagaaaagattttagatggaaagacgcttctggtcctaaagagaaactagagatctacaaaccaaccgcaagatactgcatacgatcgatgctttccctggagtcaaccacactcgctgctcagcactgttgttacggcgacaacatgcaactaataacaaggggaaagggcgccggcaccccaaacctgatttctacagaattctctgccgaactccactacaaggtcgacgttttgccttggatcatttgtaaaggcgactggtcccgctacaacgaggcaaggccaccaaataatggccagaaatgcaccgaaagtccatcagatgaggactatatcaagcagttccaggaagctcgcgaatattag

SEQ ID NO: 233263 - DNA, 1257 bp, Artificial Sequence
  derived and/or modified sequence
aataaccttaatgtcgggtctgacactaccagtgaaacaagcttttctctaagcaaagaggcccctcgtgaacacctggaccaccaagccgctcaccaaccctttccgcgcccaagatttaggcaggagaccggacatccatcactccaacgagactttccccgctcctttttgctcgatcttccaaattttccagacctctccaaagctgacatcaacggccagaaccccaatattcaggttacaatcgaggtggtcgatgggccagacagcgaggctgataaagatcagcacccagagaataagccatcatggtcagtgcccagtccggattggcgggcctggtggcagcgaagtctgtcactcgccagggcgaatagcggggaccaagattataaatacgacagtacttcggatgacagcaatttccttaacccaccacgtggttgggatcatacggcccccggacatagaacctttgagaccaaggatcagcccgaatacgactcaacagacggggagggcgattggtcactctggtcagtgtgctctgttacttgtggtaatgggaatcagaaacgcactaggagttgtggttacgcctgcaccgccacagaatcccggacctgcgaccgacctaactgcccaggtatcgaggatacctttcgtacagctgccacagaagtctctttacttgcgggctctgaagaatttaatgctactaaactcttcgaagtggacactgatagctgtgaacgctggatgtcttgcaagagcgagttcctcaaaaagtacatgcataaagtgatgaacgacctgcctagttgtccctgttcttacccaaccgaggtggcttacagtaccgccgacatattcgacaggatcaagcgtaaagattttagatggaaagacgccagcggcccaaaggaaaaactggagatctataagcctactgcccgttattgcatcagatcaatgctgtcacttgaaagtacaaccttggccgcccaacactgctgttatggggataatatgcagctgatcactagagggaaaggggccggaacaccaaatctgataagcaccgagttttcagcagagttgcactataaggtagatgtgttaccttggataatctgcaagggggattggtccaggtataacgaagcacgccccccaaacaatggccagaaatgcaccgagagtcccagtgatgaagactatatcaagcagtttcaggaggcaagagagtattag

SEQ ID NO: 233264 - DNA, 1395 bp, Artificial Sequence
  derived and/or modified sequence
atggtgaggctggctgctgagctcctcctcctcctaggcctcctgctcttgacgttacacatcactgtccttaggggttccggagccgctgacggccctgatgccgctgcaggaaacgcaagtcaggcacagctgcagaacaacctcaacgtcggatccgatacaacgagcgagacttcattttccctctcaaaggaggcaccccgcgaacatctcgaccatcaggctgctcatcagcctttcccccggccccgcttcaggcaagagactggccatccttcccttcaaagagactttcccaggagcttcctacttgatttgcccaactttcctgacctgagcaaagctgatataaacggacaaaaccccaacattcaagtgactatcgaggtggttgacgggccagactcagaggcggacaaagaccaacacccagagaataaaccttcatggagtgtacccagtccagattggcgtgcatggtggcaaaggagcctgagcctggctagagcgaactccggagatcaagattacaaatatgacagtacaagcgacgattcaaatttcctcaacccacccaggggatgggatcataccgccccgggacatagaacttttgaaactaaagaccaacccgagtacgattctacagatggagagggcgattggtcattgtggtccgtgtgtagcgtgacatgtggcaatggaaatcagaagcggactcgatcctgcggatacgcctgcacagcgactgagagcagaacctgcgacagaccaaattgtcccggaatcgaggatacctttcgcaccgcagctaccgaggtctctcttctggcaggcagcgaggagttcaacgccacaaagttatttgaagtcgatacagactcttgtgagagatggatgtcctgcaagtcggagtttttgaaaaagtacatgcacaaagttatgaatgaccttccttcttgtccttgcagctatcctaccgaagtggcttatagtaccgccgatatctttgatagaatcaaaagaaaagattttagatggaaagacgcttctggtcctaaagagaaactagagatctacaaaccaaccgcaagatactgcatacgatcgatgctttccctggagtcaaccacactcgctgctcagcactgttgttacggcgacaacatgcaactaataacaaggggaaagggcgccgggaccccgaatttaatatctacggaattcagtgctgaactacattataaagtggacgtgctaccatggattatctgtaaaggcgattggtcaaggtacaacgaagcaagacctccgaacaatggtcagaaatgcaccgaatccccctctgatgaagactatataaaacagtttcaggaagcaagggagtactag

SEQ ID NO: 233265 - DNA, 2449 bp, Artificial Sequence
  derived and/or modified sequence
aataacctcaacgtgggaagtgacaccacatcagaaaccagcttttctctctccaaagaagcaccaagggagcatctggaccaccaggctgcacaccaacccttccccagaccgcgattccgacaagagacggggcacccttcattgcaaagagatttccccagatcctttctccttgatctaccaaactttccagatctttccaaagctgatatcaatgggcagaatccaaatatccaggtcaccatagaggtggtcgacggtcctgactctgaagcagataaagatcagcatccggagaataagcccagctggtcagtcccatcccccgactggcgggcctggtggcagaggtccctgtccttggccagggcaaacagcggggaccaggactacaagtacgacagtacctcagacgacagcaacttcctcaacccccccagggggtgggaccatacagccccaggccaccggacttttgaaaccaaagatcagccagaatatgattccacagatggcgagggtgactggagtctctggtctgtctgcagcgtcacctgcgggaacggcaaccagaaacggacccggtcttgtggctacgcgtgcactgcaacagaatcgaggacctgtgaccgtccaaactgcccaggaattgaagacacttttaggacagctgccaccgaagtgagtctgcttgcgggaagcgaggagtttaatgccaccaaactgtttgaagttgacacagacagctgtgagcgctggatgagctgcaaaagcgagttcttaaagaagtacatgcacaaggtgatgaatgacctgcccagctgcccctgctcctaccccactgaggtggcctacagcacggccgacatcttcgaccgcatcaagcgcaaggacttccgctggaaggacgccagcgggcccaaggagaagctggagatctacaagcccactgcccggtactgcatccgctccatgctgtccctggagagcaccacgctggcggcacagcactgctgctacggcgacaacatgcagctcatcaccaggggcaagggggcgggcacgcccaacctcatcagcaccgagttctccgcggagctccactacaaggtggacgtcctgccctggattatctgcaagggtgactggagcaggtataacgaggcccggcctcccaacaacggacagaagtgcacagagagcccctcggacgaggactacatcaagcagttccaagaggccagggaatattaaagagactgggatgaggtggaggacgctgcctctggttctggagcacacacgtgctgcactgacgtgccgactggcgccgagaccttcatagctgcggtcgtgtatatttgtatataccacatgagtatttctcatacattacgctaggggcgtgtgccacgcccaggggactgccttgtgaagccgccctcgccatctgcagagctccttgaaagtgcccctggggagcgatgtgggcagaaggatggggacaacttggaagccagaagaagaacctggaagccacagtgggtgcgactcaattcacacccggatccagagtttcaaagagaggcaaagggggaaagagactgaggttgtaaacgttataagcagtttttatatataacttatttaatacaaatgtgacttaattaagcgtaaccttttctctggagttgtggtgaaactaatcacgtctgtgagagatcagaaagaaagagacttagggaagtggaagagaaagggaattttggaatttatttctttaaaaataatgcaatggaaatatatcaaaacatgtaaacgcccaccttaaaccaaatgttatttggtcatgaggcaccttgctggagtctcagattccaaaagtctcttcttcagactgggtagggaatatgatattttagggacaaagctgaggactggttttaaataggctttaaaataaaagatcaatattatcataatgctatcattctgctaaacggccccaaaacagtagaatttctgctcatgtcctagcaggttcagaagactgcagccaagttcagatgtaaaaacaagaagtagcacttttccaaaggaaaacaacaaaacaaatgggaaaaagataatggaccgcatttcacctattttaatactattttaacaattttttcatctaccaatatatccccaataaataaatataaaagggggggagggtcaatctggggaatcttagttttttatgttttaagaaaacaaaaaaaactgcattatttttgtaaagtatttattgagtcacggattattgtgcatcaagcaattgttaatatgacctggtcctatggggtagaacttaggaaaaataaagttggttcttattcaatattttactttgcaaaattctagtaaaagagagtatataataaaatcataataaaaggtg

SEQ ID NO: 233266 - DNA, 1257 bp, Artificial Sequence
  derived and/or modified sequence
aataaccttaatgtcgggtctgacactaccagtgaaacaagcttttctctaagcaaagaggcccctcgtgaacacctggaccaccaagccgctcaccaaccctttccgcgcccaagatttaggcaggagaccggacatccatcactccaacgagactttccccgctcctttttgctcgatcttccaaattttccagacctctccaaagctgacatcaacggccagaaccccaatattcaggttacaatcgaggtggtcgatgggccagacagcgaggctgataaagatcagcacccagagaataaaccatcgtggagcgtgccttccccagactggagagcatggtggcagcgatccttgtctctggctagggcgaacagtggagatcaagattacaaatatgattctacttctgacgattccaacttccttaaccctccccgcggctgggaccatactgcgccgggacatcgtaccttcgaaaccaaagaccaacctgagtatgactccacagatggcgaaggagactggtcgctttggagcgtctgcagtgtaacatgtgggaacggtaatcagaaacgcacacgatcctgtgggtatgcctgcaccgctactgagtctcgcacctgtgataggcccaattgcccaggaattgaggatactttccgaacagccgctaccgaagtaagtttactcgctggtagcgaagaattcaatgccaccaaactgtttgaagtcgatactgattcttgcgagagatggatgagctgcaaatccgagttcctgaagaagtatatgcacaaagttatgaatgacctccctagctgtccctgctcatatcctaccgaagtagcctattctacagccgacatattcgaccggatcaagagaaaagatttcagatggaaagacgccagcggcccaaaggaaaaactggagatctataagcctactgcccgttattgcatcagatcaatgctgtcacttgaaagtacaaccttggccgcccaacactgctgttatggggataatatgcagctgatcactagagggaaaggggccggaacaccaaatctgataagcaccgagttttcagcagagttgcactataaggtagatgtgttaccttggataatctgcaagggggattggtccaggtataacgaagcacgccccccaaacaatggccagaaatgcaccgagagcccatccgatgaagactatatcaagcagttccaagaagcacgtgaatattag

SEQ ID NO: 233267 - DNA, 2592 bp, Artificial Sequence
  derived and/or modified sequence
aaaaggatggtgcgcctggcggccgagctgctgctgctgctggggctgctgctgctcacgctgcacatcaccgtgctgcgcggctcgggagccgccgacgggcccgacgcggccgcgggcaacgccagccaagcccagctgcagaataacctcaacgtgggaagtgacaccacatcagaaaccagcttttctctctccaaagaagcaccaagggagcatctggaccaccaggctgcacaccaacccttccccagaccgcgattccgacaagagacggggcacccttcattgcaaagagatttccccagatcctttctccttgatctaccaaactttccagatctttccaaagctgatatcaatgggcagaatccaaatatccaggtcaccatagaggtggtcgacggtcctgactctgaagcagataaagatcagcatccggagaataagcccagctggtcagtcccatcccccgactggcgggcctggtggcagaggtccctgtccttggccagggcaaacagcggggaccaggactacaagtacgacagtacctcagacgacagcaacttcctcaacccccccagggggtgggaccatacagccccaggccaccggacttttgaaaccaaagatcagccagaatatgattccacagatggcgagggtgactggagtctctggtctgtctgcagcgtcacctgcgggaacggcaaccagaaacggacccggtcttgtggctacgcgtgcactgcaacagaatcgaggacctgtgaccgtccaaactgcccaggaattgaagacacttttaggacagctgccaccgaagtgagtctgcttgcgggaagcgaggagtttaatgccaccaaactgtttgaagttgacacagacagctgtgagcgctggatgagctgcaaaagcgagttcttaaagaagtacatgcacaaggtgatgaatgacctgcccagctgcccctgctcctaccccactgaggtggcctacagcacggccgacatcttcgaccgcatcaagcgcaaggacttccgctggaaggacgccagcgggcccaaggagaagctggagatctacaagcccactgcccggtactgcatccgctccatgctgtccctggagagcaccacgctggcggcacagcactgctgctacggcgacaacatgcagctcatcaccaggggcaagggggcgggcacgcccaacctcatcagcaccgagttctccgcggagctccactacaaggtggacgtcctgccctggattatctgcaagggtgactggagcaggtataacgaggcccggcctcccaacaacggacagaagtgcacagagagcccctcggacgaggactacatcaagcagttccaagaggccagggaatattaaagagactgggatgaggtggaggacgctgcctctggttctggagcacacacgtgctgcactgacgtgccgactggcgccgagaccttcatagctgcggtcgtgtatatttgtatataccacatgagtatttctcatacattacgctaggggcgtgtgccacgcccaggggactgccttgtgaagccgccctcgccatctgcagagctccttgaaagtgcccctggggagcgatgtgggcagaaggatggggacaacttggaagccagaagaagaacctggaagccacagtgggtgcgactcaattcacacccggatccagagtttcaaagagaggcaaagggggaaagagactgaggttgtaaacgttataagcagtttttatatataacttatttaatacaaatgtgacttaattaagcgtaaccttttctctggagttgtggtgaaactaatcacgtctgtgagagatcagaaagaaagagacttagggaagtggaagagaaagggaattttggaatttatttctttaaaaataatgcaatggaaatatatcaaaacatgtaaacgcccaccttaaaccaaatgttatttggtcatgaggcaccttgctggagtctcagattccaaaagtctcttcttcagactgggtagggaatatgatattttagggacaaagctgaggactggttttaaataggctttaaaataaaagatcaatattatcataatgctatcattctgctaaacggccccaaaacagtagaatttctgctcatgtcctagcaggttcagaagactgcagccaagttcagatgtaaaaacaagaagtagcacttttccaaaggaaaacaacaaaacaaatgggaaaaagataatggaccgcatttcacctattttaatactattttaacaattttttcatctaccaatatatccccaataaataaatataaaagggggggagggtcaatctggggaatcttagttttttatgttttaagaaaacaaaaaaaactgcattatttttgtaaagtatttattgagtcacggattattgtgcatcaagcaattgttaatatgacctggtcctatggggtagaacttaggaaaaataaagttggttcttattcaatattttactttgcaaaattctagtaaaagagagtatataataaaatcataataaaaggt

SEQ ID NO: 233268 - DNA, 1395 bp, Artificial Sequence
  derived and/or modified sequence
atggtgagactggccgccgagctgctgctgctgctgggcctgctgctgctgaccctgcacatcaccgtgctgagaggcagcggcgccgccgacggccccgacgccgccgccggcaacgccagccaggcccagctgcagaacaacctgaacgtgggcagcgacaccaccagcgagaccagcttcagcctgagcaaggaggcccccagagagcacctggaccaccaggccgcccaccagcccttccccagacccagattcagacaggagaccggccaccccagcctgcagagagacttccccagaagcttcctgctggacctgcccaacttccccgacctgagcaaggccgacatcaacggccagaaccccaacatccaggtgaccatcgaggtggtggacggccccgacagcgaggccgacaaggaccagcaccccgagaacaagcccagctggagcgtgcccagccccgactggagagcctggtggcagagaagcctgagcctggccagagccaacagcggcgaccaggactacaagtacgacagcaccagcgacgacagcaacttcctgaacccccccagaggctgggaccacaccgcccccggccacagaaccttcgagaccaaggaccagcccgagtacgacagcaccgacggcgagggcgactggagcctgtggagcgtgtgcagcgtgacctgcggcaacggcaaccagaagagaaccagaagctgcggctacgcctgcaccgccaccgagagcagaacctgcgacagacccaactgccccggcatcgaggacaccttcagaaccgccgccaccgaggtgagcctgctggccggcagcgaggagttcaacgccaccaagctgttcgaggtggacaccgacagctgcgagagatggatgagctgcaagagcgagttcctgaagaagtacatgcacaaggtgatgaacgacctgcccagctgcccctgcagctaccccaccgaggtggcctacagcaccgccgacatcttcgacagaatcaagagaaaggacttcagatggaaggacgccagcggccccaaggagaagctggagatctacaagcccaccgccagatactgcatcagaagcatgctgagcctggagagcaccaccctggccgcccagcactgctgctacggcgacaacatgcagctgatcaccagaggcaagggcgccggcacccccaacctgatcagcaccgagttcagcgccgagctgcactacaaggtggacgtgctgccctggatcatctgcaagggcgactggagcagatacaacgaggccagaccccccaacaacggccagaagtgcaccgagagccccagcgacgaggactacatcaagcagttccaggaggccagagagtactag

SEQ ID NO: 233269 - DNA, 1257 bp, Artificial Sequence
  derived and/or modified sequence
aacaacctgaacgtgggcagcgacaccaccagcgagaccagcttcagcctgagcaaggaggcccccagagagcacctggaccaccaggccgcccaccagcccttccccagacccagattcagacaggagaccggccaccccagcctgcagagagacttccccagaagcttcctgctggacctgcccaacttccccgacctgagcaaggccgacatcaacggccagaaccccaacatccaggtgaccatcgaggtggtggacggccccgacagcgaggccgacaaggaccagcaccccgagaacaagcccagctggagcgtgcccagccccgactggagagcctggtggcagagaagcctgagcctggccagagccaacagcggcgaccaggactacaagtacgacagcaccagcgacgacagcaacttcctgaacccccccagaggctgggaccacaccgcccccggccacagaaccttcgagaccaaggaccagcccgagtacgacagcaccgacggcgagggcgactggagcctgtggagcgtgtgcagcgtgacctgcggcaacggcaaccagaagagaaccagaagctgcggctacgcctgcaccgccaccgagagcagaacctgcgacagacccaactgccccggcatcgaggacaccttcagaaccgccgccaccgaggtgagcctgctggccggcagcgaggagttcaacgccaccaagctgttcgaggtggacaccgacagctgcgagagatggatgagctgcaagagcgagttcctgaagaagtacatgcacaaggtgatgaacgacctgcccagctgcccctgcagctaccccaccgaggtggcctacagcaccgccgacatcttcgacagaatcaagagaaaggacttcagatggaaggacgccagcggccccaaggagaagctggagatctacaagcccaccgccagatactgcatcagaagcatgctgagcctggagagcaccaccctggccgcccagcactgctgctacggcgacaacatgcagctgatcaccagaggcaagggcgccggcacccccaacctgatcagcaccgagttcagcgccgagctgcactacaaggtggacgtgctgccctggatcatctgcaagggcgactggagcagatacaacgaggccagaccccccaacaacggccagaagtgcaccgagagccccagcgacgaggactacatcaagcagttccaggaggccagagagtactag

SEQ ID NO: 233270 - DNA, 1395 bp, Artificial Sequence
  derived and/or modified sequence
atggtgaggcttgcagcagagctgctcctgcttctgggacttctgctgttaacactccacatcactgtgttgcgtgggtcaggtgccgcagacggtcctgacgccgccgccggaaatgctagccaggcccagctgcagaataacctgaacgtcgggtccgacacgaccagtgaaactagcttctccctcagcaaggaggctcctcgggagcatctggaccaccaggcagctcatcaacccttcccaagaccgaggttcaggcaggaaacaggtcatccctctctgcagcgcgactttcccaggtcgttccttctggatcttcctaattttcctgatctcagcaaggctgacattaacggacagaacccaaacatacaggtgacaattgaggttgtggacggacctgacagtgaggccgacaaagatcagcatcccgagaacaaaccgagctggtctgtgccctctcctgattggagagcatggtggcagcgcagcctgtctctggcgagagcaaactccggcgatcaggactacaaatacgatagcacgtccgatgactcaaacttcctcaatccccccagagggtgggatcacaccgccccaggccaccggaccttcgaaaccaaggaccagcccgaatacgacagtactgacggggagggcgactggtctctctggtcagtctgcagtgtgacgtgtgggaacggaaaccaaaaacggactaggtcctgtggatacgcatgcaccgctactgaaagcaggacatgtgacagacccaattgcccagggattgaggatacttttagaactgccgccacagaagtgagcttgctagccggctcagaggagtttaacgccacaaaattgttcgaagtggatacagacagttgtgaaaggtggatgtcttgcaaatctgagtttcttaagaaatacatgcacaaggttatgaacgaccttccgtcatgtccatgctcttacccaacggaagtagcatacagcaccgcagacatcttcgatcgaatcaaacgcaaggatttccgttggaaggatgcatctgggcccaaggagaagttggaaatctataagcccacggcaaggtactgcattaggagtatgctctccttggagtcaacaacccttgccgcccagcactgctgttatggtgacaacatgcagctgataacccgcggaaaaggggccgggactcctaacctcatctctactgagttctcagctgagctccactataaagtggacgttcttccttggattatttgcaagggtgactggtctcgatacaatgaggctaggccacccaataacggtcagaagtgcaccgagtcaccttccgatgaggactacatcaagcagttccaggaggctagggaatactag

SEQ ID NO: 233271 - DNA, 1257 bp, Artificial Sequence
  derived and/or modified sequence
aataacctgaacgtcggctctgatactacttcagagacatcattcagcttatcaaaggaagccccgcgagagcacttagatcaccaggccgcacaccaaccctttccccggccccgattcagacaggaaaccggacaccccagcctgcaacgggactttcctcgaagcttcttgctcgaccttcctaatttcccagatctgtctaaagcggatattaatgggcagaaccctaatatccaggtgactatcgaagtggtcgatggacctgattccgaagccgataaggaccagcatcccgagaacaagccaagttggtccgtacccagcccagactggagggcttggtggcagcggagtctgagtctggccagagccaacagcggcgaccaggactacaagtatgactccacctccgatgacagcaacttcctcaatccccccagggggtgggatcataccgcacctggccatcggaccttcgagacaaaggatcaacctgaatatgatagcactgacggagaaggggattggtccttgtggtctgtgtgctctgtgacgtgtggaaacggcaaccagaagaggaccaggtcatgcgggtatgcctgcaccgccacggaatcccgcacgtgtgataggccgaattgtccaggcattgaagatactttccggactgccgcgaccgaggtcagccttctcgcagggtccgaagagttcaatgctactaaactgttcgaagttgatactgatagttgtgaacgttggatgtcctgtaaatccgaattcttgaaaaaatatatgcataaggtgatgaatgatcttccctcctgtccatgctcctaccctaccgaagtggcgtactccacagccgacattttcgatcgaattaaaagaaaggatttccggtggaaagatgcttccgggccgaaagaaaaattagaaatctataaaccaaccgcaagatactgcattagatccatgttaagcctcgaatccaccaccctggctgcgcagcactgctgttacggcgacaacatgcagctcattacacggggaaaaggtgccggcaccccaaatttaatatccactgaattctcagccgagctgcactacaaggtcgatgtcctgccctggattatctgtaagggcgattggagtcgatataacgaggcacgtccacctaacaacggtcagaagtgcacagagtcccccagcgatgaggattatatcaaacagtttcaggaggccagagaatattag

SEQ ID NO: 233272 - DNA, 1395 bp, Artificial Sequence
  derived and/or modified sequence
atggtgcggctggccgctgagctgctgctgctgctgggcctgctgctgctgaccctgcacatcaccgtgctgcggggcagcggggctgctgatggcccagatgctgctgctggaaatgccagccaggcccagctgcagaacaacctgaatgtgggcagtgacaccaccagcgagaccagcttcagcctgagcaaggaggccccccgggagcacctggaccaccaggccgcccaccagcccttcccccggccccgcttccggcaggagaccggccaccccagcctgcagagggacttccccaggagcttcctgctggacctgcccaacttcccagacctgagcaaggctgacatcaatggccagaaccccaacatccaggtgaccatcgaggtggtggatggcccagattctgaggccgacaaggaccagcaccctgagaacaagcccagctggagcgtgcccagcccagactggagggcctggtggcagaggagcctgagcctggcccgggccaacagcggggaccaggactacaagtatgacagcaccagtgatgacagcaacttcctgaaccccccccggggctgggaccacacagcccctggccacaggacctttgagaccaaggaccagccagaatatgacagcacagatggagagggggactggagcctgtggagcgtgtgcagcgtgacctgtggaaatggaaaccagaagaggaccaggagctgtggctacgcctgcacagccacagagagcaggacctgtgaccggcccaactgccccggcatcgaggacaccttcagaacagctgccacagaggtgtccctgctggccggcagcgaggagttcaatgccaccaagctgtttgaggtggacacagacagctgtgagcgctggatgagctgcaagtctgagttcctgaagaagtacatgcacaaggtgatgaatgacctgcccagctgcccctgcagctaccccacagaggtggcctacagcacagctgacatctttgaccgcatcaagaggaaggacttccgctggaaggatgccagcggccccaaggagaagctggagatctacaagcccacagcccgctactgcatccgctccatgctgagcctggagagcaccaccctggccgcccagcactgctgctatggagacaacatgcagctgatcacccggggcaagggggccggcacccccaacctgatcagcacagagttctctgctgagctgcactacaaggtggatgtgctgccctggatcatctgcaagggggactggagccgctacaatgaggcccggccccccaacaacggccagaagtgcacagagagccccagtgatgaggactacatcaagcagttccaggaggcccgggagtactag

SEQ ID NO: 233273 - DNA, 1257 bp, Artificial Sequence
  derived and/or modified sequence
aacaacctgaatgtgggcagtgacaccaccagcgagaccagcttcagcctgagcaaggaggccccccgggagcacctggaccaccaggccgcccaccagcccttcccccggccccgcttccggcaggagaccggccaccccagcctgcagagggacttccccaggagcttcctgctggacctgcccaacttcccagacctgagcaaggctgacatcaatggccagaaccccaacatccaggtgaccatcgaggtggtggatggcccagattctgaggccgacaaggaccagcaccctgagaacaagcccagctggagcgtgcccagcccagactggagggcctggtggcagaggagcctgagcctggcccgggccaacagcggggaccaggactacaagtatgacagcaccagtgatgacagcaacttcctgaaccccccccggggctgggaccacacagcccctggccacaggacctttgagaccaaggaccagccagaatatgacagcacagatggagagggggactggagcctgtggagcgtgtgcagcgtgacctgtggaaatggaaaccagaagaggaccaggagctgtggctacgcctgcacagccacagagagcaggacctgtgaccggcccaactgccccggcatcgaggacaccttcagaacagctgccacagaggtgtccctgctggccggcagcgaggagttcaatgccaccaagctgtttgaggtggacacagacagctgtgagcgctggatgagctgcaagtctgagttcctgaagaagtacatgcacaaggtgatgaatgacctgcccagctgcccctgcagctaccccacagaggtggcctacagcacagctgacatctttgaccgcatcaagaggaaggacttccgctggaaggatgccagcggccccaaggagaagctggagatctacaagcccacagcccgctactgcatccgctccatgctgagcctggagagcaccaccctggccgcccagcactgctgctatggagacaacatgcagctgatcacccggggcaagggggccggcacccccaacctgatcagcacagagttctctgctgagctgcactacaaggtggatgtgctgccctggatcatctgcaagggggactggagccgctacaatgaggcccggccccccaacaacggccagaagtgcacagagagccccagtgatgaggactacatcaagcagttccaggaggcccgggagtactag

SEQ ID NO: 233274 - DNA, 1395 bp, Artificial Sequence
  derived and/or modified sequence
atggtgcggctggccgccgagctgctgctgctgctgggcctgctgttacttactttacacatcacagttctacggggttcaggagctgctgacggacccgacgctgccgcgggaaacgcctctcaggcccagttgcagaacaacctgaatgtcggaagcgacacaacgagtgaaacaagcttttccctatctaaagaggctcctcgggagcacctggaccaccaggccgcccaccagccgtttccacggccacgtttccggcaggagactgggcatccttcacttcagagggactttccaagatcatttttgctggacctgcccaactttcccgacctgagtaaagcagacattaacgggcagaaccccaacatccaggttaccattgaagttgtagacggtcctgatagcgaggcagacaaggaccaacaccctgaaaacaaacccagttggagtgtgccttccccagactggcgagcttggtggcagagaagtctgagtctggctcgcgccaactctggcgaccaggattacaaatacgactccacttcagacgacagtaatttcctgaaccctccaaggggttgggaccacaccgctcccgggcaccggacgtttgaaacaaaagatcagccggagtacgattctacagacggggaaggggactggagcttgtggagtgtctgttcggtcacctgcggtaatggaaaccagaaaaggaccaggagctgtgggtacgcctgcactgcaaccgagtctagaacctgcgacaggccaaattgtcccggaattgaagataccttccgcaccgctgctacagaggtctctctgctcgccgggagcgaagagtttaacgccactaaactgtttgaagtggacactgactcttgtgagcggtggatgtcttgcaagtcagagttcctgaaaaagtacatgcacaaagtgatgaatgatttaccatcttgtccatgcagttatcctactgaagtggcgtattcaacagcagacatctttgaccgtattaagcgcaaggatttccgatggaaagatgcatctgggccaaaagagaaattggagatctacaaacctactgccagatattgtattcgttcaatgctttccctggagagcacgaccttggctgcacagcattgctgctatggggataacatgcaactaatcacaaggggcaaaggggccggaactccgaacctgatctcaacggagttttctgcagagttgcactataaagttgacgtgcttccctggatcatctgcaaaggggactggtcaagatataacgaagccagaccacccaataacggtcagaagtgtacagagtcaccttccgacgaggactacataaagcagtttcaggaagctcgagagtattag

SEQ ID NO: 233275 - DNA, 1257 bp, Artificial Sequence
  derived and/or modified sequence
aacaacctgaacgtgggcagcgacaccaccagcgagaccagcttctcactttccaaggaagcccctcgagagcacttggatcatcaggcggcccatcagccattcccccggcccagattccgtcaggagaccgggcacccgagcctgcaacgtgacttccccaggtccttcttactggatctgcctaatttccccgacctcagcaaagccgacataaatggccagaaccccaatatccaggtcaccattgaggtcgtagatggaccggatagcgaggcagacaaagaccagcaccccgagaacaaaccctcttggtcagtcccatcccctgattggagagcgtggtggcagcggtccctctcactcgctcgcgccaactctggagatcaggactataagtacgactctactagcgatgactcgaattttttgaatccaccccgggggtgggaccacaccgctcccggccatcgcaccttcgagaccaaggatcagcccgagtatgacagcacagacggggaaggagactggagcctgtggagcgtttgctccgtcacttgtggcaacggcaatcaaaaaagaactagatcatgtggttacgcctgcacagccacagagtccaggacatgcgatcgacctaattgccctgggattgaagatacattccgaacagccgcaaccgaagtcagcctgctggccggtagtgaagaatttaatgccactaaactgtttgaggtggacacggacagttgcgaacgatggatgtcatgcaaatccgagttcctcaagaaatatatgcataaggttatgaatgatcttccatcctgcccctgctcctaccctaccgaggttgcttactctaccgccgatattttcgatagaatcaagcgtaaggattttaggtggaaggatgcctcaggaccaaaggaaaaactcgaaatttacaagcctaccgcgaggtactgtatccggtccatgctgagtcttgagtctactacccttgcggcgcagcattgctgttacggtgacaacatgcaactgatcacacgagggaaaggcgctgggactcctaacctcataagtactgagttctctgctgaattacactacaaggtagatgtcctgccatggatcatatgtaaaggagactggtcaaggtataacgaagcgcgaccacccaataatggccagaaatgtaccgaatctccctctgacgaggactatataaagcagtttcaggaggccagggaatactag

SEQ ID NO: 233276 - RNA, 1395 nt, Artificial Sequence
  derived and/or modified sequence
auggugcggcuggccgcugagcuccugcugcuucugggucugcuacucuuaacccugcacaucaccguguuacgcgggagcggagccgcagauggaccugaugcagccgccggcaaugcaucccaagcacaacugcagaacaaccuaaacguaggcucugacacuaccucugaaaccucuuuuucucuuagcaaagaggccccuagagagcaccuugaucaccaagcggcgcaccagccuuuuccccggccccgauuccggcaggagacagggcauccuucacuccagcgagacuucccucgcucuuuucuccucgaucuccccaauuuuccugaucugaguaaggcugauauuaacgggcaaaaucccaacauucaaguaaccaucgaggucgucgacggcccagacagcgaggccgauaaagaucagcaccccgagaauaaaccaucuuggucuguacccucucccgacuggcgcgccugguggcaacggucauuaucauuggcuagggccaacaguggcgaucaggacuacaaauaugacucuacgucugaugauagcaacuuccucaacccuccgaggggaugggaccauacggcuccgggacauagaacuuuugaaacuaaagaccaacccgaguacgauucuacagauggagagggcgauuggucauugugguccguguguagcgugacauguggcaauggaaaucagaagcggacucgauccugcggauacgccugcacagcgacugagagcagaaccugcgacagaccaaauugucccggaaucgaggauaccuuucgcaccgcagcuaccgaggucucucuucuggcaggcagcgaggaguucaacgccacaaaguuauuugaagucgauacagacucuugugagagauggauguccugcaagucggaguuuuugaaaaaguacaugcacaaaguuaugaaugaccuuccuucuuguccuugcagcuauccuaccgaaguggcuuauaguaccgccgauaucuuugauagaaucaaaagaaaagauuuuagauggaaagacgcuucugguccuaaagagaaacuagagaucuacaaaccaaccgcaagauacugcauacgaucgaugcuuucccuggagucaaccacacucgcugcucagcacuguuguuacggcgacaacaugcaacuaauaacaaggggaaagggcgccggcaccccaaaccugauuucuacagaauucucugccgaacuccacuacaaggucgacguuuugccuuggaucauuuguaaaggcgacuggucccgcuacaacgaggcaaggccaccaaauaauggccagaaaugcaccgaaaguccaucagaugaggacuauaucaagcaguuccaggaagcucgcgaauauuag

SEQ ID NO: 233277 - RNA, 1257 nt, Artificial Sequence
  derived and/or modified sequence
aauaaccuuaaugucgggucugacacuaccagugaaacaagcuuuucucuaagcaaagaggccccucgugaacaccuggaccaccaagccgcucaccaacccuuuccgcgcccaagauuuaggcaggagaccggacauccaucacuccaacgagacuuuccccgcuccuuuuugcucgaucuuccaaauuuuccagaccucuccaaagcugacaucaacggccagaaccccaauauucagguuacaaucgagguggucgaugggccagacagcgaggcugauaaagaucagcacccagagaauaagccaucauggucagugcccaguccggauuggcgggccugguggcagcgaagucugucacucgccagggcgaauagcggggaccaagauuauaaauacgacaguacuucggaugacagcaauuuccuuaacccaccacgugguugggaucauacggcccccggacauagaaccuuugagaccaaggaucagcccgaauacgacucaacagacggggagggcgauuggucacucuggucagugugcucuguuacuugugguaaugggaaucagaaacgcacuaggaguugugguuacgccugcaccgccacagaaucccggaccugcgaccgaccuaacugcccagguaucgaggauaccuuucguacagcugccacagaagucucuuuacuugcgggcucugaagaauuuaaugcuacuaaacucuucgaaguggacacugauagcugugaacgcuggaugucuugcaagagcgaguuccucaaaaaguacaugcauaaagugaugaacgaccugccuaguugucccuguucuuacccaaccgagguggcuuacaguaccgccgacauauucgacaggaucaagcguaaagauuuuagauggaaagacgccagcggcccaaaggaaaaacuggagaucuauaagccuacugcccguuauugcaucagaucaaugcugucacuugaaaguacaaccuuggccgcccaacacugcuguuauggggauaauaugcagcugaucacuagagggaaaggggccggaacaccaaaucugauaagcaccgaguuuucagcagaguugcacuauaagguagauguguuaccuuggauaaucugcaagggggauugguccagguauaacgaagcacgccccccaaacaauggccagaaaugcaccgagagucccagugaugaagacuauaucaagcaguuucaggaggcaagagaguauuag

SEQ ID NO: 233278 - RNA, 1395 nt, Artificial Sequence
  derived and/or modified sequence
auggugaggcuggcugcugagcuccuccuccuccuaggccuccugcucuugacguuacacaucacuguccuuagggguuccggagccgcugacggcccugaugccgcugcaggaaacgcaagucaggcacagcugcagaacaaccucaacgucggauccgauacaacgagcgagacuucauuuucccucucaaaggaggcaccccgcgaacaucucgaccaucaggcugcucaucagccuuucccccggccccgcuucaggcaagagacuggccauccuucccuucaaagagacuuucccaggagcuuccuacuugauuugcccaacuuuccugaccugagcaaagcugauauaaacggacaaaaccccaacauucaagugacuaucgaggugguugacgggccagacucagaggcggacaaagaccaacacccagagaauaaaccuucauggaguguacccaguccagauuggcgugcaugguggcaaaggagccugagccuggcuagagcgaacuccggagaucaagauuacaaauaugacaguacaagcgacgauucaaauuuccucaacccacccaggggaugggaucauaccgccccgggacauagaacuuuugaaacuaaagaccaacccgaguacgauucuacagauggagagggcgauuggucauugugguccguguguagcgugacauguggcaauggaaaucagaagcggacucgauccugcggauacgccugcacagcgacugagagcagaaccugcgacagaccaaauugucccggaaucgaggauaccuuucgcaccgcagcuaccgaggucucucuucuggcaggcagcgaggaguucaacgccacaaaguuauuugaagucgauacagacucuugugagagauggauguccugcaagucggaguuuuugaaaaaguacaugcacaaaguuaugaaugaccuuccuucuuguccuugcagcuauccuaccgaaguggcuuauaguaccgccgauaucuuugauagaaucaaaagaaaagauuuuagauggaaagacgcuucugguccuaaagagaaacuagagaucuacaaaccaaccgcaagauacugcauacgaucgaugcuuucccuggagucaaccacacucgcugcucagcacuguuguuacggcgacaacaugcaacuaauaacaaggggaaagggcgccgggaccccgaauuuaauaucuacggaauucagugcugaacuacauuauaaaguggacgugcuaccauggauuaucuguaaaggcgauuggucaagguacaacgaagcaagaccuccgaacaauggucagaaaugcaccgaaucccccucugaugaagacuauauaaaacaguuucaggaagcaagggaguacuag

SEQ ID NO: 233279 - RNA, 1257 nt, Artificial Sequence
  derived and/or modified sequence
aauaaccuuaaugucgggucugacacuaccagugaaacaagcuuuucucuaagcaaagaggccccucgugaacaccuggaccaccaagccgcucaccaacccuuuccgcgcccaagauuuaggcaggagaccggacauccaucacuccaacgagacuuuccccgcuccuuuuugcucgaucuuccaaauuuuccagaccucuccaaagcugacaucaacggccagaaccccaauauucagguuacaaucgagguggucgaugggccagacagcgaggcugauaaagaucagcacccagagaauaaaccaucguggagcgugccuuccccagacuggagagcaugguggcagcgauccuugucucuggcuagggcgaacaguggagaucaagauuacaaauaugauucuacuucugacgauuccaacuuccuuaacccuccccgcggcugggaccauacugcgccgggacaucguaccuucgaaaccaaagaccaaccugaguaugacuccacagauggcgaaggagacuggucgcuuuggagcgucugcaguguaacaugugggaacgguaaucagaaacgcacacgauccuguggguaugccugcaccgcuacugagucucgcaccugugauaggcccaauugcccaggaauugaggauacuuuccgaacagccgcuaccgaaguaaguuuacucgcugguagcgaagaauucaaugccaccaaacuguuugaagucgauacugauucuugcgagagauggaugagcugcaaauccgaguuccugaagaaguauaugcacaaaguuaugaaugaccucccuagcugucccugcucauauccuaccgaaguagccuauucuacagccgacauauucgaccggaucaagagaaaagauuucagauggaaagacgccagcggcccaaaggaaaaacuggagaucuauaagccuacugcccguuauugcaucagaucaaugcugucacuugaaaguacaaccuuggccgcccaacacugcuguuauggggauaauaugcagcugaucacuagagggaaaggggccggaacaccaaaucugauaagcaccgaguuuucagcagaguugcacuauaagguagauguguuaccuuggauaaucugcaagggggauugguccagguauaacgaagcacgccccccaaacaauggccagaaaugcaccgagagcccauccgaugaagacuauaucaagcaguuccaagaagcacgugaauauuag

SEQ ID NO: 233280 - protein, 401 aa, Artificial Sequence
  derived and/or modified sequence
METGKDGARRGTQSPERKRRSPVPRAPSTKLRPAAAARAMDPVAAEAPGEAFLARRRPEGGGGSARPRYSLLAEIGRGSYGVVYEAVAGRSGARVAVKKIRCDAPENVELALAEFWALTSLKRRHQNVVQFEECVLQRNGLAQRMSHGNKSSQLYLRLVETSLKGERILGYAEEPCYLWFVMEFCEGGDLNQYVLSRRPDPATNKSFMLQLTSAIAFLHKNHIVHRDLKPDNILITERSGTPILKVADFGLSKVCAGLAPRGKEGNQDNKNVNVNKYWLSSACGSDFYMAPEVWEGHYTAKADIFALGIIIWAMIERITFIDSETKKELLGTYIKQGTEIVPVGEALLENPKMELHIPQKRRTSMSEGIKQLLKDMLAANPQDRPDAFELETRMDQVTCAA

SEQ ID NO: 233281 - protein, 534 aa, Artificial Sequence [sequence omitted]

SEQ ID NO: 233282 - DNA, 1206 bp, Artificial Sequence
  derived and/or modified sequence
atggaaaccgggaaagatggggccaggagaggaacccagtctcccgagaggaagcggaggagcccagtcccaagagccccttctactaagctgcgcccggctgccgcagcaagggcaatggaccctgtggcagctgaggctcctggagaagctttccttgccaggagaaggcccgagggcggggggggcagtgcgaggcccaggtactctctcctggcggagatcgggcggggttcatacggagtggtgtatgaagccgtggcaggccggagtggggcaagggtggcagtgaagaagatcaggtgcgacgctcctgaaaatgtggagctggcacttgccgagttttgggctctaacatctcttaagaggcgccatcagaatgttgttcagtttgaggaatgtgtcctgcaacgcaacggcttggcgcagcggatgagccacgggaacaagtcttcacagctctacctgaggctcgtggagactagcctgaagggggaacgcatcctcgggtacgccgaggaaccttgctacctctggttcgtcatggagttctgtgaagggggggacttgaaccagtatgtgctttcaaggagacccgaccccgcaaccaataagagcttcatgctccagcttaccagtgctatcgctttcttgcacaagaaccacatcgtgcatagggatctgaagcctgataatattctcataacagagcgtagcggaacccctatactaaaggttgcagactttggcctctcgaaagtgtgcgccggactcgccccccgaggcaaagagggcaaccaagataacaaaaacgtcaacgttaacaagtactggctctcctccgcttgcggctccgatttctacatggcccccgaagtatgggagggacactatactgccaaggccgacatctttgccctcggaatcattatttgggctatgatagaaaggattaccttcatcgactctgaaactaaaaaggagctgctgggaacgtacataaagcagggcactgaaattgtgccagtaggcgaggctctgctcgaaaacccaaagatggaattgcatatcccgcagaagaggcgaacatcaatgagcgagggaattaaacagctcctcaaggacatgctcgcagccaaccctcaagacagaccagacgctttcgagttggagacgcggatggaccaagttacatgtgccgcttag

SEQ ID NO: 233283 - DNA, 1605 bp, Artificial Sequence
  derived and/or modified sequence
atgggacatcaggagagtccactcgccagggctcctgccggcggcgctgcttacgtgaagcgattatgtaagggcttaagctggcgagaacatgtggagtcgcacgggtcactcggagctcaggcgtctcctgctagcgcagccgccgccgagggttcggcgacacgccgggctagagctgccacgagccgtgcggcgcgatctcgacggcagcctgggcccggtgctgaccacccacaggctggggccccaggcggcaagcgtgccgccagaaagtggagatgtgccgggcaggtcaccatccagggacctgccccaccaagacctcgcgctggccggagagacgaagcaggcggagcacgagccgcgcctctgctgctcccgccacccccagccgccatggaaactggtaaagacggggctcgtcgtgggactcagagccccgaaagaaagcgcagatctcctgtgccccgtgccccaagcacaaaattgcgtccggccgctgccgccagggctatggatcccgtggcagccgaggcccctggggaggctttcttagcaaggagacgcccagaaggtgggggcggaagtgcacgtccacgatacagtctcctcgccgagatagggcgagggagctatggggtggtctatgaggctgtcgctggtcgctccggagcacgggtcgcagtcaaaaaaattcggtgtgacgctccggagaacgtggaacttgccctcgccgagttctgggctctgacaagtctcaagaggcggcaccagaacgtcgtgcaatttgaggagtgcgtgctacagaggaatggcttggcacagcgtatgtcacatgggaataagtcttcccagctgtacttacggctagtggagacttcccttaagggggagaggatcctcggctacgctgaagagccatgctatctctggtttgtgatggaattctgcgagggtggcgacctaaaccaatacgtgctctcacgccgcccagaccctgccaccaataagtcgtttatgttacagttaactagtgcaatcgccttcctgcacaaaaaccatatcgtacacagggatttaaaaccggacaatatcctgatcaccgaacgcagtggcacccccatcctcaaggtggctgacttcggattatctaaagtgtgtgcgggtctggctccaagagggaaggaaggcaaccaggataataaaaatgtcaacgtcaataagtactggctgagttcggcctgtggctcggatttctatatggcccccgaagtgtgggagggccattatactgccaaggccgatatatttgcccttgggattattatttgggccatgattgagcggattacatttatagattccgaaaccaagaaggagctcctgggaacgtacatcaagcagggcaccgagatcgtccctgttggcgaggcactattagaaaatcccaagatggagttgcacatccctcagaaaagacgtaccagcatgagcgagggcatcaaacagttacttaaagatatgctagcggcgaatcctcaggaccgtcctgatgcattcgagctagaaacaagaatggatcaagtcacctgtgcggcctag

SEQ ID NO: 233284 - DNA, 1206 bp, Artificial Sequence
  derived and/or modified sequence
atggagaccgggaaggatggagcccggcggggcacccagagccctgagaggaagagaagaagccctgtgccccgggcccccagcaccaagctgcggcctgctgctgctgcccgggccatggaccctgtggccgctgaggcccctggagaggccttcctggcccggcggcggcctgagggcggcggcggcagcgcccggccccgctacagcctgctggccgagatcggccggggcagctatggagtggtgtatgaggccgtggccggccgcagcggggcccgggtggccgtgaagaagatccgctgtgatgccccagaaaatgtggagctggccctggccgagttctgggccctgaccagcctgaagagaagacaccagaatgtggtgcagtttgaagaatgtgtgctgcagagaaatggcctggcccagaggatgagccacggcaacaagagcagccagctgtacctgcggctggtggagaccagcctgaagggggagcgcatcctgggctacgccgaggagccctgctacctgtggtttgtgatggagttctgtgagggcggggacctgaaccagtatgtgctgagcagaagaccagaccctgccaccaacaagagcttcatgctgcagctgaccagcgccatcgccttcctgcacaagaaccacatcgtgcaccgggacctgaagccagacaacatcctgatcacagagaggagcggcacccccatcctgaaggtggccgactttggcctgagcaaggtgtgtgccggcctggccccccggggcaaggagggcaaccaggacaacaagaatgtgaatgtgaacaagtactggctgagcagcgcctgtggcagtgacttctacatggcccctgaggtgtgggagggccactacacagccaaggctgacatctttgccctgggcatcatcatctgggccatgattgagcgcatcaccttcattgattctgagaccaagaaggagctgctgggcacctacatcaagcagggcacagagatcgtgcctgtgggggaggccctgctggagaaccccaagatggagctgcacatcccccagaagaggaggacctccatgtctgagggcatcaagcagctgctgaaggacatgctggccgccaacccccaggacagaccagatgcctttgagctggagaccaggatggaccaggtgacctgtgccgcctag

SEQ ID NO: 233285 - DNA, 1605 bp, Artificial Sequence
  derived and/or modified sequence
atgggccaccaggagagccccctggcccgggccccagctggaggagctgcctacgtgaagaggctgtgcaagggcctgtcctggagggagcacgtggagagccacggcagcctgggcgcccaggccagccctgccagcgctgctgctgctgagggcagcgccacccggcgggcccgggccgccaccagcagagctgcccggagccggcggcagcccggccctggagctgaccacccccaggccggggcccctgggggcaagagagctgccaggaagtggaggtgtgccggccaggtgaccatccagggccctgccccaccccggcccagggctggaagaagagatgaagctggaggagcccgggccgcccccctgctgctgcccccacctcctgctgccatggagaccgggaaggatggagcccggcggggcacccagagccctgagaggaagaggaggagccctgtgccccgggcccccagcaccaagctgcggcctgctgctgctgcccgggccatggaccctgtggccgctgaggcccctggagaggccttcctggccaggagaagacctgagggcggcggcggcagcgcccggccccgctacagcctgctggccgagatcggccggggcagctatggagtggtgtatgaagctgtggccggccgcagcggggcccgggtggccgtgaagaagatccgctgtgatgccccagaaaatgtggagctggccctggccgagttctgggccctgaccagcctgaagaggaggcaccagaatgtggtgcagtttgaggagtgtgtgctgcagagaaatggcctggcccagaggatgagccacggcaacaagagcagccagctgtacctgcggctggtggagaccagcctgaagggggagcgcatcctgggctatgcagaggagccctgctacctgtggtttgtgatggagttctgtgagggcggggacctgaaccagtatgtgctgagccggcggccagaccctgccaccaacaagagcttcatgctgcagctgaccagcgccatcgccttcctgcacaagaaccacatcgtgcaccgggacctgaagccagacaacatcctgatcacagagaggagcggcacccccatcctgaaggtggccgactttggcctgagcaaggtgtgtgccggcctggccccccggggcaaggagggcaaccaggacaacaagaatgtgaatgtgaacaagtactggctgagcagcgcctgtggcagtgacttctacatggcccctgaggtgtgggagggccactacacagccaaggctgacatctttgccctgggcatcatcatctgggccatgattgaaagaatcaccttcatcgacagcgagaccaagaaggagctgctgggcacctacatcaagcagggcacagaaattgtgcctgtgggggaggccctgctggagaaccccaagatggagctgcacatcccccagaagaggaggacctccatgtctgagggcatcaagcagctgctgaaggacatgctggccgccaacccccaggacagaccagatgcctttgagctggagaccaggatggaccaggtgacctgtgccgcctag

SEQ ID NO: 233286 - DNA, 1206 bp, Artificial Sequence
  derived and/or modified sequence
atggagaccggcaaggacggcgcccggcggggcacccagagccccgaacggaaaagaagaagccccgtgcctcgcgcaccctccaccaagttgcgcccggctgctgccgcccgcgcaatggatccagtcgcggccgaggcacccggcgaagccttccttgcaaggaggcgaccggaagggggaggtgggtctgctcgccctcgttactcactgctggcggagatcggacgaggctcttatggggtggtttatgaagctgtcgctggccggagtggagcaagagtggcagttaagaaaattagatgtgacgcacctgagaatgtggaattggccctggctgagttttgggccttaacctcactgaaaaggaggcaccagaacgtcgtacaatttgaagagtgcgttcttcagcgaaatggtctagcgcaacgtatgtctcacgggaataagagctcacagttgtacctgcgtctggtggagactagcctgaaaggggagcggattttgggatacgcagaggaaccctgctacctttggtttgtgatggagttctgtgaggggggcgacctcaaccagtatgtcctctcaagacgccctgatccagcgaccaacaagtccttcatgctccagttgacctctgccattgcattcttgcacaagaaccacatcgtgcacagggatctgaaaccagacaatattctcatcaccgaacgttccggcacgcccatattgaaggtcgccgacttcggcctgtcaaaagtctgtgcgggtctggctccaaggggaaaagaggggaatcaggataacaaaaatgtgaatgtcaataagtactggctgtcttcagcatgtgggtctgatttctatatggctccagaagtatgggaaggtcactacaccgctaaggcagacatctttgcgctcgggattataatctgggcaatgatcgaacgcataacgtttatagactcagaaacgaagaaggaactgcttggcacttatattaagcagggaacagagattgtgccagtgggcgaggcgctgctcgagaatcctaagatggagctccatatacctcagaagcgccgaacttccatgagtgagggcatcaaacaacttctgaaggacatgctggctgcaaaccctcaggacaggccagatgctttcgaactcgagactaggatggaccaggtgacttgcgctgcctag

SEQ ID NO: 233287 - DNA, 1605 bp, Artificial Sequence
  derived and/or modified sequence
atgggccaccaggagagccccctggcccgggcccccgccggcggcgccgcctatgtgaaacgtctgtgcaaaggcctaagctggcgggagcatgtcgagtcacatgggagcctgggagcacaggcttcccctgcctccgccgctgctgccgaaggcagcgcaacccggagggcgcgagccgcaacgtctcgagccgctcggtccaggaggcaacctggacccggcgctgaccacccacaagccggtgcccccggcgggaagagagccgcccggaagtggagatgcgctggccaggtcactatacagggacctgccccgccacgcccaagagcaggaaggcgcgacgaagccggaggggcacgcgccgccccactgcttcttccccccccccccgctgccatggaaaccggcaaggacggggcccgccggggcacgcagtcccccgagcgaaagcggcgttcccccgtgccccgagcaccgtctacaaagctgcgccctgcggccgcagctagagctatggacccagtagccgcggaggcacccggggaggcgttcctggcccggcggaggccagaggggggaggcggctctgcccgtccccggtacagcctgctggctgagatcgggcgtggatcatatggagtcgtgtacgaagccgtcgccggccgttctggtgcccgggtggccgtgaagaagatccggtgtgacgcccccgagaatgtggagttagccctggctgaattctgggccctcacttcactcaagaggcgacaccagaatgtggtgcagtttgaagagtgcgtgctgcagcgtaatgggctggctcaacgcatgtcgcacggaaacaagtccagtcaactgtaccttcggctggtcgagacctccctcaagggagaaagaattttgggttatgcggaagagccatgttacctgtggttcgtgatggagttctgcgaaggaggcgatctaaaccaatacgtgctatcccggcggccagaccccgccacaaacaaatcatttatgcttcagcttactagcgccatcgctttcttgcataagaaccatatcgtgcacagggatttaaagccagataacattttgatcaccgaaaggtccggcactcccatccttaaggtggccgatttcggattgtctaaagtgtgtgcggggcttgctcctcgcggcaaggaagggaaccaggataataaaaacgtgaacgtgaataaatactggctttcgtcagcatgcggatcggatttttatatggcccctgaagtgtgggaggggcactataccgctaaggccgatatcttcgctctcggcattatcatatgggccatgatagagcggatcacgttcatcgattccgaaactaagaaggagttgcttgggacctacataaagcagggaactgaaatagtacctgttggtgaggccctcctggaaaaccctaaaatggaactgcacatcccccagaaacggcggactagtatgagcgagggcattaagcagttacttaaagacatgttagcggccaacccccaggataggccagatgcttttgagctggagaccaggatggaccaagttacctgcgccgcctag

SEQ ID NO: 233288 - DNA, 1206 bp, Artificial Sequence
  derived and/or modified sequence
atggagaccggcaaggacggtgcgagacgcggaacccagtcccctgaacggaagcggcgttcccccgtgcctcgggcacccagtacaaaacttagaccagcagccgctgctagggctatggatcccgtggctgccgaggcaccgggagaagcatttctggccagacggagaccggagggtgggggaggctctgcaagacctaggtacagcctgttggctgaaataggacgcggatcctacggggtggtttacgaggccgtggccggaagaagtggggcaagggtggccgtgaaaaagatccgctgtgacgcaccagaaaatgttgagttagctctggcggaattttgggcccttactagtttgaagagacggcatcagaatgtcgtgcagtttgaggagtgcgtgctgcaacgaaatggactggcccagcgcatgtcccacggcaacaaatcttctcagttatatctgaggctcgtggaaacatcattgaaaggcgagagaattctcggatacgctgaagagccttgctacctctggttcgtgatggaattctgcgagggaggagatttgaatcagtacgtcttgtctcgaaggccagatccagcaacaaacaaaagctttatgctgcaactcacctcagccatcgcattcctgcataagaaccatatcgtccaccgagatttaaaaccggacaatatcctgattacagagcgcagcggcaccccaatcctgaaggtagcagacttcgggctctctaaggtgtgcgccggactggcccctagaggtaaagagggcaaccaggacaataaaaacgtaaacgttaacaaatattggctgtcatcagcttgtggcagcgatttttacatggccccagaggtatgggaagggcactatactgccaaagctgacatcttcgcactggggatcattatctgggccatgatagagcgaatcacattcatcgactccgaaactaaaaaggagttgctcggaacttacataaaacaaggtacagagatcgtgcctgtgggcgaagctctgttagaaaatccaaagatggagcttcacattccacagaaacgcagaactagcatgtcagaaggcatcaaacaattactcaaggacatgctggcagcaaacccccaggacaggccggatgctttcgaattggagactcgaatggaccaggtgacgtgcgccgcttag

SEQ ID NO: 233289 - DNA, 1605 bp, Artificial Sequence
  derived and/or modified sequence
atggggcaccaggagtcaccactggcaagagccccagctggcggagctgcgtatgtcaagcgcctctgtaagggcctgtcttggcgcgagcatgtggagtctcacggatccttaggtgcgcaggcctctcctgcatccgccgcagccgctgaaggaagcgccaccagacgtgctcgcgcagccactagtagggcagccaggtctcgcagacagcctgggcctggggctgaccaccctcaggccggagcacccggtggcaaacgggctgcacggaagtggaggtgcgccggtcaggtgacaattcagggacccgcacctccgcgacccagggcaggccgacgggatgaagctggtggtgctcgggctgccccattgttgctccctccaccacctgctgcgatggagactggcaaagacggagccaggcggggaacccagtcccctgagaggaaaaggaggtccccagttcctagagcaccaagcaccaaattacgcccagccgctgccgcacgcgctatggatccagtggccgcagaggctccaggtgaagccttcctagcaagacggagacctgagggcggtggcggaagtgcacgaccacggtatagtttactggctgaaattgggagagggtcttatggcgtggtgtatgaagccgtggctggccgaagtggcgctcgcgtggcagttaaaaagatccgctgcgatgcccctgaaaacgtcgagttagctttggccgagttttgggccttaaccagccttaagcggaggcaccagaatgttgtacagttcgaggagtgcgtgctccaaagaaatgggcttgctcagagaatgtcccacggcaataagtcgtcacagttgtacctgagactcgtcgaaaccagcctgaagggggagcggatactcgggtatgctgaagaaccgtgctatctttggttcgtgatggagttttgtgaaggaggcgatctcaatcagtatgtgctgtcacgcagacccgatccagccactaataaatcattcatgctccagctgactagtgccatcgccttccttcacaagaatcacattgtacatagagatctgaaaccagataatatactgattaccgagagatctgggacccctatcttaaaggtggcagattttggtctgtcaaaggtgtgtgcaggactcgcacccagaggaaaagagggaaaccaggacaacaaaaacgttaacgttaataaatactggttgagctctgcctgtggtagtgacttctatatggccccagaggtttgggaggggcattataccgccaaggctgacatttttgcactcggcatcataatctgggccatgatcgagaggatcacttttatcgactctgagaccaaaaaagagctgttaggcacctacattaaacaggggacagaaattgtcccggtgggggaggcactgttagagaacccaaaaatggagctacacattcctcagaaaaggagaacctccatgagcgaagggatcaagcagctgttaaaggacatgctcgcagcaaacccacaggaccgtccagatgcctttgaactggaaactcggatggaccaggttacatgtgcagcttag

SEQ ID NO: 233290 - DNA, 6409 bp, Artificial Sequence
  derived and/or modified sequence
atgggccaccaggagtctccgctggcccgggcgccggcgggaggtgcagcttatgtaaagaggttatgtaaagggctcagctggcgcgaacacgtggaaagccacgggagcctaggagcccaggcttccccagcgagcgccgcggcagcagaaggatccgctacacgccgggctcgggccgccacctcccgcgctgctcggtcccggaggcagcccgggcccggagcggaccatccccaggcaggggctccaggggggaaacgggccgcccggaagtggaggtgcgcgggccaggtcacaatccaaggtccggctcctccgcgtcccagggccggacggagggatgaggcagggggggcccgggcagcgccgttgctgctccccccgccgcccgcagccatggaaacggggaaggacggcgcccgcagaggtacacaaagcccggagcggaaaaggcgaagcccagtgccgcgggcgcccagcacgaagctgaggccggcggcggcggcccgggccatggatccggtggcggccgaggccccgggcgaggccttcctggcgcggcgacggcctgagggcggtggcgggtccgcgcggccgcgttacagcctgttggcggagatcgggcgcggcagctacggcgtggtttatgaggcagtggccgggcgcagcggggcccgggtggcggtcaagaagatccgctgcgacgcccccgagaacgtggagctggcgctggctgaattctgggccctcaccagcctcaagcggcgccaccagaacgtcgtgcagtttgaggagtgcgtcctgcagcgcaatgggttagcccagcgcatgagtcacggcaacaagagctcgcagctttacctgcgcctggtggagacctcgctgaaaggagaaaggatcctgggttatgctgaggagccctgctatctctggtttgtcatggagttctgtgaaggtggagacctgaatcagtatgtcctgtcccggaggccagacccagccaccaacaaaagtttcatgctacagctgacgagcgccattgccttcctgcacaaaaaccatattgtgcacagggacctgaagccagacaacatcctcatcacagagcggtctggcacccccatcctcaaagtggccgactttggactaagcaaggtctgtgctgggctggcaccccgaggcaaagagggcaatcaagacaacaaaaatgtgaatgtgaataagtactggctgtcctcagcctgcggttcggacttctacatggctcctgaagtctgggagggacactacacagccaaggcggacatctttgccctgggcattatcatctgggcaatgatagaaagaatcacttttattgactctgagaccaagaaggagctcctggggacctacattaaacaggggactgagatcgtccctgttggtgaggcgctgctagaaaacccaaagatggagttgcacatcccccaaaaacgcaggacttccatgtctgaggggatcaagcagctcttgaaagatatgttagctgctaacccacaggaccggcctgatgcctttgaacttgaaaccagaatggaccaggtcacatgtgctgcttaaaattcagggctaagcattttgggtgattttaaactaggtcgattcctcgggacccacagtctcaccacgtctcctccagaggacggcagagggtacaggtggtggcctggccggttggcgatctcccgacagctggatccggcaatgtgaagcttttgtttgggtttccccgcttctttttagttttgctttatttttttccttttcttttcttttttttttttcctctttcctttttttaaatttaaaccattgagacttcagaagagcaggacacaatgctgtggacaggcaccaatttctttaaagaaattcaatgtgggcaaggcatatgtgtaaatttcacttttactttttataaggggttagggagctatttttggttttgtccttcactttccctctgtcttccttctttatacttttctcagttctacttatgacacctcacttccctagagaaggcctgcctccccatagggaatctgggggtttcttctggaacggggcgtgaggacacaaggaggcctctgggccacgcctccctaccagatgcaggaactcctggactccttggtgggctggccctggctagcccttgggcctcggagatgatcagaggtgaagaaccgcctggaagaggaaggccagggtttggccaggagaactaagaaggtctcaactccaggctttgttgtgtttaagctattgagagccccaggccacaccaggacttgcagtggtgggaatccattcctcttctgccctgtgttgcagggaactaggaggtaagggtggagggcgaccatctcgctcttgctggcggtggagcagccatccctgcctttctgttgggaaaaactgttgtgccaaactcttgtgtggaacacagctgggtcttcagcaggcatctgtcactgccgtgaggtcagcgcttctcacctaactgcctcctggattgtcatcttcccagatgtgtcccatagtgtccaggtgtcacagagacggcctgaggccctaagatctggttgtgactttgccatgataacagggtgtcctgaactggctgccgttgtcgtgttctcacagtgaagggcgtgccctgtgtgccggggtccatggtgtcatatgcagtgacacacactgtcaagcgccatttccctcacccctggagacttactgttaggtgcctgccctcagtatagacgtatccaatgggaaaacagcggacctgcccagagcagggaggtgtcgtggaactgggtagaccccctgcagcgttaggggcccatttgtgggctcgccaccttcaggcttccccagccatgacacttcagccccgccacccatgcctgtctgctgcagccatccttgcactctccagcgacactctcgcacctccctaggggaagcttccctccccctgggctgctgctctgagcccatctgttctccccctgcaagaaggggcaatgctcttgtgttgtccctctgtctggacgcgcctggccactccgaaggcttttcaccccattatggccaaatagtatagggccactggggagggggaagggaatcattttgtgttcatttttgttttctgtttcacctaaaccagcataggattgataggggagacggttggcgggcatttccgtttctatgtgaccaaggcagcaggggcttttacctgctaagcggcaatcctttggccctgagaatttgggagagaacagtgcatcaggccaggctcagcaatatgtttgctcacattctttcagccttctgtcacccccctcaacaccaaactttcttccttgtgagcagaaggttggctgctgttagcaggatcccacagtgataaccaggcccttcccttcctaagccaaaacccattgtgactgcctgtctctcctgtctctgacttctcaggcagcctcctgagtgcactgagttgtatccgagagggtgggaacagcagcatcccctaattgcagtacacggttccttttccgcccgccaccctgcctttccttgggggcagctgtctctctgtacatgagcaaatgggcaaaaacagtccccaaacccagcacccccctctccctggctgcagcccacactgtaacatccctagtgaggctccagcctaatgagccccttattttcttttttttccctccccaggtctagtagctctaactaaaaagttcttggagccatcgtgctccccctttgttatttttcttgctatcagagtagcaagaaacagcacccctgtaggtgacaggtgggcagcctggtaggggtcgccagcctccatgccccctcatcttccagttcttgcttagtggcacgacctctttccatagcataaatgcaggccagcgttttagccccaagtgcctgcccttgcttcttacccctcccctgctttctcaaacacttgcccacctcaggcactcagcgggctccgccgtggtgagagaactggccgtggctcagccccgggtagcacctgtagtttcagtgccactctccactgtccccttgtggaccagcttccactcactgtcacgtcccccctcctgcgtcttcactgggtctcaggctgccagcagctctctggtgcatcgtctcaacaccaccaagtttgtaggacctgcccaagttctagtagtattcaaaacttcaaacggcagtcatttgttctcctcggctctgtggcaaggatagccctttggagggggactcttgacctcggctgttagggatctgaacttggttttcccgtcagaagaatcagcaggacagatcgtagtgccttattccattgtcctcccctggccaggcctcctggctcagctggaagtgcatggcttctttctccctatctgtgtcctctgtcacttgctctttcactctctctctcattcccagagagccacgggggagggatcaccctcacccccaacaccctcttcctgagggctgtagccaggtccgcatctccccaccaccaccagggcactcactcgcagctatagcccaggacagaaaaactgtgctttggacaggtgcacactctctgcctcttacctctagccaggaggatgcctcagtctgttcattcgagactggccccgtctgaaccttctctgggcactggggactaaggttgcaggccttagcctcgtctcgtcccagaggcattggatcaggagaatgggaatttttttcctcccacctggacatagtttgcccctgtggctgcctttctgagggagtatactaaatgtttacttaagaaacaccctgtttacagccagaggagaaacacccaacactgagtggagatttgactctggacagggcctggcctccttagtggcactgccggggggccccagagcgaatgagggcagagatgcccggggcaggggcaaacgccctccgctccctctgctcccaaccctgtggtgctaggaccactccccgccttccctacggcctcctcgccctgcacattccccacctccacattcccctcctccaagatctcagctccttaacatatcagttgtctcctagcctagaaaaccagtgtttggagcaataagatgattatttttgcttgaatctttttctaagagaaggaaaagagctggcattgtgggaattttctttttatgctgttagctgtttaccttcttagaagacatcctaataggatggatgtctgggttttagccttggggtatcttttggaaacttagaaaagcaggagtcaggctgccaccccctaaggagggaccctaacgttctgcccttgcctggttccatatggctccttccagccctgcccaccaagtgcagctcccactttccatcctgcccatacgcccctcttcccccgacatctgggggcgctggtggcacttactctaggttggtctcagactatccctccccttggctggttttccctcctaggcctgtctggcagcccccagacagacgtagctcctgggagtctcggccctggcaaccttggaagagccaagctgacattgtttagctcttcaggccactgggttttggaggcagaagtccagagatactggctctgccaagctgtcgtactgggctgtggcacagccttcgagacaacacgggtgtatctctgatcctgccctacctaggcttcaaggggcttctgtctggagaaatgccctcaaagggtaaccagtaggtgtggcattgaattggccagtgttagcatctacagccatcaccgagatgagtccactgccgttgcctgcccgagggccccctaaggttatagacggtatcagcagggaggccgtcccgctggttttctaggagagcccacaggaggaagggagcctcttcaggggcactggaatcttttgtgccaggggcttcttttcatcagagccggggagtacattgcagtgacttcttaaacatttgtgtgggacagacgagcgtgagggaggttttaagccaggcacaaagttagtttccaatactagttaataaatctatttttcttcatttcctttttttgcacagaagctggtaatctaggacctacgtgtgaacaactttatatgaatattttttgtacttggtttacttgggttggtatgatacattatatttaagttccttgaacactgtggatcccctaatgtgtatgaatgactgaggctttgtaaattaagggacgtttgtgtgaataaagttatttgatggggtcaaagaagccatatgtgatttg

SEQ ID NO: 233291 - DNA, 6685 bp, Artificial Sequence
  derived and/or modified sequence
gacaatcacccagtcagtatttattaggcgcctactgcggacggttggtcttcacgcagatcaggcgagaagggatagtgatgcgcgggccgctgcggagacccggagcccgccgcggatcacgggaatttcgcgcctattttttgttggctgggtgttctcgccagtgattgggtcccggcaaggcgtgccggtgcgctcggctgcggctgctccgtcgacctttgcaggaccgggcggtgcagggctcactcggctggcgtcccgggggatgggccaccaggagtctccgctggcccgggcgccggcgggaggtgcagcttatgtaaagaggttatgtaaagggctcagctggcgcgaacacgtggaaagccacgggagcctaggagcccaggcttccccagcgagcgccgcggcagcagaaggatccgctacacgccgggctcgggccgccacctcccgcgctgctcggtcccggaggcagcccgggcccggagcggaccatccccaggcaggggctccaggggggaaacgggccgcccggaagtggaggtgcgcgggccaggtcacaatccaaggtccggctcctccgcgtcccagggccggacggagggatgaggcagggggggcccgggcagcgccgttgctgctccccccgccgcccgcagccatggaaacggggaaggacggcgcccgcagaggtacacaaagcccggagcggaaaaggcgaagcccagtgccgcgggcgcccagcacgaagctgaggccggcggcggcggcccgggccatggatccggtggcggccgaggccccgggcgaggccttcctggcgcggcgacggcctgagggcggtggcgggtccgcgcggccgcgttacagcctgttggcggagatcgggcgcggcagctacggcgtggtttatgaggcagtggccgggcgcagcggggcccgggtggcggtcaagaagatccgctgcgacgcccccgagaacgtggagctggcgctggctgaattctgggccctcaccagcctcaagcggcgccaccagaacgtcgtgcagtttgaggagtgcgtcctgcagcgcaatgggttagcccagcgcatgagtcacggcaacaagagctcgcagctttacctgcgcctggtggagacctcgctgaaaggagaaaggatcctgggttatgctgaggagccctgctatctctggtttgtcatggagttctgtgaaggtggagacctgaatcagtatgtcctgtcccggaggccagacccagccaccaacaaaagtttcatgctacagctgacgagcgccattgccttcctgcacaaaaaccatattgtgcacagggacctgaagccagacaacatcctcatcacagagcggtctggcacccccatcctcaaagtggccgactttggactaagcaaggtctgtgctgggctggcaccccgaggcaaagagggcaatcaagacaacaaaaatgtgaatgtgaataagtactggctgtcctcagcctgcggttcggacttctacatggctcctgaagtctgggagggacactacacagccaaggcggacatctttgccctgggcattatcatctgggcaatgatagaaagaatcacttttattgactctgagaccaagaaggagctcctggggacctacattaaacaggggactgagatcgtccctgttggtgaggcgctgctagaaaacccaaagatggagttgcacatcccccaaaaacgcaggacttccatgtctgaggggatcaagcagctcttgaaagatatgttagctgctaacccacaggaccggcctgatgcctttgaacttgaaaccagaatggaccaggtcacatgtgctgcttaaaattcagggctaagcattttgggtgattttaaactaggtcgattcctcgggacccacagtctcaccacgtctcctccagaggacggcagagggtacaggtggtggcctggccggttggcgatctcccgacagctggatccggcaatgtgaagcttttgtttgggtttccccgcttctttttagttttgctttatttttttccttttcttttcttttttttttttcctctttcctttttttaaatttaaaccattgagacttcagaagagcaggacacaatgctgtggacaggcaccaatttctttaaagaaattcaatgtgggcaaggcatatgtgtaaatttcacttttactttttataaggggttagggagctatttttggttttgtccttcactttccctctgtcttccttctttatacttttctcagttctacttatgacacctcacttccctagagaaggcctgcctccccatagggaatctgggggtttcttctggaacggggcgtgaggacacaaggaggcctctgggccacgcctccctaccagatgcaggaactcctggactccttggtgggctggccctggctagcccttgggcctcggagatgatcagaggtgaagaaccgcctggaagaggaaggccagggtttggccaggagaactaagaaggtctcaactccaggctttgttgtgtttaagctattgagagccccaggccacaccaggacttgcagtggtgggaatccattcctcttctgccctgtgttgcagggaactaggaggtaagggtggagggcgaccatctcgctcttgctggcggtggagcagccatccctgcctttctgttgggaaaaactgttgtgccaaactcttgtgtggaacacagctgggtcttcagcaggcatctgtcactgccgtgaggtcagcgcttctcacctaactgcctcctggattgtcatcttcccagatgtgtcccatagtgtccaggtgtcacagagacggcctgaggccctaagatctggttgtgactttgccatgataacagggtgtcctgaactggctgccgttgtcgtgttctcacagtgaagggcgtgccctgtgtgccggggtccatggtgtcatatgcagtgacacacactgtcaagcgccatttccctcacccctggagacttactgttaggtgcctgccctcagtatagacgtatccaatgggaaaacagcggacctgcccagagcagggaggtgtcgtggaactgggtagaccccctgcagcgttaggggcccatttgtgggctcgccaccttcaggcttccccagccatgacacttcagccccgccacccatgcctgtctgctgcagccatccttgcactctccagcgacactctcgcacctccctaggggaagcttccctccccctgggctgctgctctgagcccatctgttctccccctgcaagaaggggcaatgctcttgtgttgtccctctgtctggacgcgcctggccactccgaaggcttttcaccccattatggccaaatagtatagggccactggggagggggaagggaatcattttgtgttcatttttgttttctgtttcacctaaaccagcataggattgataggggagacggttggcgggcatttccgtttctatgtgaccaaggcagcaggggcttttacctgctaagcggcaatcctttggccctgagaatttgggagagaacagtgcatcaggccaggctcagcaatatgtttgctcacattctttcagccttctgtcacccccctcaacaccaaactttcttccttgtgagcagaaggttggctgctgttagcaggatcccacagtgataaccaggcccttcccttcctaagccaaaacccattgtgactgcctgtctctcctgtctctgacttctcaggcagcctcctgagtgcactgagttgtatccgagagggtgggaacagcagcatcccctaattgcagtacacggttccttttccgcccgccaccctgcctttccttgggggcagctgtctctctgtacatgagcaaatgggcaaaaacagtccccaaacccagcacccccctctccctggctgcagcccacactgtaacatccctagtgaggctccagcctaatgagccccttattttcttttttttccctccccaggtctagtagctctaactaaaaagttcttggagccatcgtgctccccctttgttatttttcttgctatcagagtagcaagaaacagcacccctgtaggtgacaggtgggcagcctggtaggggtcgccagcctccatgccccctcatcttccagttcttgcttagtggcacgacctctttccatagcataaatgcaggccagcgttttagccccaagtgcctgcccttgcttcttacccctcccctgctttctcaaacacttgcccacctcaggcactcagcgggctccgccgtggtgagagaactggccgtggctcagccccgggtagcacctgtagtttcagtgccactctccactgtccccttgtggaccagcttccactcactgtcacgtcccccctcctgcgtcttcactgggtctcaggctgccagcagctctctggtgcatcgtctcaacaccaccaagtttgtaggacctgcccaagttctagtagtattcaaaacttcaaacggcagtcatttgttctcctcggctctgtggcaaggatagccctttggagggggactcttgacctcggctgttagggatctgaacttggttttcccgtcagaagaatcagcaggacagatcgtagtgccttattccattgtcctcccctggccaggcctcctggctcagctggaagtgcatggcttctttctccctatctgtgtcctctgtcacttgctctttcactctctctctcattcccagagagccacgggggagggatcaccctcacccccaacaccctcttcctgagggctgtagccaggtccgcatctccccaccaccaccagggcactcactcgcagctatagcccaggacagaaaaactgtgctttggacaggtgcacactctctgcctcttacctctagccaggaggatgcctcagtctgttcattcgagactggccccgtctgaaccttctctgggcactggggactaaggttgcaggccttagcctcgtctcgtcccagaggcattggatcaggagaatgggaatttttttcctcccacctggacatagtttgcccctgtggctgcctttctgagggagtatactaaatgtttacttaagaaacaccctgtttacagccagaggagaaacacccaacactgagtggagatttgactctggacagggcctggcctccttagtggcactgccggggggccccagagcgaatgagggcagagatgcccggggcaggggcaaacgccctccgctccctctgctcccaaccctgtggtgctaggaccactccccgccttccctacggcctcctcgccctgcacattccccacctccacattcccctcctccaagatctcagctccttaacatatcagttgtctcctagcctagaaaaccagtgtttggagcaataagatgattatttttgcttgaatctttttctaagagaaggaaaagagctggcattgtgggaattttctttttatgctgttagctgtttaccttcttagaagacatcctaataggatggatgtctgggttttagccttggggtatcttttggaaacttagaaaagcaggagtcaggctgccaccccctaaggagggaccctaacgttctgcccttgcctggttccatatggctccttccagccctgcccaccaagtgcagctcccactttccatcctgcccatacgcccctcttcccccgacatctgggggcgctggtggcacttactctaggttggtctcagactatccctccccttggctggttttccctcctaggcctgtctggcagcccccagacagacgtagctcctgggagtctcggccctggcaaccttggaagagccaagctgacattgtttagctcttcaggccactgggttttggaggcagaagtccagagatactggctctgccaagctgtcgtactgggctgtggcacagccttcgagacaacacgggtgtatctctgatcctgccctacctaggcttcaaggggcttctgtctggagaaatgccctcaaagggtaaccagtaggtgtggcattgaattggccagtgttagcatctacagccatcaccgagatgagtccactgccgttgcctgcccgagggccccctaaggttatagacggtatcagcagggaggccgtcccgctggttttctaggagagcccacaggaggaagggagcctcttcaggggcactggaatcttttgtgccaggggcttcttttcatcagagccggggagtacattgcagtgacttcttaaacatttgtgtgggacagacgagcgtgagggaggttttaagccaggcacaaagttagtttccaatactagttaataaatctatttttcttcatttcctttttttgcacagaagctggtaatctaggacctacgtgtgaacaactttatatgaatattttttgtacttggtttacttgggttggtatgatacattatatttaagttccttgaacactgtggatcccctaatgtgtatgaatgactgaggctttgtaaattaagggacgtttgtgtgaataaagttatttgatggggtcaaagaagccatatgtgatttgaaaaa

SEQ ID NO: 233292 - DNA, 1206 bp, Artificial Sequence
  derived and/or modified sequence
atggagaccggcaaggacggcgccagaagaggcacccagagccccgagagaaagagaagaagccccgtgcccagagcccccagcaccaagctgagacccgccgccgccgccagagccatggaccccgtggccgccgaggcccccggcgaggccttcctggccagaagaagacccgagggcggcggcggcagcgccagacccagatacagcctgctggccgagatcggcagaggcagctacggcgtggtgtacgaggccgtggccggcagaagcggcgccagagtggccgtgaagaagatcagatgcgacgcccccgagaacgtggagctggccctggccgagttctgggccctgaccagcctgaagagaagacaccagaacgtggtgcagttcgaggagtgcgtgctgcagagaaacggcctggcccagagaatgagccacggcaacaagagcagccagctgtacctgagactggtggagaccagcctgaagggcgagagaatcctgggctacgccgaggagccctgctacctgtggttcgtgatggagttctgcgagggcggcgacctgaaccagtacgtgctgagcagaagacccgaccccgccaccaacaagagcttcatgctgcagctgaccagcgccatcgccttcctgcacaagaaccacatcgtgcacagagacctgaagcccgacaacatcctgatcaccgagagaagcggcacccccatcctgaaggtggccgacttcggcctgagcaaggtgtgcgccggcctggcccccagaggcaaggagggcaaccaggacaacaagaacgtgaacgtgaacaagtactggctgagcagcgcctgcggcagcgacttctacatggcccccgaggtgtgggagggccactacaccgccaaggccgacatcttcgccctgggcatcatcatctgggccatgatcgagagaatcaccttcatcgacagcgagaccaagaaggagctgctgggcacctacatcaagcagggcaccgagatcgtgcccgtgggcgaggccctgctggagaaccccaagatggagctgcacatcccccagaagagaagaaccagcatgagcgagggcatcaagcagctgctgaaggacatgctggccgccaacccccaggacagacccgacgccttcgagctggagaccagaatggaccaggtgacctgcgccgcctag

SEQ ID NO: 233293 - DNA, 1605 bp, Artificial Sequence
  derived and/or modified sequence
atgggccaccaggagagccccctggccagagcccccgccggcggcgccgcctacgtgaagagactgtgcaagggcctgagctggagagagcacgtggagagccacggcagcctgggcgcccaggccagccccgccagcgccgccgccgccgagggcagcgccaccagaagagccagagccgccaccagcagagccgccagaagcagaagacagcccggccccggcgccgaccacccccaggccggcgcccccggcggcaagagagccgccagaaagtggagatgcgccggccaggtgaccatccagggccccgccccccccagacccagagccggcagaagagacgaggccggcggcgccagagccgcccccctgctgctgccccccccccccgccgccatggagaccggcaaggacggcgccagaagaggcacccagagccccgagagaaagagaagaagccccgtgcccagagcccccagcaccaagctgagacccgccgccgccgccagagccatggaccccgtggccgccgaggcccccggcgaggccttcctggccagaagaagacccgagggcggcggcggcagcgccagacccagatacagcctgctggccgagatcggcagaggcagctacggcgtggtgtacgaggccgtggccggcagaagcggcgccagagtggccgtgaagaagatcagatgcgacgcccccgagaacgtggagctggccctggccgagttctgggccctgaccagcctgaagagaagacaccagaacgtggtgcagttcgaggagtgcgtgctgcagagaaacggcctggcccagagaatgagccacggcaacaagagcagccagctgtacctgagactggtggagaccagcctgaagggcgagagaatcctgggctacgccgaggagccctgctacctgtggttcgtgatggagttctgcgagggcggcgacctgaaccagtacgtgctgagcagaagacccgaccccgccaccaacaagagcttcatgctgcagctgaccagcgccatcgccttcctgcacaagaaccacatcgtgcacagagacctgaagcccgacaacatcctgatcaccgagagaagcggcacccccatcctgaaggtggccgacttcggcctgagcaaggtgtgcgccggcctggcccccagaggcaaggagggcaaccaggacaacaagaacgtgaacgtgaacaagtactggctgagcagcgcctgcggcagcgacttctacatggcccccgaggtgtgggagggccactacaccgccaaggccgacatcttcgccctgggcatcatcatctgggccatgatcgagagaatcaccttcatcgacagcgagaccaagaaggagctgctgggcacctacatcaagcagggcaccgagatcgtgcccgtgggcgaggccctgctggagaaccccaagatggagctgcacatcccccagaagagaagaaccagcatgagcgagggcatcaagcagctgctgaaggacatgctggccgccaacccccaggacagacccgacgccttcgagctggagaccagaatggaccaggtgacctgcgccgcctag

SEQ ID NO: 233294 - protein, 280 aa, Artificial Sequence
  derived and/or modified sequence
MRWFLPWTLAAVTAAAASTVLATALSPAPTTMDFTPAPLEDTSSRPQFCKWPCECPPSPPRCPLGVSLITDGCECCKMCAQQLGDNCTEAAICDPHRGLYCDYSGDRPRYAIGVCAHAVGEVEAWHRNCIAYTSPWSPCSTSCGLGVSTRISNVNAQCWPEQESRLCNLRPCDVDIHTLIKAGKKCLAVYQPEASMNFTLAGCISTRSYQPKYCGVCMDNRCCIPYKSKTIDVSFQCPDGLGFSRQVLWINACFCNLSCRNPNDIFADLESYPDFSEIAN

SEQ ID NO: 233295 - DNA, 843 bp, Artificial Sequence
  derived and/or modified sequence
atgagatggttcctgccctggaccctggccgccgtgaccgccgccgccgccagcaccgtgctggccaccgccctgagccccgcccccaccaccatggacttcacccccgcccccctggaggacaccagcagcagaccccagttctgcaagtggccctgcgagtgcccccccagcccccccagatgccccctgggcgtgagcctgatcaccgacggctgcgagtgctgcaagatgtgcgcccagcagctgggcgacaactgcaccgaggccgccatctgcgacccccacagaggcctgtactgcgactacagcggcgacagacccagatacgccatcggcgtgtgcgcccacgccgtgggcgaggtggaggcctggcacagaaactgcatcgcctacaccagcccctggagcccctgcagcaccagctgcggcctgggcgtgagcaccagaatcagcaacgtgaacgcccagtgctggcccgagcaggagagcagactgtgcaacctgagaccctgcgacgtggacatccacaccctgatcaaggccggcaagaagtgcctggccgtgtaccagcccgaggccagcatgaacttcaccctggccggctgcatcagcaccagaagctaccagcccaagtactgcggcgtgtgcatggacaacagatgctgcatcccctacaagagcaagaccatcgacgtgagcttccagtgccccgacggcctgggcttcagcagacaggtgctgtggatcaacgcctgcttctgcaacctgagctgcagaaaccccaacgacatcttcgccgacctggagagctaccccgacttcagcgagatcgccaactag

SEQ ID NO: 233296 - DNA, 843 bp, Artificial Sequence
  derived and/or modified sequence
atgagatggttcctgccctggacactggctgctgtaacagcagcagccgccagtaccgtgttggcaacagcgttatcccctgctccaacgacaatggacttcactccagccccccttgaggacacatccagccgtccacagttttgtaaatggccatgtgagtgccctccatctccccctcgttgtcctctgggagtttctctgattactgacgggtgcgagtgctgtaaaatgtgcgcccagcaacttggcgataattgtactgaagccgcaatctgcgatcctcatcgggggttgtattgcgactactccggagacaggccgcgatacgccattggggtgtgtgcccatgcggtcggtgaggtagaagcttggcatcggaactgtatagcatacacctcgccttggtccccttgtagtacatcttgtggattaggcgtctccactcgcatatcgaacgtcaacgcccaatgctggcctgaacaggaaagcaggctgtgcaacttgcggccttgtgatgtggacattcacacactcattaaagccggcaagaagtgtttagctgtatatcagcctgaggcctcgatgaacttcactcttgcagggtgcatttcgacacggtcataccagcccaagtattgcggggtgtgcatggacaaccggtgttgtatcccttataaaagcaaaacaattgatgtgtcttttcagtgtcccgatggcctgggttttagtaggcaggtcttatggattaacgcctgcttctgtaacctgtcttgccgtaaccccaatgatattttcgcagacttagagtcctaccctgacttctcagagatcgccaattag

SEQ ID NO: 233297 - DNA, 843 bp, Artificial Sequence
  derived and/or modified sequence
atgcgctggttcctgccctggaccctggccgctgtgacagctgctgctgccagcacagtgctggccacagccctgagccctgcccccaccaccatggacttcaccccagcccccctggaggacaccagcagccggccccagttctgcaagtggccctgtgagtgcccccccagccccccacgctgccccctgggcgtgtccctcatcacagatggctgtgagtgctgcaagatgtgtgcccagcagctgggggacaactgcacagaggccgccatctgtgacccccaccggggcctgtactgtgactacagcggggaccggcccaggtatgccatcggcgtgtgtgcccatgctgtgggggaggtggaggcctggcacaggaactgcatcgcctacaccagcccctggagcccctgcagcaccagctgtggcctgggcgtgtccacccgcatcagcaatgtgaatgcccagtgctggccagagcaggagagccggctgtgcaacctgcggccctgtgatgtggacatccacaccctcatcaaggccggcaagaagtgcctggccgtgtaccagcctgaggcctccatgaacttcaccctggccggctgcatcagcaccaggagctaccagcccaagtactgcggcgtgtgcatggacaaccgctgctgcatcccctacaagagcaagaccattgatgtgtccttccagtgcccagatggcctgggcttcagccggcaggtgctgtggatcaatgcctgcttctgcaacctgagctgcaggaaccccaatgacatctttgctgacctggagagctacccagacttcagcgagatcgccaactag

SEQ ID NO: 233298 - DNA, 843 bp, Artificial Sequence
  derived and/or modified sequence
atgcggtggttcctgccctggaccctggccgccgtgaccgccgccgccgccagtactgtgttagctaccgccttgagtcctgctcccacaactatggatttcaccccagctcccttggaggataccagcagccgtccacagttttgtaagtggccctgcgagtgcccacctagcccacctagatgtcccctgggtgtctctctgataaccgacggttgcgaatgctgcaaaatgtgtgcccagcagctgggagataactgtaccgaagcagctatctgtgaccctcatagaggcctttattgcgactactcaggtgacaggccacggtatgcaatcggagtgtgcgctcacgcggtgggggaggtggaggcatggcaccgaaattgtatcgcgtataccagtccctggagtccgtgctctacttcctgtggtctcggggtatctaccagaatttccaatgtgaatgcccagtgttggcccgagcaggaaagtaggctatgcaatctccgtccgtgtgacgtcgatatccataccctgataaaggcagggaagaaatgcttggccgtgtaccaacctgaggcttccatgaactttacactcgccggttgcatatctaccaggagctatcaacccaagtactgcggggtttgcatggacaacaggtgctgcataccctataagtcaaaaaccatagatgtgtcgtttcagtgccctgacggtctgggtttcagccgccaagtgctgtggattaatgcatgtttttgcaacttgagctgcagaaatcccaatgacatcttcgcagacctcgaatcataccccgacttttccgagatcgctaactag

SEQ ID NO: 233299 - DNA, 843 bp, Artificial Sequence
  derived and/or modified sequence
atgcgatggtttctgccctggactctggctgcagtcactgctgctgctgcctccacagtcctagcgacagcactgtctcccgctccaacaaccatggactttaccccagcccctctcgaggataccagctcacgccctcagttctgcaagtggccctgtgaatgtcccccttcacctccgcgatgtcctctcggcgtttctcttatcactgacgggtgcgagtgctgtaagatgtgcgcccaacaactgggcgacaattgtacagaagccgctatttgtgatccccatcggggactgtactgtgattactcaggagacagacccagatatgccattggcgtttgtgcccatgcagttggcgaggtcgaagcatggcacagaaactgcatagcatacacttctccctggtctccatgctcgaccagttgcggacttggggtttctacaagaatctccaacgtgaatgctcagtgctggcccgagcaggagtctcgcctgtgtaatctgcgaccctgcgatgtagatattcatacattaataaaggcagggaaaaagtgcctggctgtatatcagccagaggcttctatgaactttacactggcgggttgtatctcaactaggtcctaccagccaaagtactgtggcgtctgcatggacaatcggtgctgtattccctacaagagtaaaaccattgacgtaagcttccagtgtccagacggcctgggcttctcccgacaagttctttggattaatgcatgcttttgtaacctgtcatgtagaaaccccaatgacattttcgctgatctggagagttaccccgatttttccgagatagcgaactag

SEQ ID NO: 233300 - DNA, 1205 bp, Artificial Sequence
  derived and/or modified sequence
gtccaggcatgaggtggttcctgccctggacgctggcagcagtgacagcagcagccgccagcaccgtcctggccacggccctctctccagcccctacgaccatggactttaccccagctccactggaggacacctcctcacgcccccaattctgcaagtggccatgtgagtgcccgccatccccaccccgctgcccgctgggggtcagcctcatcacagatggctgtgagtgctgtaagatgtgcgctcagcagcttggggacaactgcacggaggctgccatctgtgacccccaccggggcctctactgtgactacagcggggaccgcccgaggtacgcaataggagtgtgtgcacatgctgtgggtgaggtggaggcatggcacaggaactgcatagcctacacaagcccctggagcccttgctccaccagctgcggcctgggggtctccactcggatctccaatgttaacgcccagtgctggcctgagcaagagagccgcctctgcaacttgcggccatgcgatgtggacatccatacactcattaaggcagggaagaagtgtctggctgtgtaccagccagaggcatccatgaacttcacacttgcgggctgcatcagcacacgctcctatcaacccaagtactgtggagtttgcatggacaataggtgctgcatcccctacaagtctaagactatcgacgtgtccttccagtgtcctgatgggcttggcttctcccgccaggtcctatggattaatgcctgcttctgtaacctgagctgtaggaatcccaatgacatctttgctgacttggaatcctaccctgacttctcagaaattgccaactaggcaggcacaaatcttgggtcttggggactaacccaatgcctgtgaagcagtcagcccttatggccaataacttttcaccaatgagccttagttaccctgatctggacccttggcctccatttctgtctctaaccattcaaatgacgcctgatggtgctgctcaggcccatgctatgagttttctccttgatatcattcagcatctactctaaagaaaaatgcctgtctctagctgttctggactacacccaagcctgatccagcctttccaagtcactagaagtcctgctggatcttgcctaaatcccaagaaatggaatcaggtagacttttaatatcactaatttcttcttt

SEQ ID NO: 233301 - protein, 793 aa, Artificial Sequence
  derived and/or modified sequence
MDSWFILVLLGSGLICVSANNATTVAPSVGITRLINSSTAEPVKEEAKTSNPTSSLTSLSVAPTFSPNITLGPTYLTTVNSSDSDNGTTRTASTNSIGITISPNGTWLPDNQFTDARTEPWEGNSSTAATTPETFPPSDETPIIAVMVALSSLLVIVFIIIVLYMLRFKKYKQAGSHSNSFRLSNGRTEDVEPQSVPLLARSPSTNRKYPPLPVDKLEEEINRRMADDNKLFREEFNALPACPIQATCEAASKEENKEKNRYVNILPYDHSRVHLTPVEGVPDSDYINASFINGYQEKNKFIAAQGPKEETVNDFWRMIWEQNTATIVMVTNLKERKECKCAQYWPDQGCWTYGNIRVSVEDVTVLVDYTVRKFCIQQVGDMTNRKPQRLITQFHFTSWPDFGVPFTPIGMLKFLKKVKACNPQYAGAIVVHCSAGVGRTGTFVVIDAMLDMMHTERKVDVYGFVSRIRAQRCQMVQTDMQYVFIYQALLEHYLYGDTELEVTSLETHLQKIYNKIPGTSNNGLEEEFKKLTSIKIQNDKMRTGNLPANMKKNRVLQIIPYEFNRVIIPVKRGEENTDYVNASFIDGYRQKDSYIASQGPLLHTIEDFWRMIWEWKSCSIVMLTELEERGQEKCAQYWPSDGLVSYGDITVELKKEEECESYTVRDLLVTNTRENKSRQIRQFHFHGWPEVGIPSDGKGMISIIAAVQKQQQQSGNHPITVHCSAGAGRTGTFCALSTVLERVKAEGILDVFQTVKSLRLQRPHMVQTLEQYEFCYKVVQEYIDAFSDYANFK

SEQ ID NO: 233302 - protein, 253 aa, Artificial Sequence
  derived and/or modified sequence
MDSWFILVLLGSGLICVSANNATTVAPSVGITRLINSSTAEPVKEEAKTSNPTSSLTSLSVAPTFSPNITLGPTYLTTVNSSDSDNGTTRTASTNSIGITISPNGTWLPDNQFTDARTEPWEGNSSTAATTPETFPPSDETPIIAVMVALSSLLVIVFIIIVLYMLRFKKYKQAGSHSNSFRLSNGRTEDVEPQSVPLLARSPSTNRKYPPLPVDKLEEEINRRMADDNKLFREEFNALPACPIQATCEAASK

SEQ ID NO: 233303 - DNA, 2382 bp, Artificial Sequence
  derived and/or modified sequence
atggacagctggttcatcctggtgctgctgggcagcggcctgatctgcgtgagcgccaacaacgccaccaccgtggcccccagcgtgggcatcaccagactgatcaacagcagcaccgccgagcccgtgaaggaggaggccaagaccagcaaccccaccagcagcctgaccagcctgagcgtggcccccaccttcagccccaacatcaccctgggccccacctacctgaccaccgtgaacagcagcgacagcgacaacggcaccaccagaaccgccagcaccaacagcatcggcatcaccatcagccccaacggcacctggctgcccgacaaccagttcaccgacgccagaaccgagccctgggagggcaacagcagcaccgccgccaccacccccgagaccttcccccccagcgacgagacccccatcatcgccgtgatggtggccctgagcagcctgctggtgatcgtgttcatcatcatcgtgctgtacatgctgagattcaagaagtacaagcaggccggcagccacagcaacagcttcagactgagcaacggcagaaccgaggacgtggagccccagagcgtgcccctgctggccagaagccccagcaccaacagaaagtacccccccctgcccgtggacaagctggaggaggagatcaacagaagaatggccgacgacaacaagctgttcagagaggagttcaacgccctgcccgcctgccccatccaggccacctgcgaggccgccagcaaggaggagaacaaggagaagaacagatacgtgaacatcctgccctacgaccacagcagagtgcacctgacccccgtggagggcgtgcccgacagcgactacatcaacgccagcttcatcaacggctaccaggagaagaacaagttcatcgccgcccagggccccaaggaggagaccgtgaacgacttctggagaatgatctgggagcagaacaccgccaccatcgtgatggtgaccaacctgaaggagagaaaggagtgcaagtgcgcccagtactggcccgaccagggctgctggacctacggcaacatcagagtgagcgtggaggacgtgaccgtgctggtggactacaccgtgagaaagttctgcatccagcaggtgggcgacatgaccaacagaaagccccagagactgatcacccagttccacttcaccagctggcccgacttcggcgtgcccttcacccccatcggcatgctgaagttcctgaagaaggtgaaggcctgcaacccccagtacgccggcgccatcgtggtgcactgcagcgccggcgtgggcagaaccggcaccttcgtggtgatcgacgccatgctggacatgatgcacaccgagagaaaggtggacgtgtacggcttcgtgagcagaatcagagcccagagatgccagatggtgcagaccgacatgcagtacgtgttcatctaccaggccctgctggagcactacctgtacggcgacaccgagctggaggtgaccagcctggagacccacctgcagaagatctacaacaagatccccggcaccagcaacaacggcctggaggaggagttcaagaagctgaccagcatcaagatccagaacgacaagatgagaaccggcaacctgcccgccaacatgaagaagaacagagtgctgcagatcatcccctacgagttcaacagagtgatcatccccgtgaagagaggcgaggagaacaccgactacgtgaacgccagcttcatcgacggctacagacagaaggacagctacatcgccagccagggccccctgctgcacaccatcgaggacttctggagaatgatctgggagtggaagagctgcagcatcgtgatgctgaccgagctggaggagagaggccaggagaagtgcgcccagtactggcccagcgacggcctggtgagctacggcgacatcaccgtggagctgaagaaggaggaggagtgcgagagctacaccgtgagagacctgctggtgaccaacaccagagagaacaagagcagacagatcagacagttccacttccacggctggcccgaggtgggcatccccagcgacggcaagggcatgatcagcatcatcgccgccgtgcagaagcagcagcagcagagcggcaaccaccccatcaccgtgcactgcagcgccggcgccggcagaaccggcaccttctgcgccctgagcaccgtgctggagagagtgaaggccgagggcatcctggacgtgttccagaccgtgaagagcctgagactgcagagaccccacatggtgcagaccctggagcagtacgagttctgctacaaggtggtgcaggagtacatcgacgccttcagcgactacgccaacttcaagtag

SEQ ID NO: 233304 - DNA, 2382 bp, Artificial Sequence
  derived and/or modified sequence
atggactcttggtttatcctggtgctgttgggctcaggtctcatttgtgtatcagctaataatgcaaccaccgtggccccaagcgtcggtatcacacggctgataaattcgagcaccgcggaacctgtgaaagaagaagccaagaccagcaaccccacatcatcactgaccagtttatccgttgctccaaccttctctcctaacattacactgggcccgacttatttgactacggtgaactcttccgactctgataacggcaccacaagaacagctagcactaattctatcggtattacaattagtcctaatgggacctggctgcccgataatcagttcacagatgcaagaacagaaccatgggaaggtaattcatcaaccgctgccaccactccagagacctttccgcctagtgacgaaactcccatcatcgccgtgatggtagccctgagctccctgctcgtcattgtgtttatcatcatagtcctgtacatgttgcgtttcaaaaaatataaacaggcaggttcccacagcaactcgtttcgcttatcaaatggacgcactgaagatgtggaaccccagtccgtcccattgcttgccaggtctccctctactaatcgaaagtacccgcccctgccagtggataagctggaggaagaaatcaatcggcggatggctgacgacaataaactttttcgggaggagttcaacgctctcccagcttgcccgattcaggccacttgcgaggccgcctcaaaggaggaaaacaaagaaaaaaatcggtacgtgaatatattgccgtacgatcactcacgggtgcatttgacccccgtggagggcgtgcccgatagtgattacatcaatgcttcattcattaatggataccaggagaagaacaaatttattgccgcacaaggcccaaaagaggagaccgttaacgacttttggaggatgatatgggagcagaacactgctacaatagtcatggtcaccaatttgaaagaacggaaagaatgcaagtgcgcccaatactggcctgaccaaggctgctggacatacgggaacatccgcgtttccgtcgaagacgtcaccgtgctcgtcgattacacggtcagaaaattctgtatccagcaggtgggcgacatgactaatcgaaagccccaacgtttgattacacagtttcacttcacttcatggcccgacttcggagtaccgttcaccccaatagggatgctgaagttcctcaagaaggtcaaagcttgcaatcctcaatatgctggtgccatcgtggtgcattgctcagcgggcgttggacggactgggactttcgtcgtaatcgacgctatgctggacatgatgcacactgaaagaaaagttgatgtctatgggtttgtgtcacgaatcagagcccagcgttgccagatggtccaaacagatatgcagtatgtctttatttaccaggcactgctcgaacattacctgtatggggacaccgaattagaggttacttctttggaaacacacctgcagaaaatttacaataaaattccgggcaccagcaataatggactcgaggaagagtttaaaaagcttaccagcattaaaattcagaacgacaaaatgcgcaccggaaatctcccggccaacatgaagaagaacagagtacttcaaatcatcccttacgaatttaaccgcgtcattatccccgtcaaaagaggggaagagaacacagactatgtcaacgcatcgttcatagacggctacagacagaaggatagttacattgcctctcagggccctctactgcatactatcgaggacttctggcgcatgatttgggagtggaaaagttgctctatcgtgatgctgaccgaactcgaggagcggggccaagagaagtgcgcccagtattggccaagcgacggcctcgtctcttacggtgatattacagtggaactgaaaaaagaagaagagtgcgaatcctatacagtgcgggatctgttagtgacgaataccagggaaaataagagcagacaaatcagacagttccattttcatggctggccagaagtgggaatcccgtcagacgggaagggaatgatttccattattgctgccgtgcagaaacaacaacagcagtccggtaaccacccaatcacagtgcattgtagcgctggggcaggacggactgggacgttttgtgccctcagcactgtgttggagcgagttaaagctgaaggcattctggatgtattccagactgtcaagagcctgcgcctccaacggccacacatggttcagacgctggagcagtacgaattttgctacaaagtggtacaggaatatatcgacgcattctctgactacgctaatttcaagtag

SEQ ID NO: 233305 - DNA, 2382 bp, Artificial Sequence
  derived and/or modified sequence
atggacagctggttcatcctggtgctgctgggcagcggcctcatctgtgtgtctgccaacaatgccaccaccgtggcccccagcgtgggcatcaccaggctcatcaacagcagcacagctgagcctgtgaaggaggaggccaagaccagcaaccccaccagcagcctgaccagcctgtctgtggcccccaccttcagccccaacatcaccctgggccccacctacctgaccaccgtgaacagcagtgacagcgacaatggcaccaccaggacagccagcaccaacagcatcggcatcaccatcagccccaacggcacctggctgcctgacaaccagttcacagatgccaggacagagccctgggagggcaacagcagcacagctgccaccaccccagagaccttccccccatctgatgagacccccatcatcgctgtgatggtggccctgagcagcctgctggtgattgtgttcatcatcatcgtgctgtacatgctgcgcttcaagaagtacaagcaggccggcagccacagcaacagcttccggctgagcaatggaagaacagaagatgtggagccccagagcgtgcccctgctggcccggagccccagcaccaacaggaagtacccacccctgcctgtggacaagctggaggaggagatcaacagaaggatggctgatgacaacaagctgttccgggaggagttcaatgccctgcctgcctgccccatccaggccacctgtgaggccgccagcaaggaggagaacaaggagaagaaccgctacgtgaacatcctgccctatgaccacagccgggtgcacctgacccctgtggagggcgtgcctgacagcgactacatcaatgccagcttcatcaatggctaccaggagaagaacaagttcatcgccgcccagggccccaaggaggagaccgtgaatgacttctggaggatgatctgggagcagaacacagccaccatcgtgatggtgaccaacctgaaggagaggaaggagtgcaagtgtgcccagtactggccagaccagggctgctggacctacggcaacatccgggtgtctgtggaggatgtgacagtgctggtggactacacagtgaggaagttctgcatccagcaggtgggggacatgaccaacaggaagccccagaggctcatcacccagttccacttcacctcctggccagactttggagtgcccttcacccccatcggcatgctgaagttcctgaagaaggtgaaggcctgcaacccccagtatgctggggccatcgtggtgcactgcagcgctggggtgggccgcacaggcacctttgtggtgattgatgccatgctggacatgatgcacacagagaggaaggtggatgtgtatggctttgtgagccgcatccgggcccagcgctgccagatggtgcagacagacatgcagtatgtgttcatctaccaggccctgctggagcactacctgtatggagacacagagctggaggtgaccagcctggagacccacctgcagaagatctacaacaagatccctggcaccagcaacaacggcctggaggaggagttcaagaagctgaccagcatcaagatccagaatgacaagatgaggactggaaacctgcctgccaacatgaagaagaacagagtgctgcagatcatcccctatgagttcaacagagtcatcatccctgtgaagagaggagaagaaaatacagattatgtgaatgccagcttcattgatggctaccggcagaaggacagctacatcgccagccagggccccctgctgcacaccatcgaggacttctggaggatgatctgggagtggaagagctgcagcatcgtgatgctgacagagctggaggagcggggccaggagaagtgtgcccagtactggcccagtgatggcctggtgtcctatggagacatcaccgtggagctgaagaaggaggaggagtgtgagagctacacagtgcgggacctgctggtgaccaacacccgggagaacaagagccggcagatccggcagttccacttccacggctggccagaggtgggcatccccagtgatggcaagggcatgatcagcatcatcgctgctgtgcagaagcagcagcagcagagcggcaaccaccccatcaccgtgcactgcagcgctggagctggccgcacaggcaccttctgtgccctgagcacagtgctggagcgggtgaaggccgagggcatcctggatgtgttccagacagtgaagagcctgcggctgcagaggccccacatggtgcagaccctggagcagtatgagttctgctacaaggtggtgcaggagtacattgatgccttcagtgactatgccaacttcaagtag

SEQ ID NO: 233306 - DNA, 2382 bp, Artificial Sequence
  derived and/or modified sequence
atggacagctggttcatcctggtgctgctgggcagcggcctgatctgtgttagcgctaataacgccactactgtagctccttcagtagggatcacgcgactcattaactccagtactgccgagcctgttaaagaggaggcaaaaacaagcaacccaacctcatctctgacaagcctcagtgtcgcacctacattttctccgaatattacactggggccaacatacctgacaaccgtcaactcttccgactcagataatgggacgacgcggaccgcttccacgaatagcattggaatcaccattagcccaaatggaacttggctccctgacaaccagttcaccgacgccagaaccgaaccatgggaagggaactcaagcaccgcagccactacacccgaaacatttccccctagtgacgagactccaattattgccgtgatggtggccctgtcctccctcttggtgatcgttttcatcattatagtcctctatatgctgaggttcaagaagtacaagcaggcaggctctcattctaattcattccggctttcaaacggaaggacagaggacgtggaacctcagagcgtgccactgctggccagaagtccgtctaccaaccgtaagtaccctcccctcccagtggataagctcgaagaggagattaaccggcggatggccgatgataacaagctgtttcgtgaggagtttaatgctcttcccgcctgtcctattcaagctacttgcgaagccgcgagcaaggaggaaaataaggagaaaaataggtacgtgaatattctgccctacgaccacagtcgtgttcacctgacaccagtggagggtgttcccgattctgactacattaacgcgtctttcatcaacggctaccaggaaaaaaataagttcattgcagcccagggccccaaagaagagacagtgaacgatttttggcgaatgatctgggaacaaaacacagccactatagtgatggtcactaacctcaaggaacggaaggaatgcaagtgcgcccagtactggcctgaccagggctgctggacctacggtaacattcgggtatctgtggaggatgttaccgtgttagtggattacaccgttcgcaaattctgcatccagcaagttggagacatgaccaacagaaagccacagagattgataacacagttccattttacatcttggcctgactttggcgtgcctttcacaccaattggtatgctgaaatttctcaaaaaggtcaaggcctgcaacccacagtatgctggcgctatagtggtgcattgttcagctggcgtcggtaggaccggcactttcgtagtcattgacgcgatgctggatatgatgcacacagaacgaaaagtggacgtctatgggttcgtgagcaggattcgcgctcagaggtgccagatggtgcaaactgacatgcagtatgtgttcatataccaggccctcctcgaacactacttgtacggcgatactgagctggaagtcacttccctggagactcacttgcagaaaatctacaataagattcccgggacctccaacaacgggctggaggaagagttcaagaagctgacatcaatcaagattcagaatgataagatgaggacaggcaatttacctgccaacatgaaaaaaaaccgcgtgctacagatcatcccctatgaatttaacagagttattatccctgtgaagcgcggggaggaaaatacagactatgttaacgcgagctttattgacgggtatcgccagaaggattcatatattgcaagtcagggtcccctccttcataccatcgaagatttctggaggatgatctgggaatggaagagctgctctattgtgatgctgaccgaacttgaagagagaggtcaggagaagtgtgcacaatactggcccagcgatggcctcgtcagctatggcgacattaccgtggaactgaagaaggaggaggagtgtgagtcatacaccgtgcgtgacttactcgtgaccaacactagggagaataagtctaggcagatccggcagttccacttccacgggtggcctgaggtcggcattccctcggacgggaaaggtatgatctctatcattgctgcggtgcagaaacagcagcaacaatccggcaatcaccccataacagtgcactgttcagctggcgccggacggacggggactttttgcgcactgtctaccgtgctggagcgggtaaaagcagagggcatcctggacgttttccaaactgtgaaaagcctgcgtcttcaacggccacatatggtgcaaaccctagagcaatatgagttctgttacaaagttgtgcaagagtatatcgacgcgttctccgattatgctaacttcaaatag

SEQ ID NO: 233307 - DNA, 2382 bp, Artificial Sequence
  derived and/or modified sequence
atggattcctggttcatcctggtacttcttgggtctggactgatttgcgtatccgccaataacgcaacaaccgttgcaccaagcgtgggtattactcgcttaattaacagtagtacagccgaacccgtcaaagaagaggcaaagacttcaaacccaacttcaagtttaacttcattgagtgtcgccccaaccttcagtcctaacattactttgggcccaacctacctgacaacggtgaatagctccgactctgacaatggcaccacgagaaccgccagcaccaacagcattggcattacaataagtcccaatgggacgtggctacccgacaaccaattcactgacgcgagaactgagccatgggaggggaacagtagtacggcagctacgacacccgagacttttcccccatctgacgagacaccaattatcgcagttatggtcgcactctcatccttgcttgttattgtctttatcattatcgtactgtacatgttgcgtttcaagaagtacaaacaggccggttcgcactctaattccttccggctgagcaatggacggactgaggatgtggagccacagagcgtgcccctgctggctcgaagtccatccactaacaggaagtaccccccacttcccgtcgacaagctcgaagaggaaattaaccgaagaatggcggacgataataagctttttagagaggaattcaatgcccttcccgcatgccccattcaggccacctgtgaggctgcgtctaaagaggagaataaggagaagaatcggtatgttaatattcttccatacgatcattctcgcgtgcacctgacaccagtcgagggtgtacccgacagtgactacattaatgcttcctttattaatggctatcaagagaaaaataagttcattgccgctcagggtcctaaggaagagactgtgaacgatttctggcgcatgatctgggagcaaaacaccgctacaattgtgatggtcaccaacttgaaggagcggaaagagtgcaagtgcgcacagtactggcccgaccagggttgttggacgtatggaaatataagagtgtctgtcgaagacgttaccgtacttgtggactacaccgtgcgaaagttttgcatacaacaggtcggggacatgactaacagaaagcctcagaggcttatcactcaattccacttcaccagttggccggactttggggtgccattcacacccatagggatgttaaaattcctcaaaaaagttaaagcctgtaacccccagtacgccggagctatagtcgttcattgctccgccggagtcgggaggaccgggacctttgtggtgattgacgctatgcttgacatgatgcacacagagcggaaagtggacgtgtacggattcgtaagtcgtatcagggcccaacgatgccagatggttcagaccgacatgcaatacgtctttatttaccaggctctcttggaacactacctgtacggtgatacagagctggaggttacaagtttagaaacacatctacagaaaatttataacaaaattccagggaccagtaacaacggactggaggaagagttcaagaagctcacatccataaagattcagaacgacaagatgcggaccggcaatctgccagcaaatatgaagaagaatcgggtgctccagatcatcccgtacgagttcaaccgcgtcataatcccagtaaagagaggcgaagagaacaccgactatgttaatgctagcttcatagatggttataggcagaaggatagctatattgcctctcaaggtccgttgctgcataccattgaggacttttggaggatgatctgggagtggaaatcttgcagtatagtcatgctcacagagctggaggagcgcggtcaggagaaatgcgcccagtattggccctccgatggacttgtctcttacggcgacatcaccgtggaattgaagaaggaggaagaatgcgagagttacacagtgcgcgatctgttagtgaccaacacccgtgagaacaaatctcggcagattcggcagtttcatttccatgggtggcctgaagttggcatccctagtgacggcaagggcatgatttcgataatcgcggcagtacagaagcagcagcaacagtccggtaatcatcccatcactgttcactgcagcgctggtgcgggacgcacgggtacgttctgtgccctgagtactgtgttggaacgcgttaaggccgaggggattctcgatgtgttccagacggtcaagtcactgagacttcagcggccacacatggtgcaaaccctcgaacagtacgagttttgctataaggtggttcaagagtatatcgacgctttcagcgactacgcaaactttaaatag

SEQ ID NO: 233308 - DNA, 2382 bp, Artificial Sequence
  derived and/or modified sequence
atggattcttggtttatcctggttctgctcggttccggtctgatatgcgtttccgctaacaacgcaacaaccgtggcgccaagcgttggcatcactcgtctcatcaactcctccacagctgagccagtcaaagaggaagcaaagacatcgaatcccacctccagcctcacctccctttccgtcgcacccacgttctcccccaatatcactcttggtcccacctatttgactactgtgaattcaagcgattctgacaatggcacaacacgaacagcctcgaccaatagcattggtattacgatctcaccgaacggcacttggcttcccgataaccagtttactgacgcaaggaccgagccttgggaaggcaatagttccactgctgcgacaacacctgagacttttccaccctctgatgagactccaatcatagccgtaatggttgcactttccagcctactggtgatagttttcattatcattgtcctgtacatgctgaggttcaaaaaatataagcaagcaggcagtcactcaaactcgtttagactgtctaatggtagaactgaagacgttgagcctcagtccgtgccgctgctcgccagaagcccctccaccaacagaaaatatcctccactgccagtagataagctcgaggaagagatcaataggagaatggccgatgataacaagctgtttcgggaagaatttaatgcgctcccagcttgcccgatccaggctacttgcgaagcagcctccaaagaggaaaataaagaaaaaaaccgctacgtgaatatcctgccttatgaccacagtagggttcacctcacccctgtggaaggcgtcccagatagcgattacattaatgcgtcattcattaatggctaccaggagaaaaacaagtttattgccgctcagggaccaaaggaagagacagtcaacgatttttggcgaatgatctgggaacaaaacacagccaccatagtcatggtaactaacttaaaggaacgcaaggagtgcaagtgtgctcaatactggcctgatcaaggttgctggacatatgggaatatccgagtgtcagtggaggacgtgacggtgctcgttgattacactgtcagaaaattctgcatccagcaggtgggtgatatgaccaatcgaaagcctcaaagacttatcactcaattccacttcacctcttggccagatttcggagtcccctttacacccatcggcatgttgaagttccttaagaaggtcaaggcatgtaatccgcagtacgccggggccatcgtggtccactgttcggcaggagtaggcaggactggaactttcgtggttatagacgccatgctggacatgatgcatactgaacgtaaagtcgacgtatacggcttcgtttctaggattagagcacagcggtgccagatggtgcagacagatatgcaatacgtgtttatatatcaagctctcctggaacattacctatatggtgacaccgaactggaagtgacttcattagagacccacctccagaaaatttacaataagatacccggtacctcaaacaatgggttggaggaggagttcaagaagctgacttcaattaagattcagaacgacaaaatgcgtacgggtaaccttcccgcgaatatgaagaagaacagggtgctgcaaattatcccctatgaattcaatcgggtgattatccctgtcaagcgcggtgaagaaaacacagactatgtcaacgcttcctttatcgatggttatcgtcaaaaagactcctatatagcgtcccaaggcccgctgcttcacacgatcgaggacttctggaggatgatctgggagtggaaatcttgtagtattgtgatgctaacagaactggaagaacggggccaggaaaaatgtgcccaatactggcccagcgacggactggttagttacggtgacatcaccgtggagctgaaaaaagaggaagagtgtgagtcttacactgttagagacctgttagtgaccaataccagagaaaataaaagtaggcaaattagacagtttcactttcatggctggcccgaagtgggcatcccgtcagatggcaaaggaatgatcagtatcatcgcagcagtgcagaagcaacagcagcagtccggaaatcatcccatcactgtccactgttcggccggagccggtaggacaggaacattctgcgccctcagcactgtgttggagcgagtcaaggccgagggaattctggatgtgttccaaaccgtcaaatctctcaggctgcagcggcctcatatggtgcagaccttggaacagtatgagttttgctataaggtggtacaggagtatatcgacgcctttagcgattatgctaattttaagtag

SEQ ID NO: 233309 - DNA, 2382 bp, Artificial Sequence
  derived and/or modified sequence
atggatagctggtttattcttgtcctgttgggcagcgggttaatatgtgtcagcgctaataatgcgacaaccgtggccccttcagtgggaatcacccggctcatcaactctagcacagccgagccagtcaaagaggaagccaagacttcaaaccctacttccagcctcaccagcctttcagtggcacccactttcagtcccaatatcacattggggccaacctacttgacgactgtgaattcatcagattctgataatggcactacacggacagcctcaacaaattctatcggaatcacaattagccccaacggaacgtggctacccgataatcagtttaccgatgctaggaccgaaccgtgggagggtaactccagcaccgctgccaccacccctgagacctttccaccctccgacgagacacccattatcgccgtgatggtcgcactttcctctctcctcgtgatcgttttcataattattgtcttatacatgctcaggtttaaaaagtacaagcaagctgggtcacactcgaacagtttcagacttagcaacggccgcacagaagatgtcgaacctcagtcagtccctctgcttgctaggtctccgtccacaaatcgtaaatacccgccccttcctgttgacaaactggaggaggagataaacagaagaatggctgatgataacaaactcttcagggaggaattcaacgcactgccagcctgtccaatccaggctacgtgtgaggccgccagcaaggaagagaacaaggagaagaaccggtacgtcaacattctgccgtacgaccacagtcgtgttcacctgactccggtggagggcgtccctgactccgactatataaacgcctcttttatcaacggctaccaagagaaaaacaaatttattgccgcccaaggaccaaaagaagagaccgtcaacgatttctggcggatgatttgggagcagaataccgcaactattgtgatggtgactaacctcaaagagcggaaggagtgtaagtgcgcccagtactggccggaccagggctgttggacttacgggaatatccgagtcagcgtggaagacgttaccgtcttagttgactacacagtgagaaagttctgcattcagcaggttggcgatatgaccaatcgcaaaccacagcggttaattactcagtttcacttcacaagttggcctgacttcggggtgccttttacaccaatcgggatgttgaaatttctgaagaaagtgaaggcctgcaacccccagtatgcaggcgcgatagtggttcactgctcagccggggtgggacgtacaggtactttcgtggtgattgacgctatgctggacatgatgcatactgaaaggaaggtggatgtttacgggtttgtgtctcgaatccgtgcccaaaggtgtcaaatggtgcagacggatatgcaatatgtattcatataccaggccctgttggagcattatctatatggcgacacagagctggaggtcacctccctggagacccatctgcagaagatttacaacaaaattcccggcaccagcaataacggccttgaagaggaattcaaaaaactgacaagtatcaagattcaaaatgacaagatgaggaccggcaacttgccggccaacatgaagaagaatcgtgtgctgcagattatcccctacgagtttaaccgcgtcataattccagttaaaagaggggaggagaataccgactatgtcaacgcctctttcatagatggatatcggcagaaagactcctatatcgctagccaagggcctctgctgcacactattgaagacttctggagaatgatttgggaatggaaatcatgctcaatagtcatgctcactgagctcgaagaaagaggacaggagaaatgtgcccagtactggccatccgacggtctggtgagctacggtgacattactgtggaacttaagaaggaggaagagtgcgagagctataccgtgagggatcttctggtgacaaataccagggaaaacaagtctaggcagatccgacagtttcacttccatggatggccagaagttggaattcctagcgatggcaaaggcatgatcagcatcattgctgctgttcaaaagcagcagcaacaaagcgggaatcaccctattacagtccactgcagtgcgggggcaggacgcacaggcaccttttgcgctctgtccacagtcttagaacgtgtgaaggcagaggggatcctggacgtattccagacggtgaagtcactgcgactgcagaggccccacatggtacaaaccctggagcaatatgagttttgttacaaggtggtacaggaatacatcgacgcctttagcgattatgccaatttcaaatag

SEQ ID NO: 233310 - DNA, 1977 bp, Artificial Sequence
  derived and/or modified sequence
atggttgccttgagcagtctgttggtcattgttttcatcattattgtcctgtacatgctgcgacgcttcagaaaagctgagctgatgagcagaaataccgaaaagtacaaacaggcgggcagtcacagtaattctttcaggctaagcaacgggcgaacggaggatgtcgaaccgcagagtgttcctctgctcgctcgatctccctccaccaaccggaaatatccgcccctgcctgtggataaactcgaagaggaaataaatcgaagaatggcagacgataacaagctttttcgcgaggaattcaacgctcttcccgcttgcccaatccaggccacctgtgaggctgccagtaaagaggagaataaggagaagaatcgctacgtgaatatcctgccatatgatcactctagagtgcatctcacccccgtggaaggagtcccagatagtgattacataaatgcatcgtttataaacgggtaccaggagaagaacaaatttatcgccgcccaaggaccaaaggaggagacggttaatgatttctggcggatgatatgggagcagaatactgctaccatcgtgatggtcacaaatctgaaggaaagaaaggagtgcaagtgcgctcagtattggcctgatcagggatgctggacgtacggtaatatccgcgtgagtgtcgaggacgtgacagtgctcgtggattacaccgtgagaaaattctgtattcagcaggtgggagacatgacaaatcgtaagccacaaaggctgataacacagttccacttcacatcgtggcccgatttcggagttccgttcacgcccatcggaatgcttaagtttcttaaaaaagtgaaggcctgtaacccccagtacgccggggcaattgtagtgcactgttcagcaggggtcggcagaacgggaacttttgtcgtcattgacgctatgcttgacatgatgcatacagaaagaaaagttgacgtctatggctttgtctctaggatccgcgctcagcggtgccagatggtacagactgacatgcagtatgtcttcatctaccaggcactgctggagcactacttatacggggatacagagctcgaggttacctcgctggaaactcacctgcagaagatatacaataaaatccccggaacttccaacaatgggcttgaggaagagtttaaaaaacttacatcaatcaagattcagaatgataaaatgcgcacaggaaatctgcccgcaaatatgaagaagaatcgggtgttgcagatcatcccgtacgagtttaaccgggtcattattccagttaagcggggggaggagaacacagattacgttaacgctagttttatcgatggttacaggcagaaggacagttatatcgcttctcaagggcccttactgcacaccattgaggacttttggcgaatgatctgggaatggaaaagctgtagcatcgttatgctgaccgaactcgaggaaaggggtcaggagaaatgtgcccagtattggccctctgacggtctggtttcctacggggacattacagtcgagttaaagaaagaagaggagtgcgaaagctacaccgttagagacttgctcgtgactaacaccagagagaataagagccggcagatacgccaattccacttccacggctggcctgaagtgggcataccttctgatggaaagggcatgatcagtattatcgcagcagtgcagaagcaacagcagcagtccggaaatcatccaataaccgtgcattgcagcgctggagctggtcgcaccggaacgttctgtgcattatctactgtgcttgaaagagttaaagcagaggggatcctggacgtttttcagacagtgaaaagtctcaggctccagcgcccacacatggtccagacactcgaacaatatgagttttgttacaaggtggtccaggaatatatcgatgcctttagcgattacgcaaattttaagtag

SEQ ID NO: 233311 - DNA, 417 bp, Artificial Sequence
  derived and/or modified sequence
atggactcgtggttcatactagttctgcttggatctggcctgatctgtgtttccgctaacaatgctactacagtcgctccgagtgttggaattacccgtcttatcaactcttcaactgctgagccagtcaaggaggaagctaaaaccagtaatcccacctcaagtctcacatcgctgagcgtcgctcccactttctcaccgaacattactctgggaccaacttatctcaccactgtgaactcatctgatagtgataacgggactacccggactgcctcaaccaactccatcggtattacaatcagccccaacggtacctggttgcctgacaaccagtttacagacgcacgcacagaaccctgggaaggaaattccagtaccgccgctactactccagaaacttttccaccctcttag

SEQ ID NO: 233312 - DNA, 762 bp, Artificial Sequence
  derived and/or modified sequence
atggactcctggttcatactggttttactgggttctgggttgatttgcgtgagcgctaataatgccacaaccgtggcgccctcagttggtataactcgactaattaactcttctacagcggaacctgtcaaagaagaagctaaaacaagcaaccccacttcatctctgacatcattgtctgtcgcacccaccttcagcccaaatattaccttgggacccacatatttgaccactgtgaacagctcagactccgataatgggacaacaaggacagcctctactaactctatcgggattacgatttccccaaacgggacatggctacccgataaccaattcaccgacgcccgaacagaaccctgggaagggaactccagtactgccgccacaacccccgagacctttccaccatctgacgaaacacctatcattgcggttatggtggctctaagttcccttcttgtaattgtgttcattattatagtcttgtatatgctacgcttcaaaaagtacaagcaggcaggcagtcacagcaatagcttccgtctatccaacgggcggaccgaagatgtcgagcctcaaagcgtgcctctactagcccggtctcccagcactaatcggaagtatccaccccttcctgtggacaaactggaggaggagatcaatcgtcggatggctgatgataacaagttgttccgtgaggagtttaatgctttgcccgcctgtcccattcaggccacatgcgaagctgcgagcaaatag

SEQ ID NO: 233313 - DNA, 1239 bp, Artificial Sequence
  derived and/or modified sequence
atgactaatcggaagccgcagaggctaataacccagttccatttcacctcctggcccgacttcggagtcccgttcacaccgattggaatgctgaaattcttaaagaaggtcaaagcctgcaacccacagtacgccggtgcgatcgtcgttcactgtagcgctggggtaggtcgcacaggaacgtttgtggttatcgatgctatgctggatatgatgcacaccgaacgtaaggtggatgtctacgggtttgttagtaggattagagctcagagatgccagatggtccaaactgatatgcagtatgtgtttatataccaggcactgttggagcactacctgtacggcgatacagaattggaagtaacatctttggaaacccatctgcagaagatatataataagattccagggacttcgaataatggtctggaagaagaattcaagaagttgacgtccattaagatccagaatgacaagatgcggaccggcaatctgccagctaatatgaagaaaaacagggtccttcagattatcccatatgaattcaaccgggtgatcataccggttaagcgtggcgaagaaaacaccgattatgtgaacgcatccttcattgatggttatcggcaaaaggacagctacatcgcttcccagggacctctgctgcacacaattgaggacttctggcgaatgatctgggaatggaaaagctgcagtattgtgatgctgacggagcttgaagaacgaggccaagaaaagtgcgcgcagtactggccatcggacgggctagttagctacggggatataactgtcgaactgaaaaaggaggaagaatgcgagagttataccgtgagggatctgctggtgacaaacactagagaaaataagtcaagacagatacgccagttccatttccacggatggcctgaggtggggatcccatctgacggcaagggcatgatctccatcattgccgccgtgcaaaaacagcaacagcagagtggcaatcatccaattaccgtgcactgctctgcaggcgcaggcaggaccgggactttttgcgctctttccactgtgctggaacgcgtgaaagccgagggcattcttgacgtcttccagactgtcaagtcactcagattacagcgtccgcatatggtacaaactctcgaacagtatgagttttgttataaagtggtacaggagtacattgacgctttctccgactatgcgaactttaaatag

SEQ ID NO: 233314 - DNA, 1977 bp, Artificial Sequence
  derived and/or modified sequence
atggtggccctgagcagcctgctggtgattgtgttcatcatcatcgtgctgtacatgctgcggcgcttcaggaaggccgagctgatgagcaggaacacagagaagtacaagcaggccggcagccacagcaacagcttccggctgagcaatggccgcacagaagatgtggagccccagagcgtgcccctgctggcccggagccccagcaccaacaggaagtacccacccctgcctgtggacaagctggaggaggagatcaacagaaggatggctgatgacaacaagctgttccgggaggagttcaatgccctgcctgcctgccccatccaggccacctgtgaggccgccagcaaggaggagaacaaggagaagaacagatatgtgaacatcctgccctatgaccacagccgggtgcacctgacccctgtggagggcgtgcctgacagcgactacatcaatgccagcttcatcaatggctaccaggagaagaacaagttcatcgccgcccagggccccaaggaggagaccgtgaatgacttctggaggatgatctgggagcagaacacagccaccatcgtgatggtgaccaacctgaaggagaggaaagaatgtaaatgtgcccagtactggccagaccagggctgctggacctacggcaacatccgggtgtctgtggaggatgtgacagtgctggtggactacacagtgaggaagttctgcatccagcaggtgggggacatgaccaacaggaagccccagaggctcatcacccagttccacttcacctcctggccagactttggagtgcccttcacccccatcggcatgctgaagttcctgaagaaggtgaaggcctgcaacccccagtatgctggggccatcgtggtgcactgcagcgctggggtgggccgcacaggcacctttgtggtgattgatgccatgctggacatgatgcacacagagaggaaggtggatgtgtatggctttgtgagccgcatccgggcccagcgctgccagatggtgcagacagacatgcagtatgtgttcatctaccaggccctgctggagcactacctgtatggagacacagagctggaggtgaccagcctggagacccacctgcagaagatctacaacaagatccctggcaccagcaacaacggcctggaggaggagttcaagaagctgaccagcatcaagatccagaatgacaagatgaggacaggcaacctgcctgccaacatgaagaagaacagagtgctgcagatcatcccctatgagttcaacagagtcatcatccctgtgaagagaggagaggagaacacagattatgtgaatgccagcttcattgatggctaccggcagaaggacagctacatcgccagccagggccccctgctgcacaccatcgaggacttctggaggatgatctgggagtggaagagctgcagcatcgtgatgctgacagagctggaggagcggggccaggagaagtgtgcccagtactggcccagtgatggcctggtgtcctatggagacatcaccgtggagctgaagaaggaggaggagtgtgagagctacacagtgcgggacctgctggtgaccaacacccgggagaacaagagccggcagatccggcagttccacttccacggctggccagaggtgggcatccccagtgatggcaagggcatgatcagcatcatcgctgctgtgcagaagcagcagcagcagagcggcaaccaccccatcaccgtgcactgcagcgctggggccggccgcacaggcaccttctgtgccctgagcacagtgctggagcgggtgaaggccgagggcatcctggatgtgttccagacagtgaagagcctgcggctgcagaggccccacatggtgcagaccctggagcagtatgagttctgctacaaggtggtgcaggagtacattgatgccttcagtgactatgccaacttcaagtag

SEQ ID NO: 233315 - DNA, 417 bp, Artificial Sequence
  derived and/or modified sequence
atggacagctggttcatcctggtgctgctgggcagcggcctcatctgtgtgtctgccaacaatgccaccaccgtggcccccagcgtgggcatcaccaggctcatcaacagcagcacagctgagcctgtgaaggaggaggccaagaccagcaaccccaccagcagcctgaccagcctgtctgtggcccccaccttcagccccaacatcaccctgggccccacctacctgaccaccgtgaacagcagtgacagcgacaatggcaccaccaggacagccagcaccaacagcatcggcatcaccatcagccccaacggcacctggctgcctgacaaccagttcacagatgccaggacagagccctgggagggcaacagcagcacagctgccaccaccccagagaccttcccccccagctag

SEQ ID NO: 233316 - DNA, 762 bp, Artificial Sequence
  derived and/or modified sequence
atggacagctggttcatcctggtgctgctgggcagcggcctcatctgtgtgtctgccaacaatgccaccaccgtggcccccagcgtgggcatcaccaggctcatcaacagcagcacagctgagcctgtgaaggaggaggccaagaccagcaaccccaccagcagcctgaccagcctgtctgtggcccccaccttcagccccaacatcaccctgggccccacctacctgaccaccgtgaacagcagtgacagcgacaatggcaccaccaggacagccagcaccaacagcatcggcatcaccatcagccccaacggcacctggctgcctgacaaccagttcacagatgccaggacagagccctgggagggcaacagcagcacagctgccaccaccccagagaccttccccccatctgatgagacccccatcatcgctgtgatggtggccctgagcagcctgctggtgattgtgttcatcatcatcgtgctgtacatgctgcgcttcaagaagtacaagcaggccggcagccacagcaacagcttccggctgagcaatggaagaacagaagatgtggagccccagagcgtgcccctgctggcccggagccccagcaccaacaggaagtacccacccctgcctgtggacaagctggaggaggagatcaacagaaggatggctgatgacaacaagctgttccgggaggagttcaatgccctgcctgcctgccccatccaggccacctgtgaggccgccagcaagtag

SEQ ID NO: 233317 - DNA, 1239 bp, Artificial Sequence
  derived and/or modified sequence
atgaccaacaggaagccccagaggctcatcacccagttccacttcacctcctggccagactttggagtgcccttcacccccatcggcatgctgaagttcctgaagaaggtgaaggcctgcaacccccagtatgctggggccatcgtggtgcactgcagcgctggggtgggccgcacaggcacctttgtggtgattgatgccatgctggacatgatgcacacagagaggaaggtggatgtgtatggctttgtgagccgcatccgggcccagcgctgccagatggtgcagacagacatgcagtatgtgttcatctaccaggccctgctggagcactacctgtatggagacacagagctggaggtgaccagcctggagacccacctgcagaagatctacaacaagatccctggcaccagcaacaacggcctggaggaggagttcaagaagctgaccagcatcaagatccagaatgacaagatgaggacaggcaacctgcctgccaacatgaagaagaacagagtgctgcagatcatcccctatgagttcaacagagtcatcatccctgtgaagagaggagaggagaacacagattatgtgaatgccagcttcattgatggctaccggcagaaggacagctacatcgccagccagggccccctgctgcacaccatcgaggacttctggaggatgatctgggagtggaagagctgcagcatcgtgatgctgacagagctggaggagcggggccaggagaagtgtgcccagtactggcccagtgatggcctggtgtcctatggagacatcaccgtggagctgaagaaggaggaggagtgtgagagctacacagtgcgggacctgctggtgaccaacacccgggagaacaagagccggcagatccggcagttccacttccacggctggccagaggtgggcatccccagtgatggcaagggcatgatcagcatcatcgctgctgtgcagaagcagcagcagcagagcggcaaccaccccatcaccgtgcactgcagcgctggggccggccgcacaggcaccttctgtgccctgagcacagtgctggagcgggtgaaggccgagggcatcctggatgtgttccagacagtgaagagcctgcggctgcagaggccccacatggtgcagaccctggagcagtatgagttctgctacaaggtggtgcaggagtacattgatgccttcagtgactatgccaacttcaagtag

SEQ ID NO: 233318 - DNA, 2382 bp, Artificial Sequence
  derived and/or modified sequence
atggacagctggttcatcctggtgctgctgggcagcggcctgatctgtgtgtcagcaaacaacgccacgactgtagcgccatccgtgggcatcacacgcctaatcaactcatctaccgctgaacccgtgaaggaagaggcaaaaacatccaatcccacctctagtctaaccagcctgtcagtggctccgacattctcaccaaacatcactctgggccctacgtacctgacaaccgtgaatagttcagacagcgataatgggacgacccggaccgcatccacgaatagtattggtattacgattagccctaatggaacatggttgccagataatcaattcacagatgcccggacggagccatgggaaggcaactcctccaccgccgccacaacgcctgagaccttccctccttctgatgagacccccattattgcagtcatggtcgcgttgagttctcttcttgtgatcgttttcattatcattgtgttatacatgctcaggttcaagaaatataagcaagctggatcgcactctaattctttccgtttgtcgaatggacgcacagaggatgttgagcctcagtccgtgcctcttttagccaggtcccccagtacaaaccgcaaatacccaccactcccagttgacaagcttgaggaggagattaacagacgcatggcggacgataacaagctctttcgagaggagttcaatgcactgcctgcatgtccaatccaggcgacctgcgaggctgcctccaaggaagaaaataaggagaagaaccgatacgttaatatcctgccatacgaccacagcagagttcaccttaccccagttgagggggtgcctgacagcgactacatcaacgcttcctttataaacgggtatcaggagaagaataaattcatcgccgcacaggggcctaaagaggaaactgtgaacgatttttggcgtatgatttgggagcagaacacggcaacaattgtcatggtcacaaacttgaaggagcggaaagagtgtaagtgcgcccaatactggcctgaccaaggatgctggacctatggcaatattcgggttagcgtggaagatgtgactgtactggtggattatactgtaaggaagttctgtattcaacaggtgggtgatatgacgaaccgtaaaccgcagcggcttattacccagttccattttacaagctggcctgacttcggagtacccttcacaccgatcggcatgctaaagttccttaaaaaggtaaaagcctgcaatccccagtacgccggagccatagtcgtgcactgcagtgcgggcgttggccggaccggaacatttgtagtaatcgacgctatgctggacatgatgcataccgagcgtaaggtggacgtatacggattcgtgtcccgtatccgggcccagcggtgtcagatggtgcagaccgatatgcagtacgtcttcatttatcaggctttgctggaacactatctgtacggcgatacagaactcgaagtcacaagcttggagacacacttgcagaagatttacaacaaaataccagggacatccaataatgggctggaggaggaattcaaaaagctgacctctattaagatccaaaatgataagatgcgaactgggaacctgcccgccaatatgaagaagaacagggtgctgcagattataccttacgaatttaacagagtcatcatcccagttaaacgaggcgaggagaacactgactacgtgaatgcctcgtttatcgacggctaccgccagaaagactcctatatagcgagccagggtcccttgttacacaccattgaagacttttggcgcatgatctgggagtggaagtcctgctcaatcgtgatgctgaccgagctagaggagagaggacaggagaagtgcgctcagtattggccaagcgacggattggtttcctatggcgacatcaccgtggaactgaaaaaagaagaggagtgtgagagctacactgtgcgtgatctcttagttacaaataccagggagaataaatcaaggcagatcaggcaatttcatttccacggttggcctgaggttggaattccatccgatggtaaaggtatgatatccattattgcagccgtgcaaaagcagcagcagcagtcaggaaaccatcccatcaccgttcattgttccgccggagccggacgcaccggaacattttgtgccctttccaccgtccttgagcgagtgaaagcagagggcatcctagatgttttccagacggtgaaatccctgcgtctacagaggccccacatggtgcagacactggaacagtatgaattttgctacaaagtggtacaggaatatattgacgccttcagtgactatgcaaacttcaaatag

SEQ ID NO: 233319 - DNA, 2382 bp, Artificial Sequence
  derived and/or modified sequence
atggacagctggttcatcctggtgctgctgggcagcggcctgatctgtgtgagtgcaaataatgcaaccactgttgcaccctccgtgggcattactcgtcttattaacagttctacggctgaacccgtcaaggaagaggctaagaccagcaatccaacctcatcccttacttcactgagcgtggcccccactttctccccaaacatcacgctgggtcctacatacttgaccaccgttaattcctccgatagtgacaacgggacaacaaggacggcttctacaaatagcatcggtatcacaatcagccctaacggcacctggctgcccgataaccagtttactgacgcccggacagagccctgggagggaaactcttctactgccgcgacaacgccggagaccttcccccctagcgacgaaacgcccatcattgctgtcatggtggctctaagttcccttctagtaatagtgtttattattattgtgctgtacatgttgcgatttaagaagtataagcaagcagggtcacatagtaattccttccggctgtcgaacggaaggactgaggacgtcgagcctcagagtgttcccttactggcccgaagtccgtctacaaatcggaaatacccacccttgccggtcgataaactggaggaagagatcaataggagaatggcggacgataataaactattccgtgaggagttcaacgctctgcccgcatgtccgatccaggcaacttgtgaggccgccagcaaggaggaaaacaaagagaaaaacagatatgtcaacatcctgccgtatgaccactctcgggtgcacttgactccagtggaaggcgttcccgactctgattatataaacgcctccttcattaatggataccaggagaaaaacaagtttatcgccgcccagggcccaaaagaagagaccgtgaacgacttttggcgaatgatctgggagcagaacaccgctactatcgtgatggtaaccaatttgaaggaaaggaaggaatgtaagtgcgcccagtactggcccgatcagggatgttggacttacggcaacattcgggtgtccgtggaagatgtcacggttctcgtcgattataccgtccggaaattctgtattcagcaggtgggcgacatgactaaccgcaaaccccagcgcttgatcacgcagttccactttacttcctggcctgatttcggcgttccatttacacccattggcatgctgaaattcttgaagaaagtgaaagcttgcaaccctcagtacgcgggcgcaattgtcgtgcactgtagtgccggcgtgggacgcactggtacatttgttgtcatagatgccatgttagatatgatgcacacagagcggaaggttgacgtgtatgggttcgtgtctcgcatccgggctcagcgatgtcagatggtccagaccgacatgcagtacgtgtttatttatcaagcccttcttgagcattatttgtatggggatacagagttggaagtcacatctctcgaaacacatctgcagaaaatctacaataagatccctgggaccagcaacaacggactggaggaggaattcaaaaagctaacatcaatcaaaattcagaacgacaagatgcgcacagggaacctacccgctaatatgaagaaaaaccgtgttctgcagatcattccatacgaattcaatcgggttataatacccgtcaagcgcggcgaggagaacaccgattatgtaaacgccagtttcatcgacggctacagacagaaggacagctatattgcttctcagggccccctgctgcacaccatcgaggacttttggagaatgatatgggagtggaagtcttgctctattgtaatgctaaccgaactggaggaacgcggacaggaaaagtgcgcccaatattggccttcggatggcctagtctcctatggcgatatcaccgtagagcttaagaaagaggaagaatgtgagtcttataccgtaagggatctgctggtaactaatactagggaaaacaaaagcagacagatccggcagttccactttcacggttggcccgaggtggggatccctagcgacggaaagggtatgattagtatcatcgctgctgtgcagaaacaacagcagcagtcagggaatcatccaattacggtccattgtagtgcgggtgctggtcgcacaggaacattctgcgcactctccactgtcttggagagagttaaggcagagggaatactggatgtattccagacagtgaagtcactgcgtcttcagcggcctcatatggttcagaccctagaacaatacgaattctgctacaaggttgtgcaggagtacattgatgcgttctcagactacgcaaatttcaaatag

SEQ ID NO: 233320 - DNA, 1977 bp, Artificial Sequence
  derived and/or modified sequence
atggtggccctgagcagcctgctggtgatcgtgttcatcatcatcgtgctatacatgctccgcagatttcggaaggcagagcttatgtccaggaatactgaaaagtacaaacaggccggctcgcactccaacagcttccggctgagcaatgggcgcactgaggatgtcgaaccacaatccgtgcctctgctggccagatccccgagtaccaaccggaaatatccccccttgccagtggataagttggaggaggagattaatcgaagaatggctgacgacaataaattgtttagagaagaattcaacgctcttcccgcctgtcccattcaggcaacctgcgaggccgcctccaaagaggaaaacaaagagaagaatcgctacgtaaatatcctgccatacgatcattcccgcgtgcatctcactcccgtggagggggtcccagattcagactacattaacgcatctttcatcaacggctaccaggagaaaaacaagttcatcgccgcccagggtcccaaagaggagacagttaatgacttttggcgaatgatttgggaacaaaacaccgctacaatagttatggtgacaaacctgaaggagaggaaggaatgtaagtgtgcccagtactggccagaccaaggctgctggacttatggcaatatccgggttagtgtagaagacgtgaccgtgctggtggactacacggtgcgcaagttctgcattcagcaggtgggcgacatgacaaataggaaaccccagcgccttattacacagtttcactttacttcctggccggattttggcgtccccttcacccccataggtatgctcaaattcctcaagaaggttaaagcatgtaacccccaatatgccggggcaatcgtagttcattgttccgctggagtcggccggaccggcaccttcgtcgtgatcgatgcaatgcttgatatgatgcatacagagcgcaaagtggacgtctatggctttgtatctaggatccgagcacagcgttgccaaatggttcagactgatatgcaatatgtcttcatttaccaggcgctgcttgaacactacctgtacggcgacactgaactggaagttactagtttagagacacacttgcagaagatttataacaaaattccaggcacttcaaataacggactggaagaggagttcaagaaactgacctccatcaagatccagaatgacaaaatgcgcaccgggaacttaccggccaacatgaaaaagaatagagtactgcagattatcccctacgagtttaatagagtcattatccccgtgaaacggggcgaggaaaatactgactacgttaacgctagcttcattgacgggtatagacagaaggactcttacatcgcctcacagggcccgttgcttcacaccatcgaggacttttggcgcatgatatgggagtggaagtcttgttctattgttatgctgaccgaacttgaggagagaggccaagaaaaatgcgcccaatattggccctccgatggacttgtaagttacggggacatcactgtggagctgaagaaggaggaagagtgcgagtcatacactgttcgcgacctgctggtgaccaatacaagagaaaataaatcaagacaaatccgccaattccacttccatggatggcccgaagtgggcatccccagtgatggtaaggggatgattagtattattgccgccgtccaaaagcaacagcaacaaagtggaaaccacccgatcactgtgcattgtagcgctggagccggacgcactggaactttttgcgctctgtcaacggtcctcgaacgcgtcaaagctgagggcatcttggacgtttttcagactgtgaagtcactccgcttacagcgcccgcacatggtgcagaccctcgagcagtacgaattctgctacaaggttgttcaggaatatatagacgctttctcagattacgcgaacttcaagtag

SEQ ID NO: 233321 - DNA, 417 bp, Artificial Sequence
  derived and/or modified sequence
atggacagctggttcatcctggtgctgctgggcagcggcctgatctgcgtgtctgccaacaatgccacaaccgtggccccatctgtgggcataactcgactaatcaatagctccaccgcagaaccggtgaaagaggaagcaaaaacatctaaccccacttcgtccctgacttcactctcagtagcccccacattttcaccaaacatcacattggggccaacctaccttaccactgtgaactctagcgacagcgacaacggaaccaccaggaccgcatcaacaaattcaatcggcattaccatctcccctaacggtacatggttacctgacaaccaattcactgacgctaggacagagccttgggagggaaattcttcgacggccgctactacacctgagacgttcccccccagctag

SEQ ID NO: 233322 - DNA, 762 bp, Artificial Sequence
  derived and/or modified sequence
atggacagctggttcatcctggtgctgctgggcagcggcctgatctgcgttagtgcgaataacgcaactacagttgcgccaagtgttgggatcaccaggctaatcaattcatctaccgcggaaccagtcaaagaagaagccaagacctccaaccctacctcatcactaacctcactgagtgttgcacccacgttttctcccaatatcaccctgggccctacttatctaaccacggtcaattcgagtgacagcgataatggtacaacccggaccgcgagtactaactccataggaataaccatatcaccaaatggcacctggctgcctgataaccaatttaccgacgcaaggacggagccttgggaaggaaactcaagtacagcagcgaccacaccagagacatttcctccctcagacgagactcctataattgctgtgatggtggccctgtcttcactcttggtcatcgtgttcatcattatcgtcctctacatgttaagatttaaaaaatacaaacaggccgggagccatagcaactccttcaggctcagcaatggaagaaccgaagacgtggagccacaatcagttcctctgcttgcccgtagcccatcaaccaatcggaaatatccaccattgcctgtagacaagctggaggaagagattaaccgaaggatggctgatgacaacaaattgttccgggaggaattcaatgccctccctgcctgtcctatccaggcaacctgcgaagctgccagtaagtag

SEQ ID NO: 233323 - DNA, 1239 bp, Artificial Sequence
  derived and/or modified sequence
atgaccaaccggaagccccagcggctgatcacccagttccacttcactagctggccagattttggcgtgcccttcactccgatcggaatgctgaagtttctcaaaaaagtcaaagcatgcaacccgcagtacgcaggggccatcgttgtccactgctctgccggggtgggtcgcactggaacgttcgtggttattgacgcaatgctggacatgatgcatactgaacggaaagttgatgtatacggcttcgtgtcacgtattagggcccagcgctgccagatggtgcaaaccgatatgcagtacgtgtttatctatcaggctcttctggaacactacctttacggggatactgaactggaggtgacaagcctggaaacacacttacagaaaatctataataagattcctggcacgtccaacaacgggctggaggaagagtttaagaagttgaccagcataaaaattcagaatgataaaatgcgcacaggcaacctgcccgcaaacatgaaaaagaacagggtgcttcagatcataccctacgagttcaaccgtgtgattatccccgtgaagagaggtgaggagaacacagactacgtcaacgcctcgttcattgacggatacagacagaaggacagctatatcgcttcccaaggcccccttctgcatacgatagaggatttttggaggatgatttgggagtggaagtcttgttccatagtgatgctcaccgagctggaggaaaggggccaagaaaaatgcgcccagtattggcctagtgatgggttggtctcatacggcgatatcacagtggaacttaagaaggaagaagagtgcgagtcgtacaccgtgcgggacctgttagtcacaaacacaagggaaaacaaaagcaggcagatccgccaattccacttccatggatggcctgaagttggcatcccaagtgatggaaaaggcatgataagcattattgctgccgtacaaaagcagcaacagcagtccggcaatcaccctatcacagtgcattgtagcgctggcgccggacgcaccgggacattctgcgccctgtcaactgtcctggagcgggtgaaggctgaaggaattctggacgtgttccaaacagtgaagtccctgaggctgcagagacctcatatggtgcaaacactcgagcaatacgaattttgttataaggtcgtacaagagtacatcgatgcttttagcgattatgccaatttcaagtag

SEQ ID NO: 233324 - DNA, 2382 bp, Artificial Sequence
  derived and/or modified sequence
atggactcatggttcattctggtgcttctcggaagcggcctgatctgcgtgtccgccaataatgctaccactgtggccccttctgttggaatcactaggctcattaatagctcaaccgccgaaccagtgaaggaggaggctaagaccagcaaccccacctctagtctgacctcattgtctgtcgctcctacgttctctcccaacatcacacttggaccaacctatctcactacagtgaacagttctgattctgataacggaacaacgaggactgcaagtacaaacagtattggcatcacgatcagccccaatggcacgtggctgccagacaatcagttcactgatgcgcgtactgagccgtgggaaggtaactcctctacagccgcaacaaccccagaaacttttcctccaagcgacgaaactccaataattgccgtgatggtggccctgagctcgctgttagtcatcgtattcataatcatcgtcttatacatgcttcgctttaagaaatacaagcaggccggttcccactccaattcttttcgtctttctaacggcagaaccgaggacgtggagccacaaagcgtgcctctgttagccaggtcaccctcaactaacagaaaataccctcccctgccagtggacaagctggaagaggagataaaccggagaatggccgacgacaacaagctattcagagaggaattcaatgccctgccagcatgccctatccaggccacttgcgaggccgcttccaaggaagaaaacaaagagaaaaaccgctacgtaaatatcctgccgtatgaccattctcgggtgcacttgacccctgttgaaggtgtgcctgatagcgactatataaacgctagctttattaacgggtatcaggaaaagaataagtttattgctgcccagggtcctaaggaagaaactgtgaacgacttttggagaatgatttgggaacaaaacacagctacgattgtaatggtcactaacctcaaggaaaggaaagaatgtaagtgtgctcagtattggcctgaccagggctgctggacgtacgggaacatcagggtgagcgtggaagatgtgacagtcttagtcgattacaccgttcgtaagttttgcatccagcaagtcggtgatatgactaaccgaaagccccagagactgataacccagttccacttcactagctggcctgacttcggtgtgcccttcacaccaataggtatgttgaaatttttgaagaaagtgaaagcctgcaatccgcaatatgcgggagctattgttgttcactgttccgcaggggtgggtcgcacaggaaccttcgtagtgattgatgcaatgcttgacatgatgcataccgagaggaaagttgatgtttacgggttcgtgagccggattcgcgctcagcgctgccagatggttcagacggacatgcaatatgtgttcatataccaagctctacttgagcactatctgtatggagacaccgaactcgaagtgacttcgcttgagactcatctccagaagatctacaacaagatacccggaacaagtaataatgggctggaagaagaattcaagaaactcacatctattaagatacaaaacgataagatgcgaactggtaacttgcccgctaacatgaaaaaaaaccgcgtgctgcagattatcccttatgagtttaaccgggtgattatccctgtgaaaagaggtgaggaaaacactgactatgtcaatgcatcattcatcgacggttatagacagaaggactcatacatcgcctctcagggtcccctactccatacgattgaagacttctggcggatgatctgggaatggaagtcttgtagcattgttatgctcaccgaactggaagagaggggccaggaaaagtgcgctcagtactggccatcagatggtctggtctcttatggggacatcaccgtagaactcaagaaggaggaagagtgtgagagctataccgtgcgcgacctgctagtgaccaacactcgtgaaaataaatcccggcagatcaggcagttccacttccacggatggcctgaagtgggaattccctccgacggcaaagggatgatttccattatcgcagctgtgcagaaacagcaacagcaatcggggaatcacccgatcacagtgcactgttccgctggcgctggtcgaaccggcaccttttgtgcgctgagtacagtgttggagagggtgaaagcggagggaatactggacgtgtttcagacggtaaaatcactaaggttgcagcgcccacacatggtgcagaccctagaacagtacgaattttgttacaaagtggtgcaggagtatatcgacgccttctccgactatgcaaactttaagtag

SEQ ID NO: 233325 - DNA, 2382 bp, Artificial Sequence
  derived and/or modified sequence
atggacagttggttcatcctggtgctcctggggagcgggctgatctgtgtctccgcaaataacgcaaccactgtcgccccatctgtcggaatcacgagactgatcaactctagcacggcagagccagtcaaagaagaggcaaagacatctaatcccacatcttcccttacctctctgtccgtggctccaacgttctcacctaacatcacgctgggacccacatacctcacaacagtgaattcttctgattcagacaacgggacgacacgcaccgcaagcactaactcaatagggatcaccatttcaccgaacgggacctggctgcccgacaatcagttcaccgatgctaggaccgagccttgggaaggtaactcttccactgccgctactactcccgagacctttcctccaagcgatgaaacgcctataattgctgtgatggtggctcttagctccttgctggtcatcgtctttattattattgtactatacatgcttcggttcaagaaatacaaacaggctggctcacatagcaattccttcagactgtccaacggcaggacagaagacgtcgagcctcagtccgtccccttgctggcccgatccccctccaccaatagaaagtatcccccactgccagtcgataaacttgaagaggaaataaaccgtcgtatggctgacgataacaagctttttagagaagagttcaatgctctacctgcctgccccatccaggcgacctgtgaagccgctagcaaggaggaaaacaaggaaaagaatcgttatgtcaacatactgccatatgatcactcaagagtgcacttaacgcctgtggaaggcgtgcctgatagcgattatattaatgcctctttcattaatggataccaggaaaagaacaagtttatagccgctcagggccctaaagaggagacggtgaacgatttttggcggatgatctgggaacaaaacacagcgactatagtcatggtgacaaacctcaaggaaaggaaggaatgcaagtgcgcacagtactggccggatcagggatgttggacatatggtaatattcgggtgagcgttgaagacgttaccgtccttgtggactataccgtgcggaagttctgtatccaacaggtgggcgatatgaccaaccgtaagcctcagcggcttatcacgcaattccacttcacctcttggccagactttggcgtcccattcacacctataggtatgttaaaattccttaaaaaagttaaggcctgcaaccctcagtacgcgggagctattgttgtgcactgttctgctggggtgggacgtactggcacctttgtggtcattgatgcaatgctggacatgatgcacaccgagcgcaaagtggacgtgtatggtttcgtgtctcgaatccgtgcacagaggtgccaaatggtacagactgatatgcagtacgtgtttatttaccaggccctcctggaacattacctgtatggagacacggaacttgaagttacttccctcgaaacacacctccaaaaaatttataataagattcccggaacctccaacaatggcttggaagaggaatttaagaagctgacttctatcaaaatccaaaatgacaagatgcggaccggaaatctgccagctaatatgaaaaaaaatcgggtgttgcaaatcatcccatatgaattcaaccgcgtcatcatccctgtgaagcggggtgaagaaaataccgattacgtgaatgcctctttcatcgacggctaccgacagaaggattcctatatagcctctcaggggcctctgctgcataccattgaggacttctggagaatgatttgggaatggaagagctgctccatcgtaatgctcaccgagctggaagagaggggacaagagaaatgtgcgcagtattggccatccgacggcctggtctcctacggcgatataactgtggaactgaagaaagaagaagagtgtgagtcctacactgtgcgggatcttctggttacaaataccagagagaacaaatcacgccagatcagacagttccacttccacggttggccagaggtggggatcccatctgatggcaaggggatgattagcatcatcgctgctgtgcagaagcagcagcagcaatccgggaatcatcctataactgttcattgcagcgccggagcaggtcgaactggcactttttgcgcattgtccacggttcttgagagagtgaaagcagaaggcatactggacgtgtttcagactgtcaaatcattacggctccagcgtccccacatggtgcagactcttgaacagtacgagttctgctacaaggtcgttcaggagtacatcgatgctttttctgattatgccaattttaagtag

SEQ ID NO: 233326 - DNA, 1977 bp, Artificial Sequence
  derived and/or modified sequence
atggtggcgctctcttccctcttggtgattgtcttcataatcatagttctctatatgctgagaagatttcgaaaagcagaacttatgagccgcaatactgagaagtacaagcaggccggatcccactctaactctttccgcctgagtaatggcaggacagaggatgtggagccccaaagtgtccccctgttagccaggtcaccctcgaccaaccgaaagtatccaccgctgccggttgataaactcgaggaagaaatcaatagaagaatggccgatgataataaattgttccgagaggagttcaacgccctgcccgcatgccccattcaggccacatgcgaggccgcttccaaggaggaaaataaagaaaagaatcgatatgttaacattctgccttatgaccactcgagggtccacttgacaccagttgagggagttcccgacagcgattatattaacgcaagttttattaatggttatcaggagaaaaataagttcatcgcagcgcagggacctaaggaagaaacagtcaacgacttttggagaatgatctgggagcaaaatacagctaccatcgtaatggttacgaacctgaaagaaaggaaagagtgtaagtgtgcccagtattggcccgatcagggttgctggacgtacggtaacatcagggtgtcggtcgaggacgttaccgtcttagtggactataccgtgcgcaaattttgcattcagcaggtgggcgacatgacaaacaggaagccgcagcggctgatcacgcaattccatttcacatcctggcctgactttggcgtcccattcacacccattggcatgctgaaattccttaaaaaggtaaaggcgtgtaacccacagtacgctggagctatcgtggtccactgctcagctggcgtggggagaactggcacctttgtagtaatagatgcaatgctggacatgatgcacacggaacggaaggtggatgtttacgggtttgtgtctaggatacgagcccaaagatgccagatggtgcagaccgacatgcagtatgtgtttatctaccaagcactgctggaacattatctgtacggggacactgaactggaggtcacctccttggagactcatctacagaagatctacaataagatcccaggcacctcgaataacggcctggaagaagagttcaagaagctgacctcaattaagatccaaaacgacaagatgcgcactggcaacctgcctgccaatatgaagaagaatagggtgctccagattatcccttatgagtttaaccgtgttattataccagttaaacgtggcgaagagaatactgactacgtcaacgctagcttcatagatggctatcgccagaaggattcttacattgcatcacagggtccacttctgcacaccatcgaagatttttggaggatgatttgggaatggaagtcatgctccattgtcatgctgaccgagctggaggaaagaggccaggagaaatgcgcccagtactggccctcggacggactggtgtcctacggcgacatcaccgttgagctcaaaaaagaggaggagtgtgagtcctacacagttcgcgacctgcttgtgacaaacactcgggaaaacaagtctcgtcaaatccggcagttccacttccatggctggcccgaggtgggaatccccagtgacggaaaaggcatgatctccattatcgctgctgtgcagaagcaacagcagcagtccggaaaccatccaatcaccgtacactgttctgccggagccggtagaaccgggacgttttgcgccctaagcactgtgctcgagcgggtgaaagctgaaggtatactggacgtcttccaaacggtgaagagtttgcgattgcagcggccacatatggtgcagaccctggaacaatatgaattttgctataaggtggtgcaggaatacattgatgcattttctgattatgccaattttaagtag

SEQ ID NO: 233327 - DNA, 417 bp, Artificial Sequence
  derived and/or modified sequence
atggacagttggttcatattagtccttttaggtagcggactgatctgcgtatctgccaataacgctactacagtagccccttctgtagggatcactaggctgattaactcctctacagccgaacctgtaaaagaagaggcaaagaccagcaaccccacctcaagcttgacaagcctctcagtggccccaacgttctcccccaatattactctcggccctacttacctgactacagtgaattcctcagactccgataatgggaccactcggacagcatctaccaattcaatagggatcactatttcacccaacggtacctggctccccgataatcagttcacagacgcaagaacagaaccctgggaaggcaacagctccactgcagctaccacacctgagacatttccaccctcttag

SEQ ID NO: 233328 - DNA, 762 bp, Artificial Sequence
  derived and/or modified sequence
atggactcatggtttatccttgtgctgttgggcagtggacttatctgtgtgagtgcaaataacgctacaacagtggcaccatcagtcgggatcactagattgattaactcaagtacagccgaacctgtaaaagaggaagcgaagactagtaatccaaccagttctttaaccagcttgtccgtggccccaacttttagcccaaatatcacactggggccaacctatctcacaacagtcaattcctccgatagcgataacggtaccacacgtactgccagcactaatagtattggaattaccatatctcccaatggcacctggcttccagataaccagtttacggatgccagaaccgagccatgggaagggaatagtagcactgcagctaccacccccgaaaccttccccccttccgacgagacccctattattgcagttatggtcgccctgtcatccttgcttgtcattgtctttattatcatagtgctgtatatgttacgttttaaaaaatacaagcaggccggatcgcacagtaatagcttcaggttaagcaatgggaggactgaggatgttgagccccaatccgtcccactgctcgcacgatcacccagtaccaacagaaagtatccccctctgcctgtggacaagcttgaagaggagatcaatcgacgaatggcagatgacaacaaactgtttcgcgaagagttcaacgccctgcccgcttgccctattcaagctacatgcgaggccgctagtaaatag

SEQ ID NO: 233329 - DNA, 1239 bp, Artificial Sequence
  derived and/or modified sequence
atgactaacagaaaaccccagaggctaataacacagtttcatttcacgtcctggcctgactttggagtccctttcaccccaatcgggatgctgaaatttctcaagaaggtcaaagcctgcaatccccagtatgcgggagccattgtcgtgcactgttctgccggagtgggcagaaccggaacatttgtggtgatagatgccatgctcgacatgatgcatacagagaggaaagtggacgtctacggattcgtctccagaattcgcgctcagcgctgccagatggtgcaaacggatatgcagtatgtttttatttatcaggcgctcttggaacattatctgtatggggatactgaacttgaagtaacctccctggaaactcatctccagaaaatctacaacaagatcccaggaacctccaataacggtctggaggaggagtttaaaaaactgacttcgatcaagatacagaatgacaagatgagaacgggcaacctgcctgctaacatgaagaagaatagagtcctgcaaatcatcccctatgagttcaatagggtgatcattccagtgaagagaggagaagagaatacagactatgtcaacgcttcgttcatagacggctatcgacagaaggatagctacatcgcctctcaagggcctttgctgcatacgatagaagatttctggcgcatgatttgggaatggaaaagttgctccatcgtaatgttgaccgagctagaagagcgcggacaagagaagtgcgctcaatactggcccagtgacgggctggttagctacggcgatatcacagtggagctgaaaaaagaggaggagtgcgaatcatacaccgtgagagaccttctggtcaccaacacgcgagaaaataaatctcgccagattcgccagtttcacttccatggttggcctgaggtcgggatcccgagcgatggcaaaggaatgatcagtattattgcagcagtccagaaacagcagcagcagtccgggaaccaccccattactgtgcattgtagtgccggagcaggcagaaccggtacattttgcgccctctcaacagtgctggaaagggtgaaggctgagggcattctggacgtatttcagactgtgaagtctctcagactgcagcgcccacatatggttcagacgctggaacagtatgaattctgttataaggtggtccaggaatatattgacgctttctcagattacgctaattttaagtag

SEQ ID NO: 233330 - DNA, 3323 bp, Artificial Sequence
  derived and/or modified sequence
agcgaggctgcggcgagtgcggcgctgacagagacgcgcgcgcgcgcgatcgcgctcggaccccggccgctgccgccatcactgtcgcccgcccagtcgcccctcagccgcttcccctcgccatggaggcgaggccgccgccgccgccgcggggctcggagccgcgggccgggcggcggccctgagggctagtggcggcccgaaacgccgccgcggagccgaggcggagccgctgtcctcgtccccagcggtcccgcccaacgcccgactctgtgacacaactaaaaaaaaacaaaggtatttatggaattccactgagtggtaatggatgatgcagttcaaataactaaggacacatgttcaaagagcataattaactttttaaaagaagctaataagcatggattcctggttcattcttgttctgctcggcagtggtctgatatgtgtcagtgccaacaatgctaccacagttgcaccttctgtaggaattacaagattaattaactcatcaacggcagaaccagttaaagaagaggccaaaacttcaaatccaacttcttcactaacttctctttctgtggcaccaacattcagcccaaatataactctgggacccacctatttaaccactgtcaattcttcagactctgacaatgggaccacaagaacagcaagcaccaattctataggcattacaatttcaccaaatggaacgtggcttccagataaccagttcacggatgccagaacagaaccctgggaggggaattccagcaccgcagcaaccactccagaaactttccctccttcagatgagacaccaattattgcggtgatggtggccctgtcctctctgctagtgatcgtgtttattatcatagttttgtacatgttaaggtttaagaaatacaagcaagctgggagccattccaattctttccgcttatccaacggccgcactgaggatgtggagccccagagtgtgccacttctggccagatccccaagcaccaacaggaaatacccacccctgcccgtggacaagctggaagaggaaattaaccggagaatggcagacgacaataagctcttcagggaggaattcaacgctctccctgcatgtcctatccaggccacctgtgaggctgcttccaaggaggaaaacaaggaaaaaaatcgatatgtaaacatcttgccttatgaccactctagagtccacctgacaccggttgaaggggttccagattctgattacatcaatgcttcattcatcaacggctaccaagaaaagaacaaattcattgctgcacaaggaccaaaagaagaaacggtgaatgatttctggcggatgatctgggaacaaaacacagccaccatcgtcatggttaccaacctgaaggagagaaaggagtgcaagtgcgcccagtactggccagaccaaggctgctggacctatgggaatattcgggtgtctgtagaggatgtgactgtcctggtggactacacagtacggaagttctgcatccagcaggtgggcgacatgaccaacagaaagccacagcgcctcatcactcagttccactttaccagctggccagactttggggtgccttttaccccgatcggcatgctcaagttcctcaagaaggtgaaggcctgtaaccctcagtatgcaggggccatcgtggtccactgcagtgcaggtgtagggcgtacaggtacctttgtcgtcattgatgccatgctggacatgatgcatacagaacggaaggtggacgtgtatggctttgtgagccggatccgggcacagcgctgccagatggtgcaaaccgatatgcagtatgtcttcatataccaagcccttctggagcattatctctatggagatacagaactggaagtgacctctctagaaacccacctgcagaaaatttacaacaaaatcccagggaccagcaacaatggattagaggaggagtttaagaagttaacatcaatcaaaatccagaatgacaagatgcggactggaaaccttccagccaacatgaagaagaaccgtgttttacagatcattccatatgaattcaacagagtgatcattccagttaagcggggcgaagagaatacagactatgtgaacgcatcctttattgatggctaccggcagaaggactcctatatcgccagccagggccctcttctccacacaattgaggacttctggcgaatgatctgggagtggaaatcctgctctatcgtgatgctaacagaactggaggagagaggccaggagaagtgtgcccagtactggccatctgatggactggtgtcctatggagatattacagtggaactgaagaaggaggaggaatgtgagagctacaccgtccgagacctcctggtcaccaacaccagggagaataagagccggcagatccggcagttccacttccatggctggcctgaagtgggcatccccagtgacggaaagggcatgatcagcatcatcgccgccgtgcagaagcagcagcagcagtcagggaaccaccccatcaccgtgcactgcagcgccggggcaggaaggacggggaccttctgtgccctgagcaccgtcctggagcgtgtgaaagcagaggggattttggatgtcttccagactgtcaagagcctgcggctacagaggccacacatggtccagacactggaacagtatgagttctgctacaaggtggtgcaggagtatattgatgcattctcagattatgccaacttcaagtaagcggcaacaagggtccgtggaccaggaggattgcctttaatattttgtaatattctgttttgttaatataccccaaattgtgtatatatcttataactgttttagaaattggtacataggcttctattacctattaggtggaaattttatatgtaaatgtgttagcactgatagtcctttttccaatgttttattggggaattaaatagtgtgatgtttggattgatatcgtgaaatcctcagccgagaaattgggctggattgtgctttggttaatacatctttccctaaagaagataaacacaaaatccattccaggtagctcggcaccaactaagaaaaaaagcacaaagttctcagagctctcgaggaaagtggttgtccccgtaccaccatgcactgtaaatatccctcccctctctccctggtcccctcccccatccccaccactgatatcatggggagtaataggaccagagcggtatctctggcaccacactagggactatcaggtaataaaagctttgactccctgaggaaa

SEQ ID NO: 233331 - DNA, 3219 bp, Artificial Sequence
  derived and/or modified sequence
gcggcccgaaacgccgccgcggagccgaggcggagccgctgtcctcgtccccagcggtcccgcccaacgcccgactctgtgacacaactaaaaaaaaacaaaggtatttatggaattccactgagtggtaatggatgatgcagttcaaataactaaggacacatgttcaaagagcataattaactttttaaaagaagctagacttcttcagaagcttgccagtttttcaagctgatttctctcactggcaactcttcagagtgctgttcctactccaccctcccctggtgataagcatggattcctggttcattcttgttctgctcggcagtggtctgatatgtgtcagtgccaacaatgctaccacagttgcaccttctgtaggaattacaagattaattaactcatcaacggcagaaccagttaaagaagaggccaaaacttcaaatccaacttcttcactaacttctctttctgtggcaccaacattcagcccaaatataactctgggacccacctatttaaccactgtcaattcttcagactctgacaatgggaccacaagaacagcaagcaccaattctataggcattacaatttcaccaaatggaacgtggcttccagataaccagttcacggatgccagaacagaaccctgggaggggaattccagcaccgcagcaaccactccagaaactttccctccttcagatgagacaccaattattgcggtgatggtggccctgtcctctctgctagtgatcgtgtttattatcatagttttgtacatgttaaggtttaagaaatacaagcaagctgggagccattccaattctttccgcttatccaacggccgcactgaggatgtggagccccagagtgtgccacttctggccagatccccaagcaccaacaggaaatacccacccctgcccgtggacaagctggaagaggaaattaaccggagaatggcagacgacaataagctcttcagggaggaattcaacgctctccctgcatgtcctatccaggccacctgtgaggctgcttccaaggaggaaaacaaggaaaaaaatcgatatgtaaacatcttgccttatgaccactctagagtccacctgacaccggttgaaggggttccagattctgattacatcaatgcttcattcatcaacggctaccaagaaaagaacaaattcattgctgcacaaggaccaaaagaagaaacggtgaatgatttctggcggatgatctgggaacaaaacacagccaccatcgtcatggttaccaacctgaaggagagaaaggagtgcaagtgcgcccagtactggccagaccaaggctgctggacctatgggaatattcgggtgtctgtagaggatgtgactgtcctggtggactacacagtacggaagttctgcatccagcaggtgggcgacatgaccaacagaaagccacagcgcctcatcactcagttccactttaccagctggccagactttggggtgccttttaccccgatcggcatgctcaagttcctcaagaaggtgaaggcctgtaaccctcagtatgcaggggccatcgtggtccactgcagtgcaggtgtagggcgtacaggtacctttgtcgtcattgatgccatgctggacatgatgcatacagaacggaaggtggacgtgtatggctttgtgagccggatccgggcacagcgctgccagatggtgcaaaccgatatgcagtatgtcttcatataccaagcccttctggagcattatctctatggagatacagaactggaagtgacctctctagaaacccacctgcagaaaatttacaacaaaatcccagggaccagcaacaatggattagaggaggagtttaagaagttaacatcaatcaaaatccagaatgacaagatgcggactggaaaccttccagccaacatgaagaagaaccgtgttttacagatcattccatatgaattcaacagagtgatcattccagttaagcggggcgaagagaatacagactatgtgaacgcatcctttattgatggctaccggcagaaggactcctatatcgccagccagggccctcttctccacacaattgaggacttctggcgaatgatctgggagtggaaatcctgctctatcgtgatgctaacagaactggaggagagaggccaggagaagtgtgcccagtactggccatctgatggactggtgtcctatggagatattacagtggaactgaagaaggaggaggaatgtgagagctacaccgtccgagacctcctggtcaccaacaccagggagaataagagccggcagatccggcagttccacttccatggctggcctgaagtgggcatccccagtgacggaaagggcatgatcagcatcatcgccgccgtgcagaagcagcagcagcagtcagggaaccaccccatcaccgtgcactgcagcgccggggcaggaaggacggggaccttctgtgccctgagcaccgtcctggagcgtgtgaaagcagaggggattttggatgtcttccagactgtcaagagcctgcggctacagaggccacacatggtccagacactggaacagtatgagttctgctacaaggtggtgcaggagtatattgatgcattctcagattatgccaacttcaagtaagcggcaacaagggtccgtggaccaggaggattgcctttaatattttgtaatattctgttttgttaatataccccaaattgtgtatatatcttataactgttttagaaattggtacataggcttctattacctattaggtggaaattttatatgtaaatgtgttagcactgatagtcctttttccaatgttttattggggaattaaatagtgtgatgtttggattgatatcgtgaaatcctcagccgagaaattgggctggattgtgctttggttaatacatctttccctaaagaagataaacacaaaatccattccaggtagctcggcaccaactaagaaaaaaagcacaaagttctcagagctctcgaggaaagtggttgtccccgtaccaccatgcactgtaaatatccctcccctctctccctggtcccctcccccatccccaccactgatatcatggggagtaataggaccagagcggtatctctggcaccacactagggactatcaggtaataaaagctttgactccctgaggaaa

SEQ ID NO: 233332 - DNA, 3135 bp, Artificial Sequence
  derived and/or modified sequence
gtgacacaactaaaaaaaaacaaaggtatttatggaattccactgagtggtaatggatgatgcagttcaaataactaaggacacatgttcaaagagcataattaactttttaaaagaagctagacttcttcagaagcttgccagtttttcaagctgatttctctcactggcaactcttcagagtgctgttcctactccaccctcccctggtgataagcatggattcctggttcattcttgttctgctcggcagtggtctgatatgtgtcagtgccaacaatgctaccacagttgcaccttctgtaggaattacaagattaattaactcatcaacggcagaaccagttaaagaagaggccaaaacttcaaatccaacttcttcactaacttctctttctgtggcaccaacattcagcccaaatataactctgggacccacctatttaaccactgtcaattcttcagactctgacaatgggaccacaagaacagcaagcaccaattctataggcattacaatttcaccaaatggaacgtggcttccagataaccagttcacggatgccagaacagaaccctgggaggggaattccagcaccgcagcaaccactccagaaactttccctccttcagatgagacaccaattattgcggtgatggtggccctgtcctctctgctagtgatcgtgtttattatcatagttttgtacatgttaaggtttaagaaatacaagcaagctgggagccattccaattctttccgcttatccaacggccgcactgaggatgtggagccccagagtgtgccacttctggccagatccccaagcaccaacaggaaatacccacccctgcccgtggacaagctggaagaggaaattaaccggagaatggcagacgacaataagctcttcagggaggaattcaacgctctccctgcatgtcctatccaggccacctgtgaggctgcttccaaggaggaaaacaaggaaaaaaatcgatatgtaaacatcttgccttatgaccactctagagtccacctgacaccggttgaaggggttccagattctgattacatcaatgcttcattcatcaacggctaccaagaaaagaacaaattcattgctgcacaaggaccaaaagaagaaacggtgaatgatttctggcggatgatctgggaacaaaacacagccaccatcgtcatggttaccaacctgaaggagagaaaggagtgcaagtgcgcccagtactggccagaccaaggctgctggacctatgggaatattcgggtgtctgtagaggatgtgactgtcctggtggactacacagtacggaagttctgcatccagcaggtgggcgacatgaccaacagaaagccacagcgcctcatcactcagttccactttaccagctggccagactttggggtgccttttaccccgatcggcatgctcaagttcctcaagaaggtgaaggcctgtaaccctcagtatgcaggggccatcgtggtccactgcagtgcaggtgtagggcgtacaggtacctttgtcgtcattgatgccatgctggacatgatgcatacagaacggaaggtggacgtgtatggctttgtgagccggatccgggcacagcgctgccagatggtgcaaaccgatatgcagtatgtcttcatataccaagcccttctggagcattatctctatggagatacagaactggaagtgacctctctagaaacccacctgcagaaaatttacaacaaaatcccagggaccagcaacaatggattagaggaggagtttaagaagttaacatcaatcaaaatccagaatgacaagatgcggactggaaaccttccagccaacatgaagaagaaccgtgttttacagatcattccatatgaattcaacagagtgatcattccagttaagcggggcgaagagaatacagactatgtgaacgcatcctttattgatggctaccggcagaaggactcctatatcgccagccagggccctcttctccacacaattgaggacttctggcgaatgatctgggagtggaaatcctgctctatcgtgatgctaacagaactggaggagagaggccaggagaagtgtgcccagtactggccatctgatggactggtgtcctatggagatattacagtggaactgaagaaggaggaggaatgtgagagctacaccgtccgagacctcctggtcaccaacaccagggagaataagagccggcagatccggcagttccacttccatggctggcctgaagtgggcatccccagtgacggaaagggcatgatcagcatcatcgccgccgtgcagaagcagcagcagcagtcagggaaccaccccatcaccgtgcactgcagcgccggggcaggaaggacggggaccttctgtgccctgagcaccgtcctggagcgtgtgaaagcagaggggattttggatgtcttccagactgtcaagagcctgcggctacagaggccacacatggtccagacactggaacagtatgagttctgctacaaggtggtgcaggagtatattgatgcattctcagattatgccaacttcaagtaagcggcaacaagggtccgtggaccaggaggattgcctttaatattttgtaatattctgttttgttaatataccccaaattgtgtatatatcttataactgttttagaaattggtacataggcttctattacctattaggtggaaattttatatgtaaatgtgttagcactgatagtcctttttccaatgttttattggggaattaaatagtgtgatgtttggattgatatcgtgaaatcctcagccgagaaattgggctggattgtgctttggttaatacatctttccctaaagaagataaacacaaaatccattccaggtagctcggcaccaactaagaaaaaaagcacaaagttctcagagctctcgaggaaagtggttgtccccgtaccaccatgcactgtaaatatccctcccctctctccctggtcccctcccccatccccaccactgatatcatggggagtaataggaccagagcggtatctctggcaccacactagggactatcaggtaataaaagctttgactccctg

SEQ ID NO: 233333 - DNA, 3343 bp, Artificial Sequence
  derived and/or modified sequence
ctgcggcgagtgcggcgctgacagagacgcgcgcgcgcgcgatcgcgctcggaccccggccgctgccgccatcactgtcgcccgcccagtcgcccctcagccgcttcccctcgccatggaggcgaggccgccgccgccgccgcggggctcggagccgcgggccgggcggcggccctgagggctagtggcggcccgaaacgccgccgcggagccgaggcggagccgctgtcctcgtccccagcggtcccgcccaacgcccgactctgtgacacaactaaaaaaaaacaaaggtatttatggaattccactgagtggtaatggatgatgcagttcaaataactaaggacacatgttcaaagagcataattaactttttaaaagaagctaataagcatggattcctggttcattcttgttctgctcggcagtggtctgatatgtgtcagtgccaacaatgctaccacagttgcaccttctgtaggaattacaagattaattaactcatcaacggcagaaccagttaaagaagaggccaaaacttcaaatccaacttcttcactaacttctctttctgtggcaccaacattcagcccaaatataactctgggacccacctatttaaccactgtcaattcttcagactctgacaatgggaccacaagaacagcaagcaccaattctataggcattacaatttcaccaaatggaacgtggcttccagataaccagttcacggatgccagaacagaaccctgggaggggaattccagcaccgcagcaaccactccagaaactttccctccttcagatgagacaccaattattgcggtgatggtggccctgtcctctctgctagtgatcgtgtttattatcatagttttgtacatgttaaggcgatttagaaaggctgaattgatgagcaggaatacagagaaatacaagcaagctgggagccattccaattctttccgcttatccaacggccgcactgaggatgtggagccccagagtgtgccacttctggccagatccccaagcaccaacaggaaatacccacccctgcccgtggacaagctggaagaggaaattaaccggagaatggcagacgacaataagctcttcagggaggaattcaacgctctccctgcatgtcctatccaggccacctgtgaggctgcttccaaggaggaaaacaaggaaaaaaatcgatatgtaaacatcttgccttatgaccactctagagtccacctgacaccggttgaaggggttccagattctgattacatcaatgcttcattcatcaacggctaccaagaaaagaacaaattcattgctgcacaaggaccaaaagaagaaacggtgaatgatttctggcggatgatctgggaacaaaacacagccaccatcgtcatggttaccaacctgaaggagagaaaggagtgcaagtgcgcccagtactggccagaccaaggctgctggacctatgggaatattcgggtgtctgtagaggatgtgactgtcctggtggactacacagtacggaagttctgcatccagcaggtgggcgacatgaccaacagaaagccacagcgcctcatcactcagttccactttaccagctggccagactttggggtgccttttaccccgatcggcatgctcaagttcctcaagaaggtgaaggcctgtaaccctcagtatgcaggggccatcgtggtccactgcagtgcaggtgtagggcgtacaggtacctttgtcgtcattgatgccatgctggacatgatgcatacagaacggaaggtggacgtgtatggctttgtgagccggatccgggcacagcgctgccagatggtgcaaaccgatatgcagtatgtcttcatataccaagcccttctggagcattatctctatggagatacagaactggaagtgacctctctagaaacccacctgcagaaaatttacaacaaaatcccagggaccagcaacaatggattagaggaggagtttaagaagttaacatcaatcaaaatccagaatgacaagatgcggactggaaaccttccagccaacatgaagaagaaccgtgttttacagatcattccatatgaattcaacagagtgatcattccagttaagcggggcgaagagaatacagactatgtgaacgcatcctttattgatggctaccggcagaaggactcctatatcgccagccagggccctcttctccacacaattgaggacttctggcgaatgatctgggagtggaaatcctgctctatcgtgatgctaacagaactggaggagagaggccaggagaagtgtgcccagtactggccatctgatggactggtgtcctatggagatattacagtggaactgaagaaggaggaggaatgtgagagctacaccgtccgagacctcctggtcaccaacaccagggagaataagagccggcagatccggcagttccacttccatggctggcctgaagtgggcatccccagtgacggaaagggcatgatcagcatcatcgccgccgtgcagaagcagcagcagcagtcagggaaccaccccatcaccgtgcactgcagcgccggggcaggaaggacggggaccttctgtgccctgagcaccgtcctggagcgtgtgaaagcagaggggattttggatgtcttccagactgtcaagagcctgcggctacagaggccacacatggtccagacactggaacagtatgagttctgctacaaggtggtgcaggagtatattgatgcattctcagattatgccaacttcaagtaagcggcaacaagggtccgtggaccaggaggattgcctttaatattttgtaatattctgttttgttaatataccccaaattgtgtatatatcttataactgttttagaaattggtacataggcttctattacctattaggtggaaattttatatgtaaatgtgttagcactgatagtcctttttccaatgttttattggggaattaaatagtgtgatgtttggattgatatcgtgaaatcctcagccgagaaattgggctggattgtgctttggttaatacatctttccctaaagaagataaacacaaaatccattccaggtagctcggcaccaactaagaaaaaaagcacaaagttctcagagctctcgaggaaagtggttgtccccgtaccaccatgcactgtaaatatccctcccctctctccctggtcccctcccccatccccaccactgatatcatggggagtaataggaccagagcggtatctctggcaccacactagggactatcaggtaataaaagctttgactccctg

SEQ ID NO: 233334 - DNA, 707 bp, Artificial Sequence
  derived and/or modified sequence
agagacgcgcgcgcgcgcgatcgcgctcggaccccggccgctgccgccatcactgtcgcccgcccagtcgcccctcagccgcttcccctcgccatggaggcgaggccgccgccgccgccgcggggctcggagccgcgggccgggcggcggccctgagggctagtggcggcccgaaacgccgccgcggagccgaggcggagccgctgtcctcgtccccagcggtcccgcccaacgcccgactctgacacatgttcaaagagcataattaactttttaaaagaagctaataagcatggattcctggttcattcttgttctgctcggcagtggtctgatatgtgtcagtgccaacaatgctaccacagttgcaccttctgtaggaattacaagattaattaactcatcaacggcagaaccagttaaagaagaggccaaaacttcaaatccaacttcttcactaacttctctttctgtggcaccaacattcagcccaaatataactctgggacccacctatttaaccactgtcaattcttcagactctgacaatgggaccacaagaacagcaagcaccaattctataggcattacaatttcaccaaatggaacgtggcttccagataaccagttcacggatgccagaacagaaccctgggaggggaattccagcaccgcagcaaccactccagaaactttccctccttcag

SEQ ID NO: 233335 - DNA, 1107 bp, Artificial Sequence
  derived and/or modified sequence
tgtcggccaaccagcgcctgtctctgaacagccaatgaacacgcgtcttacagccaaggccgggtcgggagcgaggctgcggcgagtgcggcgctgacagagacgcgcgcgcgcgcgatcgcgctcggaccccggccgctgccgccatcactgtcgcccgcccagtcgcccctcagccgcttcccctcgccatggaggcgaggccgccgccgccgccgcggggctcggagccgcgggccgggcggcggccctgagggctagtggcggcccgaaacgccgccgcggagccgaggcggagccgctgtcctcgtccccagcggtcccgcccaacgcccgactctataagcatggattcctggttcattcttgttctgctcggcagtggtctgatatgtgtcagtgccaacaatgctaccacagttgcaccttctgtaggaattacaagattaattaactcatcaacggcagaaccagttaaagaagaggccaaaacttcaaatccaacttcttcactaacttctctttctgtggcaccaacattcagcccaaatataactctgggacccacctatttaaccactgtcaattcttcagactctgacaatgggaccacaagaacagcaagcaccaattctataggcattacaatttcaccaaatggaacgtggcttccagataaccagttcacggatgccagaacagaaccctgggaggggaattccagcaccgcagcaaccactccagaaactttccctccttcagatgagacaccaattattgcggtgatggtggccctgtcctctctgctagtgatcgtgtttattatcatagttttgtacatgttaaggtttaagaaatacaagcaagctgggagccattccaattctttccgcttatccaacggccgcactgaggatgtggagccccagagtgtgccacttctggccagatccccaagcaccaacaggaaatacccacccctgcccgtggacaagctggaagaggaaattaaccggagaatggcagacgacaataagctcttcagggaggaattcaacgctctccctgcatgtcctatccaggccacctgtgaggctgcttccaagg

SEQ ID NO: 233336 - DNA, 2338 bp, Artificial Sequence
  derived and/or modified sequence
gatcgcgctcggaccccggccgctgccgccatcactgtcgcccgcccagtcgcccctcagccgcttcccctcgccatggaggcgaggccgccgccgccgccgcggggctcggagccgcgggccgggcggcggccctgagggctagtggcggcccgaaacgccgccgcggagccgaggcggagccgctgtcctcgtccccagcggtcccgcccaacgcccgactctgtgacacaactaaaaaaaaacaaaggtatttatggaattccactgagtggtaatggatgatgcagttcaaataactaaggacacatgttcaaagagcataattaactttttaaaagaagctagtaattctgactcgaaggacagaagagatgagacaccaattattgcggtgatggtggccctgtcctctctgctagtgatcgtgtttattatcatagttttgtacatgttaaggtttaagaaatacaagcaagctgggagccattccaattctttccgcttatccaacggccgcactgaggatgtggagccccagagtgtgccacttctggccagatccccaagcaccaacaggaaatacccacccctgcccgtggacaagctggaagaggaaattaaccggagaatggcagacgacaataagctcttcagggaggaattcaacgctctccctgcatgtcctatccaggccacctgtgaggctgcttccaaggaggaaaacaaggaaaaaaatcgatatgtaaacatcttgccttatgaccaacagaaagccacagcgcctcatcactcagttccactttaccagctggccagactttggggtgccttttaccccgatcggcatgctcaagttcctcaagaaggtgaaggcctgtaaccctcagtatgcaggggccatcgtggtccactgcagtgcaggtgtagggcgtacaggtacctttgtcgtcattgatgccatgctggacatgatgcatacagaacggaaggtggacgtgtatggctttgtgagccggatccgggcacagcgctgccagatggtgcaaaccgatatgcagtatgtcttcatataccaagcccttctggagcattatctctatggagatacagaactggaagtgacctctctagaaacccacctgcagaaaatttacaacaaaatcccagggaccagcaacaatggattagaggaggagtttaagaagttaacatcaatcaaaatccagaatgacaagatgcggactggaaaccttccagccaacatgaagaagaaccgtgttttacagatcattccatatgaattcaacagagtgatcattccagttaagcggggcgaagagaatacagactatgtgaacgcatcctttattgatggctaccggcagaaggactcctatatcgccagccagggccctcttctccacacaattgaggacttctggcgaatgatctgggagtggaaatcctgctctatcgtgatgctaacagaactggaggagagaggccaggagaagtgtgcccagtactggccatctgatggactggtgtcctatggagatattacagtggaactgaagaaggaggaggaatgtgagagctacaccgtccgagacctcctggtcaccaacaccagggagaataagagccggcagatccggcagttccacttccatggctggcctgaagtgggcatccccagtgacggaaagggcatgatcagcatcatcgccgccgtgcagaagcagcagcagcagtcagggaaccaccccatcaccgtgcactgcagcgccggggcaggaaggacggggaccttctgtgccctgagcaccgtcctggagcgtgtgaaagcagaggggattttggatgtcttccagactgtcaagagcctgcggctacagaggccacacatggtccagacactggaacagtatgagttctgctacaaggtggtgcaggagtatattgatgcattctcagattatgccaacttcaagtaagcggcaacaagggtccgtggaccaggaggattgcctttaatattttgtaatattctgttttgttaatataccccaaattgtgtatatatcttataactgttttagaaattggtacataggcttctattacctattaggtggaaattttatatgtaaatgtgttagcactgatagtcctttttccaatgttttattggggaattaaatagtgtgatgtttggattgatatcgtgaaatcctcagccgagaaattgggctggattgtgctttggttaatacatctttccctaaagaagataaacacaaaatccattccaggtagctcggcaccaactaag

SEQ ID NO: 233337 - DNA, 1977 bp, Artificial Sequence
  derived and/or modified sequence
atggtggccctgagcagcctgctggtgatcgtgttcatcatcatcgtgctgtacatgctgagaagattcagaaaggccgagctgatgagcagaaacaccgagaagtacaagcaggccggcagccacagcaacagcttcagactgagcaacggcagaaccgaggacgtggagccccagagcgtgcccctgctggccagaagccccagcaccaacagaaagtacccccccctgcccgtggacaagctggaggaggagatcaacagaagaatggccgacgacaacaagctgttcagagaggagttcaacgccctgcccgcctgccccatccaggccacctgcgaggccgccagcaaggaggagaacaaggagaagaacagatacgtgaacatcctgccctacgaccacagcagagtgcacctgacccccgtggagggcgtgcccgacagcgactacatcaacgccagcttcatcaacggctaccaggagaagaacaagttcatcgccgcccagggccccaaggaggagaccgtgaacgacttctggagaatgatctgggagcagaacaccgccaccatcgtgatggtgaccaacctgaaggagagaaaggagtgcaagtgcgcccagtactggcccgaccagggctgctggacctacggcaacatcagagtgagcgtggaggacgtgaccgtgctggtggactacaccgtgagaaagttctgcatccagcaggtgggcgacatgaccaacagaaagccccagagactgatcacccagttccacttcaccagctggcccgacttcggcgtgcccttcacccccatcggcatgctgaagttcctgaagaaggtgaaggcctgcaacccccagtacgccggcgccatcgtggtgcactgcagcgccggcgtgggcagaaccggcaccttcgtggtgatcgacgccatgctggacatgatgcacaccgagagaaaggtggacgtgtacggcttcgtgagcagaatcagagcccagagatgccagatggtgcagaccgacatgcagtacgtgttcatctaccaggccctgctggagcactacctgtacggcgacaccgagctggaggtgaccagcctggagacccacctgcagaagatctacaacaagatccccggcaccagcaacaacggcctggaggaggagttcaagaagctgaccagcatcaagatccagaacgacaagatgagaaccggcaacctgcccgccaacatgaagaagaacagagtgctgcagatcatcccctacgagttcaacagagtgatcatccccgtgaagagaggcgaggagaacaccgactacgtgaacgccagcttcatcgacggctacagacagaaggacagctacatcgccagccagggccccctgctgcacaccatcgaggacttctggagaatgatctgggagtggaagagctgcagcatcgtgatgctgaccgagctggaggagagaggccaggagaagtgcgcccagtactggcccagcgacggcctggtgagctacggcgacatcaccgtggagctgaagaaggaggaggagtgcgagagctacaccgtgagagacctgctggtgaccaacaccagagagaacaagagcagacagatcagacagttccacttccacggctggcccgaggtgggcatccccagcgacggcaagggcatgatcagcatcatcgccgccgtgcagaagcagcagcagcagagcggcaaccaccccatcaccgtgcactgcagcgccggcgccggcagaaccggcaccttctgcgccctgagcaccgtgctggagagagtgaaggccgagggcatcctggacgtgttccagaccgtgaagagcctgagactgcagagaccccacatggtgcagaccctggagcagtacgagttctgctacaaggtggtgcaggagtacatcgacgccttcagcgactacgccaacttcaagtag

SEQ ID NO: 233338 - DNA, 417 bp, Artificial Sequence
  derived and/or modified sequence
atggacagctggttcatcctggtgctgctgggcagcggcctgatctgcgtgagcgccaacaacgccaccaccgtggcccccagcgtgggcatcaccagactgatcaacagcagcaccgccgagcccgtgaaggaggaggccaagaccagcaaccccaccagcagcctgaccagcctgagcgtggcccccaccttcagccccaacatcaccctgggccccacctacctgaccaccgtgaacagcagcgacagcgacaacggcaccaccagaaccgccagcaccaacagcatcggcatcaccatcagccccaacggcacctggctgcccgacaaccagttcaccgacgccagaaccgagccctgggagggcaacagcagcaccgccgccaccacccccgagaccttcccccccagctag

SEQ ID NO: 233339 - DNA, 762 bp, Artificial Sequence
  derived and/or modified sequence
atggacagctggttcatcctggtgctgctgggcagcggcctgatctgcgtgagcgccaacaacgccaccaccgtggcccccagcgtgggcatcaccagactgatcaacagcagcaccgccgagcccgtgaaggaggaggccaagaccagcaaccccaccagcagcctgaccagcctgagcgtggcccccaccttcagccccaacatcaccctgggccccacctacctgaccaccgtgaacagcagcgacagcgacaacggcaccaccagaaccgccagcaccaacagcatcggcatcaccatcagccccaacggcacctggctgcccgacaaccagttcaccgacgccagaaccgagccctgggagggcaacagcagcaccgccgccaccacccccgagaccttcccccccagcgacgagacccccatcatcgccgtgatggtggccctgagcagcctgctggtgatcgtgttcatcatcatcgtgctgtacatgctgagattcaagaagtacaagcaggccggcagccacagcaacagcttcagactgagcaacggcagaaccgaggacgtggagccccagagcgtgcccctgctggccagaagccccagcaccaacagaaagtacccccccctgcccgtggacaagctggaggaggagatcaacagaagaatggccgacgacaacaagctgttcagagaggagttcaacgccctgcccgcctgccccatccaggccacctgcgaggccgccagcaagtag

SEQ ID NO: 233340 - DNA, 1239 bp, Artificial Sequence
  derived and/or modified sequence
atgaccaacagaaagccccagagactgatcacccagttccacttcaccagctggcccgacttcggcgtgcccttcacccccatcggcatgctgaagttcctgaagaaggtgaaggcctgcaacccccagtacgccggcgccatcgtggtgcactgcagcgccggcgtgggcagaaccggcaccttcgtggtgatcgacgccatgctggacatgatgcacaccgagagaaaggtggacgtgtacggcttcgtgagcagaatcagagcccagagatgccagatggtgcagaccgacatgcagtacgtgttcatctaccaggccctgctggagcactacctgtacggcgacaccgagctggaggtgaccagcctggagacccacctgcagaagatctacaacaagatccccggcaccagcaacaacggcctggaggaggagttcaagaagctgaccagcatcaagatccagaacgacaagatgagaaccggcaacctgcccgccaacatgaagaagaacagagtgctgcagatcatcccctacgagttcaacagagtgatcatccccgtgaagagaggcgaggagaacaccgactacgtgaacgccagcttcatcgacggctacagacagaaggacagctacatcgccagccagggccccctgctgcacaccatcgaggacttctggagaatgatctgggagtggaagagctgcagcatcgtgatgctgaccgagctggaggagagaggccaggagaagtgcgcccagtactggcccagcgacggcctggtgagctacggcgacatcaccgtggagctgaagaaggaggaggagtgcgagagctacaccgtgagagacctgctggtgaccaacaccagagagaacaagagcagacagatcagacagttccacttccacggctggcccgaggtgggcatccccagcgacggcaagggcatgatcagcatcatcgccgccgtgcagaagcagcagcagcagagcggcaaccaccccatcaccgtgcactgcagcgccggcgccggcagaaccggcaccttctgcgccctgagcaccgtgctggagagagtgaaggccgagggcatcctggacgtgttccagaccgtgaagagcctgagactgcagagaccccacatggtgcagaccctggagcagtacgagttctgctacaaggtggtgcaggagtacatcgacgccttcagcgactacgccaacttcaagtag

SEQ ID NO: 233341 - protein, 316 aa, Artificial Sequence
  derived and/or modified sequence
MEAANESSEGISFVLLGLTTSPGQQRPLFVLFLLLYVASLLGNGLIVAAIQASPALHAPMYFLLAHLSFADLCFASVTVPKMLANLLAHDHSISLAGCLTQMYFFFALGVTDSCLLAAMAYDCYVAIRHPLPYATRMSRAMCAALVGMAWLVSHVHSLLYILLMARLSFCASHQVPHFFCDHQPLLRLSCSDTHHIQLLIFTEGAAVVVTPFLLILASYGAIAAAVLQLPSASGRLRAVSTCGSHLAVVSLFYGTVIAVYFQATSRREAEWGRVATVMYTVVTPMLNPIIYSLWNRDVQGALRALLIGRRISASDS

SEQ ID NO: 233342 - DNA, 951 bp, Artificial Sequence
  derived and/or modified sequence
atggaggccgccaacgagagcagcgagggcatcagcttcgtgctgctgggcctgaccaccagccccggccagcagagacccctgttcgtgctgttcctgctgctgtacgtggccagcctgctgggcaacggcctgatcgtggccgccatccaggccagccccgccctgcacgcccccatgtacttcctgctggcccacctgagcttcgccgacctgtgcttcgccagcgtgaccgtgcccaagatgctggccaacctgctggcccacgaccacagcatcagcctggccggctgcctgacccagatgtacttcttcttcgccctgggcgtgaccgacagctgcctgctggccgccatggcctacgactgctacgtggccatcagacaccccctgccctacgccaccagaatgagcagagccatgtgcgccgccctggtgggcatggcctggctggtgagccacgtgcacagcctgctgtacatcctgctgatggccagactgagcttctgcgccagccaccaggtgccccacttcttctgcgaccaccagcccctgctgagactgagctgcagcgacacccaccacatccagctgctgatcttcaccgagggcgccgccgtggtggtgacccccttcctgctgatcctggccagctacggcgccatcgccgccgccgtgctgcagctgcccagcgccagcggcagactgagagccgtgagcacctgcggcagccacctggccgtggtgagcctgttctacggcaccgtgatcgccgtgtacttccaggccaccagcagaagagaggccgagtggggcagagtggccaccgtgatgtacaccgtggtgacccccatgctgaaccccatcatctacagcctgtggaacagagacgtgcagggcgccctgagagccctgctgatcggcagaagaatcagcgccagcgacagctag

SEQ ID NO: 233343 - DNA, 951 bp, Artificial Sequence
  derived and/or modified sequence
atggaggctgcaaacgagtcatcagaaggaatctctttcgtcctcctgggccttaccaccagtccagggcagcagcgccccctgtttgtcttgttccttctgctatatgtggcatcactactgggaaatgggcttatagttgcggccattcaggctagccccgcactccacgccccaatgtatttcctcctcgcccacctgtcttttgcagatctctgcttcgccagcgtcaccgtaccaaaaatgctggctaacctgctggcgcacgaccactccatatccttagcaggatgcctgacacaaatgtactttttcttcgctctgggggtcaccgacagctgcctgctggccgctatggcatacgattgctatgtagctatccggcaccccctcccctacgcaaccagaatgagtagggctatgtgtgcagccctggttggtatggcttggttggtgtcccatgtgcactctttgctgtacatccttctgatggctagactgagtttttgcgcaagtcatcaggtgccccattttttctgcgatcaccagcctctgctgcgactttcttgttctgacacacatcatatacaactgttgatttttaccgagggtgccgccgttgtcgtcacacctttcctgttaattctggcaagttatggggccatcgccgcagcagtgttgcagctcccgtcagcctccgggcggctaagggccgtgtctacatgcgggagccatctggcagttgtgtccctgttttatggtaccgtcatcgctgtgtactttcaggctaccagcaggcgcgaggcagaatggggaagagtggccaccgtgatgtataccgtcgtgacacccatgctgaatcccattatatacagtctctggaatagagatgtccagggtgcacttagagctttgctcatagggcgccggatctccgccagcgatagctag

SEQ ID NO: 233344 - DNA, 951 bp, Artificial Sequence
  derived and/or modified sequence
atggaggccgccaatgaaagcagcgagggcatcagctttgtgctgctgggcctgaccaccagccctggccagcagaggcccctgtttgtgctcttcctgctgctgtatgtggccagcctgctgggcaatggcctcatcgtggccgccatccaggccagccctgccctgcacgcccccatgtacttcctgctggcccacctgagctttgctgacctgtgctttgcctctgtgacagtgcccaagatgctggccaacctgctggcccatgaccacagcatcagcctggccggctgcctgacccagatgtacttcttctttgccctgggcgtgacagacagctgcctgctggccgccatggcctatgactgctacgtggccatccgccaccccctgccctatgccaccaggatgagccgggccatgtgtgccgccctggtgggcatggcctggctggtgagccacgtgcacagcctgctgtacatcctgctgatggcccggctgtccttctgtgccagccaccaggtgccccacttcttctgtgaccaccagcccctgctgcggctgagctgcagcgacacccaccacatccagctgctgatcttcacagagggcgctgctgtggtggtgacccccttcctgctgatcctggccagctatggagccatcgctgctgctgtgctgcagctgcccagcgccagcggccgcctgcgggctgtgtccacctgtggcagccacctggccgtggtgtccctcttctatggaacagtgattgctgtgtacttccaggccaccagccggcgggaggccgagtggggccgggtggccaccgtgatgtacacagtggtgacccccatgctgaaccccatcatctacagcctgtggaacagagatgtgcagggcgccctgcgggccctgctgattggaagacgcatcagcgccagtgacagctag

SEQ ID NO: 233345 - DNA, 1026 bp, Artificial Sequence
  derived and/or modified sequence
ccttcaggttccaggcgaataaccagcctgccatggaggctgccaatgagtcttcagagggaatctcattcgttttattgggactgacaacaagtcctggacagcagcggcctctctttgtgctgttcttgctcttgtatgtggccagcctcctgggtaatggactcattgtggctgccatccaggccagtccagcccttcatgcacccatgtacttcctgctggcccacctgtcctttgctgacctctgcttcgcctccgtcactgtgcccaagatgttggccaacttgttggcccatgaccactccatctcgctggctggctgcctgacccaaatgtacttcttctttgccctgggggtaactgatagctgtcttctggcggccatggcctatgactgctacgtggccatccggcaccccctcccctatgccacgaggatgtcccgggccatgtgcgcagccctggtgggaatggcatggctggtgtcccacgtccactccctcctgtatatcctgctcatggctcgcttgtccttctgtgcttcccaccaagtgccccacttcttctgtgaccaccagcctctcttaaggctctcgtgctctgacacccaccacatccagctgctcatcttcaccgagggcgccgcagtggtggtcactcccttcctgctcatcctcgcctcctatggggccatcgcagctgccgtgctccagctgccctcagcctctgggaggctccgggctgtgtccacctgtggctcccacctggctgtggtgagcctcttctatgggacagtcattgcagtctacttccaggccacatcccgacgcgaggcagagtggggccgtgtggccactgtcatgtacactgtagtcacccccatgctgaaccccatcatctacagcctctggaatcgcgatgtacagggggcactccgagcccttctcattgggcgaaggatctcagctagtgactcctgagggcaggaccccactgaggacagactgcatcacccacactggc

SEQ ID NO: 233346 - DNA, 951 bp, Artificial Sequence
  derived and/or modified sequence
atggaggccgccaacgagagcagcgagggcatcagcttcgtgctgttaggccttactacatccccgggacaacagcgccccctcttcgtgctttttttgttgctgtatgtggccagcctcttgggtaacggactgatagtggctgcgattcaggcctccccagctctgcatgctcccatgtatttcctgcttgcccacctgtccttcgccgacctgtgttttgcgagtgtgacggtgcctaagatgctggccaacctccttgctcatgatcactcaattagcttggctggatgcttgactcagatgtatttcttctttgctctgggcgttacagattcctgtctactcgctgccatggcttatgattgctacgttgccattagacaccctctgccatacgcaactcggatgtctcgcgctatgtgtgccgcactggtggggatggcatggctggtttcacatgttcattcactactctacatattacttatggcgaggctctcattctgcgcttcacaccaggttccccatttcttttgtgaccatcagccattgcttagattatcatgttcagacactcaccatattcagttgctcatcttcaccgaaggcgcagcagttgttgtgactcccttcctccttattctcgcatcttacggcgctattgccgctgctgtactgcaattgccttccgcctctggtcgactcagggctgtgtcaacctgtggatcacacctagcagtagtgtcactcttttatggaacagtgattgctgtctactttcaggccacttctcgtagagaggcagagtgggggcgtgtggccacagtcatgtacacagtggtaactcccatgttgaacccaattatttattctctgtggaatagagatgtgcagggtgcccttcgcgcgcttctgatcggcaggaggatctcggccagcgattcctag

SEQ ID NO: 233347 - DNA, 951 bp, Artificial Sequence
  derived and/or modified sequence
atggaggccgcaaacgagtcctcggaggggattagctttgtcctactggggttgaccacatcgccgggacagcagagacctctgttcgtgttgtttctgttactgtacgtggcgagtctcttaggaaacggtctgatagttgccgctatccaggcctctcctgccctgcacgctcccatgtactttctccttgcacacttaagtttcgctgatctgtgcttcgccagcgttaccgtgcccaaaatgcttgctaaccttctggcgcacgaccattcaatatcgctggctggctgtttgacgcagatgtattttttctttgccctgggagtaacagactcctgtttactggcggctatggcctatgactgttacgtggccatccgccatccccttccttatgctaccagaatgagccgggctatgtgcgccgctctggtcgggatggcttggctcgtctcccacgtgcatagcctactgtatatcctgctcatggcacgcttgagcttttgcgctagccaccaagtaccccatttcttctgcgaccaccagccactgttacgtttatcatgcagcgacacgcatcatatccagctcctaatctttaccgaaggggctgctgtcgtggtgactccgtttctgctgattcttgcgagttatggcgctatcgctgctgctgtcttgcaactgcccagcgcatcaggacggctgcgagctgtgtcgacttgcgggtctcacctggccgtggtctcactgttttatggaacagtgatcgccgtctatttccaggcgactagccgcagagaagccgagtggggacgtgtggctactgtgatgtacactgtggtgactcctatgttgaaccccatcatctattccttgtggaaccgggatgtacaaggggctctcagggcgttgcttatcggcagaagaatctctgcatcagactcatag

SEQ ID NO: 233348 - protein, 309 aa, Artificial Sequence
  derived and/or modified sequence
MSDLGSEELEEEGENDIGEYEGGRNEAGERHGRGRARLPNGDTYEGSYEFGKRHGQGIYKFKNGARYIGEYVRNKKHGQGTFIYPDGSRYEGEWANDLRHGHGVYYYINNDTYTGEWFAHQRHGQGTYLYAETGSKYVGTWVNGQQEGTAELIHLNHRYQGKFLNKNPVGPGKYVFDVGCEQHGEYRLTDMERGEEEEEEELVTVVPKWKATQITELALWTPTLPKKPTSTDGPGQDAPGAESAGEPGEEAQALLEGFEGEMDMRPGDEDADVLREESREYDQEEFRYDMDEGNINSEEEETRQSDLQD

SEQ ID NO: 233349 - DNA, 930 bp, Artificial Sequence
  derived and/or modified sequence
atgtccgatctggggtcagaagaacttgaagaagagggagagaatgacataggtgagtacgagggagggaggaatgaggcgggcgagcggcacggtcgagggcgagcacgcctgcccaacggcgatacctatgaggggtcctacgagtttggcaagcgacatggccaagggatttataaattcaagaacggcgctagatacatcggcgaatacgttcgcaacaaaaagcacgggcagggaactttcatctacccagatgggtctcgatatgagggggaatgggccaatgacctgagacatggccatggagtgtattattatattaataatgatacttacaccggagaatggttcgcccaccagcggcatgggcagggtacgtatctctatgccgagactggctcaaaatatgtcgggacctgggtcaacggtcagcaagaaggcactgccgagctcatacacctcaaccaccgttaccaaggaaagttcctcaataaaaatcccgtcgggcccggaaaatacgtcttcgacgtgggttgtgaacagcacggcgagtatcggctcacagatatggagcgcggcgaggaggaggaagaagaagagctagttaccgtggtgccaaagtggaaggcaacccagattaccgagctagccttatggacccctaccctcccaaagaagcctaccagcacagatggccccggccaggacgctccaggtgctgaaagtgccggagaacctggggaggaggcccaggctttactagaggggtttgagggcgaaatggatatgagaccgggagacgaggatgcagatgttttgcgggaagagtctagggaatacgatcaagaagaattccgttacgatatggacgaaggcaatataaatagtgaagaggaggagacaagacagagtgatctgcaagattag

SEQ ID NO: 233350 - DNA, 930 bp, Artificial Sequence
  derived and/or modified sequence
atgtctgacctgggcagcgaggagctggaggaggagggggagaatgacattggagaatatgagggcggcagaaatgaagctggggagagacatggccggggccgggcccggctgcccaacggggacacctatgagggcagctatgaatttgggaagagacatggccagggcatctacaagttcaagaatggagcccgctacatcggggagtatgtgaggaacaagaagcacggccagggcaccttcatctacccagatggcagccgctatgaaggagagtgggccaatgacctgcggcacggccacggcgtgtactactacatcaacaatgacacctacaccggggagtggtttgcccaccagagacatggccagggcacctacctgtatgcagagaccggcagcaaatatgtgggcacctgggtgaatggccagcaggagggcacagctgagctgatccacctgaaccaccgctaccagggcaagttcctgaacaagaaccctgtgggccctgggaagtatgtgtttgatgtgggctgtgagcagcacggggagtaccgcctgacagacatggagcggggggaggaggaggaggaggaggagctggtgacagtggtgcccaagtggaaggccacccagatcacagagctggccctgtggacccccaccctgcccaagaagcccaccagcacagatggccctggccaggatgcccctggagctgagagcgctggggagcctggagaggaggcccaggccctgctggagggctttgaaggagagatggacatgaggcctggagatgaagatgctgatgtgctgcgggaggagagccgggagtatgaccaggaggagttccgctatgacatggatgagggcaacatcaacagcgaggaggaggagacccggcagagcgacctgcaggactag

SEQ ID NO: 233351 - DNA, 930 bp, Artificial Sequence
  derived and/or modified sequence
atgagcgacctgggcagcgaggagctggaggaggagggcgagaacgatattggagagtatgagggggggcggaatgaagccggcgagcgtcacggccgaggccgggctcgactccccaacggggacacttacgaaggcagctacgagtttgggaaacggcatgggcaagggatttataaattcaagaacggagcccgctatatcggagaatatgtgcgcaacaagaagcacggtcaaggcacttttatctacccggatgggtcgcggtatgagggggagtgggccaacgacctgaggcacggccatggtgtctattattacattaataatgacacctacacgggggaatggttcgcccatcagagacatggacaagggacatacctgtatgccgagaccgggtctaaatacgtaggcacttgggtgaatgggcagcaggaaggtacagccgaactgattcatctgaatcaccgttatcagggcaagttcctgaacaaaaaccccgtaggacctggtaagtatgtcttcgacgtcgggtgcgaacagcatggcgaatatcgactgacagacatggaacgcggcgaggaggaggaggaggaagaactggttaccgtagtaccaaaatggaaagccacacagataacggagctggcactctggacacccacgcttcctaagaagcctacatcaactgatggacctggccaggatgctccgggcgctgagtcagctggcgagcccggagaagaggcccaagcacttctcgaaggttttgaaggcgaaatggacatgaggcccggcgacgaggacgcggatgttctccgtgaagaatctcgggaatacgatcaggaagagttccggtacgatatggacgagggcaacattaatagtgaggaggaagaaactaggcagtcagatctgcaagattag

SEQ ID NO: 233352 - DNA, 930 bp, Artificial Sequence
  derived and/or modified sequence
atgagcgatctcggttctgaggagctggaggaagagggtgaaaatgatattggggaatacgagggaggaagaaacgaagctggcgaacggcatggcaggggtagagcacggctgccgaatggggacacttacgagggatcttatgagtttggcaagagacacggccagggcatatacaaatttaaaaatggggctcgatacatcggcgaatacgtgaggaataagaagcacggacagggaacatttatttacccagatggttcaagatacgaaggtgagtgggccaatgaccttcgtcatgggcacggcgtgtattattacataaacaacgacacgtacacaggtgaatggttcgcacaccagagacacggccaggggacttatctatacgccgagacaggctctaagtatgtcggcacctgggtgaacggtcagcaggaaggaacagccgagttgatccatctcaatcatagataccaggggaaatttctgaacaagaatccggtaggaccaggtaagtacgtcttcgatgtaggatgcgaacagcacggggagtaccggctgaccgacatggaaagaggggaggaagaggaggaagaggagctggtcactgtggttccaaaatggaaagcaactcagatcaccgagctggcgttatggaccccaacacttcccaaaaaacccacaagcacggatggacccggacaagatgctcctggcgctgagtcagcaggagaacccggtgaagaagcccaggctttgctggagggctttgaaggagaaatggatatgaggccaggggacgaggatgctgatgttcttcgcgaggaaagtcgggaatatgaccaggaagaatttcggtacgatatggacgaaggtaacatcaatagtgaagaggaagaaactagacagagtgatcttcaagactag

SEQ ID NO: 233353 - DNA, 1430 bp, Artificial Sequence
  derived and/or modified sequence
tggctcctcccgcttcgtccgcgtcgcctgtccccgctccccatcttccgggctgggagggaggcgggaccggccgcgtctccatggcgacgcgggacgcggcggtggaggcggttgctacccacctgctagaggcgctgcggctgtgatccaggctggggcgagaccatgtcggacctgggctcggaggagttggaggaggagggagagaatgatattggggaatatgaggggggtcggaatgaggcaggcgaaaggcacggacgtgggagggcacggctacccaacggggacacctacgaagggagctacgaattcggtaaaagacatggccaggggatctacaaatttaaaaatggtgctcgatatatcggagaatatgttagaaataaaaagcacggtcaaggcacttttatatatccagatggatccagatatgaaggagagtgggcaaatgacctgcggcacggccatggcgtatactactacatcaataatgacacctacactggagagtggtttgctcatcaaaggcatgggcaaggcacctatttatacgcggagacgggcagtaagtatgttggcacctgggtgaacggacagcaggagggcacggccgagctcattcacctgaaccacaggtaccagggcaagttcttgaacaaaaatcctgttggccctggaaagtatgtatttgatgttgggtgtgaacaacatggtgaatatcgtttaacagatatggaaagaggagaagaggaagaggaggaagaattagtaactgttgttccaaaatggaaagctacccaaatcactgaattggccctgtggacaccaactctccccaaaaagccgacctctacggatggacctggccaagacgctccaggagctgagagtgcaggagaacccggggaggaggcccaggctctgctggagggcttcgagggtgagatggacatgaggcctggagatgaagatgcagacgtcctccgggaagagagccgggagtatgaccaggaggagttccgctatgacatggatgagggaaacattaattctgaagaagaagaaactagacagtcagacctccaggactaagatgaagtgagccgagaggagatcgtatcataagaatgcttctgtcgttagccgggtgcagtgctgtgtgtatctagttccagctacttgagaggctgaggcaggaggattgcttgagtccagaaagtggcagttgcagtgagtggagatcgcgccactgctctccagcctgggtggcagagcgagaccctgtctcaaaaaataaacaaaaacaaaatgcttctgtcagttaacaatctttattagagggtttttagtctttctttctcagctgtatgttaagttgattgacaaatgcaaataaacgtctttattatcctttctttctgaaa

SEQ ID NO: 233354 - DNA, 930 bp, Artificial Sequence
  derived and/or modified sequence
atgagcgacctgggcagcgaggagctggaggaggagggcgagaacgacatcggcgagtacgagggcggcagaaacgaggccggcgagagacacggcagaggcagagccagactgcccaacggcgacacctacgagggcagctacgagttcggcaagagacacggccagggcatctacaagttcaagaacggcgccagatacatcggcgagtacgtgagaaacaagaagcacggccagggcaccttcatctaccccgacggcagcagatacgagggcgagtgggccaacgacctgagacacggccacggcgtgtactactacatcaacaacgacacctacaccggcgagtggttcgcccaccagagacacggccagggcacctacctgtacgccgagaccggcagcaagtacgtgggcacctgggtgaacggccagcaggagggcaccgccgagctgatccacctgaaccacagataccagggcaagttcctgaacaagaaccccgtgggccccggcaagtacgtgttcgacgtgggctgcgagcagcacggcgagtacagactgaccgacatggagagaggcgaggaggaggaggaggaggagctggtgaccgtggtgcccaagtggaaggccacccagatcaccgagctggccctgtggacccccaccctgcccaagaagcccaccagcaccgacggccccggccaggacgcccccggcgccgagagcgccggcgagcccggcgaggaggcccaggccctgctggagggcttcgagggcgagatggacatgagacccggcgacgaggacgccgacgtgctgagagaggagagcagagagtacgaccaggaggagttcagatacgacatggacgagggcaacatcaacagcgaggaggaggagaccagacagagcgacctgcaggactag

SEQ ID NO: 233355 - protein, 355 aa, Artificial Sequence
  derived and/or modified sequence
MARRPRNSRAWHFVLSAARRDADARAVALAGSTNWGYDSDGQHSDSDSDPEYSTLPPSIPSAVPVTGESFCDCAGQSEASFCSSLHSAHRGRDCRCGEEDEYFDWVWDDLNKSSATLLSCDNRKVSFHMEYSCGTAAIRGTKELGEGQHFWEIKMTSPVYGTDMMVGIGTSDVDLDKYRHTFCSLLGRDEDSWGLSYTGLLHHKGDKTSFSSRFGQGSIIGVHLDTWHGTLTFFKNRKCIGVAATKLQNKRFYPMVCSTAARSSMKVTRSCASATSLQYLCCHRLRQLRPDSGDTLEGLPLPPGLKQVLHNKLGWVLSMSCSRRKAPVSDPQAATSAHPSSREPRPCQRKRCRRT

SEQ ID NO: 233356 - protein, 159 aa, Artificial Sequence
  derived and/or modified sequence
MEYSCGTAAIRGTKELGEGQHFWEIKMTSPVYGTLTFFKNRKCIGVAATKLQNKRFYPMVCSTAARSSMKVTRSCASATSLQYLCCHRLRQLRPDSGDTLEGLPLPPGLKQVLHNKLGWVLSMSCSRRKAPVSDPQAATSAHPSSREPRPCQRKRCRRT

SEQ ID NO: 233357 - DNA, 1068 bp, Artificial Sequence
  derived and/or modified sequence
atggccagaagacccagaaacagcagagcctggcacttcgtgctgagcgccgccagaagagacgccgacgccagagccgtggccctggccggcagcaccaactggggctacgacagcgacggccagcacagcgacagcgacagcgaccccgagtacagcaccctgccccccagcatccccagcgccgtgcccgtgaccggcgagagcttctgcgactgcgccggccagagcgaggccagcttctgcagcagcctgcacagcgcccacagaggcagagactgcagatgcggcgaggaggacgagtacttcgactgggtgtgggacgacctgaacaagagcagcgccaccctgctgagctgcgacaacagaaaggtgagcttccacatggagtacagctgcggcaccgccgccatcagaggcaccaaggagctgggcgagggccagcacttctgggagatcaagatgaccagccccgtgtacggcaccgacatgatggtgggcatcggcaccagcgacgtggacctggacaagtacagacacaccttctgcagcctgctgggcagagacgaggacagctggggcctgagctacaccggcctgctgcaccacaagggcgacaagaccagcttcagcagcagattcggccagggcagcatcatcggcgtgcacctggacacctggcacggcaccctgaccttcttcaagaacagaaagtgcatcggcgtggccgccaccaagctgcagaacaagagattctaccccatggtgtgcagcaccgccgccagaagcagcatgaaggtgaccagaagctgcgccagcgccaccagcctgcagtacctgtgctgccacagactgagacagctgagacccgacagcggcgacaccctggagggcctgcccctgccccccggcctgaagcaggtgctgcacaacaagctgggctgggtgctgagcatgagctgcagcagaagaaaggcccccgtgagcgacccccaggccgccaccagcgcccaccccagcagcagagagcccagaccctgccagagaaagagatgcagaagaacctag

SEQ ID NO: 233358 - DNA, 480 bp, Artificial Sequence
  derived and/or modified sequence
atggagtacagctgcggcaccgccgccatcagaggcaccaaggagctgggcgagggccagcacttctgggagatcaagatgaccagccccgtgtacggcaccctgaccttcttcaagaacagaaagtgcatcggcgtggccgccaccaagctgcagaacaagagattctaccccatggtgtgcagcaccgccgccagaagcagcatgaaggtgaccagaagctgcgccagcgccaccagcctgcagtacctgtgctgccacagactgagacagctgagacccgacagcggcgacaccctggagggcctgcccctgccccccggcctgaagcaggtgctgcacaacaagctgggctgggtgctgagcatgagctgcagcagaagaaaggcccccgtgagcgacccccaggccgccaccagcgcccaccccagcagcagagagcccagaccctgccagagaaagagatgcagaagaacctag

SEQ ID NO: 233359 - DNA, 1068 bp, Artificial Sequence
  derived and/or modified sequence
atggctaggcgcccacgaaactctagggcatggcactttgtactcagtgctgcaagacgcgatgccgacgccagggccgtggctttggcggggtcaactaactggggctatgactccgatggccagcactccgacagcgatagcgaccctgagtacagcactctcccgccttctattccaagcgccgttccagtaaccggagaatcattttgcgactgtgccggacagtccgaagctagtttctgttccagcctgcacagcgcccaccgcgggcgagattgcagatgtggagaggaagacgagtactttgattgggtatgggacgacctaaataaatccagtgcgaccctcctctcctgcgataaccggaaagtcagttttcatatggagtacagctgcggtacagcagcaatccgcgggaccaaagagctcggagaaggccagcatttttgggaaattaagatgacaagcccagtatacgggacagacatgatggtggggatcggcaccagcgatgtggatttggataagtaccggcacacgttctgctctttactgggacgagacgaggactcttggggactaagctacacaggattactgcaccacaaaggcgacaagactagcttctccagccgttttggccaggggagtataatcggtgtgcacctcgatacctggcacggcacactcactttttttaaaaataggaagtgcatcggcgtggcagcaaccaaattgcaaaataaaagattttacccaatggtgtgctcgacagctgctcggtcatctatgaaggtcactcggtcatgcgcaagcgcgaccagtctccaatatttatgctgtcacaggctcaggcagcttcggccggattcaggcgatactctggaaggactccctctgccacctggcctgaagcaggtgcttcataacaaactgggatgggtgctgtctatgagctgttctaggagaaaagcaccagtgtccgatccgcaggccgccacctctgcccacccctcatcgcgtgaacctcggccctgtcagaggaaaaggtgcaggcgcacctag

SEQ ID NO: 233360 - DNA, 480 bp, Artificial Sequence
  derived and/or modified sequence
atggaatattcatgtggtactgccgccattcgagggacgaaggaactcggagaagggcagcacttctgggaaatcaagatgaccagccccgtgtatggcacactgactttttttaagaatcgtaaatgcatcggggtggctgctacaaaattacagaataaacggttctaccccatggtctgctcgacagccgctcgctccagcatgaaggtcactcggtcttgcgcctcagccacatcgttacaatacctgtgttgccaccgactgcgccagctgaggccagacagcggggatacactggagggcctccctcttcctcccggactcaaacaagtgctgcacaacaagctgggctgggtcctctcgatgagctgtagccgacggaaagccccagtgtctgatccccaagctgctaccagcgctcatccctccagtcgcgaaccccgcccatgccaaaggaagcgctgtcgcagaacatag

SEQ ID NO: 233361 - DNA, 1068 bp, Artificial Sequence
  derived and/or modified sequence
atggccaggcggccaagaaatagccgggcctggcactttgtgctcagcgctgctcggcgtgatgctgacgctcgtgccgtcgcattggccggcagtacaaattggggatacgactctgatggacaacactctgactctgattccgatcctgaatacagcactttgccaccttccataccttcagctgtgcctgttaccggggaaagcttctgcgactgtgcaggccagtctgaggcatcattctgctcctctctacactcagctcataggggcagggactgcaggtgtggtgaggaagatgagtacttcgactgggtctgggacgacttgaataagtcgtctgccaccctacttagctgtgataaccggaaagttagttttcatatggagtactcatgcggcacggccgcaatccgcggaaccaaggagctcggggagggacaacacttttgggaaataaagatgacctctcccgtctacgggaccgatatgatggtggggattgggacttctgatgttgatctggataaatataggcacactttctgttccctgttggggcgcgacgaggactcctgggggctgtcatacaccgggctgctccaccataagggtgacaaaacatcttttagttcaagattcggccagggtagtattataggtgttcacctggatacatggcatgggacgctgaccttctttaagaacaggaaatgcatcggcgttgccgccactaagttacagaataaaaggttctatccaatggtgtgttctaccgccgcaagaagtagtatgaaggtgacacggtcctgcgcctctgccacctctctacagtatctctgctgtcatagactcaggcagctcaggcctgactctggcgatactcttgagggcttgccgttacctcccggtctgaagcaggtgctccacaataagctggggtgggtactcagcatgagttgtagtcggaggaaggctcctgtgagcgacccgcaggccgccacctccgcccatccctcctctagagaacctcgcccgtgccagagaaagcggtgtcgccggacctag

SEQ ID NO: 233362 - DNA, 1068 bp, Artificial Sequence
  derived and/or modified sequence
atggcccggcggcccaggaacagccgggcctggcactttgtgctgtctgctgccaggagagatgctgatgcccgggctgtggccctggccggcagcaccaactggggctatgacagtgatggccagcacagcgacagcgacagcgaccctgagtacagcaccctgccccccagcatccccagcgctgtgcctgtgactggagagagcttctgtgactgtgccggccagagcgaggccagcttctgcagcagcctgcacagcgcccaccggggccgggactgccgctgtggggaggaggatgagtactttgactgggtgtgggatgacctgaacaagagcagcgccaccctgctgagctgtgacaacaggaaggtgtccttccacatggagtacagctgtggcacagctgccatccggggcaccaaggagctgggggagggccagcacttctgggagatcaagatgaccagccctgtgtatggaacagacatgatggtgggcatcggcaccagtgatgtggacctggacaagtaccgccacaccttctgcagcctgctgggcagagatgaggacagctggggcctgagctacacaggcctgctgcaccacaagggggacaagaccagcttcagcagccgcttcggccagggcagcatcatcggcgtgcacctggacacctggcacggcaccctgaccttcttcaagaacaggaagtgcatcggcgtggccgccaccaagctgcagaacaagcgcttctaccccatggtgtgcagcacagctgcccggagctccatgaaggtgaccaggagctgtgccagcgccaccagcctgcagtacctgtgctgccaccggctgcggcagctgcggccagacagcggggacaccctggagggcctgcccctgcccccaggcctgaagcaggtgctgcacaacaagctgggctgggtgctgtccatgagctgcagcaggaggaaggcccctgtgtctgacccccaggccgccaccagcgcccaccccagcagccgggagccccggccctgccagaggaagcgctgcagaagaacatag

SEQ ID NO: 233363 - DNA, 480 bp, Artificial Sequence
  derived and/or modified sequence
atggagtacagctgtggcacagctgccatccggggcaccaaggagctgggggagggccagcacttctgggagatcaagatgaccagccctgtgtatggcaccctgaccttcttcaagaacaggaagtgcatcggcgtggccgccaccaagctgcagaacaagcgcttctaccccatggtgtgcagcacagctgcccggagctccatgaaggtgaccaggagctgtgccagcgccaccagcctgcagtacctgtgctgccaccggctgcggcagctgcggccagacagcggggacaccctggagggcctgcccctgcccccaggcctgaagcaggtgctgcacaacaagctgggctgggtgctgtccatgagctgcagcaggaggaaggcccctgtgtctgacccccaggccgccaccagcgcccaccccagcagccgggagccccggccctgccagaggaagcgctgcagaagaacatag

SEQ ID NO: 233364 - DNA, 1068 bp, Artificial Sequence
  derived and/or modified sequence
atggcccggcggccccggaacagccgggcctggcacttcgtgctgagtgccgcacgcagggacgccgatgctcgggcagtcgccttagcaggttccaccaattggggctatgacagcgacgggcagcattctgatagcgatagcgatcctgagtattccacattgcctccgtctataccctccgccgtccctgtcaccggggagtcattctgcgattgtgcagggcaaagcgaagcatccttttgttcatccttacacagcgcccaccgcggccgagattgtcgatgcggagaagaggacgagtactttgactgggtttgggacgatcttaataagagcagtgcaaccctactgtcctgtgacaatcgtaaggtgagcttccacatggaatacagctgcggcaccgcggccatcagggggacgaaggaactaggggaagggcagcacttttgggaaatcaagatgacaagccctgtatacggcacagacatgatggtcgggatcggtacttcagatgtagacttggacaagtatcgacacaccttctgctcattactcggcagggacgaggatagctgggggctttcctacacaggtctgttgcaccacaagggcgataaaacaagtttctctagtaggttcggccagggcagtataatcggtgttcatctcgacacatggcatggcactctaacattcttcaaaaaccggaaatgtatcggagtggcggcgaccaaactgcaaaataaaagattctatcctatggtgtgctccactgcggccaggtcctccatgaaggtgacacggagctgtgccagcgccacttcacttcagtatctctgttgccatcgcctgaggcagcttcgtccggactcaggtgacaccttagagggcctgccactgcccccgggcttaaagcaggtgttgcacaacaaactcggatgggtgctaagcatgtcctgctcccggcgcaaagcgcctgtaagtgacccccaggcagccacgagtgcccatcccagctctcgcgagccacgtccgtgccagagaaaaaggtgcaggagaacatag

SEQ ID NO: 233365 - DNA, 480 bp, Artificial Sequence
  derived and/or modified sequence
atggagtacagctgcggcaccgccgccatccggggcaccaaggagcttggcgaaggacaacacttctgggagattaagatgacatcccctgtatacggtaccctgacattcttcaaaaacaggaagtgcattggtgtagccgcaaccaaactccagaataaaaggttttacccgatggtctgtagcaccgcagcccgttcttccatgaaagttacccgtagctgtgctagcgccacgagcctacagtacctctgctgtcaccgcctcaggcaactgagacccgactctggcgatacactagagggtctgcctctcccccccggtctcaagcaggtgttgcacaataaactgggatgggttctgagtatgagttgctcccgccggaaggcccctgtgtctgatccccaagccgctacctcagcacaccctagttctcgagagccgcgtccatgccagcggaagcggtgtaggcggacttag

SEQ ID NO: 233366 - DNA, 1068 bp, Artificial Sequence
  derived and/or modified sequence
atggcccggcggccccggaacagccgggcctggcacttcgtgctgagcgctgcgcggcgtgatgcagacgcccgtgccgtggcactcgctggatctaccaactggggatacgattccgatggacagcactccgattctgactctgatccagagtattcaacactgccaccctccattccctctgctgttcctgttaccggcgagtccttctgcgactgtgcaggacaaagcgaggcgagcttttgctcctccctccattcggcccatcggggacgggactgcagatgtggcgaggaggacgaatactttgactgggtctgggacgacctaaacaagagtagtgccaccctgctctcgtgtgacaaccggaaggtcagcttccacatggaatactcttgcgggactgccgcaatacgcggtactaaggagctgggggagggtcagcacttctgggaaatcaaaatgacaagtcccgtatatggcactgacatgatggtgggcattggcacttctgatgtggacctcgacaaatataggcacacattttgcagcctccttggccgggacgaggattcctggggattgtcctatacgggcttgctgcatcacaaaggagacaagaccagcttttcttccaggtttggccaaggcagtattattggagttcacctcgatacatggcatggaacactgacattcttcaaaaaccggaagtgcattggagtggctgctacaaaactgcagaataaaagattctaccccatggtctgtagcacagccgctcggtctagcatgaaggtgacaagatcgtgtgcaagtgccaccagcctgcagtacttgtgctgtcatcgtctgcgtcagttaagacccgacagcggcgatacactcgaaggtcttccattaccacccggattgaaacaggtcctgcacaacaagcttgggtgggtcctgtcaatgtcatgctcccggcggaaggctccagtaagcgatcctcaggccgccacttcagcccatccttcttctcgagagccgaggccatgtcagaggaaacgttgtagaagaacctag

SEQ ID NO: 233367 - DNA, 1068 bp, Artificial Sequence
  derived and/or modified sequence
atggccaggcgaccacgaaattcccgggcatggcatttcgttctgagtgcggctaggcgcgatgctgatgctcgggcagtcgccctggccggaagtactaattggggatacgacagtgacggccagcattcagattccgatagtgaccctgagtacagtacactgcctccaagcatccctagtgccgttccagttaccggagagtctttttgtgattgcgcaggtcagagcgaagcttcattttgcagctctcttcactccgctcatcgaggacgagactgtaggtgtggggaagaggatgaatattttgactgggtgtgggacgaccttaataagagcagtgctaccctcttgagttgtgataatcgaaaggtctctttccacatggaatatagctgtggaaccgccgcaatccggggtactaaggaacttggcgaagggcagcacttttgggagattaaaatgaccagcccagtgtacggaactgacatgatggtgggcattgggacttcagacgttgatctcgacaagtaccgccatacattttgttctctgttggggagagatgaagacagttggggtcttagttacaccgggctgcttcatcataagggtgataaaacttccttttcaagccgctttgggcagggtagtatcatcggtgtccacctggacacgtggcacggaactctgacatttttcaagaataggaagtgtattggggtggctgccaccaaactgcagaataagcggttctacccaatggtgtgtagcacagccgcacgcagctctatgaaagtcacaagatcttgcgcctctgccacgtccttacaatacctgtgttgccatcggcttagacagctcaggcccgactctggtgacacccttgaaggattacccttgccccctggacttaagcaggtgctccataataaacttggttgggtcctgtccatgagttgctcgaggagaaaagcacccgtgagcgacccgcaagccgcaacctctgcacacccttcttcccgcgagcctcgcccatgtcagaggaagcgatgccgccgaacctag

SEQ ID NO: 233368 - DNA, 480 bp, Artificial Sequence
  derived and/or modified sequence
atggaatactcatgcggcactgccgctataagggggaccaaggaactgggcgagggccagcacttctgggaaatcaagatgacctccccagtttacggtactctgacgttcttcaagaataggaaatgtattggagtcgccgctacaaaactgcagaacaagagattctaccctatggtgtgctcgacagctgcccgaagctctatgaaagtgactaggtcctgcgccagcgcaaccagtttgcagtatttgtgctgccacaggcttcgccagctgagaccagatagcggagatacactcgagggcctgcccctgccgcctggactcaaacaggtcctgcacaataaattggggtgggtactgtctatgtcctgcagccgtcgcaaggctccagtcagtgacccccaggcagctacttctgcccatcccagctcgcgggagcctcgtccctgtcagaggaaacggtgccggagaacatag

SEQ ID NO: 233369 - DNA, 1068 bp, Artificial Sequence
  derived and/or modified sequence
atggcgaggcggcctcgcaacagccgagcctggcactttgtactgagcgccgcaaggagagacgccgacgcacgcgctgtggccctggctggatctactaattggggatacgatagtgatggccaacactcagacagtgactctgatcctgaatattccacccttccgccttcgattcctagcgccgtccccgtgaccggggagagcttttgtgactgtgccggacagtctgaagcatccttctgtagctcactacattctgctcatcgcggtagagactgcagatgcggcgaggaagatgaatatttcgattgggtgtgggatgacctgaataaatcctccgctaccttgctttcttgcgacaatagaaaagtgtctttccatatggagtactcgtgtggtaccgctgctatcagaggcaccaaggagcttggcgagggtcagcacttctgggagatcaaaatgacaagtcccgtgtatggaacagatatgatggtggggattggaacgtctgacgtggatcttgacaagtacaggcatactttctgttcattgctagggcgtgatgaagatagctggggactgagttacacaggcctcctacatcacaaaggtgataaaaccagcttcagcagcagattcgggcaggggagcattatcggcgtccacctggacacttggcacggcacgctaacatttttcaaaaacagaaagtgcattggagtagccgctactaaacttcagaacaagcgcttctaccctatggtttgtagcaccgcagctcggagctccatgaaagtaacccgtagttgcgcgtcagccacaagcttgcagtacttatgctgccatcgcctgcgacagctcagacccgactccggagataccctggaaggcttgccattgccgccaggtctcaaacaggtgttgcataacaagctgggttgggtgttgagtatgtcttgtagtagacgaaaagccccagtgtctgatcctcaggccgctactagcgcacacccttcctcgcgagaaccccgtccatgccagcgcaagcggtgcaggagaacctag

SEQ ID NO: 233370 - DNA, 1543 bp, Artificial Sequence
  derived and/or modified sequence
gcggggattgtttacgtctcgctccggggcggaaagtgggtcagggccgggccggcggagcgcgcagcgggggctgcagattctttccaccatggccagacgcccccggaacagcagggcctggcacttcgtcctgagtgcagcccgccgagacgcagatgcccgggccgtggctctagcaggctccactaactggggctacgactctgatgggcagcacagcgactcggactccgaccccgagtactccacgctgccgccatccatccccagtgcggtgcccgtgaccggcgagtccttctgtgactgtgctgggcagagcgaggcctccttctgtagcagcctgcactcggcccaccggggcagggactgccgctgcggagaggaagacgagtatttcgactgggtctgggatgacttaaataagtcatcagccaccctgctgagctgtgacaaccgtaaggtcagcttccacatggagtacagctgcggcacagcggccatccggggcaccaaggagctgggggagggccagcacttctgggagatcaagatgacctctcccgtctacggcaccgacatgatggtgggcatcgggacgtcggatgtggacctggacaaataccgccacacgttctgcagcctgctgggcagggatgaggacagctggggcctctcctacacgggcctcctccaccacaagggcgacaagaccagcttctcatcgcggttcggccagggctccatcattggcgtgcacctggacacctggcacggcacactcacctttttcaagaacaggaagtgtataggtgtggcagccaccaagctgcagaacaagagattctacccgatggtgtgctccacggcggcccggagcagcatgaaggtcacccgctcctgtgccagcgccacttccctccagtacctgtgctgccaccgcctgcgccagctgcggccagactcgggagacacgctggagggtctgccgctgccgccgggcctcaagcaggtgctacacaacaagctgggctgggtcctgagcatgagttgcagccgccgcaaggctccagtgtccgatccccaggcagcgacctccgcccaccccagcagtcgcgagcctcggccctgccagaggaagcgctgccgccggacctgactgacttcccagtggaactgccttcttgggctgggacagcccctttcctctgtcccttctttctctgtcccttccttccagccacactccagggcggagttggatgaggcccgtccggagggagccatctcttgctcccgaggctgggacagtcctttctgtgggggctctagggcccctctgctgctgtgctgggtggggaagcggctgccctgagccccaggtcttgtgggaggctgcgaggacgagagcctggctggagcccgcgttgctgttcccacagggcctcggtttttcctaacttgctctgcatgctgtcagcggctgccccgccgtcatagacttaaaggactgcaataaatgtagagttgatgtctaacaccc

SEQ ID NO: 233371 - DNA, 857 bp, Artificial Sequence
  derived and/or modified sequence
atggagtacagctgcggcacagcggccatccggggcaccaaggagctgggggagggccagcacttctgggagatcaagatgacctctcccgtctacggcacactcacctttttcaagaacaggaagtgtataggtgtggcagccaccaagctgcagaacaagagattctacccgatggtgtgctccacggcggcccggagcagcatgaaggtcacccgctcctgtgccagcgccacttccctccagtacctgtgctgccaccgcctgcgccagctgcggccagactcgggagacacgctggagggtctgccgctgccgccgggcctcaagcaggtgctacacaacaagctgggctgggtcctgagcatgagttgcagccgccgcaaggctccagtgtccgatccccaggcagcgacctccgcccaccccagcagtcgcgagcctcggccctgccagaggaagcgctgccgccggacctgactgacttcccagtggaactgccttcttgggctgggacagcccctttcctctgtcccttctttctctgtcccttccttccagccacactccagggcggagttggatgaggcccgtccggagggagccatctcttgctcccgaggctgggacagtcctttctgtgggggctctagggcccctctgctgctgtgctgggtggggaagcggctgccctgagccccaggtcttgtgggaggctgcgaggacgagagcctggctggagcccgcgttgctgttcccacagggcctcggtttttcctaacttgctctgcatgctgtcagcggctgccccgccgtcatagacttaaaggactgcaataaatgtagagttgatgtct

SEQ ID NO: 233372 - DNA, 1784 bp, Artificial Sequence
  derived and/or modified sequence
gatgacacggacctactttccggtcaacgcggcctgcggtaccacctcccacccgggtccaatgtgcgcgcgagctttgtctccaaccgcttgggaactgaccaataggaacgttggattaggactgacagttcctgaaacctctcggcaatagctttgtcacccgactcccgccccctctcccgaagctccgagacaggtgtgcccgcccctcgccgccggagccaatgggcgcagggggcggggattgtttacgtctcgctccggggcggaaagtgggtcagggccgggccggcggagcgcgcagcgggggctgcagattctttccaccatggccagacgcccccggaacagcagggcctggcacttcgtcctgagtgcagcccgccgagacgcagatgcccgggccgtggctctagcaggctccactaactggggctacgactctgatgggcagcacagcgactcggactccgaccccgagtactccacgctgccgccatccatccccagtgcggtgcccgtgaccggcgagtccttctgtgactgtgctgggcagagcgaggcctccttctgtagcagcctgcactcggcccaccggggcagggactgccgctgcggagaggaagacgagtatttcgactgggtctgggatgacttaaataagtcatcagccaccctgctgagctgtgacaaccgtaaggtcagcttccacatggagtacagctgcggcacagcggccatccggggcaccaaggagctgggggagggccagcacttctgggagatcaagatgacctctcccgtctacggcaccgacatgatggtgggcatcgggacgtcggatgtggacctggacaaataccgccacacgttctgcagcctgctgggcagggatgaggacagctggggcctctcctacacgggcctcctccaccacaagggcgacaagaccagcttctcatcgcggttcggccagggctccatcattggcgtgcacctggacacctggcacggcacactcacctttttcaagaacaggaagtgtataggtgtggcagccaccaagctgcagaacaagagattctacccgatggtgtgctccacggcggcccggagcagcatgaaggtcacccgctcctgtgccagcgccacttccctccagtacctgtgctgccaccgcctgcgccagctgcggccagactcgggagacacgctggagggtctgccgctgccgccgggcctcaagcaggtgctacacaacaagctgggctgggtcctgagcatgagttgcagccgccgcaaggctccagtgtccgatccccaggcagcgacctccgcccaccccagcagtcgcgagcctcggccctgccagaggaagcgctgccgccggacctgactgacttcccagtggaactgccttcttgggctgggacagcccctttcctctgtcccttctttctctgtcccttccttccagccacactccagggcggagttggatgaggcccgtccggagggagccatctcttgctcccgaggctgggacagtcctttctgtgggggctctagggcccctctgctgctgtgctgggtggggaagcggctgccctgagccccaggtcttgtgggaggctgcgaggacgagagcctggctggagcccgcgttgctgttcccacagggcctcggtttttcctaacttgctctgcatgctgtcagcggctgccccgccgtcatagacttaaaggactgcaataaatgtagagttgatgtctaacaccca

SEQ ID NO: 233373 - protein, 273 aa, Artificial Sequence
  derived and/or modified sequence
MGQKLSGSLKSVEVREPALRPAKRELRGAEPGRPARLDQLLDMPAAGLAVQLRHAWNPEDRSLNVFVKDDDRLTFHRHPVAQSTDGIRGKVGHARGLHAWQINWPARQRGTHAVVGVATARAPLHSVGYTALVGSDAESWGWDLGRSRLYHDGKNQPGVAYPAFLGPDEAFALPDSLLVVLDMDEGTLSFIVDGQYLGVAFRGLKGKKLYPVVSAVWGHCEVTMRYINGLDPEPLPLMDLCRRSIRSALGRQRLQDISSLPLPQSLKNYLQYQ

SEQ ID NO: 233374 - DNA, 822 bp, Artificial Sequence
  derived and/or modified sequence
atgggccagaagctgagcggcagcctgaagagcgtggaggtgagagagcccgccctgagacccgccaagagagagctgagaggcgccgagcccggcagacccgccagactggaccagctgctggacatgcccgccgccggcctggccgtgcagctgagacacgcctggaaccccgaggacagaagcctgaacgtgttcgtgaaggacgacgacagactgaccttccacagacaccccgtggcccagagcaccgacggcatcagaggcaaggtgggccacgccagaggcctgcacgcctggcagatcaactggcccgccagacagagaggcacccacgccgtggtgggcgtggccaccgccagagcccccctgcacagcgtgggctacaccgccctggtgggcagcgacgccgagagctggggctgggacctgggcagaagcagactgtaccacgacggcaagaaccagcccggcgtggcctaccccgccttcctgggccccgacgaggccttcgccctgcccgacagcctgctggtggtgctggacatggacgagggcaccctgagcttcatcgtggacggccagtacctgggcgtggccttcagaggcctgaagggcaagaagctgtaccccgtggtgagcgccgtgtggggccactgcgaggtgaccatgagatacatcaacggcctggaccccgagcccctgcccctgatggacctgtgcagaagaagcatcagaagcgccctgggcagacagagactgcaggacatcagcagcctgcccctgccccagagcctgaagaactacctgcagtaccagtag

SEQ ID NO: 233375 - DNA, 822 bp, Artificial Sequence
  derived and/or modified sequence
atgggtcaaaagttgtctggctccctgaaaagcgtggaagtgcgggagcctgcactccggcctgccaaacgggaactgaggggagcggagcccggccggcctgcacgccttgatcagctgctggacatgccagccgctgggctcgccgtacaacttaggcacgcctggaacccggaggacagaagcctcaatgttttcgtgaaggatgatgatcggctcacattccaccgccacccggtcgctcagtccaccgacggcatccgaggaaaggtaggacacgctcgaggcctacacgcctggcagatcaactggcctgctcgacagaggggcacccacgctgttgtgggggtagcgacggcccgggctcccctgcactcagtgggatacacagcattggtcgggtccgacgcagagagctggggatgggatctgggccggtcacggctctatcacgacggcaagaatcagcccggggtagcttatcccgctttcctcgggcccgatgaggctttcgccctgccggacagtctattggtggtgctggatatggacgaaggcacattatcatttatagtcgatggccagtatttgggtgttgcattcagagggctcaaaggcaaaaagctgtatcccgttgtttctgccgtctgggggcactgtgaggtcactatgagatatatcaatgggctcgacccggaacctctgcccctaatggacttgtgccgccggtctattaggtcggcacttgggagacagcggttacaagatatctcgtctttgcccctgccgcagtcactcaagaactacctgcagtatcaatag

SEQ ID NO: 233376 - DNA, 822 bp, Artificial Sequence
  derived and/or modified sequence
atgggccagaagctgagcggcagcctgaagtctgtggaggtgcgggagcccgccctgcggcctgccaagcgggagctgcggggagctgagcccggccggcctgcccggctggaccagctgctggacatgcctgctgctggcctggccgtgcagctgcggcatgcctggaacccagaagatagaagcctgaatgtgtttgtgaaggatgatgaccggctgaccttccaccgccaccctgtggcccagagcacagatggcatccggggcaaggtgggccacgcccggggcctgcacgcctggcagatcaactggccagcccggcagaggggcacccatgctgtggtgggcgtggccacagcccgggcccccctgcacagcgtgggctacacagccctggtgggcagtgatgctgagagctggggctgggacctgggccgcagccggctgtaccatgatggcaagaaccagcccggggtggcctacccagccttcctgggcccagatgaggcctttgccctgcctgacagcctgctggtggtgctggacatggatgagggcaccctgtccttcatcgtggatggccagtacctgggcgtggccttccggggcctgaagggcaagaagctgtaccctgtggtgtctgctgtgtggggccactgtgaggtgaccatgagatacatcaatggcctggaccctgagcccctgcccctgatggacctgtgccgccgcagcatccgcagcgccctgggccggcagaggctgcaggacatcagcagcctgcccctgccccagagcctgaagaactacctgcagtaccagtag

SEQ ID NO: 233377 - DNA, 822 bp, Artificial Sequence
  derived and/or modified sequence
atgggccagaagctgagcggcagcctgaagagcgtggaggtgcgggaaccagccctgcgtccggcaaagcgagagctgaggggcgccgaacccggtcgtccagcgcggctggaccagctcctggacatgccagccgctgggctggcagtgcagctgaggcatgcatggaatcccgaagaccggtcccttaacgtgtttgtcaaagacgacgatagactgacatttcaccgacaccctgtggcacaaagtaccgatggaattagaggaaaggtgggccacgctcggggcttgcacgcttggcagattaattggccagccaggcagcgtgggacgcacgccgtggtgggagtagctaccgcaagggctccgttacactccgttggctatactgccttggttggctctgacgctgaatcttggggctgggacctggggcgcagtcgcctgtaccatgacggtaaaaaccagccgggggtggcttatcctgcattcctgggtccagatgaggccttcgctcttcctgacagtttattagtggtactggatatggacgagggaactctgagttttatcgtggatggccagtacctgggggtggcgtttcgcggccttaaaggcaagaaactctatcccgtcgtatcagccgtgtggggtcactgcgaagttactatgcgatatattaacggtctggatcctgagccactcccactgatggacctatgcagacggagtatcagatcggccctagggagacaaagactccaggacatatcttccctccctctccctcagtctttaaagaattatttgcaatatcagtag

SEQ ID NO: 233378 - DNA, 822 bp, Artificial Sequence
  derived and/or modified sequence
atgggccagaaattgagcgggtcattgaagagcgtggaggtccgagaacccgctttgcggcctgcaaagagagaattgcgcggagcagagccaggcagaccggctcgccttgaccagttactcgacatgcccgctgctggtctggcggtgcagctcagacacgcctggaatcctgaggatagaagcctgaacgtatttgtcaaggatgatgacaggctgacattccatagacaccccgtggcacagagtaccgacggcatacgcggtaaggttgggcacgcgaggggcctccatgcctggcagattaactggcccgctcggcagcgcggtacgcatgccgttgtgggggtggcgacagccagggcaccactccatagcgtcggctatacagcgctggttgggtctgacgctgagtcctgggggtgggatctcggtcgatctaggctctaccatgacgggaagaaccagcctggcgtcgcttatccggcttttctgggtccagacgaagctttcgccctccctgatagcctgcttgtcgttctggacatggatgaggggaccctttcttttatcgttgacggccagtacctcggagttgcattccggggtttgaaaggtaagaagctgtatccggtggtgagtgccgtgtgggggcactgcgaggtgacgatgagatacattaacgggcttgatcccgaaccactccctctgatggatctgtgtaggagatcaatccgaagcgccctgggaaggcagaggctccaggatattagcagtctacctctgccccaatctttgaagaattaccttcagtatcaatag

SEQ ID NO: 233379 - DNA, 2908 bp, Artificial Sequence
  derived and/or modified sequence
cggcggcggaggagggggaggcggcggcggctgcagcatccagagctggccgtggcggccggcgcgccccgcgcacaaaagcacccagccccaggggagggcgatgaacacaccacatcccgggcccgggccccagctgctgctaccgctgcgtgcgctcagggcgctggggaagacgcccggcgcgccgggggccagcggccgaggcgcggcccgtgcgccctgagcgcgggactcgtcgccctccgggtcaggcgccaagcttccaagcggctagagcgcgggccttggagcgcccccaggatcgcttcagtaaggcgcttccccactccaggcccgacccccggcgcctgagcgccaacttcgccaagaacgctcctaactccaggccatcctgcagcgcagagggggcgctgctgccgggcatcagccgtgaggacgcgcccctggccgtgcggagagagccggcatttgcgggtcactcgggcgcccctgagtgggcggcggcggcagcagacccctctccagggagtccaggacctgccagcgctggggattcttcccgaacaggcgcttgccctctcttttatggagcttgggcccctgccgcagcccggtagaggctgtggaggtctaccgtccggaagcctggttcccagccccgtggcccattcctggctacggggagtggaggctcccacgaggtagcggtggcctgcagcggcctcctccccgcagtgaagcatgggccagaagctctcggggagcctcaagtcagtggaggtgcgagagccggcgctgcggccggccaagcgggagctgcggggtgcagagcccgggcggccggcgcggctggaccagctgttggacatgccagcggcggggctggctgtgcagctgcggcacgcgtggaaccccgaggaccgctcgctcaacgtcttcgtcaaggacgacgaccggctcaccttccaccggcaccccgtggcccagagcaccgacggcatccgcggcaaggtgggccacgcccgcggcctgcacgcctggcagatcaactggccggctcggcagcgcggcacccacgctgtagttggtgtggccacggcccgtgctcccctgcactccgtgggctacacggcgctggtaggcagtgacgccgagtcgtggggctgggacctgggccgcagccgcctctaccacgacggcaagaaccagcccggcgtggcctacccggcctttctggggcccgacgaggcctttgcgctgcccgactcgctgctcgtggtgctggacatggatgagggcacactcagcttcatcgtggatggccagtacctgggcgtggccttccgaggtctcaagggcaagaagctgtacccggtggtgagtgccgtgtggggccactgtgaagtcaccatgcgctacatcaacggccttgaccccgagcccctgccactgatggacctgtgccggagatccatccgctcggccctgggccgccagcgcctgcaggacatcagctccctgcccctgcctcagtctctcaaaaactatctgcagtaccagtgagccaagcctgatgggcagcacagacacagacacacaccgcagggcccgaccctcctgtcattcacagtcccatggcacataggggaaaggatctacccttctcctggctccccaggacactcagttctttcaaagaccaggatgtggtaccaactttggaaacgaaaggtctcttgccaacagtatctactgccctcgaggcagccctcccaagtcagacacctccttcggagccacagagagcctggagtctgcacctcctggaaatcctgccaccaaccaggacacagcagccaccgtattgatcagagagcctgtttccttattcaagagaatgaataaaacatttaggcaggagactttctattgtgtgccccgttgcagacagggccagggagaaattagccagtgcagggggaaaattgcctctgaataatgaatgatgaaagcctgacgccgtgcccctcctggcccatacgccttgccagggcggcaggattgtcacaccgttttaggactctgtgccactttgagagactgttcccaggaggcccaaccgcagacctggcaagtggacagtgcagtgtggagacaccttccggcttacctctttgaacgttgtttacctacccctttccacgtgctccccttcccagccactgactcacagttctctggatgcccagacacctctcttcagggaagatgagtctgactggtttgccccagggaagagcatatccttaccattattttaagtagcatttgcattttaaaagaggaatgcggagaggacagtacttagtccaaaggtgctaacgggggaactgggggcattgtgacacccaagtctgatgtgtcctgggttggggggccttcctggagtgtcagggtctctgggcaacgtccattcagggtgcggcatggctgtcacaaagctttatttgagcaaattattttttcactttaggagacttctacaagtttgtttcctgtttcaaatgtgtgtgtgatgtgctgtttatttatcagcttgaggtccatgggggcagccttgtgactggaagggtggatatgggagacacattctctacctgctccgagcctggtcctctcgcaggaatgctgctgctgcctccgccgccactgctgctgccacctcttatatgtttcagacactctctgcccagactcatttttaactggaaatcatcacagcagtgggatatcagagccccagacagcactgcctcttcctccccaccccactgcccccaccttaatgtgaatttgactgatgaatgaagagcgtttctaataaagtttgtcattcagtccttca

SEQ ID NO: 233380 - protein, 142 aa, Artificial Sequence
  derived and/or modified sequence
MARYMLLLLLAVWVLTGELWPGAEARAAPYGVRLCGREFIRAVIFTCGGSRWRRSDILAHEAMGDTFPDADADEDSLAGELDEAMGSSEWLALTKSPQAFYRGRPSWQGTPGVLRGSRDVLAGLSSSCCKWGCSKSEISSLC

SEQ ID NO: 233381 - DNA, 429 bp, Artificial Sequence
  derived and/or modified sequence
atggctaggtacatgcttctcctccttctcgcagtctgggtgctgacaggtgagctgtggcctggggccgaagctcgagcggcaccgtacggagtccggctttgtggtcgcgaattcattcgcgcagtgatcttcacctgtggaggctcacggtggcgcagatccgacattctggctcacgaggctatgggcgatacttttccagatgccgacgcagacgaggacagccttgccggtgaactggatgaagccatggggtcttccgaatggctcgcgttgactaaaagcccccaggccttctaccgggggaggccctcatggcaaggtacccctggtgtgcttcgagggtctcgagacgtccttgctggattgtcatcctcctgttgcaagtggggatgcagtaaaagtgagatctccagcctgtgctag

SEQ ID NO: 233382 - DNA, 429 bp, Artificial Sequence
  derived and/or modified sequence
atggcccgctacatgctgctgctgctgctggccgtgtgggtgctgaccggggagctgtggccaggagctgaggcccgggccgccccctacggcgtgcggctgtgtggccgggagttcatccgggccgtcatcttcacctgtggcggcagccgctggaggagaagtgacatcctggcccacgaggccatgggagacaccttcccagatgctgatgctgatgaggacagcctggccggggagctggatgaggccatgggcagcagcgagtggctggccctgaccaagagcccccaggccttctaccggggccggcccagctggcagggcaccccaggagtgctgcggggcagcagagatgtgctggccggcctgagcagcagctgctgcaagtggggctgcagcaagtctgagatcagcagcctgtgctag

SEQ ID NO: 233383 - DNA, 429 bp, Artificial Sequence
  derived and/or modified sequence
atggcccggtacatgctgctgctgctgctggccgtgtgggtgctgaccggtgaactgtggccaggagctgaggctagggcagccccatacggtgtcaggttgtgcggcagagaattcatcagagccgttatttttacttgcggcggcagccgatggagacgtagcgatatactggctcacgaggcaatgggcgatacattcccggacgctgatgctgacgaagactctctggcaggcgaattagatgaagctatgggatcaagcgaatggcttgcgctaaccaaaagcccgcaggccttttacagaggacggccctcctggcagggaacccccggcgtcctcaggggttctagagacgtgctcgccggcctgtcgagctcttgctgcaagtggggctgtagcaaatcggagattagtagtttgtgctag

SEQ ID NO: 233384 - DNA, 429 bp, Artificial Sequence
  derived and/or modified sequence
atggcccgatatatgctgctgctgctgttggcagtttgggtgctgactggcgaactttggcccggtgccgaagcaagggctgcaccttacggggtccgtctgtgtggcagggagtttatccgggcagtcatctttacctgcgggggaagtcgatggcggagaagcgacatcctggcccatgaggcgatgggggatacgtttcctgacgctgatgctgatgaggattctctcgcaggtgagctggacgaggccatgggaagtagtgagtggttagctctgaccaaaagcccccaggctttttaccgagggagacccagttggcagggcaccccgggagtgctgcgcggaagtcgggacgttctggccggtctgtcaagtagctgttgcaagtggggctgttcaaagtcagagatctcaagcctctgctag

SEQ ID NO: 233385 - DNA, 580 bp, Artificial Sequence
  derived and/or modified sequence
gccaagaggcagcagagacactggcccactctcacgttcaaagcatctccgtccagcatggccaggtacatgctgctgctgctcctggcggtatgggtgctgaccggggagctgtggccgggagctgaggcccgggcagcgccttacggggtcaggctttgcggccgagaattcatccgagcagtcatcttcacctgcgggggctcccggtggagacgatcagacatcctggcccacgaggctatgggagataccttcccggatgcagatgctgatgaagacagtctggcaggcgagctggatgaggccatggggtccagcgagtggctggccctgaccaagtcaccccaggccttttacagggggcgacccagctggcaaggaacccctggggttcttcggggcagccgagatgtcctggctggcctttccagcagctgctgcaagtgggggtgtagcaaaagtgaaatcagtagcctttgctagtttgagggctgggcagccgtgggcaccaggaccaatgccccagtcctgccatccactcaactagtgtctggctgggcacctgtctttcgagcct

SEQ ID NO: 233386 - DNA, 429 bp, Artificial Sequence
  derived and/or modified sequence
atggccagatacatgctgctgctgctgctggccgtgtgggtgctgaccggcgagctgtggcccggcgccgaggccagagccgccccctacggcgtgagactgtgcggcagagagttcatcagagccgtgatcttcacctgcggcggcagcagatggagaagaagcgacatcctggcccacgaggccatgggcgacaccttccccgacgccgacgccgacgaggacagcctggccggcgagctggacgaggccatgggcagcagcgagtggctggccctgaccaagagcccccaggccttctacagaggcagacccagctggcagggcacccccggcgtgctgagaggcagcagagacgtgctggccggcctgagcagcagctgctgcaagtggggctgcagcaagagcgagatcagcagcctgtgctag

SEQ ID NO: 233387 - protein, 440 aa, Artificial Sequence
  derived and/or modified sequence
MAENNENISKNVDVRPKTSRSRSADRKDGYVWSGKKLSWSKKSESYSDAETVNGIEKTEVSLRNQERKHSCSSIELDLDHSCGHRFLGRSLKQKLQDAVGQCFPIKNCSSRHSSGLPSKRKIHISELMLDKCPFPPRSDLAFRWHFIKRHTAPINSKSDEWVSTDLSQTELRDGQLKRRNMEENINCFSHTNVQPCVITTDNALCREGPMTGSVMNLVSNNSIEDSDMDSDDEILTLCTSSRKRNKPKWDLDDEILQLETPPKYHTQIDYVHCLVPDLLQINNNPCYWGVMDKYAAEALLEGKPEGTFLLRDSAQEDYLFSVSFRRYSRSLHARIEQWNHNFSFDAHDPCVFHSPDITGLLEHYKDPSACMFFEPLLSTPLIRTFPFSLQHICRTVICNCTTYDGIDALPIPSSMKLYLKEYHYKSKVRVLRIDAPEQQC

SEQ ID NO: 233388 - DNA, 1323 bp, Artificial Sequence
  derived and/or modified sequence
atggccgagaacaacgagaacatcagcaagaacgtggacgtgagacccaagaccagcagaagcagaagcgccgacagaaaggacggctacgtgtggagcggcaagaagctgagctggagcaagaagagcgagagctacagcgacgccgagaccgtgaacggcatcgagaagaccgaggtgagcctgagaaaccaggagagaaagcacagctgcagcagcatcgagctggacctggaccacagctgcggccacagattcctgggcagaagcctgaagcagaagctgcaggacgccgtgggccagtgcttccccatcaagaactgcagcagcagacacagcagcggcctgcccagcaagagaaagatccacatcagcgagctgatgctggacaagtgccccttcccccccagaagcgacctggccttcagatggcacttcatcaagagacacaccgcccccatcaacagcaagagcgacgagtgggtgagcaccgacctgagccagaccgagctgagagacggccagctgaagagaagaaacatggaggagaacatcaactgcttcagccacaccaacgtgcagccctgcgtgatcaccaccgacaacgccctgtgcagagagggccccatgaccggcagcgtgatgaacctggtgagcaacaacagcatcgaggacagcgacatggacagcgacgacgagatcctgaccctgtgcaccagcagcagaaagagaaacaagcccaagtgggacctggacgacgagatcctgcagctggagaccccccccaagtaccacacccagatcgactacgtgcactgcctggtgcccgacctgctgcagatcaacaacaacccctgctactggggcgtgatggacaagtacgccgccgaggccctgctggagggcaagcccgagggcaccttcctgctgagagacagcgcccaggaggactacctgttcagcgtgagcttcagaagatacagcagaagcctgcacgccagaatcgagcagtggaaccacaacttcagcttcgacgcccacgacccctgcgtgttccacagccccgacatcaccggcctgctggagcactacaaggaccccagcgcctgcatgttcttcgagcccctgctgagcacccccctgatcagaaccttccccttcagcctgcagcacatctgcagaaccgtgatctgcaactgcaccacctacgacggcatcgacgccctgcccatccccagcagcatgaagctgtacctgaaggagtaccactacaagagcaaggtgagagtgctgagaatcgacgcccccgagcagcagtgctag

SEQ ID NO: 233389 - DNA, 1323 bp, Artificial Sequence
  derived and/or modified sequence
atggccgaaaacaatgagaatattagcaagaacgtggacgtacgaccaaaaacgtctcggtctcgctcagccgacaggaaagacgggtatgtctggagcggtaaaaagcttagttggtcaaagaagtctgagtcttactccgacgccgaaacagtaaacggaatcgagaaaaccgaggtatccctcagaaatcaagagcgcaagcactcatgctcaagcatcgaattggacttagaccattcatgtggccacagatttcttggaaggtcattgaaacagaaactgcaggacgctgtgggacaatgctttccgattaagaattgctcttctagacattcatccggactgcccagcaaacgcaaaatccatatttccgagttaatgctggacaagtgcccattcccccctcggtccgatctagcattcagatggcacttcataaagcggcatacggcccccattaacagcaagagcgatgaatgggttagtaccgatctaagccagaccgagcttagggacggacagctaaaacgacggaacatggaagaaaacatcaactgctttagccacactaacgtacagccatgcgttattaccacggacaacgcactgtgcagagagggccccatgaccggaagcgtgatgaatctcgtttctaataactctatagaggatagcgacatggacagcgacgacgagatcctcacactgtgcacatcctcgaggaaacgtaataaaccaaaatgggacctggatgacgagatcctgcagctggaaaccccccccaagtaccacacacagatagactatgttcactgtctcgtgcctgacctgctgcaaattaacaataacccttgctattggggcgtcatggacaaatatgctgctgaggcactgcttgaggggaagccagaaggcactttcctgctacgtgactctgcccaggaagactatttatttagcgtgtcattccgcagatactcaagaagcttacatgctagaatcgagcagtggaatcataatttttctttcgatgcccacgatccctgcgtcttccactccccagacattactggcctgctggagcactataaggatccttccgcctgcatgtttttcgagcccctgttgtctacccctctgattcgcacctttccttttagccttcagcacatctgtagaacggtaatatgcaactgtacaacttatgacggaatagatgccctccccatcccttcgagtatgaagctctacctgaaagagtaccactacaaatcaaaagtcagggtgctgcggattgacgcgcccgaacagcagtgttag

SEQ ID NO: 233390 - DNA, 1323 bp, Artificial Sequence
  derived and/or modified sequence
atggccgaaaacaatgagaatatctcaaaaaacgtcgacgtgcgacctaaaacctcccgctctagatccgccgaccgcaaagacggttacgtgtggtccggcaaaaagctgagttggtctaagaagtcagagagctactctgacgcagaaaccgtcaatggcattgagaaaactgaggtatccttaaggaatcaggagcggaagcatagttgttctagcatcgaactggatctggatcattcctgcgggcaccgcttcctgggacgatccttaaagcagaagttgcaggacgcagtcggacagtgctttccaatcaagaactgcagctctaggcactcctccgggctaccttctaagcgcaaaatccatatctccgagcttatgctggacaagtgccccttccctcccaggtccgacctcgcattcaggtggcactttattaaacgtcacaccgctcctatcaactccaagtccgacgagtgggtgtccaccgacctgtcccaaactgagctacgcgacggtcaactaaagaggcgaaacatggaggagaacattaattgcttttcgcacacgaatgttcagccgtgcgtgattactaccgacaatgccctttgccgagaggggccaatgaccggctcagttatgaatcttgtgtctaataactcaatcgaagatagcgatatggattcagatgacgaaattctgacattgtgcacatcatctagaaagcgaaacaaacctaagtgggacctagatgatgagatccttcaacttgagaccccccccaagtatcatacccagatagactacgtccactgtttggttcctgatctcctccagattaacaataacccttgttattggggcgtcatggataagtatgctgccgaggctctcctagagggcaaaccggagggaacatttcttctccgcgacagcgctcaggaggactatctgttttcagtttccttccgtaggtatagcaggagtttacacgcacgcatcgaacaatggaatcacaacttttcttttgacgctcatgacccctgtgtgttccacagtccagatattacaggcctcttagagcactataaggacccctccgcgtgtatgtttttcgaacctctactgtccacacccttgatcagaacctttccgtttagtctacagcacatctgtagaacggttatttgtaactgtactacttacgacggaatcgacgccctcccaattccttctagcatgaagctctacctcaaggagtatcattacaaatccaaagtcagagtactgcgaatcgacgctcccgagcagcaatgttag

SEQ ID NO: 233391 - DNA, 1323 bp, Artificial Sequence
  derived and/or modified sequence
atggctgagaataacgaaaacatcagcaaaaatgtggatgtgcgtccaaagacctcaagatcacgaagcgcggaccggaaggatgggtacgtgtggagtgggaaaaagttgtcttggtcaaaaaaatctgagagttattcagacgcagagacggtgaacgggattgaaaagaccgaggtctcactgcgcaaccaggaacgtaagcatagctgctcaagcatcgagctcgacttagaccatagctgcgggcaccgctttttgggacggagcttaaagcaaaaactacaggatgctgtagggcagtgcttccccattaaaaactgctccagccgacactctagcggcttacctagcaaaagaaaaattcacatttccgaactgatgctcgacaagtgtcccttccctcctagaagcgacttagcattccgctggcactttatcaaaagacacactgctccaatcaacagcaagagcgatgagtgggtgtccacagaccttagccagaccgaactgagggatggccagttaaaacgacgaaacatggaagaaaatataaactgcttctcccatacaaatgtacagccctgcgtgatcactaccgataacgcattatgtcgagagggtcctatgaccggctcggtgatgaacctcgtgtccaataacagtatagaggacagtgatatggattctgacgatgagattctgacactatgtacgagcagtaggaaacgcaacaaacccaaatgggatctggatgacgagatccttcaactggagacaccaccaaaataccatactcagatcgattatgttcattgtttggttcctgaccttctgcagatcaacaataatccatgttactggggcgtgatggataagtacgcagccgaggctttgcttgaaggtaagcctgagggaaccttcctgttaagggatagcgcccaggaagactatctcttttctgtgtccttccggcgatactctcggtcactgcacgccaggatcgaacagtggaaccacaatttttccttcgatgcacacgacccatgcgtcttccacagtccagacataaccgggctccttgaacattataaggatccaagcgcctgtatgtttttcgaaccgctcctgtctacaccgttgattcggaccttcccgttcagtttacaacacatttgtcgaaccgtcatctgcaattgtacaacttacgatggcatcgacgctttgcccatcccttcatctatgaagctgtacttaaaagagtaccactacaagagtaaggtgagggttctgaggatagatgcacccgaacaacaatgctag

SEQ ID NO: 233392 - DNA, 1323 bp, Artificial Sequence
  derived and/or modified sequence
atggctgaaaataatgaaaacatcagcaagaatgtggatgtgcggcccaagaccagccgcagccgctctgctgacaggaaggatggctacgtgtggagcggcaagaagctgtcctggagcaagaagtctgagagctacagtgatgctgagaccgtgaatggaattgagaagacagaggtgtccctgaggaaccaggagaggaagcacagctgcagcagcattgagctggacctggaccacagctgtggccaccgcttcctgggccgcagcctgaagcagaagctgcaggatgctgtgggccagtgcttccccatcaagaactgcagcagccgccacagcagcggcctgcccagcaagaggaagatccacatcagcgagctgatgctggacaagtgccccttccccccaagaagtgacctggccttccgctggcacttcatcaagaggcacacagcccccatcaacagcaagagtgatgagtgggtgtccacagacctgagccagacagagctgagagatggccagctgaagagaagaaacatggaggagaacatcaactgcttcagccacaccaacgtgcagccctgcgtcatcaccacagacaatgccctgtgccgggagggccccatgactggatctgtgatgaacctggtgagcaacaacagcattgaggacagcgacatggacagtgatgatgagatcctgaccctgtgcaccagcagcaggaagaggaacaagcccaagtgggacctggatgatgagatcctgcagctggagaccccacccaagtaccacacccagattgattatgtgcactgcctggtgcctgacctgctgcagatcaacaacaacccctgctactggggcgtgatggacaagtatgctgctgaggccctgctggagggcaagccagagggcaccttcctgctgcgggacagcgcccaggaggactacctgttctctgtgtccttccgccgctacagccgcagcctgcacgccagaattgagcagtggaaccacaacttctcctttgatgcccatgacccctgtgtgttccacagcccagacatcaccggcctgctggagcactacaaggaccccagcgcctgcatgttctttgagcccctgctgagcacccccctcatccgcaccttccccttcagcctgcagcacatctgcaggacagtcatctgcaactgcaccacctatgatggcattgatgccctgcccatccccagctccatgaagctgtacctgaaggagtaccactacaagagcaaggtgcgggtgctgagaattgatgcccctgagcagcagtgctag

SEQ ID NO: 233393 - DNA, 1323 bp, Artificial Sequence
  derived and/or modified sequence
atggccgagaacaacgagaacatcagcaagaacgtggacgtgcggcccaaaacttcccggtcgaggtccgctgatcgtaaagacggatacgtatggtcaggtaagaaattgagctggagcaaaaagagcgagagttactccgatgctgaaactgtgaacggaattgagaagacggaagtgagcctcagaaaccaggaaaggaagcacagttgctcctctatcgaactggatttagaccactcttgcggacacagattcttgggaaggagtctgaagcaaaagctccaggatgcagtaggacaatgcttcccaattaagaactgctcgagccgccattcatccggactgccatccaaacgtaaaatccacatcagtgagttgatgctcgacaagtgccctttcccccctcggtcagacctggcctttcgctggcacttcatcaaaaggcacactgcacctattaacagcaaaagcgatgagtgggtcagcacagacctatcacaaacggaactgcgggatggccagctgaagcgaaggaatatggaagagaatataaattgcttcagccacacaaacgttcagccctgtgttataaccacggacaatgctctctgtcgcgagggcccaatgaccggatcggttatgaatctcgtaagtaacaattccatcgaagacagcgacatggactccgatgacgagattctgactctttgcacctctagtcggaagcggaacaaacccaaatgggatctggatgacgagatcctccagctcgagacaccaccgaaatatcatactcagattgactatgtgcattgcctagtgcccgacctcctgcagattaataataacccctgctactggggggtgatggataagtacgctgcagaagcccttttggaaggtaagcccgagggtacattcctgttgagggactctgcgcaagaggattaccttttcagcgtgtcctttcgccgatactcacgatcactgcacgcccgcattgaacagtggaaccacaactttagcttcgacgcccacgacccatgcgtgtttcattcccctgacatcaccggtctcctcgagcattataaagatccatccgcctgcatgttcttcgaaccgctcctgagtacaccactgattcggaccttccccttttccctccaacatatctgtagaacagtaatctgcaattgcactacttacgacggcattgacgcccttcccatcccgtccagcatgaagctatatctgaaggagtaccactataagtctaaggtgcgggtcctgagaattgacgcaccagagcagcagtgttag

SEQ ID NO: 233394 - DNA, 1323 bp, Artificial Sequence
  derived and/or modified sequence
atggccgagaacaacgagaacatcagcaagaacgtggacgtgcggcccaaaaccagtcgaagcagatctgctgaccgaaaggatggttacgtttggagcggtaaaaagctgtcatggtctaagaaatcagaatcgtattctgatgccgagaccgtcaacggcattgagaaaacagaggtctctctgcggaatcaggagagaaagcacagctgtagtagcatagagctagacttggatcattcctgtggtcaccgattccttggtcgaagcctgaagcagaagctgcaggatgcggtgggacaatgttttcccattaaaaattgtagttccaggcactcctccgggctacctagcaaacggaagattcacatctcagaattaatgctggacaaatgtccttttccaccacggtccgacctggccttcagatggcactttattaagcggcataccgcccctatcaactcaaagagcgatgaatgggtatccaccgacctttctcagaccgagttacgcgatggacagctgaaacgcaggaatatggaagagaatattaactgcttctcacacactaatgtccaaccatgtgtgatcactaccgacaacgccctgtgcagggaggggcctatgacggggtctgtcatgaaccttgtgagtaacaacagcatcgaagactcggatatggatagtgatgacgaaatcctgacattgtgcacaagttcaagaaaaagaaataagcctaaatgggatttggacgatgagattctacaattggaaaccccacctaagtatcatactcaaatcgattacgtgcactgtcttgtgcccgatctgctacagataaataacaatccgtgctattggggagtgatggacaagtatgcggccgaggctctcctggagggaaaacctgagggtacatttctcctgcgggacagcgcgcaggaagattacttgttcagcgtttcattccgtcggtactctcgctctctacatgcacggatcgaacagtggaatcataacttctctttcgatgcgcatgacccatgcgtctttcactctccagatattacagggctactagaacattataaggacccctccgcttgtatgtttttcgagcctctcttaagcacacctctcatcagaacctttcccttcagcctgcagcacatatgcaggacggtgatttgtaattgtaccacatacgacgggattgatgccctgcccatccccagtagtatgaaactgtacttgaaggagtaccattataaatcaaaagttagagtcttgcggatagatgcgccagagcagcagtgttag

SEQ ID NO: 233395 - DNA, 1323 bp, Artificial Sequence
  derived and/or modified sequence
atggccgagaacaacgagaacatcagcaagaacgtggacgtgcggcctaagacatccaggagtaggagcgctgacaggaaagatggctacgtatggtcaggcaagaaactgagctggtcgaaaaagtctgaatcctactccgacgccgaaactgtcaacggcattgagaagactgaagtgagtctcaggaatcaagagcgtaaacacagctgctcatccattgagcttgatcttgaccactcttgcggtcatcggtttctaggcagatcactcaaacagaagctgcaagacgccgtgggccaatgcttccccatcaaaaactgctcatctcgacactctagcgggctcccttcaaaaagaaagatacatattagcgagttgatgttggacaaatgcccatttcctccgagaagtgatctcgccttcaggtggcacttcatcaaaaggcacacagccccgattaacagtaaatctgatgagtgggtctctacagacctgtctcagactgagcttagggatggccagctgaaaaggcgcaatatggaagaaaatattaactgctttagccacacaaatgtgcaaccatgcgttatcacaacagacaatgccctgtgtcgcgaggggcctatgactggctctgtcatgaacctcgtctcaaacaacagtattgaagattctgacatggactcagatgatgagattctcaccctgtgcacatcttcacgcaagcggaataagcctaagtgggacttagacgacgaaattttgcaactggaaacccctcccaagtaccacacacagattgattacgtccactgtttagtccctgaccttctgcagattaataacaacccttgctattggggcgtgatggacaagtacgccgccgaagccttgctcgaaggaaagccagagggcacctttctgctgcgcgatagcgcccaggaagactatctctttagcgtttcctttagaaggtacagccgctccctgcatgcaaggatagagcaatggaatcataacttctcatttgatgcccacgatccctgtgtgttccacagcccggatataaccggattgctggaacactacaaagaccccagcgcatgcatgtttttcgaacccctactgagcacacccctgattcgtaccttcccttttagtctgcaacacatctgtcggactgtcatctgcaattgcacgacatatgacggtattgatgcacttcccatcccctcttccatgaagctgtacctgaaggaatatcactataagagtaaagttcgcgtactccgcatcgacgctcccgagcagcagtgttag

SEQ ID NO: 233396 - DNA, 1323 bp, Artificial Sequence
  derived and/or modified sequence
atggccgagaataatgagaacatatcaaagaatgtcgacgtccgtccaaagacttccagatcccgatccgccgacagaaaagatggctacgtctggagcggtaaaaagctgagttggtcaaaaaagtccgagtcatactccgacgccgagaccgtgaacggaatcgaaaagacagaggtgtcactccggaaccaagaacggaaacattcatgtagctcaatagagctggacttggatcactcctgtggccaccggttcctgggccgttcactaaaacagaagctgcaagatgccgtgggacaatgctttcccataaagaattgtagcagtcggcactcgtcaggcctgccctccaaaagaaagattcatatctccgaactgatgttagataaatgcccctttcctccacggtccgatcttgccttccggtggcacttcatcaagcggcacacagcacccataaattccaagagtgacgaatgggtaagcaccgatctgtcacagaccgaattgagggatggtcaactcaagagaaggaacatggaagagaacatcaattgtttctcccacaccaatgtgcagccctgtgtaatcacaacagataacgctctgtgtcgagaaggacccatgacaggttcagttatgaatctagtttccaacaactccattgaagactctgacatggattctgacgatgagattctcactttgtgtacctccagcaggaaacgcaataagccaaaatgggacctcgacgacgagatcctacagctcgaaacacctccaaaataccacacccagatcgattacgtgcattgtctcgtccccgacctgctgcagatcaacaacaacccctgttattggggcgtgatggataagtacgcagccgaggctcttttagagggcaaacccgagggcaccttcctgctccgagatagtgcccaagaagactacttgttttcagtttctttcaggagatactcaagaagcctgcacgcaaggattgaacagtggaaccacaatttctccttcgatgcccacgacccctgcgtgttccattccccggacatcacaggcctgctggaacactacaaagatcccagtgcctgtatgtttttcgaacctcttctttcaactcccttgatccgtacgttccccttctccctgcaacacatttgcaggaccgttatctgtaactgcaccacctacgacggtattgatgccctgcctattccgtcctccatgaagctgtacctaaaggaatatcactacaaatccaaggtcagggtattgcggatcgatgcacccgagcaacagtgctag

SEQ ID NO: 233397 - DNA, 1323 bp, Artificial Sequence
  derived and/or modified sequence
atggctgagaacaacgaaaacatctctaagaatgtggacgtcaggcccaaaacctccagatcacggtcagcggatcggaaggatggttatgtctggtcaggaaagaaactgtcatggtcgaaaaagtccgagtcttactccgacgcagagacggtgaatggaattgagaaaaccgaagtttctctcagaaaccaggaacgcaaacattcttgcagctccatcgagctcgatctggatcatagctgtggacacaggtttctcgggagatccttgaagcaaaagctgcaggacgccgtagggcagtgctttccaatcaaaaactgtagtagccggcacagttctggattaccgtcaaaacgaaagatccacatttccgaactgatgctcgacaagtgcccattcccaccaaggtccgatctcgccttcaggtggcacttcatcaagagacacaccgctccaatcaactctaaaagcgatgagtgggttagcacagatctgtcacagaccgagctcagagacggccagctgaagcgccgaaatatggaggagaacataaactgctttagccataccaatgtgcagccatgcgtcatcaccaccgataatgccctgtgtcgcgaggggcctatgacaggctccgtgatgaacctagtaagcaataacagcatcgaggacagcgacatggacagcgacgatgagattctgaccctctgcacctccagccgaaagcggaataagccaaaatgggatctggatgacgaaatactgcagttagaaacaccgccaaaatatcatactcagatagattacgttcactgcctggtgcccgatctcctgcagatcaacaacaacccatgttactggggcgtgatggacaagtatgcagccgaagccttactcgagggaaaaccggagggaactttcctccttcgcgacagtgcccaggaggattacctttttagcgtcagctttcggaggtatagtcgaagccttcatgccaggattgaacaatggaatcataacttcagctttgacgcccatgatccctgtgtgtttcattcacccgatatcacgggtcttcttgagcattataaggacccgtcggcctgcatgttctttgagcctctcttgagcactcctctgatccgcacgttcccattcagcttgcaacacatttgtcgcactgtgatatgcaactgcacaacctacgacggtattgacgccctccctatccctagctcaatgaaactgtacttgaaggaatatcactacaagtctaaagtccgtgttctgcgaatcgacgctcccgaacagcagtgctag

SEQ ID NO: 233398 - DNA, 1323 bp, Artificial Sequence
  derived and/or modified sequence
atggcagaaaacaacgaaaacatttccaagaacgttgacgtaagaccgaagacttcacgctcaaggagcgcagatcggaaggacgggtatgtgtggtctggtaagaaactatcttggagcaaaaaatccgagtcctactccgatgccgaaaccgtgaacgggatcgagaagaccgaggtgtccctccgaaatcaggaaagaaaacacagttgcagttcgatagaactcgatttggatcattcatgtggacatcgcttcttgggcagaagcctcaagcagaagctgcaggacgctgtgggacagtgcttccccatcaaaaattgttcatcacggcattcaagtggactgccctctaaaagaaaaattcacatatcagagctgatgcttgacaagtgtccctttccgcctaggtccgacttggcatttagatggcactttatcaagcggcataccgccccaatcaactctaaatctgatgaatgggtttccactgacttatctcaaacagaactgcgtgatggacagctgaagcggcgaaacatggaggagaacattaattgtttttcacataccaatgtgcagccttgtgttataactacggacaatgcactgtgtcgggaaggcccaatgaccggctctgttatgaacttagttagcaacaattcaattgaagatagcgacatggattctgatgatgagattctgaccctgtgcacctcgagcagaaagcggaacaagccaaaatgggatctggacgacgagattttacagctggagactccccctaaataccacacacagattgactatgtgcactgccttgtgcccgatcttctccagataaataacaacccttgctactggggggtgatggataaatacgccgctgaagccctgttggagggcaagcctgaaggcacctttctcttacgggatagtgcccaggaagactatctgttcagcgtatctttccgcagatattctcggagtttacatgcgagaattgagcagtggaatcacaatttcagcttcgatgcccatgatccatgtgtttttcattcccccgatatcacggggcttttggagcactataaagaccctagcgcatgcatgttctttgagcctcttctttcaacccccttgatcagaacgttcccattctcgttgcagcatatttgccgtaccgtaatctgcaattgtaccacatacgatggaatcgacgcattacctattccctcgagcatgaaactgtatctgaaggagtaccattataagtccaaggtccgagtgctgagaattgacgccccagagcagcagtgttag

SEQ ID NO: 233399 - DNA, 6667 bp, Artificial Sequence
  derived and/or modified sequence
tctggaaaagaaggcgagatcttctagagcctctaatcttggcatccttcgtgccctcaccttgtcgcttctgtagagataaagaaggaatgacttaatttctgttccggttggttctcttggtacctgaagatacatccagaaagtgcccagaagaaacttcctgctggaaaaaatgaaaaagcagtatttataacattagaatctggataatttgttaacatggcagaaaataatgaaaatattagtaaaaatgtagatgtaaggcccaaaactagtcggagcagaagtgccgacagaaaagacggttatgtgtggagtggaaagaagttatcttggtcaaaaaagagtgagagttattcagatgctgagacagtgaatggtatagagaaaaccgaagtgtctttaaggaaccaagaaaggaagcacagctgttcatccattgagttggacttagatcattcctgtgggcatcgatttttaggccgatctcttaaacagaaactgcaagatgccgtggggcagtgttttccaataaagaattgtagtagtcggcactcttcagggcttccgtctaaaaggaaaattcatatcagtgaactcatgttagataagtgtcctttcccacctcgatcagatttagcctttaggtggcattttattaaacgacacactgctcctataaattccaaatcagatgaatgggtaagcacagacttgtctcagactgaattgagggatggtcagctaaaacgaagaaatatggaagaaaatataaactgtttctcacataccaatgttcagccctgtgtcataaccaccgacaatgctttgtgtagagaaggtcctatgactggctctgtgatgaacctggtttcaaataacagtatagaagatagtgatatggattccgatgatgaaattctaacactttgcacaagttccagaaaaagaaacaaacccaaatgggatttggatgatgaaatcctgcagttggaaacacctcctaaataccacacgcagattgattatgtccactgtcttgtaccagacctccttcagatcaataacaacccatgttactggggagtgatggataaatacgcagccgaagcactactggaaggaaaaccagagggtacctttttacttcgagactcagcacaggaagactatttattctctgttagttttagacgctatagtcgttctcttcatgctagaattgaacagtggaatcacaactttagctttgatgcacatgacccctgtgtcttccattctcctgacattactgggctcctagaacattataaggacccaagcgcctgtatgttctttgaaccacttctatccactcccttaattcggactttccctttttccctgcagcatatatgcagaacagttatttgtaactgtacaacttatgatggcatcgatgcccttccaattccttcttctatgaaattatatctgaaggaatatcattataaatcaaaagttagagtactcaggattgatgcaccagaacagcaatgctagtaacaggatgggaacatgggaatgataatatatattttttcttttaatattttatttttctttttatgccactttggatttttctacaaaggcagtggtgtccaaaataaaatctctgccctaaattttactaataaatccatttttctagtgatacacaaattgtttaaggttatacactcgagcttaaatagatatttttaaccaggtgtttggtttttgtttttaccgtgtaggttgtatacttacattttttctttccttaatttatacatgatcctttttccttaatttatacatgatccaggcacatttgaaatttggtaggcattgcaaacacatttgaatattgtgtatttcatactattctttaaaagtaatcttatgtcctttcctacatgtaaaatattttgttaatctatgccattagtagtattatatataaaatatagttccccgtcccccttttcattgagtttgatattcttcagtaaagctgaatgttgtaattcaccattcatactaatgttattgacttttgtaacttactaatagggatgttaaaagtaacaaaaccaagtcaaacttggtgtatttttattttaaatattaactctaaagcaggattactaaatttgattaatctggtcaatgagaatcaaatggaaacatatcattctggaggtgcacttactcttctacaatgtggccggatcatttgtcattcctgaataggtctttctctcaacctgcaagagctaaaccatcttcaaaacataaatcttgttcctttctcattggaagctttgaaaataatgataacactattagtagctagtagttactaaagtgctaaagtaattgtggggtttttctgtattagcttatgaactgttgcttctacttagcccttttatagaaactctgagctgttactttggggaaattccacaatgtattagcagccacaaatttccactggtaaccaaagagtacctaagtagtttttcattattttaagttgaatttgaataaagattccagaaataaacatggagctcagtattcaggaagcttaatactgtttttgatctacaagatccaaataattatccctatcttcagaattaacttagtctgtaatgtggcttcaaaaaaagaaagccttttgacagctacatgacttacaccatacagaacagtactggacaaaaggggtgatattttaaatttactatcccagaaacagggcaacgtttttagaaacatctttagcccaaagtaactagtaaaaataaatggagtggtatcctatcttctttttttaaggaatcaatgaataataaatgtagatagacaattttcttctggtgagctgtctaaccctttgtacacattgacatttttaatatcgtaactgatttcttgatgctagtttagctatattaggaaactgcttctacctagattgaaagaaatttgactcataaacttccaagttagaacaaatatttcttcattattgttgcttttatgtgagtagcatttccctatcttgcagttctgttaacatgaaaatggcatttttccataatagctttaaaataattttttagtaattattacaaaattaaggaaaatctctattaccgttatcttttagcattttttttttcctcagtgatctcaagattgtcttagtctcaatgagatgtagctacaaaaatggcacctcttagcagtgatgaggctcaggatatcggatatcataacaccaatgtcaggataaatatctcttctaaagacgatatttaccttttacaaggttagaaaagtctcatactacctcatctttattgtggcgcttttgtagatcactgagaagcttatcttattaaccaatataccacttcctaaatatccatctttggtgaaagaaaatagtgtggtaagagtacccatgattatagttttttatcagaatttgataagattttctgtttctgtgaaacaattattttaaatatttttcttttaaaaataactttttatcagtacagaaaaacctaagggatgactagcttacaaatattctgttaaggggtagttttataaagaaaaatgatatatagttatgttgtcttttatagtgttaaaattagtatttatatgaaagtcaagatctaagtaccttttcatataattcaaactgattgcttgtgatatgttttctctggcttttttattttttcaacttcaaggtattaacagctgttaacacttaaaaagtactgccacatatgtagccttgaagtagttgatctaataaatgagagcagggaggagattcattgactctgaaatgatttttatttttcctttggtatttgctacagtgaaaagaagtttggaaagtagatacataaagacttgagaagggaattgtttaagggaaaagaaaagagtaataattttttttaaaacattaaggaattggaattcagaaaggttacccccttcctctgtgtctttgtaaggatacatttggaagaacatacagtattcagaaactaacctatataaaatgtaaacaatatattgattgcactatataaatgagtaaattttgagaggaacaatgtgggaatgtataaatttgtctaaaattttataactgttgaacaaagggaagatttgaacagtgtaaattccagagttgagaaagcatttagcatggtggaaatgtggagagcttattggtgagagaggatggagctaagagaaataagatcaaatattaaaattaggaatttaggcattacctcagggaaaagccttgacagtgaaaagaaactacttaatcgctaatagctagtctggaccagacacttaactgcgctttgggaatcatcctgggctaatcaggaaataaacttgacttttctatttttctctgaagctttacaggacatactcccactcccatttttttctaagcctacagcatcttgattcatagtataattcctgaagtatgctgaatggactttttaaggttcctttagcatttttgtatagagttatatgtgatctttctataaccatgccattcacttaaataattcatgaagggaatggtttaatttaaaggaagacctaataggaagaagattaaaggaagcttttagtcagcctgtggctagatttattgatttggtgatcaaacctgtgctatttcctgaatttcagctaatggccaactgtggtcaaagaatggctttcagttaaagttttgacttcttattataaataatataaagaatgtctcagtaattagaaatcccttaataagtagaacaaatgtggcaagtaggactcctatcggtatacaaattccatttctttttataagaaaaacacataaaccattatcatttattcatgagccaaagccattaagaagataaatccagttatcagcttcctgtctctgaagtttggatcattttatagatccacgcaatagagagcttccttcctatgaaacaaaaaccttgagatctctttttttttgagacagagtctcgctgttgtcagcccaggctggagtgcaatggcgcaatctcggttcactgcaacctctgccttccaggttccagcaattctcctacctcagctcccaagtagctgagatgacaggcgtgtgccaccacgcccagctaatttttgtatttttagtagcgatggtgtttcactacattggccaggctggtctcgaactcctgacctcaggtgaccacccgcctcagcctcccaaagtgctgggattacaggcatgagccactgtgcccggccaagatctaactcacgcttacttttcattaaaatatttcttgtcgcttttagctattgtcagaatccaataaacagcttacgcattcattttggtaaagcaaatttcacaggaaaatagacaaaattataagagattcctggagacaacacaaggaaaacaatgtttaaaagcaaaatagcctgtgtaatgttaggtaatgtaatgcccaagtgaataaaagatttttcgtcaagcaaactactgtttctactttgggggaaaaaagtcagttttacatttgtaatttaaggaaagaacagaaagcacaaaggtttttcttttctttattaatggcctactagaaatgagcagtgcaagagtctacctgtactattctaatacagtaagatattggacacaaaatggaggtaactttttaaaatagattggcttggaagttgaaatgtagattaatggatataacccaatagaaagggattttcaaataaaaccaaagtctatttttttatttactttctaattttgaacagatgactcagtcctaaatctttgcctttatttcctataaaatgtaggtgatacttgtaactcgacttcctggagttaattcttcagcaagaggtgaccctgggagcgtactttaaaataattgctgtacagccattgagtactaacatgatgataggttttcaaaatatctttgtagtggatgctgcataattacattcacttctcttagactgtaaaagactttcttgacttgttttaacagtagagatagcagtacaatttgaatttatggtttaggctctgcaattagaggaacaattgcagtttcctcctacccttcatatggtctgtgtaaaactgatgtttgcttaacttattttaaaagttgattacgttttcagaaaataaagataatcacttttgccatggttataatcaaatctaagctttcagacttgagagccatggtgtaaaactcaaggaggtttatttaaattatgctgactttgctagaattggataaattctgtataagccaagtatgagttcacatgtactcgaatatacagttttcacaaagctattactctcatcagtcaggcttgtatgatctattccttaccacaaaagaagtagacaattgccacttttatttctaatccttaagttgaatgtttcttcttggatgtaagttcaaataaattgatctggataaattttcatttctacttaattaaaacttcctatgtaaaatcc

SEQ ID NO: 233400 - DNA, 6779 bp, Artificial Sequence
  derived and/or modified sequence
ctgaacacggaagtggtggcggcgcccagggaaccggcggaggcgatgaccgtgacggctgggttgggaccggaacgccgaagcggggttgggggtggcagaaaagcatctgctttgtaagacctacacgaggtgcaggagtggttgggcctcccctctccacttaagcaagcgcccagactgatggcgatggtgatggcagcagttactcgcacaaccccagttaagctgcgctccgggagatacatccagaaagtgcccagaagaaacttcctgctggaaaaaatgaaaaagcagtatttataacattagaatctggataatttgttaacatggcagaaaataatgaaaatattagtaaaaatgtagatgtaaggcccaaaactagtcggagcagaagtgccgacagaaaagacggttatgtgtggagtggaaagaagttatcttggtcaaaaaagagtgagagttattcagatgctgagacagtgaatggtatagagaaaaccgaagtgtctttaaggaaccaagaaaggaagcacagctgttcatccattgagttggacttagatcattcctgtgggcatcgatttttaggccgatctcttaaacagaaactgcaagatgccgtggggcagtgttttccaataaagaattgtagtagtcggcactcttcagggcttccgtctaaaaggaaaattcatatcagtgaactcatgttagataagtgtcctttcccacctcgatcagatttagcctttaggtggcattttattaaacgacacactgctcctataaattccaaatcagatgaatgggtaagcacagacttgtctcagactgaattgagggatggtcagctaaaacgaagaaatatggaagaaaatataaactgtttctcacataccaatgttcagccctgtgtcataaccaccgacaatgctttgtgtagagaaggtcctatgactggctctgtgatgaacctggtttcaaataacagtatagaagatagtgatatggattccgatgatgaaattctaacactttgcacaagttccagaaaaagaaacaaacccaaatgggatttggatgatgaaatcctgcagttggaaacacctcctaaataccacacgcagattgattatgtccactgtcttgtaccagacctccttcagatcaataacaacccatgttactggggagtgatggataaatacgcagccgaagcactactggaaggaaaaccagagggtacctttttacttcgagactcagcacaggaagactatttattctctgttagttttagacgctatagtcgttctcttcatgctagaattgaacagtggaatcacaactttagctttgatgcacatgacccctgtgtcttccattctcctgacattactgggctcctagaacattataaggacccaagcgcctgtatgttctttgaaccacttctatccactcccttaattcggactttccctttttccctgcagcatatatgcagaacagttatttgtaactgtacaacttatgatggcatcgatgcccttccaattccttcttctatgaaattatatctgaaggaatatcattataaatcaaaagttagagtactcaggattgatgcaccagaacagcaatgctagtaacaggatgggaacatgggaatgataatatatattttttcttttaatattttatttttctttttatgccactttggatttttctacaaaggcagtggtgtccaaaataaaatctctgccctaaattttactaataaatccatttttctagtgatacacaaattgtttaaggttatacactcgagcttaaatagatatttttaaccaggtgtttggtttttgtttttaccgtgtaggttgtatacttacattttttctttccttaatttatacatgatcctttttccttaatttatacatgatccaggcacatttgaaatttggtaggcattgcaaacacatttgaatattgtgtatttcatactattctttaaaagtaatcttatgtcctttcctacatgtaaaatattttgttaatctatgccattagtagtattatatataaaatatagttccccgtcccccttttcattgagtttgatattcttcagtaaagctgaatgttgtaattcaccattcatactaatgttattgacttttgtaacttactaatagggatgttaaaagtaacaaaaccaagtcaaacttggtgtatttttattttaaatattaactctaaagcaggattactaaatttgattaatctggtcaatgagaatcaaatggaaacatatcattctggaggtgcacttactcttctacaatgtggccggatcatttgtcattcctgaataggtctttctctcaacctgcaagagctaaaccatcttcaaaacataaatcttgttcctttctcattggaagctttgaaaataatgataacactattagtagctagtagttactaaagtgctaaagtaattgtggggtttttctgtattagcttatgaactgttgcttctacttagcccttttatagaaactctgagctgttactttggggaaattccacaatgtattagcagccacaaatttccactggtaaccaaagagtacctaagtagtttttcattattttaagttgaatttgaataaagattccagaaataaacatggagctcagtattcaggaagcttaatactgtttttgatctacaagatccaaataattatccctatcttcagaattaacttagtctgtaatgtggcttcaaaaaaagaaagccttttgacagctacatgacttacaccatacagaacagtactggacaaaaggggtgatattttaaatttactatcccagaaacagggcaacgtttttagaaacatctttagcccaaagtaactagtaaaaataaatggagtggtatcctatcttctttttttaaggaatcaatgaataataaatgtagatagacaattttcttctggtgagctgtctaaccctttgtacacattgacatttttaatatcgtaactgatttcttgatgctagtttagctatattaggaaactgcttctacctagattgaaagaaatttgactcataaacttccaagttagaacaaatatttcttcattattgttgcttttatgtgagtagcatttccctatcttgcagttctgttaacatgaaaatggcatttttccataatagctttaaaataattttttagtaattattacaaaattaaggaaaatctctattaccgttatcttttagcattttttttttcctcagtgatctcaagattgtcttagtctcaatgagatgtagctacaaaaatggcacctcttagcagtgatgaggctcaggatatcggatatcataacaccaatgtcaggataaatatctcttctaaagacgatatttaccttttacaaggttagaaaagtctcatactacctcatctttattgtggcgcttttgtagatcactgagaagcttatcttattaaccaatataccacttcctaaatatccatctttggtgaaagaaaatagtgtggtaagagtacccatgattatagttttttatcagaatttgataagattttctgtttctgtgaaacaattattttaaatatttttcttttaaaaataactttttatcagtacagaaaaacctaagggatgactagcttacaaatattctgttaaggggtagttttataaagaaaaatgatatatagttatgttgtcttttatagtgttaaaattagtatttatatgaaagtcaagatctaagtaccttttcatataattcaaactgattgcttgtgatatgttttctctggcttttttattttttcaacttcaaggtattaacagctgttaacacttaaaaagtactgccacatatgtagccttgaagtagttgatctaataaatgagagcagggaggagattcattgactctgaaatgatttttatttttcctttggtatttgctacagtgaaaagaagtttggaaagtagatacataaagacttgagaagggaattgtttaagggaaaagaaaagagtaataattttttttaaaacattaaggaattggaattcagaaaggttacccccttcctctgtgtctttgtaaggatacatttggaagaacatacagtattcagaaactaacctatataaaatgtaaacaatatattgattgcactatataaatgagtaaattttgagaggaacaatgtgggaatgtataaatttgtctaaaattttataactgttgaacaaagggaagatttgaacagtgtaaattccagagttgagaaagcatttagcatggtggaaatgtggagagcttattggtgagagaggatggagctaagagaaataagatcaaatattaaaattaggaatttaggcattacctcagggaaaagccttgacagtgaaaagaaactacttaatcgctaatagctagtctggaccagacacttaactgcgctttgggaatcatcctgggctaatcaggaaataaacttgacttttctatttttctctgaagctttacaggacatactcccactcccatttttttctaagcctacagcatcttgattcatagtataattcctgaagtatgctgaatggactttttaaggttcctttagcatttttgtatagagttatatgtgatctttctataaccatgccattcacttaaataattcatgaagggaatggtttaatttaaaggaagacctaataggaagaagattaaaggaagcttttagtcagcctgtggctagatttattgatttggtgatcaaacctgtgctatttcctgaatttcagctaatggccaactgtggtcaaagaatggctttcagttaaagttttgacttcttattataaataatataaagaatgtctcagtaattagaaatcccttaataagtagaacaaatgtggcaagtaggactcctatcggtatacaaattccatttctttttataagaaaaacacataaaccattatcatttattcatgagccaaagccattaagaagataaatccagttatcagcttcctgtctctgaagtttggatcattttatagatccacgcaatagagagcttccttcctatgaaacaaaaaccttgagatctctttttttttgagacagagtctcgctgttgtcagcccaggctggagtgcaatggcgcaatctcggttcactgcaacctctgccttccaggttccagcaattctcctacctcagctcccaagtagctgagatgacaggcgtgtgccaccacgcccagctaatttttgtatttttagtagcgatggtgtttcactacattggccaggctggtctcgaactcctgacctcaggtgaccacccgcctcagcctcccaaagtgctgggattacaggcatgagccactgtgcccggccaagatctaactcacgcttacttttcattaaaatatttcttgtcgcttttagctattgtcagaatccaataaacagcttacgcattcattttggtaaagcaaatttcacaggaaaatagacaaaattataagagattcctggagacaacacaaggaaaacaatgtttaaaagcaaaatagcctgtgtaatgttaggtaatgtaatgcccaagtgaataaaagatttttcgtcaagcaaactactgtttctactttgggggaaaaaagtcagttttacatttgtaatttaaggaaagaacagaaagcacaaaggtttttcttttctttattaatggcctactagaaatgagcagtgcaagagtctacctgtactattctaatacagtaagatattggacacaaaatggaggtaactttttaaaatagattggcttggaagttgaaatgtagattaatggatataacccaatagaaagggattttcaaataaaaccaaagtctatttttttatttactttctaattttgaacagatgactcagtcctaaatctttgcctttatttcctataaaatgtaggtgatacttgtaactcgacttcctggagttaattcttcagcaagaggtgaccctgggagcgtactttaaaataattgctgtacagccattgagtactaacatgatgataggttttcaaaatatctttgtagtggatgctgcataattacattcacttctcttagactgtaaaagactttcttgacttgttttaacagtagagatagcagtacaatttgaatttatggtttaggctctgcaattagaggaacaattgcagtttcctcctacccttcatatggtctgtgtaaaactgatgtttgcttaacttattttaaaagttgattacgttttcagaaaataaagataatcacttttgccatggttataatcaaatctaagctttcagacttgagagccatggtgtaaaactcaaggaggtttatttaaattatgctgactttgctagaattggataaattctgtataagccaagtatgagttcacatgtactcgaatatacagttttcacaaagctattactctcatcagtcaggcttgtatgatctattccttaccacaaaagaagtagacaattgccacttttatttctaatccttaagttgaatgtttcttcttggatgtaagttcaaataaattgatctggataaattttcatttctacttaattaaaacttcctatgtaaaatccaa

SEQ ID NO: 233401 - DNA, 4110 bp, Artificial Sequence
  derived and/or modified sequence
gcggcgcccagggaaccggcggaggcgatgaccgtgacggctgggttgggaccggaacgccgaagcggggttgggggtggcagaaaagcatctgctttgtaagacctacacgaggtgcaggagtggttgggcctcccctctccacttaagcaagcgcccagactgatggcgatggtgatggcagcagttactcgcacaaccccagttaagctgcgctccgggaggagttcatctgttgtctgctctccagtgacttccgtttgtggagcctaagtgtttctacagaatccaactcaaatatcaaggactatgatcagaatgctttcaaggagtttttgggcacatgatggcagatacatccagaaagtgcccagaagaaacttcctgctggaaaaaatgaaaaagcagtatttataacattagaatctggataatttgttaacatggcagaaaataatgaaaatattagtaaaaatgtagatgtaaggcccaaaactagtcggagcagaagtgccgacagaaaagacggttatgtgtggagtggaaagaagttatcttggtcaaaaaagagtgagagttattcagatgctgagacagtgaatggtatagagaaaaccgaagtgtctttaaggaaccaagaaaggaagcacagctgttcatccattgagttggacttagatcattcctgtgggcatcgatttttaggccgatctcttaaacagaaactgcaagatgccgtggggcagtgttttccaataaagaattgtagtagtcggcactcttcagggcttccgtctaaaaggaaaattcatatcagtgaactcatgttagataagtgtcctttcccacctcgatcagatttagcctttaggtggcattttattaaacgacacactgctcctataaattccaaatcagatgaatgggtaagcacagacttgtctcagactgaattgagggatggtcagctaaaacgaagaaatatggaagaaaatataaactgtttctcacataccaatgttcagccctgtgtcataaccaccgacaatgctttgtgtagagaaggtcctatgactggctctgtgatgaacctggtttcaaataacagtatagaagatagtgatatggattccgatgatgaaattctaacactttgcacaagttccagaaaaagaaacaaacccaaatgggatttggatgatgaaatcctgcagttggaaacacctcctaaataccacacgcagattgattatgtccactgtcttgtaccagacctccttcagatcaataacaacccatgttactggggagtgatggataaatacgcagccgaagcactactggaaggaaaaccagagggtacctttttacttcgagactcagcacaggaagactatttattctctgttagttttagacgctatagtcgttctcttcatgctagaattgaacagtggaatcacaactttagctttgatgcacatgacccctgtgtcttccattctcctgacattactgggctcctagaacattataaggacccaagcgcctgtatgttctttgaaccacttctatccactcccttaattcggactttccctttttccctgcagcatatatgcagaacagttatttgtaactgtacaacttatgatggcatcgatgcccttccaattccttcttctatgaaattatatctgaaggaatatcattataaatcaaaagttagagtactcaggattgatgcaccagaacagcaatgctagtaacaggatgggaacatgggaatgataatatatattttttcttttaatattttatttttctttttatgccactttggatttttctacaaaggcagtggtgtccaaaataaaatctctgccctaaattttactaataaatccatttttctagtgatacacaaattgtttaaggttatacactcgagcttaaatagatatttttaaccaggtgtttggtttttgtttttaccgtgtaggttgtatacttacattttttctttccttaatttatacatgatcctttttccttaatttatacatgatccaggcacatttgaaatttggtaggcattgcaaacacatttgaatattgtgtatttcatactattctttaaaagtaatcttatgtcctttcctacatgtaaaatattttgttaatctatgccattagtagtattatatataaaatatagttccccgtcccccttttcattgagtttgatattcttcagtaaagctgaatgttgtaattcaccattcatactaatgttattgacttttgtaacttactaatagggatgttaaaagtaacaaaaccaagtcaaacttggtgtatttttattttaaatattaactctaaagcaggattactaaatttgattaatctggtcaatgagaatcaaatggaaacatatcattctggaggtgcacttactcttctacaatgtggccggatcatttgtcattcctgaataggtctttctctcaacctgcaagagctaaaccatcttcaaaacataaatcttgttcctttctcattggaagctttgaaaataatgataacactattagtagctagtagttactaaagtgctaaagtaattgtggggtttttctgtattagcttatgaactgttgcttctacttagcccttttatagaaactctgagctgttactttggggaaattccacaatgtattagcagccacaaatttccactggtaaccaaagagtacctaagtagtttttcattattttaagttgaatttgaataaagattccagaaataaacatggagctcagtattcaggaagcttaatactgtttttgatctacaagatccaaataattatccctatcttcagaattaacttagtctgtaatgtggcttcaaaaaaagaaagccttttgacagctacatgacttacaccatacagaacagtactggacaaaaggggtgatattttaaatttactatcccagaaacagggcaacgtttttagaaacatctttagcccaaagtaactagtaaaaataaatggagtggtatcctatcttctttttttaaggaatcaatgaataataaatgtagatagacaattttcttctggtgagctgtctaaccctttgtacacattgacatttttaatatcgtaactgatttcttgatgctagtttagctatattaggaaactgcttctacctagattgaaagaaatttgactcataaacttccaagttagaacaaatatttcttcattattgttgcttttatgtgagtagcatttccctatcttgcagttctgttaacatgaaaatggcatttttccataatagctttaaaataattttttagtaattattacaaaattaaggaaaatctctattaccgttatcttttagcattttttttttcctcagtgatctcaagattgtcttagtctcaatgagatgtagctacaaaaatggcacctcttagcagtgatgaggctcaggatatcggatatcataacaccaatgtcaggataaatatctcttctaaagacgatatttaccttttacaaggttagaaaagtctcatactacctcatctttattgtggcgcttttgtagatcactgagaagcttatcttattaaccaatataccacttcctaaatatccatctttggtgaaagaaaatagtgtggtaagagtacccatgattatagttttttatcagaatttgataagattttctgtttctgtgaaacaattattttaaatatttttcttttaaaaataactttttatcagtacagaaaaacctaagggatgactagcttacaaatattctgttaaggggtagttttataaagaaaaatgatatatagttatgttgtcttttatagtgttaaaattagtatttatatgaaagtcaagatctaagtaccttttcatataattcaaactgattgcttgtgatatgttttctctggcttttttattttttcaacttcaaggtattaacagctgttaacacttaaaaagtactgccacatatgtagccttgaagtagttgatctaataaatgagagcagggagg

SEQ ID NO: 233402 - protein, 235 aa, Artificial Sequence
  derived and/or modified sequence
MTQVTEKSTEHPEKTTSTTEKTTRTPEKPTLYSEKTICTKGKNTPVPEKPTENLGNTTLTTETIKAPVKSTENPEKTAAVTKTIKPSVKVTGDKSLTTTSSHLNKTEVTHQVPTGSFTLITSRTKLSSITSEATGNESHPYLNKDGSQKGIHAGQMGENDSFPAWAIVIVVLVAVILLLVFLGLIFLVSYMMRTRRTLTQNTQYNDAEDEGGPNSYPVYLMEQQNLGMGQIPSPR

SEQ ID NO: 233403 - protein, 507 aa, Artificial Sequence
  derived and/or modified sequence
PLANEKTTLSPAEPTENGERTPFTNEKTTPSSAEPTEHGERTPLANEITTPSRAEPTEHGERIANEKATPSPAKPTEHGETTVNEDTTPSSAEPTENGERTPLANENTTTSPTESTEHGERTANEKTTPSPAEPTEHGERTPSANEKTIPSPAKPTEHEEMTPSANENTTPSPVKPTEHGEKTTLANEKITLSPEGPTEHGAKTTSANEKITPSLAKPTEHGERTTSPNDKITSSAAESTEHRDRATSANVITPAPAEPIKHAKRTTLAHEKMTQVTEKSTEHPEKTTSTTEKTTRTPEKPTLYSEKTICTKGKNTPVPEKPTENLGNTTLTTETIKAPVKSTENPEKTAAVTKTIKPSVKVTGDKSLTTTSSHLNKTEVTHQVPTGSFTLITSRTKLSSITSEATGNESHPYLNKDGSQKGIHAGQMGENDSFPAWAIVIVVLVAVILLLVFLGLIFLVSYMMRTRRTLTQNTQYNDAEDEGGPNSYPVYLMEQQNLGMGQIPSPR

SEQ ID NO: 233404 - protein, 507 aa, Artificial Sequence
  derived and/or modified sequence
PLANEKTTLSPAEPTENGERTPFTNEKTTPSSAEPTEHGERTPLANEITTPSRAEPTEHGERIANEKATPSPAKPTEHGETTVNEDTTPSSAEPTENGERTPLANENTTTSPTESTEHGERTANEKTTPSPAEPTEHGERTPSANEKTIPSPAKPTEHEEMTPSANENTTPSPVKPTEHGEKTTLANEKITLSPEGPTEHGAKTTSANEKITPSLAKPTEHGERTTSPNDKITSSAAESTEHRDRATSANVITPAPAEPIKHAKRTTLAHEKMTQVTEKSTEHPEKTTSTTEKTTRTPEKPTLYSEKTICTKGKNTPVPEKPTENLGNTTLTTETIKAPVKSTENPEKTAAVTKTIKPSVKVTGDKSLTTTSSHLNKTEVTHQVPTGSFTLITSRTKLSSITSEATGNKSHPYLNKDGSQKGIHAGQMGENDSFPAWAIVIVVLVAVILLLVFLGLIFLVSYMMRTRRTLTQNTQYNDAEDEGGPNSYPVYLMEQQNLGMGQIPSPR

SEQ ID NO: 233405 - protein, 517 aa, Artificial Sequence
  derived and/or modified sequence
MAQPVHSLCSAFGLQCCLLFLLASWGAGATTFQEYQKTGELSTSDHIFPLTPGLVYSIPFDHIVLHSGQRPPELPKSTEIHEQKRHCNTTRHSKPTDKPTGNSKTIDHKSSTDNHEAPPTSEENSSNQGKDPMIRNQRSVDPADSTTTHKESAGKKHITPAPKSKINCRKSTTGKSTVTRKSDKTGRPLEKSMSTLDKTSTSSHKTTTSFHNSGNSQTKQKSTSFPEKITAASKTTYKTTGTPEESEKTEDSRTTVASDKLLTKTTKNIQETISANELTQSLAEPTEHGGRTANENNTPSPAEPTENRERTANENKKTICTKGKNTPVPEKPTENLGNTTLTTETIKAPVKSTENPEKTAAVTKTIKPSVKVTGDKSLTTTSSHLNKTEVTHQVPTGSFTLITSRTKLSSITSEATGNESHPYLNKDGSQKGIHAGQMGENDSFPAWAIVIVVLVAVILLLVFLGLIFLVSYMMRTRRTLTQNTQYNDAEDEGGPNSYPVYLMEQQNLGMGQIPSPR

SEQ ID NO: 233406 - protein, 1393 aa, Artificial Sequence [sequence omitted]

SEQ ID NO: 233407 - protein, 889 aa, Artificial Sequence
  derived and/or modified sequence
MAQPVHSLCSAFGLQCCLLFLLASWGAGATTFQEYQKTGELSTSDHIFPLTPGLVYSIPFDHIVLHSGQRPPELPKSTEIHEQKRHCNTTRHSKPTDKPTGNSKTIDHKSSTDNHEAPPTSEENSSNQGKDPMIRNQRSVDPADSTTTHKESAGKKHITPAPKSKINCRKSTTGKSTVTRKSDKTGRPLEKSMSTLDKTSTSSHKTTTSFHNSGNSQTKQKSTSFPEKITAASKTTYKTTGTPEESEKTEDSRTTVASDKLLTKTTKNIQETISANELTQSLAEPTEHGGRTANENNTPSPAEPTENRERTANENTTLSPAEPTENRERTANENTAPFPAGPTENREMTANENTTLFPAEPTEHGERTANENTTPSPAEPTEHGERTANENTTPSPAEPTEHGERTPFANDKTTSSSAESTEHGERTPLANENTTPSPAEPTENRERTANENTTPSPAGPTENRETTANEKTTLSPVEPTENRETTANEKTTPSPAEPTENGQRTPFANEKTTSSSAEPTEHGERTPLANENTTPSPAEPTENRERTANEKTTPSPAEPTENGDRTPLANEKTTPSLAEPTENGQRTPFANEKTTSSSAEPTEHEERTPLANENTTPSPAEPTENRERTANENTTPSPAGPTENREMTANEKTTLFPAEPTENRERTANEKTTSSPAEPTENGQRTPFANEKTTSSSAEPTEHGERTPLANENTTLSPAGPTENRERTANEKTTPFPAEPTENRERTANENTTPSPAQPTENGDRTPLANEKTTPSLAEPTENGKRTPFANEKTTSSSAEPTEHAERTPLANENTTSSPAEPTENRERTANEKTTQFPAEPTENRESTANEKTTPFPAEPTENREWTANENTTLSPAEPTEHEEMTPLA

SEQ ID NO: 233408 - DNA, 94 bp, Artificial Sequence
  derived and/or modified sequence
aatggaatcaacacgagtgcaattgaatggaatcgaatggaatggaatggaatggaatgaattcaacccgaatggaatggaaaggaatggaatc

SEQ ID NO: 233409 - DNA, 65 bp, Artificial Sequence
  derived and/or modified sequence
aacccgagtgcaatagaatggaatcgaatggaatggaatggaatggaatggaatggaatggagtc

SEQ ID NO: 233410 - DNA, 708 bp, Artificial Sequence
  derived and/or modified sequence
atgactcaggtgaccgaaaaaagtaccgaacacccagagaaaacgacgagtaccaccgagaaaaccactcgaacccctgaaaagcccaccctctactccgagaaaacaatctgcactaaaggcaagaatacacccgtgcccgaaaagccaaccgagaacttagggaacaccaccctaactaccgaaactattaaagccccagtcaaatccacggaaaatccggagaaaactgccgctgttaccaaaaccatcaagccatcagtgaaggtaacaggtgataaaagtctcactacgacttcgagtcacctgaacaaaacagaggtaacacaccaggtccccacaggctcatttacactcatcaccagtaggacaaagctgtcctccataacctccgaggcgactgggaacgaatcccatccatacctaaacaaagacggaagccaaaagggcatccacgccggtcagatgggggaaaacgattcattccccgcatgggctattgtgattgtagtgctggtcgccgtgatcctgttactagtcttccttggattgatatttctcgtgagctacatgatgagaacccgccgaaccttgacgcagaacacgcagtacaacgatgccgaggatgaaggaggccccaacagctaccccgtctacctcatggagcaacagaaccttgggatggggcagattccatccccgcgttag

SEQ ID NO: 233411 - DNA, 1524 bp, Artificial Sequence
  derived and/or modified sequence
cccctggccaacgagaagacaacccttagcccggccgagccgactgaaaacggtgagaggacaccctttacaaacgagaagacaaccccaagcagtgctgagccgactgagcacggagagcggacccccctggctaatgagattacaaccccgagtcgcgcagaaccgactgagcatggggaacggatagccaacgaaaaagctaccccttctcccgccaaacctactgaacacggagaaacaacagtgaatgaagatactacaccttcttccgccgaaccaactgagaacggagagaggacacctctagcgaatgagaataccacaacctctcccaccgaaagcactgaacacggagagcgaacggccaatgagaagactacaccatcacctgcggagcccacagaacacggagagcggaccccttctgcgaacgaaaaaaccatcccctcccccgccaaaccaaccgaacacgaagaaatgaccccctccgcgaatgagaatactactccatctccggtgaagccaacggagcatggcgagaagacgacgctggccaacgagaaaataactctgagtcctgaaggcccaaccgagcatggagccaagaccaccagcgccaacgaaaaaatcactccttcacttgccaaaccaaccgagcacggagaaaggactacatcgcccaacgacaaaatcacctcttccgccgcagaaagcacagagcaccgggaccgcgccacctcagccaacgtgatcacaccagcccctgcagagcccatcaagcacgccaagcgaacgacacttgctcatgagaagatgacccaagtcaccgagaaaagtactgagcatcctgagaaaactacttccaccaccgagaagacgacccgtactccggagaaacccaccctgtactcagaaaagaccatctgcacaaaaggcaagaatacaccagtccctgagaagccaacagagaatctcggtaataccactctgacgaccgaaactatcaaagcacctgtgaaatccacagagaatcctgaaaagaccgctgcggtgacgaaaaccattaagccatctgtcaaagtgaccggggataagagcctgacgacaacatcttcccatctgaataaaaccgaagtgacccatcaggtacccactggatcctttacgttgattaccagtcggacaaagctgagcagcatcacctccgaagccaccggcaatgaatcccacccatatttaaataaggacgggagtcaaaagggaattcatgccggccagatgggcgagaacgattcttttccagcttgggctatcgttatcgtggtgctggtggctgtcatcctactgctcgtcttcttaggactcattttcctggtgagctatatgatgcggacacggcgaactctgacccagaatactcagtataatgacgcagaagacgagggcggcccgaatagctaccccgtctacttgatggaacagcaaaatctgggcatggggcagatccccagtccaagatag

SEQ ID NO: 233412 - DNA, 1524 bp, Artificial Sequence
  derived and/or modified sequence
ccgttggcgaatgagaagacgacccttagtcctgccgaacccactgaaaacggggaacggaccccattcaccaacgagaagaccacacctagctctgccgagcctaccgaacatggtgagcgtactcccttagccaacgaaattaccaccccgagccgcgccgagcctaccgagcatggcgagcggattgccaatgagaaggctacaccttcacctgccaaaccgaccgaacatggggaaacaaccgtgaatgaagatactaccccttctagcgctgagccaaccgagaacggagaacgcactcctcttgccaatgagaatacaactacctcaccaactgaatcaaccgagcatggtgagaggaccgccaatgaaaaaaccacaccctctcccgctgagcctacggaacacggcgagaggacaccttctgcgaacgaaaaaaccatacccagccccgctaaaccgaccgagcatgaggagatgactccgtccgctaacgaaaatacgacacccagtcctgtcaagcctacagagcatggcgaaaaaaccactctcgcaaacgagaagataacactatccccagaaggccctaccgaacatggtgccaaaaccactagtgctaacgaaaaaatcactccttccctggccaagcctacggagcacggcgagaggacaaccagcccgaacgataagatcacgagtagcgctgctgagtctaccgaacatcgcgaccgcgctacatctgccaatgtcattacgccagctcctgccgagcctatcaagcacgccaagaggaccaccttggcacacgaaaaaatgacccaggtgacggagaagagcaccgagcacccagaaaagacaacatctactaccgaaaagacgactcggactcccgaaaaaccgacactgtattcagaaaaaactatctgtaccaaaggcaagaataccccagtgccagaaaaaccaaccgaaaatttaggaaacacaactctcacgactgaaaccatcaaggcccccgtaaaatctactgagaatcccgagaagacagccgcagtgaccaaaactataaagccatctgtgaaggtgacaggagataaaagcctgacaactacatcatcacacttgaacaaaacagaggtgacccaccaggttcccactggtagttttactctgattacaagtagaacgaagctgagctctattacaagtgaggccaccggcaacaagagccacccttacctgaacaaagacggatcccagaagggaattcatgctggtcagatgggggagaacgactcgttcccagcctgggcaatcgtcattgtggttctagtggcagtgattctgcttctggtgttcctgggcctgatctttctggtctcctatatgatgaggacccgtcggacactgactcagaatacccagtacaacgatgctgaagacgagggaggaccgaactcctaccctgtgtaccttatggaacagcagaatttggggatgggacagatcccaagtccaagatag

SEQ ID NO: 233413 - DNA, 1524 bp, Artificial Sequence
  derived and/or modified sequence
cctctggcaaacgaaaagaccactctgtctcctgccgagccaactgaaaatggcgagaggacaccttttacaaacgaaaagacaacaccatcttcagcggagccaaccgagcacggggagaggacacccttggccaacgagatcaccacaccttctcgtgctgagcctactgagcacggggagagaatcgctaacgaaaaggcaacccctagtcccgccaaacccaccgaacacggtgagactactgtcaatgaagataccacgcccagctcagcagaacccactgaaaatggcgagagaacgccgctggcaaacgaaaataccaccaccagcccgacagaatcaacagaacacggtgaaagaactgctaacgagaaaaccactccctctccagcggaacccaccgaacacggtgagcggactccgagtgcgaacgagaagacaatcccctctccagccaagcctacagagcacgaggaaatgacgccctctgccaacgaaaatacaacaccctcaccagttaagcccaccgagcacggcgaaaagaccacactcgccaatgagaaaattaccttgagtccggagggaccaacagagcatggcgccaagacaactagcgcgaacgaaaaaataacccccagcctggcgaagcctacagaacacggagagaggaccacctctccaaacgacaaaattacgtcctccgctgccgagagcacagagcaccgagacagagcaacaagcgccaatgtcattactcccgcaccggccgagcccataaagcacgcaaagagaacgacccttgcgcatgaaaagatgacacaagtgaccgaaaagtctacagagcaccccgaaaaaacaacctctacaacggagaaaaccacaaggactccagaaaaacctactctgtacagtgaaaagactatttgcaccaagggcaagaacacccccgtgccagagaagcccactgaaaatctgggcaacactacgctgactactgaaacaatcaaagccccagttaaaagtactgagaacccagagaaaaccgctgccgtcacaaaaactattaaaccaagcgttaaagtgactggagacaagagtttgacaacaacgagctcccacctaaataaaaccgaagtgacgcaccaggtgccaacaggtagttttacactgatcacatcccggacaaaactttcttctataacatccgaagctacgggcaacgagagccatccctaccttaataaggatgggtctcagaaaggaatccacgccggccaaatgggggaaaacgattcgtttccagcttgggcaatcgtaattgtggttttggtggcggtaattctgctactggtgttcctaggcctgatcttcttggtgtcatatatgatgcggacccgtagaacgcttacccagaacacccagtacaacgacgcagaggacgagggcggccccaactcataccccgtatatttgatggagcagcagaacctaggcatggggcagatcccctcccctcggtag

SEQ ID NO: 233414 - DNA, 1554 bp, Artificial Sequence
  derived and/or modified sequence
atggcacagccagtccactccctgtgctccgccttcggcctccagtgctgcttgctctttctgctggcctcttggggggctggtgcgacaacattccaggaatatcagaaaaccggcgagctgtctacaagcgaccatatttttccactgacccccggcctggtttacagcattcctttcgatcatatcgtcctgcactcgggccaacggccaccagaattgccgaagagcactgagattcatgagcaaaaaaggcactgcaacaccactcggcactctaaacctaccgataagccgacagggaactcgaaaacgattgaccataaaagctctactgataaccacgaagccccacctaccagtgaggagaattcctctaaccaaggtaaggatcctatgattagaaaccaacgctctgttgatcccgctgacagtaccaccacccacaaagagtctgcaggcaaaaagcacattacacccgcccctaagtccaagattaactgtaggaagagcacgaccggcaagagcacggtcacaagaaagtccgacaagaccggtcgtcccctggaaaaatcaatgtctacactagataagaccagcacctctagccacaaaaccactaccagtttccataacagtgggaactcccagacaaaacagaagtcaaccagttttccagagaaaattacagcggctagcaaaacaacatataagacaacaggcacccccgaggaatcagagaaaaccgaggattcacgaaccacagtggcctccgacaaattgctgacgaaaacaacaaagaacattcaggaaactatcagcgccaatgaacttactcaatccctggctgagcccaccgaacatggtggccgaacagcaaacgaaaataacactccatcgccagctgaacctaccgaaaatcgcgaacggactgccaatgagaacaagaagaccatttgcacaaaggggaaaaacactccagtcccggagaagccaacggagaatctgggaaatactacactcaccacagaaaccatcaaagctccagtcaagtcaaccgaaaatcccgagaagaccgcagctgtcacaaagacaattaagccatccgtgaaagttaccggtgataagagtctgacaaccacgtcctcccacctaaacaagaccgaagtcacccatcaagtgccaactggcagctttactctgattaccagtcgtacaaaactgagcagtattacatccgaggcaaccggcaatgaatctcacccttaccttaacaaggacgggagtcagaaaggcattcacgctgggcagatgggcgagaacgactcattccccgcctgggctattgttattgttgtgctggtagccgtgatcctccttctggtgttcctggggctgatattcctcgtctcctacatgatgcgcaccagaagaaccttgacccagaatacccagtacaacgatgctgaagacgagggcggccccaattcttatcctgtgtatcttatggagcagcagaacctaggcatgggacagatcccatcccccagatag

SEQ ID NO: 233415 - DNA, 1554 bp, Artificial Sequence
  derived and/or modified sequence
atggcccagcctgtgcactccctatgcagcgccttcgggctgcaatgctgtctcctttttctgttggccagctggggggctggtgcgacgacatttcaagagtatcagaagaccggggaactatctacaagcgatcatatcttccccctgactccagggctggtgtattccattccgttcgaccatatcgtcctgcacagtggccaaaggccacccgaattgccaaaaagtactgaaatacatgaacaaaaacgtcactgtaatacaacccggcacagcaaacccaccgataagcccacagggaacagtaagacaattgatcataaatcttctaccgacaaccacgaggcccctcccaccagtgaagagaacagctccaatcagggcaaagacccaatgatccgcaaccagcgcagcgtggaccccgcggacagtactacgacacacaaagagtcagctggcaaaaaacatatcaccccagcccctaaatccaagatcaactgtcggaagagtactacaggcaagtctacagttaccaggaaatccgacaagactggccgcccattagagaaaagcatgagtacgctggataagacttctacaagctctcacaaaacaacaaccagcttccacaactcagggaatagtcagacaaagcaaaaaagtacatcttttccagaaaaaattactgcggctagcaagactacttacaagactacaggcacccccgaggagtcagagaagacagaggatagccgaactaccgttgctagtgacaagctacttacgaagacaacaaaaaatatacaggagactatcagtgctaatgaacttactcagtcgttggcagaacccaccgagcacggtgggcgcacagctaacgaaaacaataccccctcacctgcagagcctactgagaaccgcgagcgcactgctaacgaaaacaaaaagacaatctgcacaaaaggcaagaacacccctgttcccgagaagccaaccgaaaatctgggcaacacaaccctgaccacagagaccattaaggcacctgttaagtccacagaaaatcctgagaagactgccgctgttaccaagacgatcaaaccatctgttaaagtgaccggcgataagtcactgacaaccacttctagtcacttgaacaagaccgaggtgacccaccaagtccccacaggctcctttaccctgattacttcgcggacaaaactaagctcgattacgagtgaagccactggtaatgagtcccacccttacctcaacaaagatggatctcagaaaggcattcacgccggccagatgggcgaaaacgactcctttcccgcttgggcaatcgttatagttgtgctggtcgccgtgattctgcttctagtgtttctgggcttgatatttctcgtgagttacatgatgcggacaagacggacgctgacacagaatacacagtacaacgacgcggaagacgaaggcggtcccaactcatatccagtctatctgatggaacagcagaatctgggtatgggccagatcccatctccccgttag

SEQ ID NO: 233416 - DNA, 1554 bp, Artificial Sequence
  derived and/or modified sequence
atggcccagccggtgcatagcctgtgcagcgctttcgggctgcagtgctgcctgctgtttctgctggccagttggggcgccggagcaaccactttccaggagtaccaaaaaaccggggaactgagcacgtctgatcatatctttccgctgactcccggtctggtgtattcaatcccatttgatcacatcgtgctgcattctggccaacgtcccccagaactgcctaagagcactgaaatccacgagcagaaacggcactgtaacacaacacggcacagcaagccaaccgacaagccaactggaaattccaagaccatcgatcacaaaagtagtactgacaatcacgaggcccctccgaccagcgaggaaaactcctctaaccaaggaaaagatccaatgatcagaaatcagagaagcgtggaccccgcggattccactactacacacaaggagtctgccggcaaaaaacatataactccagcccctaagtcaaagatcaattgtaggaagtctaccaccgggaagagcacagtgacacgtaagtctgataaaaccgggaggcctcttgagaagagcatgtcgacactggataaaacgagtacaagctcccacaagacaactacaagttttcacaactccggaaactcccagaccaaacagaagtcaactagttttccggaaaaaataacggctgcctccaaaactacctataaaactactggtacccctgaggagagcgagaaaactgaagattctcggactacggtggcctccgacaagttactaactaaaactacaaagaatatccaggagactatttccgcgaacgaactgacccagtctttggccgagccgactgagcatggaggtcgcacagctaacgaaaacaacactccctcccctgccgagcctactgaaaaccgcgaacgaaccgcgaatgagaataagaaaacaatatgtacaaagggcaagaatactcccgtgccagaaaaacccactgagaaccttggtaatacaaccttaaccacggaaacaatcaaagcaccagtgaagagcactgaaaatcccgaaaaaaccgcagcggtgaccaaaactattaagcctagcgtaaaagtgactggcgataagtcccttacaacaacaagttctcatctaaataaaactgaagtgacccaccaagttcccacgggtagcttcacactcatcaccagtaggactaagctgtcctcaattacttctgaagctaccggcaatgagagccacccatacctgaacaaggacggaagtcagaagggaatccacgccggtcaaatgggggaaaatgacagtttcccagcttgggccatagtgattgttgtgctggtggcagtgatcctcctcctggttttcctggggcttattttcctggtatcatatatgatgcggacccgtcggaccctgactcagaatactcagtacaatgatgctgaagatgaggggggtccaaatagttatcccgtttacctgatggagcagcagaatctggggatgggtcagattccaagcccccgctag

SEQ ID NO: 233417 - DNA, 4182 bp, Artificial Sequence
  derived and/or modified sequence
atggcacagcctgtgcactcactatgctccgcctttgggctgcagtgctgccttctgttcctcttggcttcatggggtgcaggcgctacaactttccaagagtatcagaaaactggtgagctaagcactagcgatcacatttttccccttacccctgggttggtctacagtatacctttcgatcacattgttctgcactctggccagagaccacctgaattacctaaaagtacagaaattcacgagcagaagaggcattgtaacacaacccgccactccaagccaacagataaaccgaccggaaattcaaaaaccatcgatcacaaaagctcgaccgacaatcatgaagctcctccaacctcagaggagaactctagcaaccaagggaaggaccccatgatccgaaatcagcggagcgtcgaccccgccgattccacaaccactcataaagagtctgctggaaaaaaacatatcaccccagcgcccaaaagcaagatcaattgtaggaaaagcacaacgggtaagtccacggtgacacgcaagagtgataagactggacgaccactggaaaaatccatgagtactctcgataaaacctccactagctctcacaaaaccactactagcttccacaactcggggaacagccagacaaaacaaaagtccacaagctttcccgagaagatcacagctgcatctaagaccacatataagacaactggaacacccgaagaatctgagaagactgaggattctcgcacaacggtcgcctccgacaagctcctcacaaagactactaagaatattcaggagactatctctgcaaacgaactaacccagagcctcgctgagccgaccgagcatgggggccgcaccgcaaacgagaacaacaccccttcaccagctgagcctactgaaaacagggaacgcaccgccaatgaaaacacaacactgtcacccgcggagcccactgagaacagagaaaggactgcaaacgagaacaccgctcccttccctgctggcccgaccgagaacagagaaatgacggcaaacgagaacacaacactgttccccgcagagcccacagagcacggcgaacggaccgccaacgaaaataccaccccctcgccagccgaaccgacagagcacggagagcgcaccgccaatgaaaacacgaccccctctcccgccgaacccaccgaacacggtgaaaggacaccgttcgctaatgacaagacaacgtcctcatcagctgaatccactgagcatggagagagaacgcctctagccaatgagaatactacgcccagtccagccgagccaacagaaaatcgggagaggactgccaacgagaatactaccccgagtccagccggccccacagaaaatagggagaccacagccaacgaaaaaacgactttatcaccagtggaacctaccgaaaaccgcgagacaacagcaaatgaaaaaacaacacccagccccgctgaacccactgagaatggacaaaggactccatttgccaacgaaaagactacgagctcgtctgccgagccaaccgaacatggtgagcgcacaccgttggccaatgagaacaccacaccctcccccgctgaacctacggagaaccgagaaaggactgctaacgaaaagactacaccttctcctgcggagcctactgaaaatggggataggactccgcttgccaacgaaaagaccacaccctctttagcagaaccaaccgagaatggacagagaactccgtttgcaaatgaaaagaccacttcatcttcagcagagcctaccgaacatgaagagcgcacgccgcttgccaacgagaacaccactcctagcccggcagagcccactgaaaacagagaaaggaccgctaatgaaaataccacccctagcccagccgggccaacagagaatagagagatgaccgctaacgagaaaaccacactctttcctgccgagccaaccgaaaaccgggaacgaacggctaatgagaaaactacgtccagtcccgcagagccgaccgagaacggccagaggacaccattcgctaacgagaagacgacgagctccagtgccgagcccacggagcatggcgaaagaaccccactagcaaatgaaaatacaacattgagccccgccgagccgacggagaatcgtgagagaacggcaaacgagaagaccaccccatttccagcagaacccactgagaaccgggagcggacagctaacgaaaacactacaccgagccctgctcagcccacagaaaatggcgatagaactccacttgccaatgaaaaaaccacaccttctctcgccgaacctaccgagaatggcaaacgcaccccttttgctaacgaaaaaaccacctcttcctcagccgagcccacggagcatgctgagcgcacacctctggctaacgagaataccacgagtagcccagccgagccaaccgagaaccgcgagcgtacagcaaacgagaagactacgcaattcccggcggagcctactgaaaaccgggaatctaccgcaaacgagaagaccactcctttccccgcagagcccacggaaaaccgcgagtggacagccaacgagaacacaacattatctcccgctgaaccgacagagcatgaagagatgacgccgctggccaatgagaagaccaccttgtcgccagctgaaccgactgagaatggtgagcgcaccccattcaccaacgaaaaaactaccccttctagtgccgagcccactgaacatggtgagcggacccctctggccaacgaaatcactaccccgtcaagggccgagcccaccgagcatggcgagagaatcgccaacgagaaagccaccccctctccagctaagcctactgaacatggtgaaaccactgtaaacgaagatacaacgccttcttccgccgaaccgacagagaacggtgaaaggacgcctctagcgaatgaaaacaccactaccagtccgaccgagtccacggaacacggagaacgcacggcaaatgagaagaccacgcctagccctgctgagcccaccgagcatggagagcggaccccaagtgccaatgaaaagactattccgtcccctgccaaacctacggaacatgaagaaatgaccccctctgccaatgaaaacaccaccccttccccggtcaagcctactgagcacggggaaaaaacaacacttgcaaacgagaagatcaccctcagccccgagggtccaaccgagcacggggccaagaccactagcgctaacgagaagatcaccccctccttagcaaaacctaccgaacacggagagcgcacaacaagcccgaatgacaagattacatcaagcgctgccgagtcaacagaacatagggaccgtgccaccagcgccaacgtaattactccagcaccagcggagcctatcaagcatgccaaaaggaccaccctagctcacgagaaaatgactcaagtgacagaaaaaagcacagagcaccccgaaaagaccacgtccaccaccgagaagactacacgaacccctgaaaagccaacgctttattcagagaagacaatctgcacaaaaggcaaaaatacacctgtgccagaaaaaccgaccgaaaacttgggcaatacaacgttgactactgagacgataaaagcccctgtgaaaagcacagagaacccggaaaaaacagctgccgtgaccaaaaccattaagcccagtgtgaaggtcacgggcgataagtctctgacaaccacatctagccatctgaacaagacggaggtcacccatcaagttcccaccggaagtttcaccctgataacatcccgaaccaagctttcatctatcactagtgaagcaaccggtaatgaatcccatccctaccttaacaaggacggcagtcagaaaggcatccacgctgggcagatgggtgaaaatgactctttcccagcatgggcgatcgtaatcgtagtgctggtggccgtgatcctacttcttgtctttctggggttaatctttctggttagctacatgatgagaactaggcgtacattaacacagaacacgcaatacaatgatgccgaggatgaagggggtcccaatagctatcccgtgtacctgatggagcagcagaatctggggatgggtcagatcccctcaccaagatag

SEQ ID NO: 233418 - DNA, 2670 bp, Artificial Sequence
  derived and/or modified sequence
atggcgcagcccgtgcacagtctttgctcggcctttgggctccagtgttgcttgttattcctccttgcttcatggggagcgggggctactacgttccaggagtatcagaagaccggggagctctccacaagtgaccacattttccccctgactccaggtctcgtctatagcatcccttttgaccacatagtgctgcactccgggcagaggccacctgaactcccaaagtctacagagatccacgagcagaagcgtcattgcaacactacccggcatagcaagcctactgataagcctaccggcaactcaaagactatcgaccataagagcagtactgacaaccatgaggctccccctacttcagaagagaactcatcaaatcaggggaaagacccaatgatccgcaaccagagaagcgttgatcctgctgactcaaccactacccacaaggaatccgccggcaagaagcacattacgcctgctccaaagagtaaaatcaattgccgaaaatcgacaaccggaaagagcaccgttaccaggaaaagcgacaagactggccgacccctggagaagtcaatgagtaccctagataagacctccaccagctcccacaaaacaaccacctccttccataattctgggaatagtcagactaaacaaaagtccacatctttcccagagaaaatcaccgccgcttccaaaaccacttacaaaactacaggcacccccgaggaatcggaaaagactgaagacagcagaaccactgtggcttccgataaactgctgaccaaaacaaccaagaacatacaggaaaccataagtgccaacgaattgactcaatctcttgccgaacccaccgagcacggaggccgaaccgccaatgaaaacaatactccgtcccccgctgaaccaaccgaaaatagggagcgaaccgcaaacgagaacacaaccctcagccccgccgagcctaccgaaaaccgggagcggactgctaatgagaataccgctcccttccccgctggcccaactgagaacagagaaatgaccgctaatgaaaacactaccctgttcccagccgaaccgactgagcacggggaaaggaccgctaatgagaacactaccccctccccagccgaaccaaccgagcatggggagcgcacagcaaatgagaacacgacaccttccccggccgagcccaccgagcacggggaaaggacaccttttgccaatgacaagacaacaagtagctcagcagaaagcaccgaacacggtgaaagaactccattagccaacgaaaataccaccccgtctcccgccgaacccacagagaaccgtgagcgaacagcaaatgaaaacactacacccagcccagctgggcctactgagaatcgggagacgaccgccaatgagaagactacactaagtcctgtggagccgaccgagaatcgcgaaacaaccgcaaatgaaaaaaccactccctctccagccgaacctacggagaatgggcagcgcacccctttcgccaatgagaagacgacaagcagtagcgctgaacccacagaacacggagaacgcactcccttagcgaatgagaacacgacccctagccctgctgaaccaactgaaaatcgcgaacgcactgcaaatgaaaagacaacccctagccccgccgagcccacagaaaatggagacaggaccccattggccaacgagaaaacaactccatcactcgctgaaccaaccgagaacgggcaacgtacccctttcgctaatgagaagacaacctcttccagtgcagagcccaccgaacacgaggaacgcaccccattagctaatgaaaatactacgccgagtccagctgagcccaccgagaaccgtgaaaggaccgcaaacgaaaatacgaccccaagtcccgcaggccccaccgagaatagggagatgacggcgaacgagaaaaccacactgttcccagccgaaccaaccgagaaccgcgaaaggaccgctaacgagaagacaaccagcagtcccgccgagcccaccgaaaatggacagagaaccccgtttgctaatgagaagacaacatcctcttctgcagagccgaccgagcacggggagaggacgccgctggctaacgagaataccaccctgtctccggcagggccgacagagaacagggagcgtaccgccaacgagaagacaactccttttccagctgaacctactgagaatagagagagaactgcaaatgagaacacaactccttccccagctcagcccactgagaatggagaccgaacccccctggccaacgagaaaacaactcccagcctggccgagcccaccgaaaatggcaagaggaccccctttgctaatgaaaagacgacctcttcgagcgcagagcctactgaacatgccgagcggacgcccctcgctaacgagaatactacaagttctcctgctgagcctaccgagaaccgagaacggactgctaacgaaaaaacaactcagtttccagctgagcccacggagaacagagagtctaccgcgaacgaaaagacaaccccatttcctgccgaaccgactgaaaatcgggaatggacggccaatgagaacacgacgctgtctcccgctgaaccaactgagcacgaagaaatgactccattggcctag

SEQ ID NO: 233419 - DNA, 708 bp, Artificial Sequence
  derived and/or modified sequence
atgacccaggtgacagagaagagcacagagcaccctgagaagaccaccagcaccacagagaagaccaccaggaccccagagaagcccaccctgtacagcgagaagaccatctgcaccaagggcaagaacacccctgtgcctgagaagcccacagagaacctgggcaacaccaccctgaccacagagaccatcaaggcccctgtgaagagcacagagaaccctgagaagacagctgctgtgaccaagaccatcaagcccagcgtgaaggtgactggagacaagagcctgaccaccaccagcagccacctgaacaagacagaggtgacccaccaggtgcccaccggcagcttcaccctcatcaccagcaggaccaagctgagcagcatcaccagcgaggccactggaaatgaaagccacccctacctgaacaaggatggcagccagaagggcatccatgctggccagatgggagaaaatgacagcttccctgcctgggccatcgtgattgtggtgctggtggccgtcatcctgctgctggtgttcctgggcctcatcttcctggtgtcctacatgatgaggaccaggaggaccctgacccagaacacccagtacaatgatgctgaagatgaaggaggccccaacagctaccctgtgtacctgatggagcagcagaacctgggcatgggccagatccccagccccaggtag

SEQ ID NO: 233420 - DNA, 1524 bp, Artificial Sequence
  derived and/or modified sequence
cccctggccaatgagaagaccaccctgagccctgctgagcccacagaaaatggagagaggacccccttcaccaatgagaagaccacccccagcagcgctgagcccacagagcacggggagaggacccccctggccaatgagatcaccacccccagcagagctgagcccacagaacatggagagagaattgccaatgagaaggccacccccagccctgccaagcccacagagcacggggagaccaccgtgaatgaagacaccacccccagcagcgctgagcccacagaaaatggagagaggacccccctggccaatgaaaacaccaccaccagccccacagagagcacagagcacggggagaggacagccaatgagaagaccacccccagccctgctgagcccacagaacatggagagaggaccccatctgccaatgagaagaccatccccagccctgccaagcccacagagcacgaggagatgacccccagcgccaatgaaaacaccacccccagccctgtgaagcccacagaacatggagagaagaccaccctggccaatgagaagatcaccctgagccctgagggccccacagagcacggggccaagaccaccagcgccaatgagaagatcacccccagcctggccaagcccacagaacatggagagaggaccaccagccccaatgacaagatcaccagcagcgctgctgagagcacagagcaccgggaccgggccaccagcgccaacgtcatcaccccagccccagctgagcccatcaagcacgccaagaggaccaccctggcccacgagaagatgacccaggtgacagagaagagcacagagcaccctgagaagaccaccagcaccacagagaagaccaccaggaccccagagaagcccaccctgtacagcgagaagaccatctgcaccaagggcaagaacacccctgtgcctgagaagcccacagagaacctgggcaacaccaccctgaccacagagaccatcaaggcccctgtgaagagcacagagaaccctgagaagacagctgctgtgaccaagaccatcaagcccagcgtgaaggtgactggagacaagagcctgaccaccaccagcagccacctgaacaagacagaggtgacccaccaggtgcccaccggcagcttcaccctcatcaccagcaggaccaagctgagcagcatcaccagcgaggccactggaaatgaaagccacccctacctgaacaaggatggcagccagaagggcatccatgctggccagatgggagaaaatgacagcttccctgcctgggccatcgtgattgtggtgctggtggccgtcatcctgctgctggtgttcctgggcctcatcttcctggtgtcctacatgatgaggaccaggaggaccctgacccagaacacccagtacaatgatgctgaagatgaaggaggccccaacagctaccctgtgtacctgatggagcagcagaacctgggcatgggccagatccccagccccaggtag

SEQ ID NO: 233421 - DNA, 1524 bp, Artificial Sequence
  derived and/or modified sequence
cccctggccaatgagaagaccaccctgagccctgctgagcccacagaaaatggagagaggacccccttcaccaatgagaagaccacccccagcagcgctgagcccacagagcacggggagaggacccccctggccaatgagatcaccacccccagcagagctgagcccacagaacatggagagagaattgccaatgagaaggccacccccagccctgccaagcccacagagcacggggagaccaccgtgaatgaagacaccacccccagcagcgctgagcccacagaaaatggagagaggacccccctggccaatgaaaacaccaccaccagccccacagagagcacagagcacggggagaggacagccaatgagaagaccacccccagccctgctgagcccacagaacatggagagaggaccccatctgccaatgagaagaccatccccagccctgccaagcccacagagcacgaggagatgacccccagcgccaatgaaaacaccacccccagccctgtgaagcccacagaacatggagagaagaccaccctggccaatgagaagatcaccctgagccctgagggccccacagagcacggggccaagaccaccagcgccaatgagaagatcacccccagcctggccaagcccacagaacatggagagaggaccaccagccccaatgacaagatcaccagcagcgctgctgagagcacagagcaccgggaccgggccaccagcgccaacgtcatcaccccagccccagctgagcccatcaagcacgccaagaggaccaccctggcccacgagaagatgacccaggtgacagagaagagcacagagcaccctgagaagaccaccagcaccacagagaagaccaccaggaccccagagaagcccaccctgtacagcgagaagaccatctgcaccaagggcaagaacacccctgtgcctgagaagcccacagagaacctgggcaacaccaccctgaccacagagaccatcaaggcccctgtgaagagcacagagaaccctgagaagacagctgctgtgaccaagaccatcaagcccagcgtgaaggtgactggagacaagagcctgaccaccaccagcagccacctgaacaagacagaggtgacccaccaggtgcccaccggcagcttcaccctcatcaccagcaggaccaagctgagcagcatcaccagcgaggccaccggcaacaagagccacccctacctgaacaaggatggcagccagaagggcatccatgctggccagatgggagaaaatgacagcttccctgcctgggccatcgtgattgtggtgctggtggccgtcatcctgctgctggtgttcctgggcctcatcttcctggtgtcctacatgatgaggaccaggaggaccctgacccagaacacccagtacaatgatgctgaagatgaaggaggccccaacagctaccctgtgtacctgatggagcagcagaacctgggcatgggccagatccccagccccaggtag

SEQ ID NO: 233422 - DNA, 1554 bp, Artificial Sequence
  derived and/or modified sequence
atggcccagcctgtgcacagcctgtgcagcgccttcggcctgcagtgctgcctgctcttcctgctggcctcctggggcgctggggccaccaccttccaggagtaccagaagacaggagagctgagcaccagtgaccacatcttccccctgaccccaggcctggtgtacagcatcccctttgaccacatcgtgctgcacagcggccagaggcctcctgagctgcccaagagcacagagatccacgagcagaagaggcactgcaacaccaccaggcacagcaagcccacagacaagcccaccggcaacagcaagaccatcgaccacaagagcagcacagacaaccacgaggccccacccaccagcgaggagaacagcagcaaccagggcaaggaccccatgatccggaaccagaggtctgtggaccctgctgacagcaccaccacccacaaggagagcgctgggaagaagcacatcaccccagcccccaagagcaagatcaactgcaggaagagcaccaccgggaagagcacagtgaccaggaagagtgacaagacaggccggcccctggagaagtccatgagcaccctggacaagaccagcaccagcagccacaagaccaccaccagcttccacaacagcggcaacagccagaccaagcagaagagcaccagcttccctgagaagatcacagctgccagcaagaccacctacaagaccaccggcaccccagaggagagcgagaagacagaggacagcaggaccaccgtggccagtgacaagctgctgaccaagaccaccaagaacatccaggagaccatcagcgccaatgagctgacccagagcctggccgagcccacagagcacggcggccgcacagccaatgaaaacaacacccccagccctgctgagcccacagagaaccgggagaggacagccaatgaaaacaagaagaccatctgcaccaagggcaagaacacccctgtgcctgagaagcccacagagaacctgggcaacaccaccctgaccacagagaccatcaaggcccctgtgaagagcacagagaaccctgagaagacagctgctgtgaccaagaccatcaagcccagcgtgaaggtgactggagacaagagcctgaccaccaccagcagccacctgaacaagacagaggtgacccaccaggtgcccaccggcagcttcaccctcatcaccagcaggaccaagctgagcagcatcaccagcgaggccactggaaatgaaagccacccctacctgaacaaggatggcagccagaagggcatccatgctggccagatgggagaaaatgacagcttccctgcctgggccatcgtgattgtggtgctggtggccgtcatcctgctgctggtgttcctgggcctcatcttcctggtgtcctacatgatgaggaccaggaggaccctgacccagaacacccagtacaatgatgctgaagatgaaggaggccccaacagctaccctgtgtacctgatggagcagcagaacctgggcatgggccagatccccagccccaggtag

SEQ ID NO: 233423 - DNA, 4182 bp, Artificial Sequence
  derived and/or modified sequence
atggcccagcctgtgcacagcctgtgcagcgccttcggcctgcagtgctgcctgctcttcctgctggcctcctggggcgctggggccaccaccttccaggagtaccagaagacaggagagctgagcaccagtgaccacatcttccccctgaccccaggcctggtgtacagcatcccctttgaccacatcgtgctgcacagcggccagaggcctcctgagctgcccaagagcacagagatccacgagcagaagaggcactgcaacaccaccaggcacagcaagcccacagacaagcccaccggcaacagcaagaccatcgaccacaagagcagcacagacaaccacgaggccccacccaccagcgaggagaacagcagcaaccagggcaaggaccccatgatccggaaccagaggtctgtggaccctgctgacagcaccaccacccacaaggagagcgctgggaagaagcacatcaccccagcccccaagagcaagatcaactgcaggaagagcaccaccgggaagagcacagtgaccaggaagagtgacaagacaggccggcccctggagaagtccatgagcaccctggacaagaccagcaccagcagccacaagaccaccaccagcttccacaacagcggcaacagccagaccaagcagaagagcaccagcttccctgagaagatcacagctgccagcaagaccacctacaagaccaccggcaccccagaggagagcgagaagacagaggacagcaggaccaccgtggccagtgacaagctgctgaccaagaccaccaagaacatccaggagaccatcagcgccaatgagctgacccagagcctggccgagcccacagagcacggcggccgcacagccaatgaaaacaacacccccagccctgctgagcccacagagaaccgggagaggacagccaatgaaaacaccaccctgagccctgctgagcccacagaaaatcgggagaggacagccaatgaaaatacagcccccttccctgctggccccacagagaaccgggagatgacagccaatgaaaacaccaccctcttccctgctgagcccacagagcacggggagaggacagccaatgaaaacaccacccccagccctgctgagcccacagaacatggagagaggacagccaatgaaaacaccacccccagccctgctgagcccacagagcacggggagaggaccccatttgccaatgacaagaccaccagcagcagcgctgagagcacagaacatggagagaggacccccctggccaatgaaaacaccacccccagccctgctgagcccacagaaaatcgggagaggacagccaatgaaaacaccacccccagccctgctggccccacagagaaccgggagaccacagccaatgagaagaccaccctgagccctgtggagcccacagaaaatcgggagaccacagccaatgagaagaccacccccagccctgctgagcccacagaaaatggccagaggaccccatttgccaatgagaagaccaccagcagcagcgctgagcccacagagcacggggagaggacccccctggccaatgaaaacaccacccccagccctgctgagcccacagagaaccgggagaggacagccaatgagaagaccacccccagccctgctgagcccacagaaaatggagacaggacccccctggccaatgagaagaccacccccagcctggccgagcccacagaaaatggccagaggaccccatttgccaatgagaagaccaccagcagcagcgctgagcccacagagcacgaggagaggacccccctggccaatgaaaacaccacccccagccctgctgagcccacagagaaccgggagaggacagccaatgaaaacaccacccccagccctgctggccccacagaaaatcgggagatgacagccaatgagaagaccaccctcttccctgctgagcccacagagaaccgggagaggacagccaatgagaagaccaccagcagccctgctgagcccacagaaaatggccagaggaccccatttgccaatgagaagaccaccagcagcagcgctgagcccacagaacatggagagaggacccccctggccaatgaaaacaccaccctgagccctgctgagcccacagaaaatcgggagaggacagccaatgagaagaccacccccttccctgctgagcccacagagaaccgggagaggacagccaatgaaaacaccacccccagccctgcccagcccacagaaaatggagacaggacccccctggccaatgagaagaccacccccagcctggccgagcccacagaaaatggcaagaggaccccatttgccaatgagaagaccaccagcagcagcgctgagcccacagagcacgccgagaggacccccctggccaatgaaaacaccaccagcagccctgctgagcccacagagaaccgggagaggacagccaatgagaagaccacccagtttcctgctgagcccacagaaaatcgggagagcacagccaatgagaagaccacccccttccctgctgagcccacagagaaccgggagtggacagccaatgaaaacaccaccctgagccctgctgagcccacagagcacgaggagatgacccccctggccaatgagaagaccaccctgagccctgctgagcccacagaaaatggagagaggacccccttcaccaatgagaagaccacccccagcagcgctgagcccacagagcacggggagaggacccccctggccaatgagatcaccacccccagcagagctgagcccacagaacatggagagagaattgccaatgagaaggccacccccagccctgccaagcccacagagcacggggagaccaccgtgaatgaagacaccacccccagcagcgctgagcccacagaaaatggagagaggacccccctggccaatgaaaacaccaccaccagccccacagagagcacagagcacggggagaggacagccaatgagaagaccacccccagccctgctgagcccacagaacatggagagaggaccccatctgccaatgagaagaccatccccagccctgccaagcccacagagcacgaggagatgacccccagcgccaatgaaaacaccacccccagccctgtgaagcccacagaacatggagagaagaccaccctggccaatgagaagatcaccctgagccctgagggccccacagagcacggggccaagaccaccagcgccaatgagaagatcacccccagcctggccaagcccacagaacatggagagaggaccaccagccccaatgacaagatcaccagcagcgctgctgagagcacagagcaccgggaccgggccaccagcgccaacgtcatcaccccagccccagctgagcccatcaagcacgccaagaggaccaccctggcccacgagaagatgacccaggtgacagagaagagcacagagcaccctgagaagaccaccagcaccacagagaagaccaccaggaccccagagaagcccaccctgtacagcgagaagaccatctgcaccaagggcaagaacacccctgtgcctgagaagcccacagagaacctgggcaacaccaccctgaccacagagaccatcaaggcccctgtgaagagcacagagaaccctgagaagacagctgctgtgaccaagaccatcaagcccagcgtgaaggtgactggagacaagagcctgaccaccaccagcagccacctgaacaagacagaggtgacccaccaggtgcccaccggcagcttcaccctcatcaccagcaggaccaagctgagcagcatcaccagcgaggccactggaaatgaaagccacccctacctgaacaaggatggcagccagaagggcatccatgctggccagatgggagaaaatgacagcttccctgcctgggccatcgtgattgtggtgctggtggccgtcatcctgctgctggtgttcctgggcctcatcttcctggtgtcctacatgatgaggaccaggaggaccctgacccagaacacccagtacaatgatgctgaagatgaaggaggccccaacagctaccctgtgtacctgatggagcagcagaacctgggcatgggccagatccccagccccaggtag

SEQ ID NO: 233424 - DNA, 2670 bp, Artificial Sequence
  derived and/or modified sequence
atggcccagcctgtgcacagcctgtgcagcgccttcggcctgcagtgctgcctgctcttcctgctggcctcctggggcgctggggccaccaccttccaggagtaccagaagacaggagagctgagcaccagtgaccacatcttccccctgaccccaggcctggtgtacagcatcccctttgaccacatcgtgctgcacagcggccagaggcctcctgagctgcccaagagcacagagatccacgagcagaagaggcactgcaacaccaccaggcacagcaagcccacagacaagcccaccggcaacagcaagaccatcgaccacaagagcagcacagacaaccacgaggccccacccaccagcgaggagaacagcagcaaccagggcaaggaccccatgatccggaaccagaggtctgtggaccctgctgacagcaccaccacccacaaggagagcgctgggaagaagcacatcaccccagcccccaagagcaagatcaactgcaggaagagcaccaccgggaagagcacagtgaccaggaagagtgacaagacaggccggcccctggagaagtccatgagcaccctggacaagaccagcaccagcagccacaagaccaccaccagcttccacaacagcggcaacagccagaccaagcagaagagcaccagcttccctgagaagatcacagctgccagcaagaccacctacaagaccaccggcaccccagaggagagcgagaagacagaggacagcaggaccaccgtggccagtgacaagctgctgaccaagaccaccaagaacatccaggagaccatcagcgccaatgagctgacccagagcctggccgagcccacagagcacggcggccgcacagccaatgaaaacaacacccccagccctgctgagcccacagagaaccgggagaggacagccaatgaaaacaccaccctgagccctgctgagcccacagaaaatcgggagaggacagccaatgaaaatacagcccccttccctgctggccccacagagaaccgggagatgacagccaatgaaaacaccaccctcttccctgctgagcccacagagcacggggagaggacagccaatgaaaacaccacccccagccctgctgagcccacagaacatggagagaggacagccaatgaaaacaccacccccagccctgctgagcccacagagcacggggagaggaccccatttgccaatgacaagaccaccagcagcagcgctgagagcacagaacatggagagaggacccccctggccaatgaaaacaccacccccagccctgctgagcccacagaaaatcgggagaggacagccaatgaaaacaccacccccagccctgctggccccacagagaaccgggagaccacagccaatgagaagaccaccctgagccctgtggagcccacagaaaatcgggagaccacagccaatgagaagaccacccccagccctgctgagcccacagaaaatggccagaggaccccatttgccaatgagaagaccaccagcagcagcgctgagcccacagagcacggggagaggacccccctggccaatgaaaacaccacccccagccctgctgagcccacagagaaccgggagaggacagccaatgagaagaccacccccagccctgctgagcccacagaaaatggagacaggacccccctggccaatgagaagaccacccccagcctggccgagcccacagaaaatggccagaggaccccatttgccaatgagaagaccaccagcagcagcgctgagcccacagagcacgaggagaggacccccctggccaatgaaaacaccacccccagccctgctgagcccacagagaaccgggagaggacagccaatgaaaacaccacccccagccctgctggccccacagaaaatcgggagatgacagccaatgagaagaccaccctcttccctgctgagcccacagagaaccgggagaggacagccaatgagaagaccaccagcagccctgctgagcccacagaaaatggccagaggaccccatttgccaatgagaagaccaccagcagcagcgctgagcccacagaacatggagagaggacccccctggccaatgaaaacaccaccctgagccctgctggccccacagaaaatcgggagaggacagccaatgagaagaccacccccttccctgctgagcccacagagaaccgggagaggacagccaatgaaaacaccacccccagccctgcccagcccacagaaaatggagacaggacccccctggccaatgagaagaccacccccagcctggccgagcccacagaaaatggcaagaggaccccatttgccaatgagaagaccaccagcagcagcgctgagcccacagagcacgccgagaggacccccctggccaatgaaaacaccaccagcagccctgctgagcccacagagaaccgggagaggacagccaatgagaagaccacccagtttcctgctgagcccacagaaaatcgggagagcacagccaatgagaagaccacccccttccctgctgagcccacagagaaccgggagtggacagccaatgaaaacaccaccctgagccctgctgagcccacagagcacgaggagatgacccccctggcctag

SEQ ID NO: 233425 - DNA, 708 bp, Artificial Sequence
  derived and/or modified sequence
atgacccaggtgaccgagaagagcaccgagcaccccgagaagaccacgtcgacaactgagaagaccacccgcactccagaaaagcccacactgtacagcgaaaagacaatctgtacaaagggtaaaaacactccagtgcctgagaaacctactgagaaccttggcaacactaccctgaccacagagacaatcaaagcccctgtaaagtcaacagagaatcctgagaaaaccgctgctgtgacaaagaccatcaagccatcagtgaaggtgactggcgataagtcacttacgactacatcctcccatctgaacaaaaccgaggtgacgcatcaggtcccaactgggagcttcacactaatcaccagccggacaaaactgtcgtctatcaccagcgaagctaccggaaatgagtcacacccctatctgaacaaggacggcagccaaaaaggcatccacgctggtcagatgggcgaaaatgatagcttcccagcctgggcaattgttattgtggtgttggtggctgtgattctcctcctggtctttttagggctgatttttctggtatcatacatgatgaggactcggaggacgcttacacagaatacacagtataatgatgcggaagacgagggcggaccaaactcatatcctgtctatctgatggaacagcaaaacctgggcatgggccagataccctcgccacgctag

SEQ ID NO: 233426 - DNA, 1524 bp, Artificial Sequence
  derived and/or modified sequence
cccctggccaacgagaagaccaccctgagccccgccgagcccaccgagaatggcgagaggacaccattcactaatgagaagacaaccccctccagcgcagaacctacagagcatggcgaaagaacaccactggctaacgaaataacgaccccatccagagctgagccaacggagcacggggaacggattgccaacgagaaagccactcctagcccagctaaaccgaccgaacacggcgaaactacggttaatgaagacactacaccttcatcagcagagccaactgagaacggtgagcgcaccccccttgcaaatgagaataccaccacctcccccacggaatcaactgagcacggcgaaagaaccgccaatgagaagaccactcccagccccgccgagcctacagagcacggtgagagaactccatctgctaacgagaagactattccgtcccccgctaagcccactgaacacgaggagatgactcctagcgcaaatgagaataccaccccaagccccgtgaagccaacagagcatggcgaaaaaacaacactggccaacgagaaaattactttatcccctgaaggccctaccgagcacggcgctaagacgacatcagctaacgagaaaataactccaagtttagccaagcctaccgaacacggtgaacggaccacatccccaaacgacaagataacatcttcggctgccgagtctactgagcaccgagaccgcgctacgagcgccaatgtgataacgcccgccccagctgagccgattaagcacgcaaagcgcaccactctggcccacgagaaaatgacacaggttacggaaaagtcaactgaacatcccgagaagaccaccagtacgacagagaagactactcggactcccgaaaaacccacactttactctgagaagacaatttgcactaaggggaagaacacccccgtgcctgagaagcctacagaaaatctcggtaacaccacactcactacagaaacaatcaaagcccccgtgaaatccaccgagaatcctgaaaaaactgccgccgtgactaaaactataaagccttctgtgaaggtgacaggcgacaagagcttgacgaccaccagttctcatttgaataaaaccgaggttacacatcaagtccccactgggagtttcactcttattacaagcaggacaaagctgtcgtcaataacttcggaagcgacaggcaacgaatctcacccttacttgaataaggatggctcccagaagggcatccatgccggtcagatgggagagaatgactctttccctgcttgggccatagtaattgtcgtgcttgtggccgtgattctgctgctggtttttctgggcctaatttttttagtcagctacatgatgcggacacgcagaactctgacccaaaacacacaatacaatgatgctgaagatgaaggaggcccgaattcataccctgtgtacctgatggaacagcaaaatctgggtatgggacagatccccagccctcgctag

SEQ ID NO: 233427 - DNA, 1524 bp, Artificial Sequence
  derived and/or modified sequence
cccctggccaacgagaagaccaccctgagccccgccgagcccaccgagaacggtgaacgtaccccctttacgaatgaaaagacgacgccttcgagtgcagaacccactgaacatggcgagaggacaccgcttgctaatgagatcactaccccatccagggctgagcctaccgaacacggagagaggattgcaaacgagaaggccacaccttccccagctaaacccacggagcacggtgaaaccaccgtgaacgaggataccaccccttcatcggcagaacctaccgagaacggagaacggacccctctggcaaacgagaatacaactacctcccccactgaatccaccgagcacggtgagcgcaccgcaaacgagaagactacaccttcgcccgctgagcccacagagcacggagagcgaacaccttcagctaacgagaaaaccatcccatctcccgccaaacccaccgaacacgaagaaatgacacctagcgccaacgagaatacaaccccatcacccgtgaagcccactgagcatggcgagaaaaccacactggccaacgagaaaattaccctatctccggagggtccgactgaacacggcgctaagacgacatctgcgaatgagaagatcactccttcactggcgaagcccacagaacatggagaacggaccacgagtcccaatgacaaaattacatccagcgctgcagagtccactgaacacagagatcgtgctacttctgctaatgtgatcacccccgctcccgctgagcctattaaacacgctaaacgcacgaccctcgcccatgagaagatgacacaggtaaccgaaaagtcgactgagcatcccgagaaaaccaccagcacaacagagaaaactacccggactcccgaaaaacctacgttatattcagagaagactatctgtactaaagggaagaacacaccggtgcccgagaagccaaccgagaatctgggaaatacgacacttactaccgagacaataaaggcgcctgtaaagtctacagaaaaccccgaaaaaaccgcagccgtaaccaagaccattaagccgtctgtgaaagtgacaggcgataagtcactgacgaccacttcttctcaccttaacaagaccgaagttactcaccaggttcccacaggctccttcacactgattacctcacggactaaactttcctcaataacatctgaagcgactggaaataagtctcacccgtacctcaacaaagacggatcccaaaaaggcatacacgctggtcagatgggggagaacgactctttccccgcctgggcaattgtgattgttgtgctcgtcgcggtcatcctgttgctggtattcttggggctgatctttctggtatcctacatgatgcggacaagacgaacgttgactcaaaacactcaatacaacgacgcggaggatgagggtggacccaacagctacccagtgtacctcatggaacagcaaaatctagggatgggccagatcccatcacctagatag

SEQ ID NO: 233428 - DNA, 1524 bp, Artificial Sequence
  derived and/or modified sequence
cccctggccaacgagaagaccaccctgagccccgccgagcccaccgagaacggtgaacgcaccccctttaccaatgaaaagacgactccatcttcagccgagccgaccgagcatggggaacggacgcccctggccaatgagattaccacccctagtcgtgccgagccaaccgagcatggcgaacgaatcgccaatgagaaggccaccccatccccagcgaaaccgaccgagcacggcgagaccacagttaacgaagatacaacaccttcttcagcagaaccgaccgagaacggtgaacgtacccccttggccaatgaaaacactacgactagtccaaccgaaagcaccgagcacggtgaaaggacagcaaacgagaaaacaactccttcacccgcggagcctaccgaacatggagagcgaactccatcagcaaacgaaaaaacaattcccagcccagcaaaaccaacagagcacgaggaaatgacgccaagcgccaacgaaaacacaacacctagccctgtaaagcccacagagcacggcgagaagaccacattggctaacgagaagatcaccctcagccccgagggccccaccgagcatggggcaaagactaccagtgctaatgagaaaattaccccgtccctggcaaaaccaaccgagcacggagaacgaacaacctcccccaacgacaagataacctcttctgccgccgagtcaactgagcatcgggacagggctactagcgctaatgtaataacacccgctcccgccgagccaatcaaacatgccaaaagaaccactctggctcacgaaaagatgacacaggtcaccgaaaaaagcactgaacaccccgagaaaacaaccagtactaccgaaaagacaacacggacacccgagaaacccaccctctactcggagaagacaatctgtacaaaagggaagaatacccccgtgcccgagaaacccacggagaacctgggaaacacaactctgactaccgagacaatcaaggcaccggtgaaatcgacagagaaccccgaaaaaaccgctgccgttaccaagacaatcaaaccatcggttaaagtcaccggggataaaagcctcacgaccacaagtagccatttgaacaaaacggaagtgacccaccaggtgcccaccggaagcttcacgctgattaccagccgaacaaagttgtccagcatcacgagcgaagcgactgggaacgaatcacatccatacctcaataaggacggttcacagaagggcatccatgccgggcagatgggagaaaacgactcctttcccgcatgggccatcgtgattgtcgtgctggtggcagttatcctgttactggtttttctgggactgattttcctggtatcctacatgatgagaactcgccgtaccctgactcaaaacacacagtataatgatgccgaggacgaaggtgggcctaattcatacccggtgtatctcatggaacaacagaacctcggcatgggacagatcccttctccccgctag

SEQ ID NO: 233429 - DNA, 1554 bp, Artificial Sequence
  derived and/or modified sequence
atggcccagcccgtgcacagcctgtgcagcgccttcggcctgcagtgttgcctcctattcctcttggcaagctggggagctggggcaactacattccaggagtatcagaagaccggggagctctcaacctcagaccatattttcccgctgactcccggcctcgtgtattctattccgttcgaccatattgtccttcatagtggccaaaggcctccagaactgcctaaatccaccgagatacacgaacagaagcgccattgcaacaccaccaggcactccaaacctacagataaacccacaggaaattctaagaccatcgatcacaaatcctcaaccgataatcacgaagcaccccctaccagcgaagaaaactcttcaaaccagggcaaggatccaatgatcagaaatcaacgctctgtggatcccgccgactctacaaccacccacaaggaatcagctggcaagaaacatataacaccggctccgaaatccaagatcaattgccggaagtcaaccacagggaaatcgaccgttactagaaaatccgacaaaacggggcggcccctcgagaaaagcatgtcaaccttggacaagactagcacctcctcccataagactacaaccagttttcacaattctggaaacagtcagactaaacaaaaatcaacttcattccccgagaagatcacagccgccagtaagactacttacaaaaccacgggcacacccgaagagtctgaaaagacagaggatagcagaacaacagtggctagcgacaagctgctgactaagaccacaaaaaatatacaggaaacaatttctgccaacgagctgacccagagtctggccgaaccaaccgaacatgggggccggactgctaatgaaaataacacaccctccccagcagagcccaccgaaaatcgagagcgcacagccaacgagaataaaaaaaccatatgcaccaagggaaaaaacaccccagtgcccgaaaagccaacagagaacttaggtaacactaccctgacaaccgagaccataaaggcaccagtgaaaagtaccgagaaccctgagaagacggccgcagtcaccaagacaataaaacccagtgtgaaggtgacgggggataaatctctgacaacaacaagctcccacctgaacaagacagaggtgactcaccaggtccctaccggcagtttcacactgatcactagccggaccaaactctcctctatcaccagcgaggctacaggcaacgagtcccacccatacctgaataaggacgggagccagaagggtatccatgccggacagatgggagaaaatgattcattccctgcgtgggcaattgtgatcgtggtcctggtggccgtaatcttactgctggttttccttgggcttattttcctggtgtcatatatgatgaggacaagacgcaccctgacccagaacactcagtacaatgacgcagaagacgaaggaggaccaaacagttaccctgtgtatctgatggagcagcaaaatctcggaatgggccaaataccatcacctcgctag

SEQ ID NO: 233430 - DNA, 1554 bp, Artificial Sequence
  derived and/or modified sequence
atggcccagcccgtgcacagcctgtgcagcgccttcggcctgcagtgctgcctcctgtttcttctagcctcatggggcgccggagccacaaccttccaagagtaccagaagaccggggagcttagcactagtgaccacatatttccgttgaccccaggactcgtctacagcatcccatttgatcatatcgttctccacagcggtcagaggcctcccgagctacccaaatccactgagattcacgaacagaagcggcactgcaatactacacgtcatagcaagcctacggataagcccactgggaactctaaaacgattgatcacaaatcttcaaccgacaaccacgaggcccctcctacgtctgaagagaattcttctaatcagggtaaagatcccatgatccgcaatcaaaggagcgtggaccctgccgattctaccactactcataaagaatccgcaggcaagaagcatattacacctgcgcccaaaagcaagattaactgtaggaagagcaccactgggaaatcaactgtcacgcggaaatcagacaaaactgggcggccactggagaaatcaatgagcaccttagataagacatctacatctagccataagacaacgacgagcttccacaattctggcaacagccagaccaaacagaagagcacctcgtttcctgagaaaatcaccgcggcgagcaaaacgacatataagaccaccggtaccccggaggagtcagagaaaaccgaggatagcaggaccaccgtcgcaagtgacaagctgttaacaaagacaacaaaaaacatccaagagactatatctgcgaacgaactgacccagtccctggccgaaccaaccgagcatggaggacggaccgcgaatgagaacaacacgccctcacccgccgaacctacagaaaaccgggaacgtaccgcgaacgaaaacaaaaagacaatttgtacaaaggggaagaacactcctgtacctgagaaaccaacagagaatcttggaaacacaactctgactactgaaacaatcaaagccccggtgaagagtacagaaaatccagagaagacggctgccgttactaagactattaagcccagtgtgaaggttacaggcgacaaatcactgacaacaaccagcagtcacctgaacaagacagaggtgacacaccaggtccccacggggagtttcaccctcatcacttctcgaacgaagctgtccagcattacttccgaggcaacgggcaatgagtcacacccatatctcaacaaggatggctctcagaaggggatccatgctggtcaaatgggggaaaacgacagcttcccagcttgggctatcgtgatcgtggtgttagttgcagtcattctcttgctggtctttctgggccttattttccttgtttcttacatgatgagaacccgacggacccttactcaaaatacccaatataatgacgccgaggatgaaggaggaccaaattcatacccagtgtacttgatggaacagcagaacttgggcatggggcagatccctagccctagatag

SEQ ID NO: 233431 - DNA, 1554 bp, Artificial Sequence
  derived and/or modified sequence
atggcccagcccgtgcacagcctgtgcagcgccttcggcctgcagtgctgcttactcttcctgctggcgtcttggggagcaggagcgacaacctttcaggagtatcagaaaacaggggaactttctactagcgatcacatttttccgctcaccccaggcctggtgtacagcatcccgttcgatcatattgtgctgcattccgggcagcgtccacccgagttacccaagtcgaccgagatccacgagcagaagagacactgtaacacaactcggcacagtaagcccacagataagcctaccggcaactcaaaaacgatcgaccacaaaagcagcactgacaatcacgaggctccgcctacctctgaagagaatagcagtaaccagggcaaggatcctatgatccggaaccagcggagcgttgacccggccgactcaaccaccacacataaggagtctgctggcaagaagcatatcacccctgcccccaaatcgaagatcaattgcagaaagtctactaccggcaaatcgacagtgacgaggaagtcggacaaaactggacggcctctagagaaaagcatgtccacgctcgacaaaaccagtacttcttcacacaagacgacaacaagctttcacaattcaggaaattctcaaactaaacaaaagagcacgagtttccctgagaagatcacagctgcatccaaaaccacgtacaagacaacaggcacaccagaagagtccgaaaagaccgaggactctcggacaactgttgccagcgacaagctcctaacaaagacaactaagaatattcaggaaaccatcagtgcgaatgaactcacacagtctctagccgaacctacagagcacggaggccgaacagctaacgaaaataatacacccagtccagccgagcccactgagaatcgggagaggaccgctaatgaaaataagaaaacaatttgtaccaagggtaagaataccccagtgcccgagaaaccgactgagaatctgggtaacactactttaaccacagagaccatcaaagccccagtgaaatctacagaaaaccccgaaaaaacagccgcagtgacaaagacaatcaaaccctccgttaaagtcactggcgataagagcttgaccacaaccagctctcatctcaataagacagaggtcactcaccaggtccccaccggctccttcaccctgatcaccagtcggactaagctctccagcattacctccgaagcaacaggaaatgagagccacccttatcttaacaaggatgggtctcagaagggcattcacgccgggcagatgggcgagaacgatagtttccctgcatgggccatcgtcatcgtagtccttgtggccgtaattttgctgttagtgttcttgggactgatttttttggtatcttacatgatgcgtacccggcggactctgacccagaacactcaatataacgacgctgaagacgaggggggccctaatagctatccagtttaccttatggagcaacagaacctgggaatgggccagataccaagcccgagatag

SEQ ID NO: 233432 - DNA, 4182 bp, Artificial Sequence
  derived and/or modified sequence
atggcccagcccgtgcacagcctgtgcagcgccttcggcctgcagtgctgcttgctgttcctgttagctagctggggggcaggagccactacctttcaggaataccagaaaacaggtgagctctccaccagcgaccacatcttcccactgaccccagggctcgtgtactctattccatttgaccatattgttctccactctggccaaaggcccccagagctaccaaagagcaccgagattcatgaacaaaagagacattgtaataccacacggcactccaaacctaccgataagcccaccggaaattctaaaactatcgaccacaaatccagcacagataatcacgaggccccccccaccagtgaggagaactctagcaaccaaggaaaggatcctatgattcgcaaccagcggagcgttgaccccgctgactctaccaccactcataaggagagcgcggggaaaaaacacattaccccagcccccaagtctaaaattaattgtaggaaatccaccactggaaaatctaccgtgacgagaaaatccgacaaaaccggacgtcccctcgaaaagtccatgagcactctggataaaaccagcacctcatctcacaagacaacaacttcgtttcacaactcaggaaattcccagactaagcagaaatcgacctctttcccggagaagatcacggcggcgtctaaaactacctacaagaccaccggcacgcccgaagaatctgagaagaccgaggactctaggacaaccgtagcttccgataagctccttacaaaaactaccaagaatatccaggagaccatatcagccaacgagctgacacagtcgctggcggagcccaccgaacacgggggtcgtacagccaacgaaaataatacacctagccctgctgaacccacagaaaacagagagcggactgcgaacgaaaacacaacattgtctccagccgaaccaaccgagaaccgcgaaaggacggccaatgagaataccgcccctttccctgctggccccacggaaaatagagagatgacagctaacgagaacaccactttatttcccgcagaacctacagaacacggagaacgaactgcaaacgagaatactacacctagtcctgctgagcccaccgaacatggagagaggaccgcgaacgagaacaccacaccctcacctgcggagccaactgagcatggggagagaacaccctttgcgaacgacaagactacgagctctagcgctgaatctacggaacacggcgagaggaccccactagcgaatgagaacaccacgccgtcccccgccgaacccactgagaacagagagaggactgctaacgagaatactacaccctctcccgctggacctactgaaaaccgggagacaactgcgaatgagaagacaaccctgagtcccgtcgagcctacagagaatcgggagaccactgccaacgagaagaccacacccagccctgctgaacccacagagaacggccagcggacccctttcgccaacgagaaaaccaccagttcatccgctgagccaactgagcatggagagagaactcccctcgcaaacgagaataccaccccttccccggctgagccaacagagaacagagaacgtacagccaatgagaaaactacaccctcaccagcagaaccgacagagaatggggaccgaactccactggcgaacgaaaagactactccctcattggccgaacctactgagaatggacagaggactcccttcgctaacgagaagaccactagttccagcgctgaaccaacggagcatgaggagagaactccgctcgcaaacgagaacaccaccccctccccagctgagccaactgaaaacagagaaaggacagctaacgagaatacaaccccaagtcctgcaggccctaccgagaaccgggagatgactgctaacgaaaaaaccacattgtttcctgccgaaccgactgagaacagggaaaggactgccaatgaaaagaccacctcttctccagccgagcccaccgagaacggtcagaggacgccgtttgccaacgaaaagacgacgtctagttctgccgaaccaaccgagcacggagagcgcacacctctggccaatgagaacactactttgtcccctgctgagcctaccgagaaccgggaacgcacagcaaatgaaaaaactacaccattccctgcggaacctaccgagaaccgcgaacgcacagccaatgaaaataccaccccttctccggctcagccaaccgagaacggggatcggacccccttggcaaacgagaagacaactcccagcctggccgagcctactgaaaacggaaaaagaactccattcgcaaacgagaaaaccacaagcagttcagctgagcccactgagcatgccgagcggacaccacttgctaatgagaatactacgagcagtcctgccgaacccacggaaaacagggagcgcacggccaacgagaagactacacagttcccagccgaacctacagagaatcgagaatcaaccgctaacgaaaagacaacccccttccccgcggaacccacggaaaatcgggaatggacagccaatgagaacactactctgtcaccagcagagccaactgagcacgaagagatgacccctttagcaaatgagaagaccactctgtctcctgctgagcctaccgagaacggtgagcggacaccttttaccaatgaaaaaacaaccccctcaagcgctgaaccaacagagcacggcgaaaggacccccctagccaacgagattacgaccccaagcagagccgaaccaaccgaacacggcgagagaatagccaacgagaaggcaactccatcgcctgccaaacccacagagcatggggaaacgactgtcaatgaggatacaactccttccagtgcagagccaaccgagaacggcgaacgcacacctctcgcaaatgaaaacaccaccacttctcccacggaaagcacagagcacggcgagagaacagccaacgaaaagactaccccatcaccagcagaacccacggagcatggagaaagaaccccatccgccaacgaaaagactataccaagccccgctaagccaacggagcacgaggagatgactccgtccgccaacgagaacacaacaccttcccctgtcaagcctaccgagcacggagaaaagacgacattggctaatgagaaaatcacactgagtcccgaaggacccacggaacacggtgctaagaccacctctgcgaatgagaagattaccccgagcctggcaaagcccacagaacacggcgagaggacaacatcaccgaacgacaagattacatctagcgctgccgagagtactgagcatagagatcgggctacgtcagccaacgtgataactcccgcccccgcggaaccaatcaaacacgctaaacgcacaactctagctcacgagaaaatgacccaggtgacagaaaaatctactgagcacccagagaagacaacatccaccacagagaagactacaagaacgccagaaaagcccacactctacagtgagaagacaatctgcacaaaaggcaaaaatacgcctgttcctgaaaagcctaccgagaatcttggcaacaccaccctgacgactgagaccattaaggccccagtgaaaagtaccgagaatcccgagaagaccgctgctgtgactaaaaccattaaaccctcagtaaaagttaccggcgacaagtccctaacaacgacaagctctcacctcaataagacggaagtcactcaccaggtgcccactggcagctttaccttaattacttctcgtacaaagctttcttcaatcaccagcgaggctactggcaacgagagccatccctacctaaataaggacgggtcacagaaaggcatccatgcgggacagatgggcgagaatgactcattccctgcctgggccatcgtgattgtcgtgctagtcgctgttatacttctgcttgtgtttctcggtttgattttcttggtatcctatatgatgcgcaccagacggaccctaacacagaatacacagtataatgacgcagaggacgaggggggacctaattcttaccctgtttacctgatggaacagcagaaccttggtatggggcagatcccttcccctagatag

SEQ ID NO: 233433 - DNA, 2670 bp, Artificial Sequence
  derived and/or modified sequence
atggcccagcccgtgcacagcctgtgcagcgccttcggcctgcagtgttgcctcttgttcttgctcgcttcatggggtgcgggcgccactacgttccaggagtatcagaagactggcgaacttagtactagtgaccacatttttcccctcacacccggcctcgtttattccattccttttgatcatattgtcttgcattctggccaacgcccgcccgaattgcccaagagcaccgagattcatgagcagaagaggcactgtaacacaactaggcattcaaagcctactgataagcctacaggcaacagcaagactatcgatcacaagtccagtacagacaatcacgaggcccctccaaccagtgaagagaattcttctaatcagggtaaggatcccatgattagaaaccagaggagcgtggaccctgctgactccacaactacccacaaggaaagcgctggtaaaaagcacattacaccggcccctaagtcaaagatcaattgccgtaagtccaccacaggaaaatcgaccgtaaccaggaaatcagataagaccggacgaccgcttgaaaagtctatgtccaccctggacaagacatcaacctcttcgcacaaaaccacgacctcgttccacaacagcggcaactcacaaaccaagcagaaatctacctcctttcctgagaagatcactgccgcctctaagacaacatataaaactactgggactccggaggaaagcgaaaagaccgaagactctcggacaactgtggccagtgacaagcttcttaccaagactacaaaaaacatccaggagaccatcagcgcaaacgaattgacacagagtctcgccgagcccacggaacatgggggaagaacagcaaatgagaataataccccctctccagctgagccaactgagaaccgtgagcgcaccgccaatgagaacacaacactctcacccgccgagccgactgagaatagggagcgtaccgcaaacgaaaatacggcacccttccctgccggtcctactgaaaaccgggagatgaccgccaatgagaataccacgctgtttcctgcagagcccacagaacacggtgaacggactgccaacgaaaatactaccccgagccccgccgagcctactgaacatggtgaacggaccgccaatgaaaacacgactccatcccccgccgaaccaaccgagcatggagagaggacgccattcgccaatgacaaaaccacctctagctctgcagagtccacagaacatggggaacggacccccctagccaacgaaaataccaccccttcccctgcagaacctaccgaaaatcgggaaaggacagctaatgaaaataccactccaagcccagcgggtcctacagagaacagggagacgacggctaacgaaaagacaacactgtcccctgtcgagccgaccgaaaatcgtgaaacgacggctaatgagaagactaccccatcccccgctgagcctaccgaaaacggacagaggaccccatttgcaaacgagaaaacaaccagtagctccgctgagccaaccgaacacggggaacgaactcccctagctaacgagaacacgacaccatctcctgcagaacccaccgagaatagagagagaaccgcaaatgaaaagaccaccccctcccccgccgagcccaccgaaaatggtgaccggaccccacttgccaatgaaaagaccacacccagcctagccgagccaaccgaaaacggccaacgcacgccatttgctaatgaaaaaacaacttcgagttccgcagaacccaccgaacatgaggaaaggactcctcttgccaatgaaaacacgacacctagtcctgccgaacctacagagaaccgagagcggacagctaacgagaatactaccccatcaccagccggtcctacggagaatcgggagatgactgccaacgagaagacaacactgtttcctgctgagccaaccgaaaaccgagagagaaccgcaaatgagaagacgacatctagtcctgccgaacctactgaaaacggacagcgaacgcccttcgccaatgaaaagaccacttctagttcagccgagccaacagaacatggggagcgcactcctctggcgaatgagaacacgactctatccccagctggtcccacagagaacagagagagaaccgcgaacgagaaaactacccctttcccggcggaacctaccgagaacagagagaggactgccaacgagaacaccacaccttctcccgcccagcccaccgagaacggagatcggacaccactggccaacgagaagactactcccagtctggccgaacctaccgagaatggtaagcgaacgcccttcgccaacgagaagaccaccagcagtagcgctgagccgactgagcatgccgaaagaacgcccttagcaaacgagaatactacaagcagtccagctgaacccaccgagaatagggaaagaaccgccaatgaaaaaacaacacagtttccggcggaacctaccgaaaacagagagtctacggcaaatgagaaaaccacaccattccctgctgagcccaccgagaacagggagtggacagcaaacgaaaatactaccttgtcacctgctgagcccaccgaacacgaggagatgacgccactggcctag

SEQ ID NO: 233434 - DNA, 708 bp, Artificial Sequence
  derived and/or modified sequence
atgactcaagtgaccgaaaaaagcactgagcatcccgaaaaaacgactagtacaacggagaagactacaagaacaccagaaaaacccaccctctattccgagaagacaatttgtacaaagggtaagaatacacctgttccagaaaaacccaccgagaacctaggcaataccacattgaccaccgaaactattaaggcacccgtcaagtctacagaaaaccctgagaagacggccgctgtaaccaaaacaattaaacctagtgtgaaggtcacaggtgacaagtcgctgaccaccacttcgagccatctgaataaaactgaggtaactcaccaggtgccaaccgggagtttcactttgattacgagcagaactaagctgtcatcgattaccagcgaggccaccggaaatgagagtcacccatacctgaacaaggatggctcccagaaaggtatccatgcaggccagatgggggagaatgactccttccccgcttgggccattgtaatagtagttctggtcgctgttatcctgctcttggtgttcttaggcctcatctttctcgtctcttatatgatgagaacccgcagaacactcacccagaacacccaatataatgatgctgaggacgaaggcggacccaatagctaccccgtttacctgatggagcagcagaacctggggatgggccagatcccttcccccagatag

SEQ ID NO: 233435 - DNA, 1524 bp, Artificial Sequence
  derived and/or modified sequence
ccactcgcgaatgagaaaacaaccctctctcctgccgaaccaacagagaacggtgagcgcacacccttcactaatgaaaagaccaccccgtccagcgcagaaccaacagaacatggagagagaacccccctcgcaaacgagatcactacaccatctcgtgccgagccaaccgagcatggcgagaggattgctaatgagaaggccaccccatctccagctaagcctactgagcatggtgaaacaacagttaatgaggacaccacacccagcagcgctgaacctaccgagaacggggaaagaaccccacttgccaatgagaacacaaccacttcacctaccgaaagtacagaacatggcgagcggaccgctaatgagaaaactacacccagccctgcggaacctacagagcatggagagcgcaccccctcagcaaacgagaagacaatcccatcacccgctaaacctacagagcacgaagagatgaccccctcggctaacgaaaacaccaccccaagccccgtcaaacctacagagcacggcgaaaagacaaccctcgcaaatgaaaaaattaccttatcccctgaaggacccaccgaacacggagcaaaaacgacctcagccaacgaaaagatcacaccatccctggccaagcctaccgaacatggagagcgcacaacatcccccaacgacaaaattacatcctccgcagctgagagtactgagcaccgggacagagccacaagtgcaaacgtgatcactcccgcacccgcagagccaatcaaacacgccaagagaacgacactggcccatgaaaaaatgacgcaggtgaccgaaaagtcaaccgagcatcctgagaagaccacttctaccacggaaaagaccacacggactcccgagaagcctactctgtacagcgaaaagactatttgtacgaaaggcaaaaataccccagtgccagagaagcctacggagaacctcggcaatactactctgactactgagacaattaaagcacctgtcaagtccaccgagaaccccgaaaagacagctgctgtcaccaaaacaatcaagcctagcgtgaaagttactggggataagtccttgacaactaccagctcacacctgaacaaaactgaggtgactcaccaggtgcctacaggaagttttaccctcatcaccagccgaacaaagctgtccagcatcacctcggaggccacaggtaacgaaagtcacccctacttgaataaggatggatctcaaaaaggaatccacgcaggacagatgggagagaacgactcattccccgcttgggccatcgtgatagtcgttcttgtggctgttatcctgttactggtctttttgggactgatctttctggtgtcttacatgatgcgcacccgcagaactttgacccagaatactcaatataatgatgccgaagatgaaggcggtcccaattcctacccagtctacctgatggaacagcaaaatcttgggatgggccagattccatcccctcgatag

SEQ ID NO: 233436 - DNA, 1524 bp, Artificial Sequence
  derived and/or modified sequence
cctctcgctaacgaaaagacaacactcagtcctgctgaacccaccgagaacggggagaggacaccttttacaaacgaaaaaacaacgccaagctcagcagagccaactgagcacggcgaaagaacaccactggcaaacgaaattaccactccaagccgggctgagcccacagaacacggtgaaaggatcgcgaacgagaaggctactccctcacctgccaagcccactgagcacggagagacaacggtaaacgaagatacaaccccatcctctgctgaaccaaccgagaatggtgaaaggacccccttggcgaacgagaataccacaacttcgcctactgaatctacggaacacggcgagcggacggctaatgagaaaaccaccccatctcccgctgagccaacagaacatggcgagcggacacccagcgctaacgaaaagaccatcccctccccggctaagcccaccgaacacgaagagatgacacccagtgccaatgagaataccacaccatcacctgtgaagcctactgaacacggcgagaaaacaacattagcaaacgagaagatcactttgagccccgagggacctacagaacatggagctaagacaacaagtgccaacgaaaagataaccccgagtttagctaagcccaccgagcacggagagaggactacatccccaaatgataagatcacctctagcgctgccgagagcactgagcacagagaccgagccacgagtgctaacgtgatcactcctgcccctgccgaaccaataaagcacgccaagcggaccactttggcccacgaaaaaatgacgcaagtaacagagaaaagtactgaacaccctgagaagactacctcaacaacagagaaaacaacccggactcccgaaaaacccacgctgtactctgagaaaacgatctgcactaaagggaaaaatactccagtacctgaaaaaccgacggagaatctggggaatacaacactaacgaccgagacaatcaaggccccagtcaagagtacagaaaatcccgagaaaaccgcagctgtcacaaaaaccatcaaaccctctgtcaaggtgactggagataaaagtctaacaaccacttcgtcccatctcaacaaaactgaggtgacccatcaggtcccaaccggctccttcactctcattacatctcgaaccaagctgtcctcaatcacttccgaggctaccgggaacaagagtcacccctatctcaacaaggatggctctcagaaaggtatccacgcaggccaaatgggcgagaatgattcgtttcccgcatgggccatcgtgattgttgtgctagtggcagtcattctgctactggtgttcctaggcctcatttttctggtgtcctacatgatgcgcactcgacgtactctgacgcagaacacccagtacaacgatgcagaagacgagggaggacccaactcttaccctgtgtacctgatggagcagcagaacttaggtatgggacagatcccgagccctaggtag

SEQ ID NO: 233437 - DNA, 1524 bp, Artificial Sequence
  derived and/or modified sequence
ccccttgccaacgagaaaacaacactgagccctgcagagcctaccgagaacggggaacggaccccttttacgaatgagaaaaccacaccgtcctccgccgaacccactgaacatggcgagcgaaccccgctggccaatgagattacaacaccatctcgggctgaaccaacagagcacggagaacgcatcgcaaatgagaaggctactccatctcctgcaaagcctaccgaacacggtgaaacaaccgtcaacgaagacacaactcctagttctgctgagccaacagagaacggcgaacgaactccattggccaatgagaacaccactacctcaccaaccgagtctaccgaacacggagagagaaccgctaatgagaagacaaccccatcacctgccgaacccaccgaacacggtgaacgaacccctagtgctaatgagaaaactatcccttcccctgcaaaacctactgagcacgaggagatgactccttcagccaacgagaacaccaccccctctcccgtaaaacccaccgaacacggcgagaaaacaaccctggcaaacgagaagattacgctgtctcccgaaggcccaaccgagcacggtgctaagaccaccagtgctaatgagaagattactccgtccctggccaagcctacagagcacggagagcgaacaacttcgcccaatgacaagatcacatctagtgccgctgaaagcactgaacatagagatcgagccacatccgccaatgttattacacctgcccctgctgaacccatcaagcatgcaaaaaggaccacactggctcatgagaagatgacacaggtgaccgagaaatcaactgaacaccccgagaagaccacaagcacaactgaaaagaccaccagaacacccgaaaagccaactctgtacagcgagaagactatctgtaccaagggcaagaacactccagtgcccgagaagcccactgagaatctgggtaacacaacgctgaccaccgagacgattaaggctcccgtgaagagtacagagaatccagagaagacagcagcggtcacaaaaacaattaagccatctgtgaaggtcactggagacaaatccttgacgacaacttcttcgcaccttaataagactgaggtcacgcaccaggtccctacaggctcattcaccctgataacctcgaggaccaagctgtctagcatcaccagtgaagctaccggcaacgaaagccacccctacctcaacaaagacggttctcagaagggcatccatgccggtcagatgggcgagaacgattccttccctgcttgggcaattgtgattgtcgtgctggtggccgtcatactcctgctcgtgtttcttgggcttatattcctcgtcagttacatgatgcgaacccgaaggacgctgacacaaaacactcagtacaacgatgctgaagacgagggtgggccaaactcttaccctgtgtacttgatggagcagcagaatcttgggatgggacaaattccgtctccacggtag

SEQ ID NO: 233438 - DNA, 1554 bp, Artificial Sequence
  derived and/or modified sequence
atggctcagccagttcatagcctctgtagtgcctttggacttcagtgttgcctacttttcttgctagcaagctggggagccggagccactacattccaggagtaccagaaaactggggagctgagcaccagtgatcacatcttcccactcacacccggtctggtatacagtatcccctttgaccatatcgtgttgcactctggccagcgccctcccgagctcccgaagtcgaccgagattcatgagcagaaacgacattgtaacacgactaggcactccaagccgacagacaagcccaccggaaactcaaaaaccatcgaccacaagtccagcactgacaatcacgaggcaccacctacgagtgaggagaatagctccaatcaaggtaaagatccaatgatcaggaatcagaggagcgtagacccagccgatagcacaacaactcataaggaaagcgccggaaagaagcacataaccccagctccaaagtctaaaattaactgccgaaagagtacaaccgggaagagtactgtcaccaggaaaagcgataagaccggtcgacccctggagaagagcatgagcactctggacaaaacatcaaccagcagtcacaaaacaacgacctctttccacaattccggaaattctcagactaagcagaagtccacctcctttccagagaagatcacagcggcatcaaagaccacttataaaactacagggacacctgaagagagtgaaaagaccgaggattcaaggacaaccgtggccagcgataagttgttaacaaagaccaccaagaatattcaggaaaccatctctgcgaacgagttgacccagtccttagcggaacctaccgagcatggcggtcgcaccgctaacgagaacaacacacccagcccagcagagcccaccgaaaaccgcgaacggacggccaacgaaaacaaaaaaactatctgcaccaagggaaaaaacacgccagttcctgagaagcctacagaaaatttgggcaataccacccttacaacagagaccatcaaggctccagtaaaaagcaccgagaatccagagaagaccgccgcagtgacgaagacaatcaagcccagcgtgaaggtgacgggggacaaatctctgaccactacttcttcccatctaaacaagactgaggtcacgcatcaagtgccgactgggtcatttactttaattacatccaggacgaagctctcttccatcacgtcagaggccacaggcaatgaaagtcacccctacctgaacaaggatgggtctcagaaaggaatacacgctggacaaatgggagagaacgactcattccccgcatgggctattgttattgttgttctcgtcgccgtgatcttactactggtgtttcttggccttatattcctggtatcatacatgatgcgcacgcgaagaacactgactcagaacacccagtacaacgatgcagaagatgaggggggaccaaactcctatcctgtttatctcatggagcaacagaatctggggatgggccagattccgtcacccagatag

SEQ ID NO: 233439 - DNA, 1554 bp, Artificial Sequence
  derived and/or modified sequence
atggcccagcctgtgcattccctgtgttcggcatttggtctgcaatgctgcctgctgttcctcttggcctcctggggggcaggggcaacaacctttcaggaataccagaagactggcgagctgagcacctccgatcacatttttccgcttacccctgggctcgtttactccatcccctttgatcatatagtcctgcatagtggccagagaccacctgaactgccaaagtctacagaaattcatgagcagaagcggcactgcaataccactcgccactccaagcctactgataaacccacaggtaactctaagactattgatcacaagtccagcacagataatcacgaagctcccccaactagcgaggagaactccagcaaccagggcaaggatcccatgattaggaatcaacggagtgtggatccagcggattccacaacaacccacaaagagtccgcaggaaagaaacatattacaccagctcccaaatctaagatcaactgccgaaagagcacaaccggaaagtctaccgtgacaaggaagtccgataaaacaggcaggcctctggaaaagagtatgtccactttggataaaacctccacctcaagccacaagactacaactagtttccacaattccggtaactcgcagaccaagcagaagtcaacctcctttcccgagaagataacagcagcttcaaaaaccacgtacaaaacaaccgggacgcctgaggagagcgaaaagaccgaggactctcgtacaactgtggcatctgataagttgttgaccaagaccaccaagaacatccaggagacgatcagtgcgaacgagctgacccagagcctcgcagaaccaactgagcacgggggtagaactgccaacgagaacaatacaccctccccggcagaaccgaccgaaaaccgcgagagaactgctaacgaaaacaagaaaactatctgcacaaagggcaagaacacccccgttccggaaaagcctaccgagaacttgggtaacaccacacttaccaccgaaaccattaaggcgccagtaaaaagtacagagaacccagagaagactgccgcagtaactaagactataaagccctctgttaaggttacaggagataaatctctcaccactacctcatctcacctgaacaaaacggaagtgacccaccaagtcccgaccggatccttcacccttatcacatctcgaacaaagttgtctagcattactagtgaggccactgggaatgaatcacatccttacttaaataaggacggctcccagaagggaatccacgcaggtcagatgggggaaaacgattcctttcccgcttgggccattgtgatagtggttttggttgctgtcatacttcttcttgtgttcctgggacttatattcctcgtgtcttacatgatgcggacaagacggacgctgacgcagaacacgcagtataacgatgctgaggacgagggaggccctaatagttaccctgtgtatctaatggaacaacaaaacctgggaatggggcagatacccagtcctcggtag

SEQ ID NO: 233440 - DNA, 1554 bp, Artificial Sequence
  derived and/or modified sequence
atggcacaacccgtgcactctctgtgctctgcttttggcctgcaatgctgcttactgtttctgcttgcttcatggggtgctggggcaacaacattccaagaatatcagaagactggggagctgtccaccagcgaccacattttcccgctgactcccggtttggtctacagtatcccttttgatcacatcgtgttgcacagtgggcaaagacccccagagctgccgaaatccacagagatacacgagcaaaagcgacattgcaacactactcgtcattcaaagccaacggataaaccgactgggaactcaaaaaccattgatcataagtcatctacggacaatcacgaagcaccgcctacgagcgaagagaacagctcaaatcagggaaaagaccccatgatccgtaaccaacggagtgtggacccggctgatagtaccactacgcacaaagagagtgccggaaaaaagcatattacacctgctcccaagagcaaaattaattgccgcaagtctacgacaggtaagtctaccgtcacaaggaagtctgacaagaccggcagacctctcgaaaagtccatgtctaccctggacaagacgtcgacttcttctcacaaaactacaacaagcttccacaacagtggaaattcacagactaaacagaaaagcacatcttttcccgaaaaaattacagcagcgagcaaaacaacttataagaccactggcacacctgaggaaagcgaaaaaaccgaagatagtagaaccactgtcgcgtccgataagctgctcaccaaaacaactaaaaatattcaggagacgatcagcgccaatgagctgacgcaatctctggccgagccaaccgaacacggcggtcgtacagccaacgagaataacaccccatcaccagccgaaccaaccgaaaatcgcgagaggacggctaacgagaacaagaagactatctgtacaaaagggaaaaataccccagttcctgagaagccaacagaaaacttaggcaatacgacactgaccaccgaaacgattaaagcccctgtgaagagtaccgagaatcccgaaaagacagcagcggtgactaaaaccatcaaaccatctgtcaaggtgacaggagataaatctctgacgactacaagcagccacttgaacaagacagaagtgacccaccaggtgcctacgggctcttttaccctcattacctcccgcacgaaattatctagtattactagtgaggctacaggcaatgaatctcatccctacctgaacaaagatgggagtcagaaaggaatccacgctggacagatgggcgagaacgatagtttcccagcgtgggctattgtgatcgttgtgctcgtggcagtcattctgctcctggtgtttctgggacttattttcctagtgtcttatatgatgcggacccgacgcactctgacacagaacacccagtataacgacgcggaagacgaaggcggtccaaacagctatcctgtatacctgatggaacagcaaaatctgggcatgggccagataccttcacctcgctag

SEQ ID NO: 233441 - DNA, 4182 bp, Artificial Sequence
  derived and/or modified sequence
atggcacagccagtgcattcactctgctccgcatttgggcttcagtgttgtcttctgtttttgctcgccagttggggcgctggtgccacaactttccaggaataccagaagaccggcgaactgtccacctccgatcacattttccccctaactcctggactggtttactccatcccttttgatcatatcgttctgcatagcggccaacgacctccagagctgcctaagagtacagagatccacgagcagaaacggcattgtaacactacccgccactccaagccaactgataagccgaccggaaatagtaaaaccatcgatcataaaagcagcactgataatcacgaggctccccctaccagcgaagagaactcaagtaaccagggtaaggatcccatgattcgcaaccagcgatccgtggaccctgcagactcaactaccactcacaaagagagcgcagggaaaaagcacatcaccccagccccaaagagcaagatcaactgcaggaagtctaccacaggcaaatccaccgttacgaggaagagtgacaagacaggccgacctctggagaaatcaatgagtactcttgacaagacatccacttccagccacaagaccaccacgtcctttcataactctgggaactcacagaccaaacagaaaagtaccagttttccagaaaagattaccgcagcaagcaaaacgacctacaaaacaaccggcacacccgaggaaagcgagaagacggaggattcacggaccacagtggcttccgataagctgctgaccaaaacgacaaaaaatattcaggaaacaatttctgccaatgagttgacccagagcctggccgaacctacagaacatggcggtcggacggccaacgagaataatacaccaagtcccgctgaacccactgagaatcgcgagagaacagccaatgaaaacacaacactttcccccgctgagcctactgaaaaccgcgaacgtacagccaatgagaataccgctccattcccagccggaccgacagagaaccgcgagatgaccgcaaacgaaaacacgactcttttccccgctgaacctacagaacacggtgaaagaacagctaacgagaacactacaccttcccccgcagaacctaccgaacacggcgaacggactgccaacgagaacaccactccatctccagcggagcccactgaacacggcgagagaacccccttcgccaatgacaagaccacctcatcatcagcagaatccactgaacatggcgaaaggactcccttggccaacgaaaatactacgcctagtcctgctgagcccactgagaacagggagaggaccgccaacgaaaacactactccatctcccgcaggtcccactgagaatcgggaaacaacggcgaacgaaaaaaccacactgtcccccgttgagcctacagagaatagggagacaaccgcaaatgagaagacaacaccttctccagctgagccaacagagaatgggcagaggactccatttgcaaatgagaagaccacatcctcaagcgcggagcctaccgaacatggagagcggacccctctggccaatgagaacaccaccccgagccccgctgaacccactgagaacagggagcgtaccgccaacgaaaagactaccccgagccctgcggagcctacggagaacggagacaggactccactcgcaaacgaaaaaactaccccctcattggccgaacccaccgagaacgggcagcgcaccccgtttgcaaatgaaaaaacgacgtctagtagtgcagaaccaactgaacacgaagagcgcactccactggccaatgagaacactacacccagcccagctgagcccacagaaaacagggagcgcactgctaacgaaaacacaacaccaagtcccgctggccctactgagaaccgcgagatgactgcaaacgagaaaactacactgttccctgccgaaccaactgagaatagggagcggaccgctaatgagaagaccacctctagccccgctgaaccgactgaaaatggccaaaggacgccctttgctaacgagaaaacaacaagctctagtgctgagccaacagaacatggggagcgaacaccacttgccaacgaaaacacaacactttcacccgctgagccaaccgagaatcgagaacggaccgctaatgagaaaacaaccccctttccagccgaaccgactgagaatcgagaacggactgctaacgaaaacaccacgccttcccctgcccagccgaccgagaatggtgaccggacgccgttagccaatgagaaaacaacacccagccttgccgagccaactgagaacggaaagcgcactccttttgccaacgaaaaaaccactagtagctctgccgaaccgacagagcatgcagagaggacccccctggcaaatgagaacaccacaagctcccccgcagagccaactgaaaaccgcgaacgcaccgcaaacgaaaaaacaacacagtttccagctgagccgaccgaaaatagagaatctacggctaatgagaagacaactccattccccgctgagcccactgaaaatcgagagtggacggccaacgaaaacacgaccttgagcccagccgagccaactgaacatgaagaaatgactccactagcaaacgagaaaacaaccctgtccccagctgagccaacagaaaacggcgaaaggactccctttaccaatgaaaagaccactccatcaagcgccgagcctacagagcacggtgagagaacccccttggctaatgagataaccacccccagtcgcgcagagcccactgaacacggagaaagaatagcaaatgagaaagctacgcctagccctgctaagccgacagagcatggcgagacaacggtgaacgaggacactacaccaagctcagcggaacctacggagaatggggagaggacacccctagccaacgagaacaccacaacctcccctacagagtccacagaacatggagagcgaacggcgaacgagaagaccaccccatcgcctgcagaacctaccgaacatggtgaaaggaccccgtccgctaatgagaaaacaattccgtcacctgcaaaacccacagagcacgaagagatgaccccctcagcaaatgaaaacacgactccttcacccgtgaagcccaccgaacacggagaaaagacaaccctggctaatgagaagatcacactgagccctgaaggtcctaccgaacacggcgcaaaaactacctcagcgaatgaaaagattacccccagtcttgcgaaaccgacagaacacggagaacgaacgacctcacctaacgacaagatcacatcttctgccgcagaaagcaccgagcatcgcgacagggctacttcggcaaacgtcatcacccctgcacccgctgagcctattaagcatgctaagagaactaccctagcccacgagaagatgacccaggtgacagaaaagtccacagagcaccctgaaaaaactacttccacaactgaaaaaaccaccaggacaccagagaagccgacactgtatagtgaaaaaactatttgtactaaggggaagaacacgcctgtaccagaaaagcctactgagaatctgggaaacactaccctgacgactgagactataaaggcccctgtgaagtccaccgaaaaccctgagaagactgccgctgtgacaaagaccatcaagcctagtgtaaaggttacaggggacaaatcccttaccaccaccagctcacatctcaacaagacagaggtgactcatcaggtacccacgggcagctttacgctaattacatctcgtacgaagctgagcagtattaccagcgaggcaaccggaaacgagtctcacccatatctcaataaagacgggagtcagaaggggatacacgccggtcagatgggcgaaaatgatagctttccggcatgggccattgtgatcgtggtgctcgtagccgtcattctgctgctggtattcttggggctcatcttcctggtctcttatatgatgcgcacccgcaggacgcttactcagaacacgcaatataacgacgccgaggacgaagggggacccaactcttatccagtgtacttgatggagcaacagaacctgggaatgggccagattccatccccgagatag

SEQ ID NO: 233442 - DNA, 2670 bp, Artificial Sequence
  derived and/or modified sequence
atggcacagcccgtgcactcactttgtagtgctttcggattgcagtgttgtctcctgtttctgcttgctagttggggggcaggggctactacctttcaagaatatcagaagaccggggagctgtctacatctgatcacatattccctttgacacccggattggtatactctatacctttcgatcatattgtcctgcactcaggccagaggccccctgaactcccgaaaagcacagagatccacgagcagaaacggcattgcaataccacacgacactccaagccaactgacaagcctaccggtaatagcaaaactatcgatcacaaaagcagtacagataaccacgaggcaccaccaactagcgaggagaattcctccaatcaggggaaagatcctatgatcagaaatcagcgaagcgtcgaccccgctgactccactacgacccacaaggaatcagctggtaaaaagcacatcacacctgctcctaaatcgaaaatcaattgtcgaaagagtacaacaggcaaaagtacggtaacgagaaagtctgacaagaccggtcgcccacttgaaaaaagtatgtctaccctggataaaaccagcacaagctctcataaaacaacaacctctttccataatagcggaaattctcagactaagcaaaagtccacctcattccccgagaagatcactgcagcttcgaagaccacctataagactacaggtactccggaagaaagcgaaaagaccgaagattctcgaactactgtggcctctgataagctgctgaccaagactacgaaaaatatccaggagacaatctcagcaaacgaattgacacagtctctcgccgagcccaccgagcatggaggcagaactgccaacgagaataacacccccagtcctgcagaaccaacagagaaccgcgagcggacagccaacgaaaatacaaccctctccccagccgaacccaccgaaaatcgcgagcgtaccgctaacgaaaataccgcgccttttccggcaggtcccaccgaaaaccgggaaatgactgcaaacgaaaataccactctgttccctgccgaacccacagaacatggagaacgaacagccaatgaaaacacaacccccagtcctgccgagccaaccgagcacggtgaacggactgcaaacgagaacacaacaccgagccccgctgagcctaccgaacacggtgaacgcaccccctttgctaatgacaaaactacaagctcctccgctgagtctaccgaacatggtgaacgcacaccactcgcaaatgaaaacacaactccctcacccgcagaacccaccgagaatagggaacggaccgccaatgagaatacaacaccgagtcccgctgggccaacagagaatcgagagacaacggcaaatgagaagaccacgctctctcccgtcgaacccaccgaaaaccgcgaaactaccgcaaatgagaagaccaccccaagcccagccgagcccactgaaaatggccaaaggaccccatttgcaaacgaaaaaacaacgagctcctcagccgagccaaccgaacacggcgagcggacccccttggccaatgagaataccactccatcccctgctgagccaaccgagaatagagagcgaactgcgaatgagaaaaccaccccctcccctgcagagcccacagaaaatggcgaccggacacccttagccaacgagaagactaccccatctcttgctgagccaaccgaaaatggtcagaggacacccttcgcaaatgagaagactacaagtagttcagccgaacctacagaacacgaggagcggacccccttggccaacgagaatactaccccaagcccggctgagcctaccgaaaacagagagcggactgccaatgagaatacgacgcccagccctgcagggccaacagaaaaccgcgaaatgactgctaatgagaaaaccacccttttcccggctgaacccaccgagaaccgggagcggacagccaatgagaagacaactagctcacctgctgagcctacagagaatggtcaacggacgccgttcgctaatgagaagacaacctcatcctcggccgagcccactgaacatggtgaacggactcccttagctaacgaaaacaccaccttatctcctgcaggcccaaccgaaaaccgcgaacgtaccgcaaatgaaaagacgacacccttcccagccgaacctacagagaaccgggaaaggacggccaacgaaaatactacgccctcccctgctcaaccaactgagaatggcgaccgcacacccctagccaacgaaaagaccaccccatcgttggctgagccaactgaaaacggcaaacgaacaccctttgccaatgaaaagacgactagttcgtcggccgaacctacagaacatgccgaacggactcctctggcgaatgagaatactacttcctctccggctgagccaacagaaaatagagagagaactgctaatgagaagaccacacagtttcctgctgagcccacagagaatagggagagtacagctaacgagaagaccactcctttccctgctgagcccacagaaaatagggagtggaccgccaatgaaaacacaactttaagtcccgcagagcccacagagcacgaggagatgactccgctggcctag

SEQ ID NO: 233443 - DNA, 708 bp, Artificial Sequence
  derived and/or modified sequence
atgacccaggtgaccgagaagagcaccgagcaccccgagaagaccaccagcaccaccgagaagaccaccagaacccccgagaagcccaccctgtacagcgagaagaccatctgcaccaagggcaagaacacccccgtgcccgagaagcccaccgagaacctgggcaacaccaccctgaccaccgagaccatcaaggcccccgtgaagagcaccgagaaccccgagaagaccgccgccgtgaccaagaccatcaagcccagcgtgaaggtgaccggcgacaagagcctgaccaccaccagcagccacctgaacaagaccgaggtgacccaccaggtgcccaccggcagcttcaccctgatcaccagcagaaccaagctgagcagcatcaccagcgaggccaccggcaacgagagccacccctacctgaacaaggacggcagccagaagggcatccacgccggccagatgggcgagaacgacagcttccccgcctgggccatcgtgatcgtggtgctggtggccgtgatcctgctgctggtgttcctgggcctgatcttcctggtgagctacatgatgagaaccagaagaaccctgacccagaacacccagtacaacgacgccgaggacgagggcggccccaacagctaccccgtgtacctgatggagcagcagaacctgggcatgggccagatccccagccccagatag

SEQ ID NO: 233444 - DNA, 1524 bp, Artificial Sequence
  derived and/or modified sequence
cccctggccaacgagaagaccaccctgagccccgccgagcccaccgagaacggcgagagaacccccttcaccaacgagaagaccacccccagcagcgccgagcccaccgagcacggcgagagaacccccctggccaacgagatcaccacccccagcagagccgagcccaccgagcacggcgagagaatcgccaacgagaaggccacccccagccccgccaagcccaccgagcacggcgagaccaccgtgaacgaggacaccacccccagcagcgccgagcccaccgagaacggcgagagaacccccctggccaacgagaacaccaccaccagccccaccgagagcaccgagcacggcgagagaaccgccaacgagaagaccacccccagccccgccgagcccaccgagcacggcgagagaacccccagcgccaacgagaagaccatccccagccccgccaagcccaccgagcacgaggagatgacccccagcgccaacgagaacaccacccccagccccgtgaagcccaccgagcacggcgagaagaccaccctggccaacgagaagatcaccctgagccccgagggccccaccgagcacggcgccaagaccaccagcgccaacgagaagatcacccccagcctggccaagcccaccgagcacggcgagagaaccaccagccccaacgacaagatcaccagcagcgccgccgagagcaccgagcacagagacagagccaccagcgccaacgtgatcacccccgcccccgccgagcccatcaagcacgccaagagaaccaccctggcccacgagaagatgacccaggtgaccgagaagagcaccgagcaccccgagaagaccaccagcaccaccgagaagaccaccagaacccccgagaagcccaccctgtacagcgagaagaccatctgcaccaagggcaagaacacccccgtgcccgagaagcccaccgagaacctgggcaacaccaccctgaccaccgagaccatcaaggcccccgtgaagagcaccgagaaccccgagaagaccgccgccgtgaccaagaccatcaagcccagcgtgaaggtgaccggcgacaagagcctgaccaccaccagcagccacctgaacaagaccgaggtgacccaccaggtgcccaccggcagcttcaccctgatcaccagcagaaccaagctgagcagcatcaccagcgaggccaccggcaacgagagccacccctacctgaacaaggacggcagccagaagggcatccacgccggccagatgggcgagaacgacagcttccccgcctgggccatcgtgatcgtggtgctggtggccgtgatcctgctgctggtgttcctgggcctgatcttcctggtgagctacatgatgagaaccagaagaaccctgacccagaacacccagtacaacgacgccgaggacgagggcggccccaacagctaccccgtgtacctgatggagcagcagaacctgggcatgggccagatccccagccccagatag

SEQ ID NO: 233445 - DNA, 1524 bp, Artificial Sequence
  derived and/or modified sequence
cccctggccaacgagaagaccaccctgagccccgccgagcccaccgagaacggcgagagaacccccttcaccaacgagaagaccacccccagcagcgccgagcccaccgagcacggcgagagaacccccctggccaacgagatcaccacccccagcagagccgagcccaccgagcacggcgagagaatcgccaacgagaaggccacccccagccccgccaagcccaccgagcacggcgagaccaccgtgaacgaggacaccacccccagcagcgccgagcccaccgagaacggcgagagaacccccctggccaacgagaacaccaccaccagccccaccgagagcaccgagcacggcgagagaaccgccaacgagaagaccacccccagccccgccgagcccaccgagcacggcgagagaacccccagcgccaacgagaagaccatccccagccccgccaagcccaccgagcacgaggagatgacccccagcgccaacgagaacaccacccccagccccgtgaagcccaccgagcacggcgagaagaccaccctggccaacgagaagatcaccctgagccccgagggccccaccgagcacggcgccaagaccaccagcgccaacgagaagatcacccccagcctggccaagcccaccgagcacggcgagagaaccaccagccccaacgacaagatcaccagcagcgccgccgagagcaccgagcacagagacagagccaccagcgccaacgtgatcacccccgcccccgccgagcccatcaagcacgccaagagaaccaccctggcccacgagaagatgacccaggtgaccgagaagagcaccgagcaccccgagaagaccaccagcaccaccgagaagaccaccagaacccccgagaagcccaccctgtacagcgagaagaccatctgcaccaagggcaagaacacccccgtgcccgagaagcccaccgagaacctgggcaacaccaccctgaccaccgagaccatcaaggcccccgtgaagagcaccgagaaccccgagaagaccgccgccgtgaccaagaccatcaagcccagcgtgaaggtgaccggcgacaagagcctgaccaccaccagcagccacctgaacaagaccgaggtgacccaccaggtgcccaccggcagcttcaccctgatcaccagcagaaccaagctgagcagcatcaccagcgaggccaccggcaacaagagccacccctacctgaacaaggacggcagccagaagggcatccacgccggccagatgggcgagaacgacagcttccccgcctgggccatcgtgatcgtggtgctggtggccgtgatcctgctgctggtgttcctgggcctgatcttcctggtgagctacatgatgagaaccagaagaaccctgacccagaacacccagtacaacgacgccgaggacgagggcggccccaacagctaccccgtgtacctgatggagcagcagaacctgggcatgggccagatccccagccccagatag

SEQ ID NO: 233446 - DNA, 1554 bp, Artificial Sequence
  derived and/or modified sequence
atggcccagcccgtgcacagcctgtgcagcgccttcggcctgcagtgctgcctgctgttcctgctggccagctggggcgccggcgccaccaccttccaggagtaccagaagaccggcgagctgagcaccagcgaccacatcttccccctgacccccggcctggtgtacagcatccccttcgaccacatcgtgctgcacagcggccagagaccccccgagctgcccaagagcaccgagatccacgagcagaagagacactgcaacaccaccagacacagcaagcccaccgacaagcccaccggcaacagcaagaccatcgaccacaagagcagcaccgacaaccacgaggccccccccaccagcgaggagaacagcagcaaccagggcaaggaccccatgatcagaaaccagagaagcgtggaccccgccgacagcaccaccacccacaaggagagcgccggcaagaagcacatcacccccgcccccaagagcaagatcaactgcagaaagagcaccaccggcaagagcaccgtgaccagaaagagcgacaagaccggcagacccctggagaagagcatgagcaccctggacaagaccagcaccagcagccacaagaccaccaccagcttccacaacagcggcaacagccagaccaagcagaagagcaccagcttccccgagaagatcaccgccgccagcaagaccacctacaagaccaccggcacccccgaggagagcgagaagaccgaggacagcagaaccaccgtggccagcgacaagctgctgaccaagaccaccaagaacatccaggagaccatcagcgccaacgagctgacccagagcctggccgagcccaccgagcacggcggcagaaccgccaacgagaacaacacccccagccccgccgagcccaccgagaacagagagagaaccgccaacgagaacaagaagaccatctgcaccaagggcaagaacacccccgtgcccgagaagcccaccgagaacctgggcaacaccaccctgaccaccgagaccatcaaggcccccgtgaagagcaccgagaaccccgagaagaccgccgccgtgaccaagaccatcaagcccagcgtgaaggtgaccggcgacaagagcctgaccaccaccagcagccacctgaacaagaccgaggtgacccaccaggtgcccaccggcagcttcaccctgatcaccagcagaaccaagctgagcagcatcaccagcgaggccaccggcaacgagagccacccctacctgaacaaggacggcagccagaagggcatccacgccggccagatgggcgagaacgacagcttccccgcctgggccatcgtgatcgtggtgctggtggccgtgatcctgctgctggtgttcctgggcctgatcttcctggtgagctacatgatgagaaccagaagaaccctgacccagaacacccagtacaacgacgccgaggacgagggcggccccaacagctaccccgtgtacctgatggagcagcagaacctgggcatgggccagatccccagccccagatag

SEQ ID NO: 233447 - DNA, 4182 bp, Artificial Sequence
  derived and/or modified sequence
atggcccagcccgtgcacagcctgtgcagcgccttcggcctgcagtgctgcctgctgttcctgctggccagctggggcgccggcgccaccaccttccaggagtaccagaagaccggcgagctgagcaccagcgaccacatcttccccctgacccccggcctggtgtacagcatccccttcgaccacatcgtgctgcacagcggccagagaccccccgagctgcccaagagcaccgagatccacgagcagaagagacactgcaacaccaccagacacagcaagcccaccgacaagcccaccggcaacagcaagaccatcgaccacaagagcagcaccgacaaccacgaggccccccccaccagcgaggagaacagcagcaaccagggcaaggaccccatgatcagaaaccagagaagcgtggaccccgccgacagcaccaccacccacaaggagagcgccggcaagaagcacatcacccccgcccccaagagcaagatcaactgcagaaagagcaccaccggcaagagcaccgtgaccagaaagagcgacaagaccggcagacccctggagaagagcatgagcaccctggacaagaccagcaccagcagccacaagaccaccaccagcttccacaacagcggcaacagccagaccaagcagaagagcaccagcttccccgagaagatcaccgccgccagcaagaccacctacaagaccaccggcacccccgaggagagcgagaagaccgaggacagcagaaccaccgtggccagcgacaagctgctgaccaagaccaccaagaacatccaggagaccatcagcgccaacgagctgacccagagcctggccgagcccaccgagcacggcggcagaaccgccaacgagaacaacacccccagccccgccgagcccaccgagaacagagagagaaccgccaacgagaacaccaccctgagccccgccgagcccaccgagaacagagagagaaccgccaacgagaacaccgcccccttccccgccggccccaccgagaacagagagatgaccgccaacgagaacaccaccctgttccccgccgagcccaccgagcacggcgagagaaccgccaacgagaacaccacccccagccccgccgagcccaccgagcacggcgagagaaccgccaacgagaacaccacccccagccccgccgagcccaccgagcacggcgagagaacccccttcgccaacgacaagaccaccagcagcagcgccgagagcaccgagcacggcgagagaacccccctggccaacgagaacaccacccccagccccgccgagcccaccgagaacagagagagaaccgccaacgagaacaccacccccagccccgccggccccaccgagaacagagagaccaccgccaacgagaagaccaccctgagccccgtggagcccaccgagaacagagagaccaccgccaacgagaagaccacccccagccccgccgagcccaccgagaacggccagagaacccccttcgccaacgagaagaccaccagcagcagcgccgagcccaccgagcacggcgagagaacccccctggccaacgagaacaccacccccagccccgccgagcccaccgagaacagagagagaaccgccaacgagaagaccacccccagccccgccgagcccaccgagaacggcgacagaacccccctggccaacgagaagaccacccccagcctggccgagcccaccgagaacggccagagaacccccttcgccaacgagaagaccaccagcagcagcgccgagcccaccgagcacgaggagagaacccccctggccaacgagaacaccacccccagccccgccgagcccaccgagaacagagagagaaccgccaacgagaacaccacccccagccccgccggccccaccgagaacagagagatgaccgccaacgagaagaccaccctgttccccgccgagcccaccgagaacagagagagaaccgccaacgagaagaccaccagcagccccgccgagcccaccgagaacggccagagaacccccttcgccaacgagaagaccaccagcagcagcgccgagcccaccgagcacggcgagagaacccccctggccaacgagaacaccaccctgagccccgccgagcccaccgagaacagagagagaaccgccaacgagaagaccacccccttccccgccgagcccaccgagaacagagagagaaccgccaacgagaacaccacccccagccccgcccagcccaccgagaacggcgacagaacccccctggccaacgagaagaccacccccagcctggccgagcccaccgagaacggcaagagaacccccttcgccaacgagaagaccaccagcagcagcgccgagcccaccgagcacgccgagagaacccccctggccaacgagaacaccaccagcagccccgccgagcccaccgagaacagagagagaaccgccaacgagaagaccacccagttccccgccgagcccaccgagaacagagagagcaccgccaacgagaagaccacccccttccccgccgagcccaccgagaacagagagtggaccgccaacgagaacaccaccctgagccccgccgagcccaccgagcacgaggagatgacccccctggccaacgagaagaccaccctgagccccgccgagcccaccgagaacggcgagagaacccccttcaccaacgagaagaccacccccagcagcgccgagcccaccgagcacggcgagagaacccccctggccaacgagatcaccacccccagcagagccgagcccaccgagcacggcgagagaatcgccaacgagaaggccacccccagccccgccaagcccaccgagcacggcgagaccaccgtgaacgaggacaccacccccagcagcgccgagcccaccgagaacggcgagagaacccccctggccaacgagaacaccaccaccagccccaccgagagcaccgagcacggcgagagaaccgccaacgagaagaccacccccagccccgccgagcccaccgagcacggcgagagaacccccagcgccaacgagaagaccatccccagccccgccaagcccaccgagcacgaggagatgacccccagcgccaacgagaacaccacccccagccccgtgaagcccaccgagcacggcgagaagaccaccctggccaacgagaagatcaccctgagccccgagggccccaccgagcacggcgccaagaccaccagcgccaacgagaagatcacccccagcctggccaagcccaccgagcacggcgagagaaccaccagccccaacgacaagatcaccagcagcgccgccgagagcaccgagcacagagacagagccaccagcgccaacgtgatcacccccgcccccgccgagcccatcaagcacgccaagagaaccaccctggcccacgagaagatgacccaggtgaccgagaagagcaccgagcaccccgagaagaccaccagcaccaccgagaagaccaccagaacccccgagaagcccaccctgtacagcgagaagaccatctgcaccaagggcaagaacacccccgtgcccgagaagcccaccgagaacctgggcaacaccaccctgaccaccgagaccatcaaggcccccgtgaagagcaccgagaaccccgagaagaccgccgccgtgaccaagaccatcaagcccagcgtgaaggtgaccggcgacaagagcctgaccaccaccagcagccacctgaacaagaccgaggtgacccaccaggtgcccaccggcagcttcaccctgatcaccagcagaaccaagctgagcagcatcaccagcgaggccaccggcaacgagagccacccctacctgaacaaggacggcagccagaagggcatccacgccggccagatgggcgagaacgacagcttccccgcctgggccatcgtgatcgtggtgctggtggccgtgatcctgctgctggtgttcctgggcctgatcttcctggtgagctacatgatgagaaccagaagaaccctgacccagaacacccagtacaacgacgccgaggacgagggcggccccaacagctaccccgtgtacctgatggagcagcagaacctgggcatgggccagatccccagccccagatag

SEQ ID NO: 233448 - DNA, 2670 bp, Artificial Sequence
  derived and/or modified sequence
atggcccagcccgtgcacagcctgtgcagcgccttcggcctgcagtgctgcctgctgttcctgctggccagctggggcgccggcgccaccaccttccaggagtaccagaagaccggcgagctgagcaccagcgaccacatcttccccctgacccccggcctggtgtacagcatccccttcgaccacatcgtgctgcacagcggccagagaccccccgagctgcccaagagcaccgagatccacgagcagaagagacactgcaacaccaccagacacagcaagcccaccgacaagcccaccggcaacagcaagaccatcgaccacaagagcagcaccgacaaccacgaggccccccccaccagcgaggagaacagcagcaaccagggcaaggaccccatgatcagaaaccagagaagcgtggaccccgccgacagcaccaccacccacaaggagagcgccggcaagaagcacatcacccccgcccccaagagcaagatcaactgcagaaagagcaccaccggcaagagcaccgtgaccagaaagagcgacaagaccggcagacccctggagaagagcatgagcaccctggacaagaccagcaccagcagccacaagaccaccaccagcttccacaacagcggcaacagccagaccaagcagaagagcaccagcttccccgagaagatcaccgccgccagcaagaccacctacaagaccaccggcacccccgaggagagcgagaagaccgaggacagcagaaccaccgtggccagcgacaagctgctgaccaagaccaccaagaacatccaggagaccatcagcgccaacgagctgacccagagcctggccgagcccaccgagcacggcggcagaaccgccaacgagaacaacacccccagccccgccgagcccaccgagaacagagagagaaccgccaacgagaacaccaccctgagccccgccgagcccaccgagaacagagagagaaccgccaacgagaacaccgcccccttccccgccggccccaccgagaacagagagatgaccgccaacgagaacaccaccctgttccccgccgagcccaccgagcacggcgagagaaccgccaacgagaacaccacccccagccccgccgagcccaccgagcacggcgagagaaccgccaacgagaacaccacccccagccccgccgagcccaccgagcacggcgagagaacccccttcgccaacgacaagaccaccagcagcagcgccgagagcaccgagcacggcgagagaacccccctggccaacgagaacaccacccccagccccgccgagcccaccgagaacagagagagaaccgccaacgagaacaccacccccagccccgccggccccaccgagaacagagagaccaccgccaacgagaagaccaccctgagccccgtggagcccaccgagaacagagagaccaccgccaacgagaagaccacccccagccccgccgagcccaccgagaacggccagagaacccccttcgccaacgagaagaccaccagcagcagcgccgagcccaccgagcacggcgagagaacccccctggccaacgagaacaccacccccagccccgccgagcccaccgagaacagagagagaaccgccaacgagaagaccacccccagccccgccgagcccaccgagaacggcgacagaacccccctggccaacgagaagaccacccccagcctggccgagcccaccgagaacggccagagaacccccttcgccaacgagaagaccaccagcagcagcgccgagcccaccgagcacgaggagagaacccccctggccaacgagaacaccacccccagccccgccgagcccaccgagaacagagagagaaccgccaacgagaacaccacccccagccccgccggccccaccgagaacagagagatgaccgccaacgagaagaccaccctgttccccgccgagcccaccgagaacagagagagaaccgccaacgagaagaccaccagcagccccgccgagcccaccgagaacggccagagaacccccttcgccaacgagaagaccaccagcagcagcgccgagcccaccgagcacggcgagagaacccccctggccaacgagaacaccaccctgagccccgccggccccaccgagaacagagagagaaccgccaacgagaagaccacccccttccccgccgagcccaccgagaacagagagagaaccgccaacgagaacaccacccccagccccgcccagcccaccgagaacggcgacagaacccccctggccaacgagaagaccacccccagcctggccgagcccaccgagaacggcaagagaacccccttcgccaacgagaagaccaccagcagcagcgccgagcccaccgagcacgccgagagaacccccctggccaacgagaacaccaccagcagccccgccgagcccaccgagaacagagagagaaccgccaacgagaagaccacccagttccccgccgagcccaccgagaacagagagagcaccgccaacgagaagaccacccccttccccgccgagcccaccgagaacagagagtggaccgccaacgagaacaccaccctgagccccgccgagcccaccgagcacgaggagatgacccccctggcctag

SEQ ID NO: 233449 - DNA, 5286 bp, Artificial Sequence
  derived and/or modified sequence
atggcccagccggtccacagcctctgctccgcctttggcctccagtgctgcctcctcttccttctagcttcttggggggcaggtgctactacattccaagaatatcagaaaactggggaactctcaacatccgatcacatatttcccctcactccaggccttgtttatagtatcccttttgatcacattgttctgcattcaggacaaagacctccagagctccctaaatctacagaaatccatgagcaaaaacgccactgcaacaccacacgccattctaagccaactgacaagcctacaggcaactccaaaactatagaccacaaaagctctacagataatcatgaggctcctcccacttctgaagaaaactccagcaaccaagggaaagacccaatgatccggaaccagcgctctgttgatcctgctgactccactaccacacataaagaatccgctggaaaaaaacatataacgccagcacccaagagcaaaataaactgtcgtaagtccacaacaggcaaatcaacggtaacaagaaaatcagataaaactggaagacctttggaaaagtccatgagtactttggataagacaagtaccagctcacataagactacaacttccttccacaactcaggcaattcacagaccaagcaaaaaagcacatcttttccagaaaaaatcacagcagcctcaaaaacaacatacaagaccacaggaaccccagaagagtcagaaaaaactgaagattccagaacaacagttgcctcagacaagctcctgacaaaaactacaaaaaacatacaagagaccatatcagccaatgagctcacacaatctctagcagagcctacagaacatggaggaaggacagccaatgagaacaacacaccatccccagcagagcctacagaaaatagagaaaggacagccaatgagaacaccacactatccccagcagagcctatagaaaatagagaaaggacagccaatgagaacaccgcaccattcccagcagggcctacagaaaatagagaaatgacagccaatgagaataccacactattcccagcagagcctacagaacatggagaaaggacagccaatgagaacaccacaccatccccagcagagcctacagaacatggagaaaggacagccaatgagaacactacaccatccccagcagagcctacagaacatggagaaaggaccccatttgccaatgacaaaaccacatcatcctcagcagagtctacagaacatggagaaaggaccccactggccaacgagaacaccacaccatccccagcagagcctacagaaaatagagaaaggacagccaatgagaacaccacaccatccccagcagggcctacagaaaacagagaaacgacagccaacgagaagaccacactatccccagtagagcctacagaaaatagagaaacaacagccaatgagaagaccacaccatccccagcagagcctacagaaaatggacaaaggaccccatttgccaatgagaaaaccacatcatcctcagcagagcctacagaacacggagaaaggaccccactggccaatgagaacaccacaccatccccagcagagcctacagaaaatagagaaaggacagccaatgagaagaccacaccatccccagcagagcctacagaaaatggagacaggactcctttggccaatgagaagaccacgccatctctagcagagcctacagaaaatggacaaaggaccccatttgccaatgagaagaccacatcatcctcagcagagcctacagaacacgaagaaaggactccactggccaatgagaacaccacaccatccccggcagagcctacagaaaatagagaaaggacagccaatgagaacaccacaccatccccagcagggcctacagaaaatagagaaatgacagccaacgagaagaccacactattcccagcagagcctacagaaaatagagaaaggacagccaatgagaagaccacatcatccccagcagagcctacagaaaatggacaaaggaccccatttgccaatgagaaaaccacatcatcctcagcagagcctacagaacacggagaaaggaccccactggccaatgagaacaccacactatccccagcagagcctacagaaaatagagaaaggacagccaatgagaagaccacaccattcccagcagagcctacagaaaatagagaaaggacagccaatgagaacaccacaccatccccagcacagcctacagaaaatggagacaggactccattggccaatgagaagaccacaccatctctagcagagcctacagaaaatggaaaaaggaccccatttgccaatgagaagaccacatcatcctcagcagagcctacagaacacgcagaaaggactccactggccaatgagaacaccacatcatccccagcagagcctacagaaaatagagaaaggacagccaatgagaagaccacacaattcccagcagagcctacagaaaatagagaaagcacagccaatgagaagaccacaccattcccagcagagcctacagaaaatagagaatggacagccaatgagaacaccacactatccccagcagagcctacagaacatgaagaaatgaccccattggccaatgagaagaccacactatccccagcagagcctacagaaaatggagaaaggaccccatttaccaatgagaagaccacaccatcctcagcagagcctacagaacatggagaaaggaccccactggccaatgagatcaccacaccatcccgagcagagcctacagaacatggagaaaggatagccaatgagaaggccacaccatccccagcaaagcctacagaacatggagaaacgacagtcaatgaggacaccacaccatcctcagcagagcctacagaaaatggagaaaggaccccactggccaatgagaacaccacaacatccccaacagagtctacagaacatggagaaaggacagccaatgagaagaccacaccatccccagcagagcctacagaacatggagaaaggacaccatcagccaatgagaagaccataccatctccagcaaagcctacagaacacgaagaaatgaccccatcggccaatgagaacaccacaccatccccagtaaagcctacagaacatggagaaaagactacattggccaatgagaagatcacactatccccagaagggcctacagaacatggagcaaaaactacgtcggccaatgagaagatcacaccatccctagcaaagcctacagaacatggagaaaggaccacatcacccaatgacaagatcacctcatctgcagcagagtctacagaacatagagatagggctacatcagccaatgtgatcacaccagccccagcagagcctataaaacatgcaaaaaggaccacattggcccatgagaagatgacacaagtcacagaaaagtccacagaacacccagaaaagaccacgtcaaccacagagaaaaccacaagaaccccagaaaagcctacgctatactcagagaagaccatatgcaccaaagggaaaaacacaccagtcccagaaaagcctacagaaaacctggggaacaccacactgaccactgagaccataaaagccccagtaaagtccacagaaaacccagaaaaaacagcagcagtcacaaagactataaaaccttcagtcaaggtcacaggagacaaatctctcactactacctcttctcatctaaataaaactgaagttactcatcaggtgcccactggttctttcaccctcattacatctagaacgaagctgagttctatcacatcagaagccacaggaaacgagagccatccatacctcaataaagatggctcacagaaaggtatccacgctggacagatgggagagaatgattcattccctgcatgggccatagttattgtggtcctggtggctgtgattctcctcctggtgttccttggcctgatcttcttggtctcctatatgatgcggacacgccgcacactaacccagaacacccagtacaatgatgcagaggatgagggtggccccaattcctacccggtctacctgatggagcagcagaatcttggcatgggccagatcccttccccacggtgatcttggagtaggcgcccagccctggctcttccatgctctgcccctttcctggatgaggaaccggactcacaatttctatttccgggactacaggaagggcagagaatactgacggttaccagtattaacccttcatctgttcttgaaactggttggggaatgaggtgataagcaaggagggtgtaagtttaggggacaaagaagaaagaatgaataatacgagcagacattctctgtagaaggtaatggtctgagaatgaaaaggtgtttgatggacatgttgtgggggcaccaatgcagaacactgcactgagtcctaaaggaaggacaggagccttataggcaatgccccagactgacttgtgagtggggtttatggggaaagggagggactgagggcagagtctctgggtttcaggacagcattatgttatttccattcactattacttaagagtttgtgtgtaaacaggctcatctctgagttctcaggacccttgcccccacccccatttttttaatgaaaaaaaaaaacaaaaaaaacggatccaagaagaaaagagaatttatttccttctccactctctccatgccctggagaaaaaaaagtccagaagaaatcataaatatctctcatctacatggttgcttcctcttcctcccaaatcccttagttttcctaaatgtctacagtggacgccctgttggtttggcttgctgggttgtgggtggacacgcaaggaggggatttttatttggccagcagtctcacccactgatctccaccccagaccttccctgattggtgtctcagcatttattttcctgtctcttccaccaaaagccagctgtagctttatctcgtaaaagttacccatcttctctactgtccccattctctctcctcccaccttcaccccagattcaagttttcctccttgtaggcatttcatctgtgtgtgttttctggattttctctctctcttcttatggccatttcaccttattactgattgggtagagggggaaaaggagaatgatgatgatagtttccttctgtctattgaccttttttataataaagtataacatgtttataaaggg

SEQ ID NO: 233450 - DNA, 2627 bp, Artificial Sequence
  derived and/or modified sequence
ccattggccaatgagaagaccacactatccccagcagagcctacagaaaatggagaaaggaccccatttaccaatgagaagaccacaccatcctcagcagagcctacagaacatggagaaaggaccccactggccaatgagatcaccacaccatcccgagcagagcctacagaacatggagaaaggatagccaatgagaaggccacaccatccccagcaaagcctacagaacatggagaaacgacagtcaatgaggacaccacaccatcctcagcagagcctacagaaaatggagaaaggaccccactggccaatgagaacaccacaacatccccaacagagtctacagaacatggagaaaggacagccaatgagaagaccacaccatccccagcagagcctacagaacatggagaaaggacaccatcagccaatgagaagaccataccatctccagcaaagcctacagaacacgaagaaatgaccccatcggccaatgagaacaccacaccatccccagtaaagcctacagaacatggagaaaagactacattggccaatgagaagatcacactatccccagaagggcctacagaacatggagcaaaaactacgtcggccaatgagaagatcacaccatccctagcaaagcctacagaacatggagaaaggaccacatcacccaatgacaagatcacctcatctgcagcagagtctacagaacatagagatagggctacatcagccaatgtgatcacaccagccccagcagagcctataaaacatgcaaaaaggaccacactggcccatgagaagatgacacaagtcacagaaaagtccacagaacacccagaaaagaccacgtcaaccacagagaaaaccacaagaaccccagaaaagcctacgctatactcagagaagaccatatgcaccaaagggaaaaacacaccagtcccagaaaagcctacagaaaacctggggaacaccacactgaccactgagaccataaaagccccagtaaagtccacagaaaacccagaaaaaacagcagcagtcacaaagactataaaaccttcagtcaaggtcacaggagacaaatctctcactactacctcttctcatctaaataaaactgaagttactcatcaggtgcccactggttctttcaccctcattacatctagaacgaagctgagttctatcacatcagaagccacaggaaacgagagccatccatacctcaataaagatggctcacagaaaggtatccacgctggacagatgggagagaatgattcattccctgcatgggccatagttattgtggtcctggtggctgtgattctcctcctggtgttccttggcctgatcttcttggtctcctatatgatgcggacacgccgcacactaacccagaacacccagtacaatgatgcagaggatgagggtggccccaattcctacccggtctacctgatggagcagcagaatcttggcatgggccagatcccttccccacggtgatcttggagtaggcgcccagccctggctcttccatgctctgcccctttcctggatgaggaaccggactcacaatttctatttccgggactacaggaagggcagagaatactgacggttaccagtattaacccttcatctgttcttgaaactggttggggaatgaggtgataagcaaggagggtgtaagtttaggggacaaagaagaaagaatgaataatacgagcagacattctctgtagaaggtaatggtctgagaatgaaaaggtgtttgatggacatgttgtgggggcaccaatgcagaacactgcactgagtcctaaaggaaggacaggagccttataggcaatgccccagactgacttgtgagtggggtttatggggaaagggagggactgagggcagagtctctgggtttcaggacagcattatgttatttccattcactattacttaagagtttgtgtgtaaacaggctcatctctgagttctcaggacccttgcccccacccccatttttttaatgaaaaaaaaaacaaaaaaaacggatccaagaagaaaagagaatttatttccttctccactctctccatgccctggagaaaaaaaagtccagaagaaatcataaatatctctcatctacatggttgcttcctcttcctcccaaatcccttagttttcctaaatgtctacagtggacgccctgttggtttggcttgctgggttgtgggtggacacgcaaggaggggatttttatttggccagcagtctcacccactgatctccaccccagaccttccctgattggtgtctcagcatttattttcctgtctcttccaccaaaagccagctgtagctttatctcgtaaaagttacccatcttctctactgtccccattctctctcctcccaccttcaccccagattcaagttttcctccttgtaggcatttcatctgtgtgtgttttctggattttctctctctcttcttatggccatttcaccttattactgattgggtagagggggaaaaggagaatgatgatgatagtttccttctgtctattgaccttttttataataaagtataacatgtttataaaggg

SEQ ID NO: 233451 - DNA, 2627 bp, Artificial Sequence
  derived and/or modified sequence
ccattggccaatgagaagaccacactatccccagcagagcctacagaaaatggagaaaggaccccatttaccaatgagaagaccacaccatcctcagcagagcctacagaacatggagaaaggaccccactggccaatgagatcaccacaccatcccgagcagagcctacagaacatggagaaaggatagccaatgagaaggccacaccatccccagcaaagcctacagaacatggagaaacgacagtcaatgaggacaccacaccatcctcagcagagcctacagaaaatggagaaaggaccccactggccaatgagaacaccacaacatccccaacagagtctacagaacatggagaaaggacagccaatgagaagaccacaccatccccagcagagcctacagaacatggagaaaggacaccatcagccaatgagaagaccataccatctccagcaaagcctacagaacacgaagaaatgaccccatcagccaatgagaacaccacaccatccccagtaaagcctacagaacatggagaaaagactacattggccaatgagaagatcacactatccccagaagggcctacagaacatggagcaaaaactacgtcggccaatgagaagatcacaccatccctagcaaagcctacagaacatggagaaaggaccacatcacccaatgacaagatcacctcatctgcagcagagtctacagaacatagagatagggctacatcagccaatgtgatcacaccagccccagcagagcctataaaacatgcaaaaaggaccacattggcccatgagaagatgacacaagtcacagaaaagtccacagaacacccagaaaagaccacgtcaaccacagagaaaaccacaagaaccccagaaaagcctacgctatactcagagaagaccatatgcaccaaagggaaaaacacaccagtcccagaaaagcctacagaaaacctggggaacaccacactgaccactgagaccataaaagccccagtaaagtccacagaaaacccagaaaaaacagcagcagtcacaaagactataaaaccttcagtcaaggtcacaggagacaaatctctcactactacctcttctcatctaaataaaactgaagttactcatcaggtgcccactggttctttcaccctcattacatctagaacgaagctgagttctatcacatcagaagccacaggaaacaagagccatccatacctcaataaagatggctcacagaaaggtatccacgctggacagatgggagagaatgattcattccctgcatgggccatagttattgtggtcctggtggctgtgattctcctcctggtgttccttggcctgatcttcttggtctcctatatgatgcggacacgccgcacactaacccagaacacccagtacaatgatgcagaggatgagggtggccccaattcctacccggtctacctgatggagcagcagaatcttggcatgggccagatcccttccccacggtgatcttggagtaggcgcccagccctggctcttccatgctctgcccctttcctggatgaggaaccggactcacaatttctatttccgggactacaggaagggcagagaatactgacggttaccagtattaacccttcatctgttcttgaaactggttggggaatgaggtgataagcaaggagggtgtaagtttaggggacaaagaagaaagaatgaataatacgagcagacattctctgtagaaggtaatggtctgagaatgaaaaggtgtttgatggacatgttgtgggggcaccaatgcagaacactgcactgagtcctaaaggaaggacaggagccttataggcaatgccccagactgacttgtgagtggggtttatggggaaagggagggactgagggcagagtctctgggtttcaggacagcattatgttatttccattcactattacttaagagtttgtgtgtaaacaggctcatctctgagttctcaggacccttgcccccacccccatttttttaatgaaaaaaaaaacaaaaaaaacggatccaagaagaaaagagaatttatttccttctccactctctccatgccctggagaaaaaaaagtccagaagaaatcataaatatctctcatctacatggttgcttcctcttcctcccaaatcccttagttttcctaaatgtctacagtggacgccctgttggtttggcttgctgggttgtgggtggacacgcaaggaggggatttttatttggccagcagtctcacccactgatctccaccccagaccttccctgattggtgtctcagcatttattttcctgtctcttccaccaaaagccagctgtagctttatctcgtaaaagttacccatcttctctactgtccccattctctctcctcccaccttcaccccagattcaagttttcctccttgtaggcatttcatctgtgtgtgttttctggattttctctctctcttcttatggccatttcaccttattactgattgggtagagggggaaaaggagaatgatgatgatagtttccttctgtctattgaccttttttataataaagtataacatgtttataaaggg

SEQ ID NO: 233452 - DNA, 2627 bp, Artificial Sequence
  derived and/or modified sequence
ccattggccaatgagaagaccacactatccccagcagagcctacagaaaatggagaaaggaccccatttaccaatgagaagaccacaccatcctcagcagagcctacagaacatggagaaaggaccccactggccaatgagatcaccacaccatcccgagcagagcctacagaacatggagaaaggatagccaatgagaaggccacaccatccccagcaaagcctacagaacatggagaaacgacagtcaatgaggacaccacaccatcctcagcagagcctacagaaaatggagaaaggaccccactggccaatgagaacaccacaacatccccaacagagtctacagaacatggagaaaggacagccaatgagaagaccacaccatccccagcagagcctacagaacatggagaaaggacaccatcagccaatgagaagaccataccatctccagcaaagcctacagaacacgaagaaatgaccccatcggccaatgagaacaccacaccatccccagtaaagcctacagaacatggagaaaagactacattggccaatgagaagatcacactatccccagaagggcctacagaacatggagcaaaaactacgtcggccaatgagaagatcacaccatccctagcaaagcctacagaacatggagaaaggaccacatcacccaatgacaagatcacctcatctgcagcagagtctacagaacatagagatagggctacatcagccaatgtgatcacaccagccccagcagagcctataaaacatgcaaaaaggaccacattggcccatgagaagatgacacaagtcacagaaaagtccacagaacacccagaaaagaccacgtcaaccacagagaaaaccacaagaaccccagaaaagcctacgctatactcagagaagaccatatgcaccaaagggaaaaacacaccagtcccagaaaagcctacagaaaacctggggaacaccacactgaccactgagaccataaaagccccagtaaagtccacagaaaacccagaaaaaacagcagcagtcacaaagactataaaaccttcagtcaaggtcacaggagacaaatctctcactactacctcttctcatctaaataaaactgaagttactcatcaggtgcccactggttctttcaccctcattacatctagaacgaagctgagttctatcacatcagaagccacaggaaacgagagccatccatacctcaataaagatggctcacagaaaggtatccacgctggacagatgggagagaatgattcattccctgcatgggccatagttattgtggtcctggtggctgtgattctcctcctggtgttccttggcctgatcttcttggtctcctatatgatgcggacacgccgcacactaacccagaacacccagtacaatgatgcagaggatgagggtggccccaattcctacccggtctacctgatggagcagcagaatcttggcatgggccagatcccttccccacggtgatcttggagtaggcgcccagccctggctcttccatgctctgcccctttcctggatgaggaaccagactcacaatttctatttccgggactacaggaagggcagagaatactgacggttaccagtattaacccttcatctgttcttgaaactggttggggaatgaggtgataagcaaggagggtgtaagtttaggggacaaagaagaaagaatgaataatacgagcagacattctctgtagaaggtaatggtctgagaatgaaaaggtgtttgatggacatgttgtgggggcaccaatgcagaacactgcactgagtcctaaaggaaggacaggagccttataggcaatgccccagactgacttgtgagtggggtttatggggaaagggagggactgagggcagagtctctgggtttcaggacagcattatgttatttccattcactattacttaagagtttgtgtgtaaataggctcatctctgagttctcaggacccttgcccccacccccatttttttaatgaaaaaaaaaacaaaaaaaacggatccaagaagaaaagagaatttatttccttctccactctctccatgccctggagaaaaaaaagtccagaagaaatcataaatatctctcatctacatggttgcttcctcttcctcccaaatcccttagttttcctaaatgtctacagtggacgccctgttggtttggcttgctgggttgtgggtggacacgcaaggaggggatttttatttggccagcagtctcacccactgatctccaccccagaccttccctgattggtgtctcagcatttattttcctgtctcttccaccaaaagccagctgtagctttatctcgtaaaagttacccatcttctctactgtccccattctctctcctcccaccttcaccccagattcaagttttcctccttgtaggcatttcatctgtgtgtgttttctggattttctctctctcttcctatggccatttcaccttattactgattgggtagagggggaaaaggagaatgatgatgatagtttccttctgtctattgaccttttttataataaagtataacatgtttataaaggg

SEQ ID NO: 233453 - DNA, 2658 bp, Artificial Sequence
  derived and/or modified sequence
atggcccagccggtccacagcctctgctccgcctttggcctccagtgctgcctcctcttccttctagcttcttggggggcaggtgctactacattccaagaatatcagaaaactggggaactctcaacatccgatcacatatttcccctcactccaggccttgtttatagtatcccttttgatcacattgttctgcattcaggacaaagacctccagagctccctaaatctacagaaatccatgagcaaaaacgccactgcaacaccacacgccattctaagccaactgacaagcctacaggcaactccaaaactatagaccacaaaagctctacagataatcatgaggctcctcccacttctgaagaaaactccagcaaccaagggaaagacccaatgatccggaaccagcgctctgttgatcctgctgactccactaccacacataaagaatccgctggaaaaaaacatataacgccagcacccaagagcaaaataaactgtcgtaagtccacaacaggcaaatcaacggtaacaagaaaatcagataaaactggaagacctttggaaaagtccatgagtactttggataagacaagtaccagctcacataagactacaacttccttccacaactcaggcaattcacagaccaagcaaaaaagcacatcttttccagaaaaaatcacagcagcctcaaaaacaacatacaagaccacaggaaccccagaagagtcagaaaaaactgaagattccagaacaacagttgcctcagacaagctcctgacaaaaactacaaaaaacatacaagagaccatatcagccaatgagctcacacaatctctagcagagcctacagaacatggaggaaggacagccaatgagaacaacacaccatccccagcagagcctacagaaaatagagaaaggacagccaatgagaacaagaagaccatatgcaccaaagggaaaaacacaccagtcccagaaaagcctacagaaaacctggggaacaccacactgaccactgagaccataaaagccccagtaaagtccacagaaaacccagaaaaaacagcagcagtcacaaagactataaaaccttcagtcaaggtcacaggagacaaatctctcactactacctcttctcatctaaataaaactgaagttactcatcaggtgcccactggttctttcaccctcattacatctagaacgaagctgagttctatcacatcagaagccacaggaaacgagagccatccatacctcaataaagatggctcacagaaaggtatccacgctggacagatgggagagaatgattcattccctgcatgggccatagttattgtggtcctggtggctgtgattctcctcctggtgttccttggcctgatcttcttggtctcctatatgatgcggacacgccgcacactaacccagaacacccagtacaatgatgcagaggatgagggtggccccaattcctacccggtctacctgatggagcagcagaatcttggcatgggccagatcccttccccacggtgatcttggagtaggcgcccagccctggctcttccatgctctgcccctttcctggatgaggaaccggactcacaatttctatttccgggactacaggaagggcagagaatactgacggttaccagtattaacccttcatctgttcttgaaactggttggggaatgaggtgataagcaaggagggtgtaagtttaggggacaaagaagaaagaatgaataatacgagcagacattctctgtagaaggtaatggtctgagaatgaaaaggtgtttgatggacatgttgtgggggcaccaatgcagaacactgcactgagtcctaaaggaaggacaggagccttataggcaatgccccagactgacttgtgagtggggtttatggggaaagggagggactgagggcagagtctctgggtttcaggacagcattatgttatttccattcactattacttaagagtttgtgtgtaaacaggctcatctctgagttctcaggacccttgcccccacccccatttttttaatgaaaaaaaaaaacaaaaaaaacggatccaagaagaaaagagaatttatttccttctccactctctccatgccctggagaaaaaaaagtccagaagaaatcataaatatctctcatctacatggttgcttcctcttcctcccaaatcccttagttttcctaaatgtctacagtggacgccctgttggtttggcttgctgggttgtgggtggacacgcaaggaggggatttttatttggccagcagtctcacccactgatctccaccccagaccttccctgattggtgtctcagcatttattttcctgtctcttccaccaaaagccagctgtagctttatctcgtaaaagttacccatcttctctactgtccccattctctctcctcccaccttcaccccagattcaagttttcctccttgtaggcatttcatctgtgtgtgttttctggattttctctctctcttcttatggccatttcaccttattactgattgggtagagggggaaaaggagaatgatgatgatagtttccttctgtctattgaccttttttataataaagtataacatgtttataaaggg

SEQ ID NO: 233454 - DNA, 1689 bp, Artificial Sequence
  derived and/or modified sequence
atggcccagccggtccacagcctctgctccgcctttggcctccagtgctgcctcctcttccttctagcttcttggggggcaggtgctactacattccaagaatatcagaaaactggggaactctcaacatccgatcacatatttcccctcactccaggccttgtttatagtatcccttttgatcacattgttctgcattcaggacaaagacctccagagctccctaaatctacagaaatccatgagcaaaaacgccactgcaacaccacacgccattctaagccaactgacaagcctacaggcaactccaaaactatagaccacaaaagctctacagataatcatgaggctcctcccacttctgaagaaaactccagcaaccaagggaaagacccaatgatccggaaccagcgctctgttgatcctgctgactccactaccacacataaagaatccgctggaaaaaaacatataacgccagcacccaagagcaaaataaactgtcgtaagtccacaacaggcaaatcaacggtaacaagaaaatcagataaaactggaagacctttggaaaagtccatgagtactttggataagacaagtaccagctcacataagactacaacttccttccacaactcaggcaattcacagaccaagcaaaaaagcacatcttttccagaaaaaatcacagcagcctcaaaaacaacatacaagaccacaggaaccccagaagagtcagaaaaaactgaagattccagaacaacagttgcctcagacaagctcctgacaaaaactacaaaaaacatacaagagaccatatcagccaatgagctcacacaatctctagcagagcctacagaacatggaggaaggacagccaatgagaacaacacaccatccccagcagagcctacagaaaatagagaaaggacagccaatgagaacaagaagaccatatgcaccaaagggaaaaacacaccagtcccagaaaagcctacagaaaacctggggaacaccacactgaccactgagaccataaaagccccagtaaagtccacagaaaacccagaaaaaacagcagcagtcacaaagactataaaaccttcagtcaaggtcacaggagacaaatctctcactactacctcttctcatctaaataaaactgaagttactcatcaggtgcccactggttctttcaccctcattacatctagaacgaagctgagttctatcacatcagaagccacaggaaacgagagccatccatacctcaataaagatggctcacagaaaggtatccacgctggacagatgggagagaatgattcattccctgcatgggccatagttattgtggtcctggtggctgtgattctcctcctggtgttccttggcctgatcttcttggtctcctatatgatgcggacacgccgcacactaacccagaacacccagtacaatgatgcagaggatgagggtggccccaattcctacccggtctacctgatggagcagcagaatcttggcatgggccagatcccttccccacggtgatcttggagtaggcgcccagccctggctcttccatgctctgcccctttcctggatgaggaaccagactcacaatttctatttccgggactacaggaagggcagagaatactgacggttaccagtattaacccttca

SEQ ID NO: 233455 - DNA, 1689 bp, Artificial Sequence
  derived and/or modified sequence
atggcccagccggtccacagcctctgctccgcctttggcctccagtgctgcctcctcttccttctagcttcttggggggcaggtgctactacattccaagaatatcagaaaactggggaactctcaacatccgatcacatatttcccctcactccaggccttgtttatagtatcccttttgatcacattgttctgcattcaggacaaagacctccagagctccctaaatctacagaaatccatgagcaaaaacgccactgcaacaccacacgccattctaagccaactgacaagcctacaggcaactccaaaactatagaccacaaaagctctacagataatcatgaggctcctcccacttctgaagaaaactccagcaaccaagggaaagacccaatgatccggaaccagcgctctgttgatcctgctgactccactaccacacataaagaatccgctggaaaaaaacatataacaccagcacccaagagcaaaataaactgtcgtaagtccacaacaggcaaatcaacggtaacaagaaaatcagataaaactggaagacctttggaaaagtccatgagtactttggataagacaagtaccagctcacataagactacaacttccttccacaactcaggcaattcacagaccaagcaaaaaagcacatcttttccagaaaaaatcacagcagcctcaaaaacaacatacaagaccacaggaaccccagaagagtcagaaaaaactgaagattccagaacaacagttgcctcagacaagctcctgacaaaaactacaaaaaacatacaagagaccatatcagccaatgagctcacacaatctctagcagagcctacagaacatggaggaaggacagccaatgagaacaacacaccatccccagcagagcctacagaaaatagagaaaggacagccaatgagaacaagaagaccatatgcaccaaagggaaaaacacaccagtcccagaaaagcctacagaaaacctggggaacaccacactgaccactgagaccataaaagccccagtaaagtccacagaaaacccagaaaaaacagcagcagtcacaaagactataaaaccttcagtcaaggtcacaggagacaaatctctcactactacctcttctcatctaaataaaactgaagttactcatcaggtgcccactggttctttcaccctcattacatctagaacgaagctgagttctatcacatcagaagccacaggaaacgagagccatccatacctcaataaagatggctcacagaaaggtatccacgctggacagatgggagagaatgattcattccctgcatgggccatagttattgtggtcctggtggctgtgattctcctcctggtgttccttggcctgatcttcttggtctcctatatgatgcggacacgccgcacactaacccagaacacccagtacaatgatgcagaggatgagggtggccccaattcctacccggtctacctgatggagcagcagaatcttggcatgggccagatcccttccccacggtgatcttggagtaggcgcccagccctggctcttccatgctctgcccctttcctggatgaggaaccggactcacaatttctatttccgggactacaggaagggcagagaatactgacggttaccagtattaacccttca

SEQ ID NO: 233456 - DNA, 4317 bp, Artificial Sequence
  derived and/or modified sequence
atggcccagccggtccacagcctctgctccgcctttggcctccagtgctgcctcctcttccttctagcttcttggggggcaggtgctactacattccaagaatatcagaaaactggggaactctcaacatccgatcacatatttcccctcactccaggccttgtttatagtatcccttttgatcacattgttctgcattcaggacaaagacctccagagctccctaaatctacagaaatccatgagcaaaaacgccactgcaacaccacacgccattctaagccaactgacaagcctacaggcaactccaaaactatagaccacaaaagctctacagataatcatgaggctcctcccacttctgaagaaaactccagcaaccaagggaaagacccaatgatccggaaccagcgctctgttgatcctgctgactccactaccacacataaagaatccgctggaaaaaaacatataacgccagcacccaagagcaaaataaactgtcgtaagtccacaacaggcaaatcaacggtaacaagaaaatcagataaaactggaagacctttggaaaagtccatgagtactttggataagacaagtaccagctcacataagactacaacttccttccacaactcaggcaattcacagaccaagcaaaaaagcacatcttttccagaaaaaatcacagcagcctcaaaaacaacatacaagaccacaggaaccccagaagagtcagaaaaaactgaagattccagaacaacagttgcctcagacaagctcctgacaaaaactacaaaaaacatacaagagaccatatcagccaatgagctcacacaatctctagcagagcctacagaacatggaggaaggacagccaatgagaacaacacaccatccccagcagagcctacagaaaatagagaaaggacagccaatgagaacaccacactatccccagcagagcctacagaaaatagagaaaggacagccaatgagaacaccgcaccattcccagcagggcctacagaaaatagagaaatgacagccaatgagaataccacactattcccagcagagcctacagaacatggagaaaggacagccaatgagaacaccacaccatccccagcagagcctacagaacatggagaaaggacagccaatgagaacactacaccatccccagcagagcctacagaacatggagaaaggaccccatttgccaatgacaaaaccacatcatcctcagcagagtctacagaacatggagaaaggaccccactggccaacgagaacaccacaccatccccagcagagcctacagaaaatagagaaaggacagccaatgagaacaccacaccatccccagcagggcctacagaaaacagagaaacgacagccaacgagaagaccacactatccccagtagagcctacagaaaatagagaaacaacagccaatgagaagaccacaccatccccagcagagcctacagaaaatggacaaaggaccccatttgccaatgagaaaaccacatcatcctcagcagagcctacagaacacggagaaaggaccccactggccaatgagaacaccacaccatccccagcagagcctacagaaaatagagaaaggacagccaatgagaagaccacaccatccccagcagagcctacagaaaatggagacaggactcctttggccaatgagaagaccacgccatctctagcagagcctacagaaaatggacaaaggaccccatttgccaatgagaagaccacatcatcctcagcagagcctacagaacacgaagaaaggactccactggccaatgagaacaccacaccatccccggcagagcctacagaaaatagagaaaggacagccaatgagaacaccacaccatccccagcagggcctacagaaaatagagaaatgacagccaacgagaagaccacactattcccagcagagcctacagaaaatagagaaaggacagccaatgagaagaccacatcatccccagcagagcctacagaaaatggacaaaggaccccatttgccaatgagaaaaccacatcatcctcagcagagcctacagaacacggagaaaggaccccactggccaatgagaacaccacactatccccagcagagcctacagaaaatagagaaaggacagccaatgagaagaccacaccattcccagcagagcctacagaaaatagagaaaggacagccaatgagaacaccacaccatccccagcacagcctacagaaaatggagacaggactccattggccaatgagaagaccacaccatctctagcagagcctacagaaaatggaaaaaggaccccatttgccaatgagaagaccacatcatcctcagcagagcctacagaacacgcagaaaggactccactggccaatgagaacaccacatcatccccagcagagcctacagaaaatagagaaaggacagccaatgagaagaccacacaattcccagcagagcctacagaaaatagagaaagcacagccaatgagaagaccacaccattcccagcagagcctacagaaaatagagaatggacagccaatgagaacaccacactatccccagcagagcctacagaacatgaagaaatgaccccattggccaatgagaagaccacactatccccagcagagcctacagaaaatggagaaaggaccccatttaccaatgagaagaccacaccatcctcagcagagcctacagaacatggagaaaggaccccactggccaatgagatcaccacaccatcccgagcagagcctacagaacatggagaaaggatagccaatgagaaggccacaccatccccagcaaagcctacagaacatggagaaacgacagtcaatgaggacaccacaccatcctcagcagagcctacagaaaatggagaaaggaccccactggccaatgagaacaccacaacatccccaacagagtctacagaacatggagaaaggacagccaatgagaagaccacaccatccccagcagagcctacagaacatggagaaaggacaccatcagccaatgagaagaccataccatctccagcaaagcctacagaacacgaagaaatgaccccatcggccaatgagaacaccacaccatccccagtaaagcctacagaacatggagaaaagactacattggccaatgagaagatcacactatccccagaagggcctacagaacatggagcaaaaactacgtcggccaatgagaagatcacaccatccctagcaaagcctacagaacatggagaaaggaccacatcacccaatgacaagatcacctcatctgcagcagagtctacagaacatagagatagggctacatcagccaatgtgatcacaccagccccagcagagcctataaaacatgcaaaaaggaccacattggcccatgagaagatgacacaagtcacagaaaagtccacagaacacccagaaaagaccacgtcaaccacagagaaaaccacaagaaccccagaaaagcctacgctatactcagagaagaccatatgcaccaaagggaaaaacacaccagtcccagaaaagcctacagaaaacctggggaacaccacactgaccactgagaccataaaagccccagtaaagtccacagaaaacccagaaaaaacagcagcagtcacaaagactataaaaccttcagtcaaggtcacaggagacaaatctctcactactacctcttctcatctaaataaaactgaagttactcatcaggtgcccactggttctttcaccctcattacatctagaacgaagctgagttctatcacatcagaagccacaggaaacgagagccatccatacctcaataaagatggctcacagaaaggtatccacgctggacagatgggagagaatgattcattccctgcatgggccatagttattgtggtcctggtggctgtgattctcctcctggtgttccttggcctgatcttcttggtctcctatatgatgcggacacgccgcacactaacccagaacacccagtacaatgatgcagaggatgagggtggccccaattcctacccggtctacctgatggagcagcagaatcttggcatgggccagatcccttccccacggtgatcttggagtaggcgcccagccctggctcttccatgctctgcccctttcctggatgaggaaccagactcacaatttctatttccgggactacaggaagggcagagaatactgacggttaccagtattaacccttca

SEQ ID NO: 233457 - DNA, 2695 bp, Artificial Sequence
  derived and/or modified sequence
ggtccccaagcagccacccagctccgacatggcccagccggtccacagcctctgctccgcctttggcctccagtgctgcctcctcttccttctagcttcttggggggcaggtgctactacattccaagaatatcagaaaactggggaactctcaacatccgatcacatatttcccctcactccaggccttgtttatagtatcccttttgatcacattgttctgcattcaggacaaagacctccagagctccctaaatctacagaaatccatgagcaaaaacgccactgcaacaccacacgccattctaagccaactgacaagcctacaggcaactccaaaactatagaccacaaaagctctacagataatcatgaggctcctcccacttctgaagaaaactccagcaaccaagggaaagacccaatgatccggaaccagcgctctgttgatcctgctgactccactaccacacataaagaatccgctggaaaaaaacatataacgccagcacccaagagcaaaataaactgtcgtaagtccacaacaggcaaatcaacggtaacaagaaaatcagataaaactggaagacctttggaaaagtccatgagtactttggataagacaagtaccagctcacataagactacaacttccttccacaactcaggcaattcacagaccaagcaaaaaagcacatcttttccagaaaaaatcacagcagcctcaaaaacaacatacaagaccacaggaaccccagaagagtcagaaaaaactgaagattccagaacaacagttgcctcagacaagctcctgacaaaaactacaaaaaacatacaagagaccatatcagccaatgagctcacacaatctctagcagagcctacagaacatggaggaaggacagccaatgagaacaacacaccatccccagcagagcctacagaaaatagagaaaggacagccaatgagaacaccacactatccccagcagagcctacagaaaatagagaaaggacagccaatgagaacaccgcaccattcccagcagggcctacagaaaatagagaaatgacagccaatgagaataccacactattcccagcagagcctacagaacatggagaaaggacagccaatgagaacaccacaccatccccagcagagcctacagaacatggagaaaggacagccaatgagaacactacaccatccccagcagagcctacagaacatggagaaaggaccccatttgccaatgacaaaaccacatcatcctcagcagagtctacagaacatggagaaaggaccccactggccaacgagaacaccacaccatccccagcagagcctacagaaaatagagaaaggacagccaatgagaacaccacaccatccccagcagggcctacagaaaacagagaaacgacagccaacgagaagaccacactatccccagtagagcctacagaaaatagagaaacaacagccaatgagaagaccacaccatccccagcagagcctacagaaaatggacaaaggaccccatttgccaatgagaaaaccacatcatcctcagcagagcctacagaacacggagaaaggaccccactggccaatgagaacaccacaccatccccagcagagcctacagaaaatagagaaaggacagccaatgagaagaccacaccatccccagcagagcctacagaaaatggagacaggactcctttggccaatgagaagaccacgccatctctagcagagcctacagaaaatggacaaaggaccccatttgccaatgagaagaccacatcatcctcagcagagcctacagaacacgaagaaaggactccactggccaatgagaacaccacaccatccccggcagagcctacagaaaatagagaaaggacagccaatgagaacaccacaccatccccagcagggcctacagaaaatagagaaatgacagccaacgagaagaccacactattcccagcagagcctacagaaaatagagaaaggacagccaatgagaagaccacatcatccccagcagagcctacagaaaatggacaaaggaccccatttgccaatgagaaaaccacatcatcctcagcagagcctacagaacacggagaaaggaccccactggccaatgagaacaccacactatccccagcagggcctacagaaaatagagaaaggacagccaatgagaagaccacaccattcccagcagagcctacagaaaatagagaaaggacagccaatgagaacaccacaccatccccagcacagcctacagaaaatggagacaggactccattggccaatgagaagaccacaccatctctagcagagcctacagaaaatggaaaaaggaccccatttgccaatgagaagaccacatcatcctcagcagagcctacagaacacgcagaaaggactccactggccaatgagaacaccacatcatccccagcagagcctacagaaaatagagaaaggacagccaatgagaagaccacacaattcccagcagagcctacagaaaatagagaaagcacagccaatgagaagaccacaccattcccagcagagcctacagaaaatagagaatggacagccaatgagaacaccacactatccccagcagagcctacagaacatgaagaaatgaccccattggcc

SEQ ID NO: 233458 - protein, 452 aa, Artificial Sequence
  derived and/or modified sequence
MPWGKNSSPHWGHHLGCLPSAPACRIWRPHSRPAWEPPRPSPLLCQDMALQNALYTGDLARLQELFPPHSTADLLLESRAAEPRWSSHQRGLWSLTYEEELTTPLHVAASRGHTEVLRLLLRRRARPDSAPGGRTALHEACAAGHTACVHVLLVAGADPNIADQDGKRPLHLCRGPGTLECAELLLRFGARVDGRSEEEEETPLHVAARLGHVELADLLLRRGACPDARNAEGWTPLLAACDVRCQSITDAEATTARCLQLCSLLLSAGADADAADQDKQRPLHLACRRGHAAVVELLLSCGVSANTMDYGGHTPLHCALQGPAAALAQSPEHVVRALLNHGAVRVWPGALPKVLERWSTCPRTIEVLMNTYSVVQLPEEAVGLVTPETLQKHQRFYSSLFALVRQPRSLQHLSRCALRSHLEGSLPQALPRLPLPPRLLRYLQLDFEGVLY

SEQ ID NO: 233459 - DNA, 1359 bp, Artificial Sequence
  derived and/or modified sequence
atgccctggggcaagaacagcagcccccactggggccaccacctgggctgcctgcccagcgcccccgcctgcagaatctggagaccccacagcagacccgcctgggagccccccagacccagccccctgctgtgccaggacatggccctgcagaacgccctgtacaccggcgacctggccagactgcaggagctgttccccccccacagcaccgccgacctgctgctggagagcagagccgccgagcccagatggagcagccaccagagaggcctgtggagcctgacctacgaggaggagctgaccacccccctgcacgtggccgccagcagaggccacaccgaggtgctgagactgctgctgagaagaagagccagacccgacagcgcccccggcggcagaaccgccctgcacgaggcctgcgccgccggccacaccgcctgcgtgcacgtgctgctggtggccggcgccgaccccaacatcgccgaccaggacggcaagagacccctgcacctgtgcagaggccccggcaccctggagtgcgccgagctgctgctgagattcggcgccagagtggacggcagaagcgaggaggaggaggagacccccctgcacgtggccgccagactgggccacgtggagctggccgacctgctgctgagaagaggcgcctgccccgacgccagaaacgccgagggctggacccccctgctggccgcctgcgacgtgagatgccagagcatcaccgacgccgaggccaccaccgccagatgcctgcagctgtgcagcctgctgctgagcgccggcgccgacgccgacgccgccgaccaggacaagcagagacccctgcacctggcctgcagaagaggccacgccgccgtggtggagctgctgctgagctgcggcgtgagcgccaacaccatggactacggcggccacacccccctgcactgcgccctgcagggccccgccgccgccctggcccagagccccgagcacgtggtgagagccctgctgaaccacggcgccgtgagagtgtggcccggcgccctgcccaaggtgctggagagatggagcacctgccccagaaccatcgaggtgctgatgaacacctacagcgtggtgcagctgcccgaggaggccgtgggcctggtgacccccgagaccctgcagaagcaccagagattctacagcagcctgttcgccctggtgagacagcccagaagcctgcagcacctgagcagatgcgccctgagaagccacctggagggcagcctgccccaggccctgcccagactgcccctgccccccagactgctgagatacctgcagctggacttcgagggcgtgctgtactag

SEQ ID NO: 233460 - DNA, 1359 bp, Artificial Sequence
  derived and/or modified sequence
atgccttggggaaaaaacagtagtccacattggggccatcatctcgggtgcctcccttccgcacccgcctgcagaatctggagaccgcattcccggcctgcatgggagcccccaaggcccagccccctgctttgccaagatatggccctgcagaatgctttgtacactggagatctcgcccggctgcaggagcttttccccccacattccaccgcggatcttctgctagagagccgggccgccgagcctcgatggagcagccaccagaggggcctgtggagcttaacttatgaggaggagttgaccaccccgctacacgttgccgcttccagaggtcacaccgaagtactgcgactactcttgaggagacgggcccgacctgactccgcaccaggcgggcgaacggctctgcacgaggcttgcgccgccgggcacaccgcctgcgtccacgtgctgttggtcgctggggctgatccaaatattgccgatcaggacggcaagagacctcttcatctgtgtaggggccctggtacactcgagtgcgctgaactgcttttgcgcttcggcgcccgggttgatggacgcagtgaagaggaggaggaaaccccgctccacgtcgcagctagattgggccatgtcgaactggcagacttgctccttcgaagaggagcatgtcctgacgcgcgcaacgccgaaggttggactcctttgctggctgcctgcgatgtcagatgtcagtcaatcactgatgcagaagccactaccgcccgttgcctgcagctgtgctcactgttactgtccgcgggcgccgatgcagacgccgccgaccaggacaaacagagacctctgcatctggcatgccgccggggacacgccgccgttgttgagttgttgctgagctgtggggtctcagctaacaccatggattacggcggtcacacaccacttcattgtgccctgcagggacctgctgccgcacttgcacagtcacccgagcatgtcgtcagagccctcctcaaccacggcgcggtgcgagtctggcctggggcgttaccaaaagtcttggagagatggtcaacttgtcctaggaccatcgaggttctgatgaacacatactcagtggtccaattgccagaggaggctgtgggactggtgacaccagaaacattgcagaagcaccagcggttctatagcagtctgtttgctctggttcgacagcctcggtccctccagcatctgtctagatgcgctctccgttcccacctggaagggagcctccctcaggctctgcctcgattacctctgcctcctcggctactacgatacttacagctcgactttgagggcgtgctctactag

SEQ ID NO: 233461 - DNA, 1738 bp, Artificial Sequence
  derived and/or modified sequence
cctgcgcctcccatgctgggccccacccagctcgggcccagcacccacctgcccagtccaccagcaacatcgctgggagtcgtgctgctttggctctcccagaacaagccatgccctggggaaagaactcctctccccactggggacaccatctggggtgccttccctccgccccggcctgccggatctggaggccccactcccgcccagcctgggagccccctcggccatcaccactgctctgccaagacatggccctgcagaatgccctctacaccggggacctggcaaggttgcaggagctgttccccccgcacagcacagccgacctgctgctggagagccgggccgcagagcctcgctggagcagccaccagaggggactctggtctctgacatacgaagaggagctgaccaccccactgcatgtggcagccagccgtggccacacggaagtcctgcggctgctgctgaggcggcgagcaaggccagacagtgcccctgggggccgcaccgccctgcacgaggcctgtgctgcaggccacactgcctgtgttcatgtgctgctggtggcaggagccgaccccaacatcgctgaccaggatgggaaacgccccctgcatctctgccgggggcctggcacccttgagtgtgcggagctgctcctcaggtttggagcgagagtggatggtcggtccgaggaagaagaggagacccctttgcatgtggccgcccggcttggccatgtggagctggcagatctgcttctaagacggggggcatgtcctgatgcccgcaatgccgaaggctggaccccactgctggctgcctgtgacgtccgctgccagtccatcaccgatgccgaggccaccaccgcccgctgcctgcagctgtgcagcttgctgctttcagctggagcagacgctgatgctgcggaccaggacaagcagcgacccctgcacctggcctgccgccgtggccatgcagctgtcgtggagctgctcctgtcctgtggtgtcagcgccaacaccatggactatgggggacacacgcccctgcactgtgctctgcagggcccagctgcagccctggcccagagccccgagcacgtggttcgggctctgctcaaccatggcgccgtccgtgtctggccaggggccctccccaaggtgctggagcgctggagcacgtgccctcggaccatcgaggtcctgatgaacacctacagtgttgtgcagcttcccgaggaggccgtcggcctggtgactcctgaaactctgcagaaacatcagcgtttctactcctccctcttcgccttggtgaggcagcccaggtcgctgcagcatttgagccgctgtgcgctccgctcccacctggagggcagcctgccccaagcgctgccccgcctccccctgccaccgcgcctgctccgctacctgcagctggattttgagggcgtgctctactagatgtccatggccttttgagagggcctgaaagcagatgccccagcctgcagagggcgcgcctctgcactaactcaggccaggtagccctggcagcaggaggcccagctccgcaggcaggtgtggatgctgcaattcccaatgcagagaagcggaccgacagcggcagccgggtgatgtctgatgaagacacactcctactggggctctcctgaggcccccttctagcctgtgcaaaccctgtatgtgcattaaaaatctccaggtctgtg

SEQ ID NO: 233462 - DNA, 1359 bp, Artificial Sequence
  derived and/or modified sequence
atgccctggggcaagaacagcagcccccactggggccaccacctgggctgcctgcccagcgccccagcctgccgcatctggaggccccacagcaggcctgcctgggagcccccccggcccagccccctgctgtgccaggacatggccctgcagaatgccctgtacaccggggacctggcccggctgcaggagctgtttcctccccacagcacagctgacctgctgctggagagcagagctgctgagccccgctggagcagccaccagaggggcctgtggagcctgacctatgaggaggagctgaccacccccctgcacgtggccgccagccggggccacacagaggtgctgcggctgctgctgcggcggcgggcccggccagattctgcccctgggggccgcacagccctgcacgaggcctgtgccgccggccacacagcctgtgtgcacgtgctgctggtggccggggctgaccccaacattgctgaccaggacggcaagaggcccctgcacctgtgccggggccctggcaccctggagtgtgccgagctgctgctgcgctttggagcccgggtggatggccgctctgaggaggaggaggagacccccctgcacgtggccgcccggctgggccacgtggagctggccgacctgctgctgcggcggggggcctgcccagatgccagaaatgctgagggctggacccccctgctggccgcctgtgatgtgcgctgccagagcatcacagatgctgaggccaccacagcccgctgcctgcagctgtgcagcctgctgctgtctgctggagcagatgctgatgctgctgaccaggacaagcagaggcccctgcacctggcctgccggcggggccacgccgctgtggtggagctgctgctgagctgtggggtgtctgccaacaccatggactatggaggccacacccccctgcactgtgccctgcagggccctgctgctgccctggcccagagccctgagcacgtggtgcgggccctgctgaaccacggggctgtgcgggtgtggccaggggccctgcccaaggtgctggagcgctggagcacctgccccaggaccatcgaggtgctgatgaacacctacagcgtggtgcagctgcctgaggaggccgtgggcctggtgaccccagagaccctgcagaagcaccagcgcttctacagcagcctgtttgccctggtgcggcagcccaggagcctgcagcacctgagccgctgtgccctgcggagccacctggagggcagcctgccccaggccctgccccggctgcccctgcccccccggctgctgcgctacctgcagctggactttgaaggagtgctgtactag

SEQ ID NO: 233463 - DNA, 1359 bp, Artificial Sequence
  derived and/or modified sequence
atgccctggggcaagaacagcagcccccactggggccaccacctgggctgtctcccttccgcgcccgcttgccgaatctggaggcctcactctaggcctgcatgggaaccgccccgcccttcacccctgctgtgccaagacatggcactgcagaacgctctgtataccggcgacttagctcggctgcaggagctgtttcccccacactccacagccgatctcctcctggagagcagagcagcagagccaaggtggagctcacaccagcgcggtttgtggtctctaacatacgaggaggaactgacgaccccactgcacgtagcggcttcgaggggccacactgaagtcctacggctgctgttgcgaagaagagctcgcccagattctgctcctggcggacgcacggcgctgcatgaggcgtgcgccgcaggacacaccgcgtgtgtgcacgtgttgctggtggctggggcggaccctaatattgctgaccaggatggaaagcgccctctgcacctgtgccggggcccaggcactctagagtgcgcggaattattgttacgcttcggcgcgcgtgttgatggcagatctgaggaagaggaagagacacctctccacgtggccgccagactgggccatgtcgagctggcagatctcctgttaagaaggggcgcatgccctgacgcacggaacgcagagggctggacccctttactagcggcctgcgacgttcgctgtcagtctatcaccgacgctgaagcaacaaccgcacggtgcctgcaactctgctctcttcttctgagtgcgggcgcagacgccgacgcggccgatcaggataagcagcgacctctgcatctggcctgtagaagaggacatgccgccgtggtggaactgctactttcctgcggggtctctgcaaataccatggattacgggggacatacacccctgcactgtgcattgcaaggcccagccgctgctctggctcagtcgcctgagcatgtcgtccgggctctgctcaaccatggcgctgttcgcgtctggcccggagctttgcctaaagttctggagagatggagtacatgcccgcgcacaatagaggttctcatgaatacatacagtgtcgtacagctgcccgaagaagcagtcggtctggtaacccccgagacgttgcagaaacaccaaagattttactctagtctgtttgcgctggttcgccaacctaggtcactccaacatctgtcaaggtgcgccctgcggtcccacctggaaggctcactgccgcaggcgttgcccaggcttccgctgcctcctagattactcaggtatttgcagctcgactttgagggggtcctgtattag

SEQ ID NO: 233464 - DNA, 1359 bp, Artificial Sequence
  derived and/or modified sequence
atgccctggggaaaaaattcctccccacactggggccaccaccttggctgtctcccctctgctccagcatgtcgtatttggcgccctcacagtcgtcctgcatgggagcctcctcgacctagcccgctcctgtgccaagatatggctctccagaacgcgctgtacaccggagacctcgcccgattgcaggaactcttccccccacattcaacagccgacctcttgctggaatccagagcggctgagccaaggtggagcagccatcagagaggcctgtggagtttaacctatgaggaagaactaacaaccccactccacgtcgcggcttcccgaggacacacagaagtgctaagactcctcttgcggcgaagagcaagacctgactccgctcctggtgggagaaccgccctacacgaagcatgcgcagccggacacaccgcgtgcgtgcatgtgctactggtagcaggcgctgatcctaacattgcagatcaggacggcaagcggcctttacacctgtgtcggggaccaggtaccctggagtgtgcggagctgctcctgagatttggagccagggtggatggacgatctgaggaggaggaagaaaccccgctgcatgtagcagccagactgggacatgtggagttggccgacctgctactaagacgaggggcatgccccgatgccagaaacgctgagggctggacgcctctccttgccgcatgcgacgtgcgctgccagtccatcaccgacgcagaagccactactgccagatgtcttcagctctgctcactcttactgtcagcaggcgcagacgccgatgctgcagatcaggataaacagcgccctttgcacttggcttgccgcaggggtcacgcagcagtggttgagctcctgctgagttgtggagtgagcgctaatactatggactacggcggacacactcctttgcactgcgcattacaagggccagcagcggcactcgcgcagtcaccagaacacgttgtgagagctctgctgaaccatggagccgtgagggtatggccaggcgctttgccaaaggtactggagagatggagtacttgcccacggaccatcgaggtcctgatgaacacctattccgtcgtgcagttgccagaggaagccgtgggtctggtgacccccgaaaccctgcagaaacaccagaggttctattcatctttatttgccttggttcgacagccacggtctttgcagcatctgagcaggtgtgccctgagatcccacctggagggctcactcccccaagccctcccacgcttgcctctgccccctcgcctgcttcgatatttgcagctggacttcgagggggtgctgtattag

SEQ ID NO: 233465 - protein, 953 aa, Artificial Sequence
  derived and/or modified sequence
MGRAAATAGGGGGARRWLPWLGLCFWAAGTAAARGTDNGEALPESIPSAPGTLPHFIEEPDDAYIIKSNPIALRCKARPAMQIFFKCNGEWVHQNEHVSEETLDESSGLKVREVFINVTRQQVEDFHGPEDYWCQCVAWSHLGTSKSRKASVRIAYLRKNFEQDPQGREVPIEGMIVLHCRPPEGVPAAEVEWLKNEEPIDSEQDENIDTRADHNLIIRQARLSDSGNYTCMAANIVAKRRSLSATVVVYVNGGWSSWTEWSACNVRCGRGWQKRSRTCTNPAPLNGGAFCEGMSVQKITCTSLCPVDGSWEVWSEWSVCSPECEHLRIRECTAPPPRNGGKFCEGLSQESENCTDGLCILDKKPLHEIKPQSIENASDIALYSGLGAAVVAVAVLVIGVTLYRRSQSDYGVDVIDSSALTGGFQTFNFKTVRQGNSLLLNSAMQPDLTVSRTYSGPICLQDPLDKELMTESSLFNPLSDIKVKVQSSFMVSLGVSERAEYHGKNHSRTFPHGNNHSFSTMHPRNKMPYIQNLSSLPTRTELRTTGVFGHLGGRLVMPNTGVSLLIPHGAIPEENSWEIYMSINQGEPSLQSDGSEVLLSPEVTCGPPDMIVTTPFALTIPHCADVSSEHWNIHLKKRTQQGKWEEVMSVEDESTSCYCLLDPFACHVLLDSFGTYALTGEPITDCAVKQLKVAVFGCMSCNSLDYNLRVYCVDNTPCAFQEVVSDERHQGGQLLEEPKLLHFKGNTFSLQISVLDIPPFLWRIKPFTACQEVPFSRVWCSNRQPLHCAFSLERYTPTTTQLSCKICIRQLKGHEQILQVQTSILESERETITFFAQEDSTFPAQTGPKAFKIPYSIRQRICATFDTPNAKGKDWQMLAQKNSINRNLSYFATQSSPSAVILNLWEARHQHDGDLDSLACALEEIGRTHTKLSNISESQLDEADFNYSRQNGL

SEQ ID NO: 233466 - protein, 948 aa, Artificial Sequence
  derived and/or modified sequence
MILVLVKALSDVCAGTSGFLLDFSSQTSPGTDNGEALPESIPSAPGTLPHFIEEPDDAYIIKSNPIALRCKARPAMQIFFKCNGEWVHQNEHVSEETLDESSGLKVREVFINVTRQQVEDFHGPEDYWCQCVAWSHLGTSKSRKASVRIAYLRKNFEQDPQGREVPIEGMIVLHCRPPEGVPAAEVEWLKNEEPIDSEQDENIDTRADHNLIIRQARLSDSGNYTCMAANIVAKRRSLSATVVVYVNGGWSSWTEWSACNVRCGRGWQKRSRTCTNPAPLNGGAFCEGMSVQKITCTSLCPVDGSWEVWSEWSVCSPECEHLRIRECTAPPPRNGGKFCEGLSQESENCTDGLCILDKKPLHEIKPQSIENASDIALYSGLGAAVVAVAVLVIGVTLYRRSQSDYGVDVIDSSALTGGFQTFNFKTVRQGNSLLLNSAMQPDLTVSRTYSGPICLQDPLDKELMTESSLFNPLSDIKVKVQSSFMVSLGVSERAEYHGKNHSRTFPHGNNHSFSTMHPRNKMPYIQNLSSLPTRTELRTTGVFGHLGGRLVMPNTGVSLLIPHGAIPEENSWEIYMSINQGEPSLQSDGSEVLLSPEVTCGPPDMIVTTPFALTIPHCADVSSEHWNIHLKKRTQQGKWEEVMSVEDESTSCYCLLDPFACHVLLDSFGTYALTGEPITDCAVKQLKVAVFGCMSCNSLDYNLRVYCVDNTPCAFQEVVSDERHQGGQLLEEPKLLHFKGNTFSLQISVLDIPPFLWRIKPFTACQEVPFSRVWCSNRQPLHCAFSLERYTPTTTQLSCKICIRQLKGHEQILQVQTSILESERETITFFAQEDSTFPAQTGPKAFKIPYSIRQRICATFDTPNAKGKDWQMLAQKNSINRNLSYFATQSSPSAVILNLWEARHQHDGDLDSLACALEEIGRTHTKLSNISESQLDEADFNYSRQNGL

SEQ ID NO: 233467 - DNA, 2862 bp, Artificial Sequence
  derived and/or modified sequence
atgggcagagccgccgccaccgccggcggcggcggcggcgccagaagatggctgccctggctgggcctgtgcttctgggccgccggcaccgccgccgccagaggcaccgacaacggcgaggccctgcccgagagcatccccagcgcccccggcaccctgccccacttcatcgaggagcccgacgacgcctacatcatcaagagcaaccccatcgccctgagatgcaaggccagacccgccatgcagatcttcttcaagtgcaacggcgagtgggtgcaccagaacgagcacgtgagcgaggagaccctggacgagagcagcggcctgaaggtgagagaggtgttcatcaacgtgaccagacagcaggtggaggacttccacggccccgaggactactggtgccagtgcgtggcctggagccacctgggcaccagcaagagcagaaaggccagcgtgagaatcgcctacctgagaaagaacttcgagcaggacccccagggcagagaggtgcccatcgagggcatgatcgtgctgcactgcagaccccccgagggcgtgcccgccgccgaggtggagtggctgaagaacgaggagcccatcgacagcgagcaggacgagaacatcgacaccagagccgaccacaacctgatcatcagacaggccagactgagcgacagcggcaactacacctgcatggccgccaacatcgtggccaagagaagaagcctgagcgccaccgtggtggtgtacgtgaacggcggctggagcagctggaccgagtggagcgcctgcaacgtgagatgcggcagaggctggcagaagagaagcagaacctgcaccaaccccgcccccctgaacggcggcgccttctgcgagggcatgagcgtgcagaagatcacctgcaccagcctgtgccccgtggacggcagctgggaggtgtggagcgagtggagcgtgtgcagccccgagtgcgagcacctgagaatcagagagtgcaccgcccccccccccagaaacggcggcaagttctgcgagggcctgagccaggagagcgagaactgcaccgacggcctgtgcatcctggacaagaagcccctgcacgagatcaagccccagagcatcgagaacgccagcgacatcgccctgtacagcggcctgggcgccgccgtggtggccgtggccgtgctggtgatcggcgtgaccctgtacagaagaagccagagcgactacggcgtggacgtgatcgacagcagcgccctgaccggcggcttccagaccttcaacttcaagaccgtgagacagggcaacagcctgctgctgaacagcgccatgcagcccgacctgaccgtgagcagaacctacagcggccccatctgcctgcaggaccccctggacaaggagctgatgaccgagagcagcctgttcaaccccctgagcgacatcaaggtgaaggtgcagagcagcttcatggtgagcctgggcgtgagcgagagagccgagtaccacggcaagaaccacagcagaaccttcccccacggcaacaaccacagcttcagcaccatgcaccccagaaacaagatgccctacatccagaacctgagcagcctgcccaccagaaccgagctgagaaccaccggcgtgttcggccacctgggcggcagactggtgatgcccaacaccggcgtgagcctgctgatcccccacggcgccatccccgaggagaacagctgggagatctacatgagcatcaaccagggcgagcccagcctgcagagcgacggcagcgaggtgctgctgagccccgaggtgacctgcggcccccccgacatgatcgtgaccacccccttcgccctgaccatcccccactgcgccgacgtgagcagcgagcactggaacatccacctgaagaagagaacccagcagggcaagtgggaggaggtgatgagcgtggaggacgagagcaccagctgctactgcctgctggaccccttcgcctgccacgtgctgctggacagcttcggcacctacgccctgaccggcgagcccatcaccgactgcgccgtgaagcagctgaaggtggccgtgttcggctgcatgagctgcaacagcctggactacaacctgagagtgtactgcgtggacaacaccccctgcgccttccaggaggtggtgagcgacgagagacaccagggcggccagctgctggaggagcccaagctgctgcacttcaagggcaacaccttcagcctgcagatcagcgtgctggacatcccccccttcctgtggagaatcaagcccttcaccgcctgccaggaggtgcccttcagcagagtgtggtgcagcaacagacagcccctgcactgcgccttcagcctggagagatacacccccaccaccacccagctgagctgcaagatctgcatcagacagctgaagggccacgagcagatcctgcaggtgcagaccagcatcctggagagcgagagagagaccatcaccttcttcgcccaggaggacagcaccttccccgcccagaccggccccaaggccttcaagatcccctacagcatcagacagagaatctgcgccaccttcgacacccccaacgccaagggcaaggactggcagatgctggcccagaagaacagcatcaacagaaacctgagctacttcgccacccagagcagccccagcgccgtgatcctgaacctgtgggaggccagacaccagcacgacggcgacctggacagcctggcctgcgccctggaggagatcggcagaacccacaccaagctgagcaacatcagcgagagccagctggacgaggccgacttcaactacagcagacagaacggcctgtag

SEQ ID NO: 233468 - DNA, 2847 bp, Artificial Sequence
  derived and/or modified sequence
atgatcctggtgctggtgaaggccctgagcgacgtgtgcgccggcaccagcggcttcctgctggacttcagcagccagaccagccccggcaccgacaacggcgaggccctgcccgagagcatccccagcgcccccggcaccctgccccacttcatcgaggagcccgacgacgcctacatcatcaagagcaaccccatcgccctgagatgcaaggccagacccgccatgcagatcttcttcaagtgcaacggcgagtgggtgcaccagaacgagcacgtgagcgaggagaccctggacgagagcagcggcctgaaggtgagagaggtgttcatcaacgtgaccagacagcaggtggaggacttccacggccccgaggactactggtgccagtgcgtggcctggagccacctgggcaccagcaagagcagaaaggccagcgtgagaatcgcctacctgagaaagaacttcgagcaggacccccagggcagagaggtgcccatcgagggcatgatcgtgctgcactgcagaccccccgagggcgtgcccgccgccgaggtggagtggctgaagaacgaggagcccatcgacagcgagcaggacgagaacatcgacaccagagccgaccacaacctgatcatcagacaggccagactgagcgacagcggcaactacacctgcatggccgccaacatcgtggccaagagaagaagcctgagcgccaccgtggtggtgtacgtgaacggcggctggagcagctggaccgagtggagcgcctgcaacgtgagatgcggcagaggctggcagaagagaagcagaacctgcaccaaccccgcccccctgaacggcggcgccttctgcgagggcatgagcgtgcagaagatcacctgcaccagcctgtgccccgtggacggcagctgggaggtgtggagcgagtggagcgtgtgcagccccgagtgcgagcacctgagaatcagagagtgcaccgcccccccccccagaaacggcggcaagttctgcgagggcctgagccaggagagcgagaactgcaccgacggcctgtgcatcctggacaagaagcccctgcacgagatcaagccccagagcatcgagaacgccagcgacatcgccctgtacagcggcctgggcgccgccgtggtggccgtggccgtgctggtgatcggcgtgaccctgtacagaagaagccagagcgactacggcgtggacgtgatcgacagcagcgccctgaccggcggcttccagaccttcaacttcaagaccgtgagacagggcaacagcctgctgctgaacagcgccatgcagcccgacctgaccgtgagcagaacctacagcggccccatctgcctgcaggaccccctggacaaggagctgatgaccgagagcagcctgttcaaccccctgagcgacatcaaggtgaaggtgcagagcagcttcatggtgagcctgggcgtgagcgagagagccgagtaccacggcaagaaccacagcagaaccttcccccacggcaacaaccacagcttcagcaccatgcaccccagaaacaagatgccctacatccagaacctgagcagcctgcccaccagaaccgagctgagaaccaccggcgtgttcggccacctgggcggcagactggtgatgcccaacaccggcgtgagcctgctgatcccccacggcgccatccccgaggagaacagctgggagatctacatgagcatcaaccagggcgagcccagcctgcagagcgacggcagcgaggtgctgctgagccccgaggtgacctgcggcccccccgacatgatcgtgaccacccccttcgccctgaccatcccccactgcgccgacgtgagcagcgagcactggaacatccacctgaagaagagaacccagcagggcaagtgggaggaggtgatgagcgtggaggacgagagcaccagctgctactgcctgctggaccccttcgcctgccacgtgctgctggacagcttcggcacctacgccctgaccggcgagcccatcaccgactgcgccgtgaagcagctgaaggtggccgtgttcggctgcatgagctgcaacagcctggactacaacctgagagtgtactgcgtggacaacaccccctgcgccttccaggaggtggtgagcgacgagagacaccagggcggccagctgctggaggagcccaagctgctgcacttcaagggcaacaccttcagcctgcagatcagcgtgctggacatcccccccttcctgtggagaatcaagcccttcaccgcctgccaggaggtgcccttcagcagagtgtggtgcagcaacagacagcccctgcactgcgccttcagcctggagagatacacccccaccaccacccagctgagctgcaagatctgcatcagacagctgaagggccacgagcagatcctgcaggtgcagaccagcatcctggagagcgagagagagaccatcaccttcttcgcccaggaggacagcaccttccccgcccagaccggccccaaggccttcaagatcccctacagcatcagacagagaatctgcgccaccttcgacacccccaacgccaagggcaaggactggcagatgctggcccagaagaacagcatcaacagaaacctgagctacttcgccacccagagcagccccagcgccgtgatcctgaacctgtgggaggccagacaccagcacgacggcgacctggacagcctggcctgcgccctggaggagatcggcagaacccacaccaagctgagcaacatcagcgagagccagctggacgaggccgacttcaactacagcagacagaacggcctgtag

SEQ ID NO: 233469 - DNA, 2862 bp, Artificial Sequence
  derived and/or modified sequence
atggggcgtgcagcagccaccgccggtggtggcggcggcgcgcggcggtggctcccgtggctaggcttgtgcttctgggccgccggtacagcagcagcccgcggtactgataatggagaagcactgccagagagcatcccttccgccccggggacactgccgcacttcatagaggagccagacgatgcatatattattaagtctaaccccatcgcgctgagatgcaaggcccgccccgcaatgcagatttttttcaaatgcaatggtgaatgggtgcatcagaatgagcatgtcagcgaagagactctggatgaatcaagtggtcttaaggtgagggaggtatttatcaatgttactaggcagcaggtcgaggattttcatggcccagaggattattggtgccagtgcgtggcttggtcacatcttggcacaagcaagtcgcggaaagctagcgtcaggattgcttacctcagaaagaattttgagcaggacccacaggggcgcgaggtccctattgaggggatgatcgtgctccattgccgaccgcctgagggcgtgccagccgcggaggtggagtggcttaagaatgaggagcctatagactccgaacaggacgaaaatattgacacccgggcagatcacaacctgatcatcaggcaagcccggctgtctgactctggtaactatacatgcatggcagccaatatagtcgctaagaggagatccctgtccgctaccgtggtggtctatgtgaacggcggttggagctcctggaccgagtggagcgcatgcaacgtgaggtgtggcagggggtggcagaaacgcagcagaacctgcacaaatcctgcacccttgaatgggggcgctttctgtgaaggtatgtccgtccagaaaatcacgtgcacgagtttatgtcccgttgacgggagttgggaagtgtggtccgaatggtctgtttgcagccccgaatgtgagcacttacgcatcagggaatgtaccgcgcctccaccacgtaatggcggtaagttttgtgagggtctgtcccaggagtcggaaaactgcactgatggtctgtgcattctagataagaaacctctgcatgaaatcaagccccaatcgattgagaacgcttcagacatcgcactgtactccggcctgggcgctgcggtggtggctgtggccgtgcttgtgattggggttacactgtatcgcagatctcaatccgactatggcgtggacgtaatcgacagctccgccctgacaggagggtttcagacttttaattttaagacagtccggcagggcaattcactgcttctgaattcagccatgcagccagacctgacggtgtctcggacatactctgggcctatatgtcttcaagacccccttgacaaggaacttatgacagaatcttctctatttaaccccctgtcggacattaaagttaaagtccagtccagttttatggtgtctcttggagtctccgagcgcgccgagtaccacggcaagaatcatagcagaacgttccctcatggaaataaccattctttctccaccatgcaccctcgtaacaagatgccatatattcagaacctcagcagtctacctactaggaccgaattgagaactactggcgtgtttggccacctgggaggaagactggtcatgccgaatacaggcgtctccttactgatcccacatggtgctatacccgaggagaactcctgggagatttacatgagcatcaaccagggcgaaccctccctccaatcagatgggtccgaggttctgctctctcctgaggtcacatgcgggcctcccgatatgatcgtaacaacaccctttgcactaaccataccgcattgtgcagacgtttcaagcgaacattggaacatccatctgaaaaagagaacccagcagggaaaatgggaagaggttatgtccgtggaggatgagtccacatcctgctactgccttttggatccttttgcctgccatgtgctgttagactctttcgggacatacgccctgaccggagaacccattacagactgcgccgtcaagcagttaaaggtggccgttttcgggtgtatgagctgtaatagtttggattacaacctgagggtctactgtgtcgacaacacaccctgtgctttccaggaggtggtaagtgatgaaagacatcaaggaggacaattgctggaggaacccaagctgctccactttaagggtaatacgttctcactgcagatttctgtcctggatattcccccgtttctctggaggatcaaaccattcactgcttgtcaggaggtgccattcagcagagtctggtgttcaaataggcagcccctccactgcgctttctctctggagaggtatacaccaaccacaacccagctctcttgtaagatttgcattaggcagcttaaaggccacgaacagattctccaggtccaaacttcgatccttgagtctgagcgggaaacaattacttttttcgcacaggaagatagcacttttcccgcccagaccggtcccaaggcatttaagataccttactccattcgccagcgcatctgtgccacatttgatacaccaaacgccaaagggaaggactggcagatgctggcccagaagaatagtatcaatcgcaatctttcatacttcgcaactcagtcctcaccgtcagccgttatcctgaacctgtgggaggcacggcaccaacatgacggggatctagattcgctcgcatgcgccctagaagagattggtcggactcacaccaaactgtccaatatctccgagtctcagttggacgaggctgatttcaattattcacgccagaatggcttgtag

SEQ ID NO: 233470 - DNA, 2847 bp, Artificial Sequence
  derived and/or modified sequence
atgatcctggtgttagtgaaagccttatctgatgtttgtgccggtacatcagggtttctgcttgatttctctagccagacttcccccgggactgataatggggaggccttgcccgagtcaattccttctgcacccggtacattgccccactttattgaggaaccagatgatgcctacattattaaaagtaaccccatcgctctgcgttgtaaggcccgcccggcaatgcagatcttctttaaatgcaatggcgagtgggtacaccagaatgagcacgtttcagaagaaacattagatgagtccagcgggctcaaggtgagggaagtgttcatcaatgtaacaaggcagcaggtggaggactttcatggacccgaagattactggtgtcagtgtgttgcgtggtcccacctgggcacatctaaatcccggaaagcatccgtccgcatagcttatctcagaaagaactttgaacaggatcctcagggccgggaagtcccaattgagggcatgattgttctgcattgtagacctccggagggggtcccagctgccgaagtagagtggctcaagaatgaggagccaatcgactccgaacaggatgagaatattgacactagagccgatcataatctgattattaggcaggccagactttccgattccggcaattatacctgcatggcggcaaatatcgtggctaaaaggaggagcttaagtgcaacggtcgtagtatatgtaaatggtggctggtcatcctggactgagtggagcgcatgcaacgtgagatgcggccggggatggcagaaacgaagcagaacctgtacgaacccagctccgctcaatgggggagccttctgcgaaggaatgtctgtacagaagattacatgcacgtccctgtgccctgtggacggttcttgggaggtgtggagcgagtggtccgtttgctctcctgagtgtgaacatctccggatcagagagtgcactgcccctcctccccgaaacggggggaagttttgtgagggactctcacaggagtccgagaactgtactgatggcttgtgcatactggataaaaaacctctccacgaaatcaagccccagagcatcgagaatgctagtgacatcgcgctgtacagcgggctgggagccgcagttgtggcagtggccgttctggtgatcggcgttacactgtatcgccgatcccaatccgattatggagtcgatgtgattgatagctcagccctgactggagggttccagacattcaacttcaagactgtgaggcaaggtaattcattgttgttaaactctgctatgcagcccgatctgacagtctcacgcacgtacagtggcccgatttgtctgcaggaccccttagacaaggaactgatgaccgaatcttccctgttcaatcctctctccgatataaaggtcaaggttcagtcctcttttatggtgagcctcggggtgagcgaacgcgccgaatatcacggcaaaaaccactcgagaacgttcccccacggtaataaccatagcttctcaacaatgcaccccagaaacaaaatgccgtatatccaaaacctctcatctctaccaacaagaactgaactgcgaaccacaggggtcttcggacatttaggcggtcgattagtgatgccgaacactggcgtttcgctgcttatcccacacggcgctatccccgaggagaacagctgggaaatatacatgtctatcaatcagggagagccgtcacttcagtctgacggatctgaagttttgctttctcccgaagtcacgtgcggcccgccagatatgattgtgacaaccccattcgcactcacaattcctcattgtgctgacgtgagctccgaacattggaatattcacttaaaaaagaggacccagcagggaaaatgggaagaagtgatgagcgttgaggatgaatcgaccagctgttactgtctgttggatccttttgcttgccatgtgctactggactcatttgggacctatgccttgactggggagcccatcacggactgcgctgtaaaacaacttaaagtggctgtgttcggttgcatgtcatgtaactccctggattacaacctgcgcgtctattgcgtggataacactccatgcgcatttcaggaggtagtttcagacgaacgccaccagggagggcaattgctcgaagagcccaaactgctccatttcaagggcaacacctttagcttacagatttcagtgctagatattcccccatttctgtggcggattaagcccttcacagcctgtcaggaggtgcccttcagccgggtgtggtgtagcaatcgtcagcccctgcactgtgccttcagtctggaacgatacacaccgacaaccacacagctttcctgtaagatttgcatccggcagcttaaagggcacgaacaaattttgcaagtgcaaacttctatactggaaagcgagagagagaccattacattctttgcccaagaggattcaactttccccgcgcaaacaggcccgaaggctttcaagattccttattctattagacagcgtatctgcgcaaccttcgacacccctaatgccaagggcaaggattggcagatgctggcccaaaaaaactccattaacaggaacctgtcctactttgcaacacagtcgagtccgagcgccgtgatcctcaatttgtgggaagcccgtcatcaacacgacggggatctcgacagcctcgcctgtgccttagaggagataggccgtacccacacgaagctaagtaatatctccgaaagccagctagacgaagctgatttcaactacagcaggcaaaatggcttgtag

SEQ ID NO: 233471 - DNA, 2862 bp, Artificial Sequence
  derived and/or modified sequence
atgggccgggctgctgccacagctgggggcggcggcggggcccggcgctggctgccctggctgggcctgtgcttctgggccgccggcacagctgctgcccggggcacagacaacggggaggccctgcctgagagcatccccagcgcccctggcaccctgccccacttcatcgaggagccagatgatgcctacatcatcaagagcaaccccatcgccctgcgctgcaaggcccggcctgccatgcagatcttcttcaagtgcaatggagagtgggtgcaccagaatgaacatgtgtctgaggagaccctggatgagagcagcggcctgaaggtgcgggaggtgttcatcaacgtgacccggcagcaggtggaggacttccacggccctgaggactactggtgccagtgtgtggcctggagccacctgggcaccagcaagagcaggaaggcctctgtgcgcatcgcctacctgaggaagaactttgagcaggacccccagggccgggaggtgcccatcgagggcatgattgtgctgcactgccggcccccagagggcgtgcctgctgctgaggtggagtggctgaagaatgaggagcccatcgacagcgagcaggatgagaacatcgacaccagggctgaccacaacctgatcatccggcaggcccggctgagtgacagcggcaactacacctgcatggccgccaacatcgtggccaagaggaggagcctgagcgccaccgtggtggtgtatgtgaatggaggctggagctcctggacagagtggagcgcctgcaatgtgcgctgtggccggggctggcagaagaggagcaggacctgcaccaacccagcccccctgaatggaggagccttctgtgagggcatgtctgtgcagaagatcacctgcaccagcctgtgccctgtggatggctcctgggaggtgtggagcgagtggagcgtgtgcagcccagaatgtgagcacctgcgcatcagagaatgtacagcccccccaccaagaaatggaggcaagttctgtgagggcctgagccaggagagcgagaactgcacagatggcctgtgcatcctggacaagaagcccctgcacgagatcaagccccagagcattgaaaatgccagtgacatcgccctgtacagcggcctgggcgctgctgtggtggccgtggccgtgctggtgattggagtgaccctgtaccgccgcagccagagcgactatggagtggatgtgattgacagcagcgccctgactggaggcttccagaccttcaacttcaagacagtgcggcagggcaacagcctgctgctgaacagcgccatgcagcctgacctgactgtgtccaggacctacagcggccccatctgcctgcaggaccccctggacaaggagctgatgacagagagcagcctcttcaaccccctgagtgacatcaaggtgaaggtgcagagcagcttcatggtgtccctgggcgtgtctgaaagagctgagtaccacggcaagaaccacagcaggaccttcccccacggcaacaaccacagcttcagcaccatgcaccccaggaacaagatgccctacatccagaacctgagcagcctgcccaccaggacagagctgcggaccactggagtgtttggccacctgggcggccgcctggtgatgcccaacacaggagtgtccctgctgatcccccacggggccatccctgaggagaacagctgggagatctacatgagcatcaaccagggcgagcccagcctgcagagtgatggcagcgaggtgctgctgagccctgaggtgacctgtggccccccagacatgattgtgaccaccccatttgccctgaccatcccccactgtgctgatgtgagcagcgagcactggaacatccacctgaagaagaggacccagcagggcaagtgggaggaggtgatgtctgtggaggatgagagcaccagctgctactgcctgctggacccctttgcctgccacgtgctgctggacagctttggcacctacgccctgactggagagcccatcacagactgtgctgtgaagcagctgaaggtggccgtgtttggctgcatgagctgcaacagcctggactacaacctgcgggtgtactgtgtggacaacaccccctgtgccttccaggaggtggtgtctgatgagcggcaccagggcggccagctgctggaggagcccaagctgctgcacttcaagggcaacaccttcagcctgcagatctctgtgctggacatcccccccttcctgtggaggatcaagcccttcaccgcctgccaggaggtgcccttcagccgggtgtggtgcagcaaccggcagcccctgcactgtgccttcagcctggagcgctacacccccaccaccacccagctgagctgcaagatctgcatccggcagctgaagggccacgagcagatcctgcaggtgcagaccagcatcctggagagcgagcgggagaccatcaccttctttgcccaggaggacagcaccttccctgcccagacaggccccaaggccttcaagatcccctacagcatccggcagaggatctgtgccacctttgacaccccaaatgccaagggcaaggactggcagatgctggcccagaagaacagcatcaacagaaacctgagctactttgccacccagagcagccccagcgctgtgatcctgaacctgtgggaggcccggcaccagcatgatggagacctggacagcctggcctgtgccctggaggagattggaagaacccacaccaagctgagcaacatcagcgagagccagctggatgaagctgacttcaactacagccggcagaatggcctgtag

SEQ ID NO: 233472 - DNA, 2847 bp, Artificial Sequence
  derived and/or modified sequence
atgatcctggtgctggtgaaggccctgagtgatgtgtgtgccggcaccagcggcttcctgctggacttcagcagccagaccagccctggaacagacaatggagaggccctgcctgagagcatccccagcgcccctggcaccctgccccacttcatcgaggagccagatgatgcctacatcatcaagagcaaccccatcgccctgcgctgcaaggcccggcctgccatgcagatcttcttcaagtgcaatggagagtgggtgcaccagaatgagcacgtgtctgaggagaccctggatgagagcagcggcctgaaggtgcgggaggtgttcatcaacgtgacccggcagcaggtggaggacttccacggccctgaggactactggtgccagtgtgtggcctggagccacctgggcaccagcaagagcaggaaggcctctgtgagaattgcctacctgaggaagaactttgagcaggacccccagggccgggaggtgcccatcgagggcatgattgtgctgcactgcaggcctcctgagggcgtgcctgctgctgaggtggagtggctgaagaatgaggagcccattgattctgagcaggatgaaaatattgacaccagggctgaccacaacctgatcatccggcaggcccggctgagtgacagcggcaactacacctgcatggccgccaacatcgtggccaagagaagaagcctgagcgccaccgtggtggtgtatgtgaatggaggctggagctcctggacagagtggagcgcctgcaatgtgcgctgtggccggggctggcagaagaggagcaggacctgcaccaacccagcccccctgaatggaggagccttctgtgagggcatgtctgtgcagaagatcacctgcaccagcctgtgccctgtggatggctcctgggaggtgtggagcgagtggagcgtgtgcagcccagaatgtgagcacctgcgcatccgggagtgcacagcccctcctccaagaaatggaggcaagttctgtgagggcctgagccaggagagcgagaactgcacagatggcctgtgcatcctggacaagaagcccctgcacgagatcaagccccagagcattgaaaatgccagtgacatcgccctgtacagcggcctgggcgctgctgtggtggccgtggccgtgctggtgattggagtgaccctgtacagaagaagccagagcgactatggagtggatgtgattgacagcagcgccctgaccggcggcttccagaccttcaacttcaagacagtgcggcagggcaacagcctgctgctgaacagcgccatgcagcctgacctgactgtgtccaggacctacagcggccccatctgcctgcaggaccccctggacaaggagctgatgacagagagcagcctcttcaaccccctgagtgacatcaaggtgaaggtgcagagcagcttcatggtgtccctgggcgtgtctgagcgggcagagtaccacggcaagaaccacagcaggaccttcccccacggcaacaaccacagcttcagcaccatgcaccccaggaacaagatgccctacatccagaacctgagcagcctgcccaccaggacagagctgcggaccaccggggtgtttggccacctgggcggccgcctggtgatgcccaacacaggagtgtccctgctgatcccccatggagccatcccagaagaaaattcctgggagatctacatgagcatcaaccagggcgagcccagcctgcagagtgatggcagcgaggtgctgctgagccctgaggtgacctgtggccccccagacatgattgtgaccaccccatttgccctgaccatcccccactgtgctgatgtgtcctctgagcactggaacatccacctgaagaagaggacccagcagggcaagtgggaggaggtgatgtctgtggaggatgagagcaccagctgctactgcctgctggacccctttgcctgccacgtgctgctggacagctttggcacctacgccctgaccggggagcccatcacagactgtgctgtgaagcagctgaaggtggccgtgtttggctgcatgagctgcaacagcctggactacaacctgcgggtgtactgtgtggacaacaccccctgtgccttccaggaggtggtgtctgatgagcggcaccagggcggccagctgctggaggagcccaagctgctgcacttcaagggcaacaccttcagcctgcagatctctgtgctggacatcccccccttcctgtggaggatcaagcccttcaccgcctgccaggaggtgcccttcagccgggtgtggtgcagcaaccggcagcccctgcactgtgccttcagcctggagcgctacacccccaccaccacccagctgagctgcaagatctgcatccggcagctgaagggccacgagcagatcctgcaggtgcagaccagcatcctggagagcgagcgggagaccatcaccttctttgcccaggaggacagcaccttccctgcccagacaggccccaaggccttcaagatcccctacagcatccggcagaggatctgtgccacctttgacaccccaaatgccaagggcaaggactggcagatgctggcccagaagaacagcatcaacagaaacctgagctactttgccacccagagcagccccagcgctgtgatcctgaacctgtgggaggcccggcaccagcatgatggagacctggacagcctggcctgtgccctggaggagatcggccgcacccacaccaagctgagcaacatcagcgagagccagctggatgaggccgacttcaactacagccggcagaatggcctgtag

SEQ ID NO: 233473 - DNA, 2862 bp, Artificial Sequence
  derived and/or modified sequence
atgggccgggccgccgccaccgccggcggcggcggcggcgcccggcggtggttgccctggctcggcctgtgtttctgggctgccggaacagctgcggcgcggggtacagataacggcgaggcccttccggagagtataccgagcgcacctggtaccctacctcattttatcgaagaacccgacgatgcctacatcatcaagtccaatcccattgcactcagatgcaaagctcggcctgcgatgcaaatctttttcaaatgtaacggcgagtgggtccaccagaacgagcacgtcagcgaagagaccctcgacgaatcttctggcctaaaagtgagggaggtgttcattaacgtgacacggcagcaggtcgaggacttccacggccccgaggattactggtgtcaatgcgtggcttggagccacctgggaacctccaagagccgcaaagcctctgttcggattgcttatcttcggaagaactttgagcaggatcctcagggtcgggaagtgccgatcgaggggatgattgtgcttcattgtcgccctcccgagggcgtgcctgcagcagaggtcgagtggctcaaaaacgaggaaccaattgatagcgagcaggacgagaatattgacacgagggccgatcacaatctcatcatcaggcaggctcggctgagcgattctggtaattacacatgtatggctgcaaatattgtcgctaaacggcgctccctaagcgcgaccgtagtagtgtatgttaatggtggatggagcagctggacagagtggtctgcatgcaatgtccgttgcggccgtggttggcagaaaaggtcaaggacgtgcacaaaccctgctcccctgaacggtggagcgttctgcgaaggcatgagtgtgcagaagattacgtgcacttccctttgtcccgtggatggcagctgggaggtgtggagcgagtggagtgtgtgctcccctgaatgtgaacatctcagaataagagaatgtaccgcaccacccccacgcaatggcggcaagttttgcgaaggcctgagccaggaatcagaaaactgtaccgacggcctgtgtattttggataagaagcctctgcacgagattaaaccacagagtattgagaatgcatcagacattgccctttatagtggcctaggagctgccgtcgtggcagtggctgtgttggtgatcggcgtaactttataccgacgctcccagtccgactacggagtggacgtaattgattccagcgcactgacaggaggcttccagacatttaacttcaaaacagtaagacaagggaactccctgctgctgaactccgccatgcagcctgacctgacagtgagccgaacatatagcggtcccatttgccttcaggatcctctagataaggagctgatgactgagagcagcttgttcaatcctctttctgacatcaaggtgaaggtccagtcatcgttcatggtgagcctgggcgttagcgaacgggctgaataccacgggaagaaccatagtcggacttttccgcacggaaataaccattcatttagtactatgcaccctcgaaacaaaatgccctacatccagaacctcagctctttaccaacaaggaccgagttacgcaccaccggagttttcggacatctcggggggagactggtgatgcccaatactggcgtgtcacttctcattccccacggtgcaatccccgaagaaaatagttgggaaatttatatgtctataaatcagggtgagcctagccttcaatctgacggttctgaggttttactaagtcccgaggtgacgtgtggcccacccgatatgatagtcacaacacccttcgctctgaccatcccgcactgcgccgacgtgagcagcgagcattggaacattcacctgaagaagcggacccagcagggcaagtgggaggaagtaatgagtgtcgaggatgaatctacttcctgctactgccttctagaccctttcgcatgtcacgtgctcctggacagctttggtacatacgctctcacaggggagcctatcaccgattgcgctgttaaacagctgaaagtggccgtgtttgggtgtatgtcgtgcaactcgttggattacaatctccgagtatactgtgtggacaacactccttgcgcattccaggaggtcgtgagtgacgaaagacaccagggcggacagttactggaggaacctaagctgctccattttaagggcaatacatttagcctccaaattagtgttctagacatccctccttttctgtggagaatcaagcccttcacggcctgccaggaggttccatttagcagggtgtggtgctcaaatcgccagccattgcattgtgccttttccttagagcgctatacccctacaacgacgcagctgagttgcaagatctgtatccgacagctcaaaggccatgaacagatcttacaggtacagaccagcatactggagtccgagcgcgagacaataaccttttttgcccaggaggactccactttcccagctcaaaccggccccaaggctttcaagatcccctattcaattcgccagaggatctgtgccacatttgacacccctaacgctaagggtaaagattggcagatgctcgcccagaaaaactcaataaaccgaaacctgagctacttcgctacgcagagttcaccttccgccgtgatccttaatctgtgggaagctagacaccagcacgatggagacttggacagcctggcttgtgccctcgaggagatcggccgcacacatacaaaattaagcaacatatcagaatcccaactggatgaagctgattttaactattcacgtcaaaatgggttgtag

SEQ ID NO: 233474 - DNA, 2847 bp, Artificial Sequence
  derived and/or modified sequence
atgatcctggtgctggtgaaggccctgagcgacgtgtgcgccggcacctcagggtttcttttggatttctcgtcccaaacgtcccctgggacagataacggcgaggccctgcccgagagcatccccagcgctcctgggacccttcctcatttcatcgaggaacccgatgatgcctatattattaagagtaacccaatcgctctgaggtgcaaggcaagacccgcaatgcagattttcttcaaatgtaatggtgaatgggtgcaccaaaacgaacacgtcagcgaggagacgctggatgagtctagcggtctgaaagtccgagaagtgttcatcaacgtcacccgacagcaagtggaagacttccacggccccgaagattactggtgccagtgcgtggcatggtcccatctgggaactagtaagtctcgaaaggctagtgtccggattgcgtaccttcggaaaaatttcgagcaggaccctcaggggagagaagtgccgattgaaggcatgatcgtgttacattgtagacctccagagggggtcccggccgccgaagtagaatggctaaagaacgaagaacctatcgactctgaacaagatgaaaacattgatacacgcgcagaccataaccttatcatccgccaagcgagactgagcgattccggcaattacacctgtatggctgctaacatagtcgcgaagcggcgaagcctgtcagctacggtcgtcgtgtacgtaaatgggggctggtcaagctggaccgaatggtctgcttgtaatgttagatgtggtagaggctggcagaagcggtctcggacatgtacaaacccggcccctctcaatgggggcgccttttgtgaaggaatgagtgtgcagaagatcacctgtacttctctctgtccggtcgacggaagctgggaagtttggtcggaatggtctgtgtgttcaccggaatgtgagcacctccgaatccgtgaatgtacagccccacccccgagaaacggcgggaagttctgcgagggtctctcacaggaaagtgagaattgcaccgatgggttgtgtatacttgacaaaaagcccctgcacgaaataaaacctcagtccattgagaacgccagcgatattgccctctacagcggactgggtgctgcggtagtcgccgttgctgttctcgttatcggtgtgacactttatcggcggtcacagtccgactatggagtggacgttatcgatagttccgctcttacgggcggcttccagaccttcaacttcaagactgtgcggcagggtaatagtctgctactgaattctgctatgcagccagacttgacagtgtcaaggacatactccgggcctatttgtcttcaggaccccctcgataaagagctcatgactgagtcaagtcttttcaaccccctgtccgatattaaagtgaaggtgcagtctagctttatggtttcattgggagttagtgagcgcgctgaatatcacggaaaaaatcatagtcgtacgtttccccacggaaacaatcactccttctctactatgcacccccgcaataaaatgccgtacatccaaaacctaagcagtcttccgactcgtaccgagctccgtaccacgggggtgtttggtcacctgggtgggcggctcgtgatgcccaataccggagtctcgctccttattccgcacggagccatcccagaggaaaattcctgggagatttacatgtcaatcaaccagggggagccctccctgcagtccgatggctccgaggttctgctgtccccagaggttacctgcgggcccccggatatgatcgtcactacaccctttgcactgacgatcccccattgcgcagacgtcagcagcgaacactggaatatacatctgaagaagaggacccagcagggcaagtgggaggaagtcatgtctgtcgaagatgagtccacttcatgttactgcctgctcgatccattcgcatgtcatgttctgctcgactcattcggcacatacgctttgacaggagaacctatcactgattgcgcagttaagcaactgaaggtcgccgtcttcggctgcatgtcttgcaattccttggactacaacttgcgtgtgtactgcgtcgacaacactccatgtgccttccaggaagtggtgtcagatgaaaggcatcagggtgggcagctgctcgaggagccaaagctactccacttcaagggcaatactttcagcttgcagatctcagtgctggatatcccccctttcctgtggcggattaagcccttcactgcctgccaggaagtgccattctcacgtgtatggtgctctaatcggcagcccctgcattgcgcttttagcctggaaaggtacacaccaactacaactcagcttagctgcaagatctgtattcggcaactcaagggacacgagcagattcttcaggtgcagactagcatccttgaatctgagagagagacaataaccttttttgcccaggaggactcaactttccctgcgcagacgggcccgaaagctttcaaaataccctattcgatccgccagcgcatctgcgcaactttcgatacacccaacgccaagggcaaggactggcaaatgctggcgcagaaaaattccatcaaccgtaatctgagctacttcgccacacagtcatccccttcagccgttattcttaacctgtgggaagccagacaccagcatgatggggatctcgatagcctggcctgtgctctagaagagatcggccggacccataccaaactgtctaacattagcgaaagccagctggacgaagccgacttcaattattctcgacagaacggcctttag

SEQ ID NO: 233475 - DNA, 2862 bp, Artificial Sequence
  derived and/or modified sequence
atgggcagagctgccgcaaccgcagggggaggaggtggtgctcggaggtggcttccatggctaggactgtgtttctgggccgctggtactgcagccgctcgcggaaccgacaacggggaagccctgcccgaaagcatcccgagcgcaccagggacacttcctcacttcattgaagagcctgatgatgcctatataattaaatccaacccaatagccctgcgctgcaaggccaggcccgcaatgcagatattctttaagtgcaatggggagtgggtccaccagaatgaacacgtttccgaagagacattggacgaatcatctggccttaaagttcgggaagtcttcattaatgtgacccgtcagcaggtggaggattttcacggccctgaggattattggtgccaatgcgtggcttggtcccacctggggactagcaaatcgcgtaaggctagcgttaggatcgcctacttaaggaagaacttcgaacaggatccacagggacgagaggtgcccatagaaggcatgattgtactgcattgccgccctcccgaaggggtcccagccgcagaagtcgagtggctgaagaacgaggaaccaatcgacagcgaacaggacgagaacattgatactagggccgaccacaatcttattatcagacaggccaggctgtctgactcaggcaactacacttgcatggctgccaatatcgtcgccaaaagaaggtctttaagcgctacggttgtggtctatgtgaacggaggctggtcatcctggaccgagtggtcagcctgtaatgtgcggtgtggacgaggctggcagaaacggagccgcacttgcaccaaccccgcacccctgaatgggggtgctttctgcgaagggatgtcagtgcagaaaattacttgtacatctctttgtccagtggacggcagctgggaagtatggtccgaatggtcagtatgcagccctgaatgtgaacaccttcgcattagagagtgcacggcccctccccctaggaatgggggaaaattctgcgaaggcctgtcccaggagagtgagaattgtacggatgggctctgcattctagacaagaagccgctccacgaaataaagccccaatccatagagaatgcttccgacatcgccctgtactctggtctgggtgcagccgttgtggcagtcgccgtcctggtgatcggcgtgactctttacagaaggagtcagagcgactacggagtggacgtcatagattcatccgctttgactggaggctttcagactttcaactttaagaccgttagacagggcaactcactccttctgaatagcgccatgcaacccgacttgacagtcagccggacctatagcgggccaatctgtctacaggaccccttggacaaggagctcatgaccgagtccagtctgtttaatcctctgtccgatatcaaggtgaaagttcagtcttcattcatggtctctctcggggtgtcggaacgtgcagagtatcatgggaaaaatcatagccgcacatttcctcatggcaacaatcactccttttcgaccatgcatccacgtaataagatgccatatatccagaacttatctagccttccgacacggaccgagctcaggaccacaggcgtctttggacacttagggggacggctggtgatgcccaacactggggtgtccttactaatcccccatggcgctatcccagaggaaaacagctgggaaatttacatgtccattaaccagggggagccgtcactgcagtcagatggatctgaggtcctcttgtcccccgaggtgacctgcggacccccagacatgatagtcacgacacctttcgccttgaccatcccacattgcgctgacgtgtcgtcagagcattggaatatacatctcaagaaaaggacccagcagggcaagtgggaagaggtgatgtctgtcgaggatgagtctacctcctgttactgcctactcgacccttttgcttgtcacgtgctgttggattctttcgggacttatgccctaacgggagaacccattaccgactgcgccgtgaaacagcttaaggtggccgttttcgggtgtatgtcatgcaattcactggactacaatctgagagtttattgtgtcgacaatactccctgcgccttccaagaggtagtctccgacgagagacaccaggggggacagttactggaggagcccaaattactccacttcaaagggaacactttctcgctacagataagcgtgttggatattccgccattcctctggcgcatcaaaccatttaccgcgtgccaggaggtgcccttctccagggtgtggtgcagtaataggcagcccctgcattgtgctttctctttggaacggtacactccaaccaccacccagctctcatgtaagatatgcattcgacagcttaagggccacgagcagatactgcaggttcaaaccagtatccttgagagtgagcgtgagaccataacatttttcgctcaagaggactccactttccctgctcaaaccgggccaaaagccttcaaaattccctattcaatccgacagagaatctgcgccacttttgatactccaaacgccaaaggaaaagattggcagatgctggcacagaagaattctataaatcgaaacctatcctacttcgccactcagtcatccccctctgccgtgattctcaacttgtgggaggcaaggcatcaacatgacggcgatctggactccctggcatgcgcactggaagaaatcggcagaacccacacaaagctgtccaacatcagcgagtcgcagctcgacgaagctgattttaattattcaagacaaaacggactttag

SEQ ID NO: 233476 - DNA, 2847 bp, Artificial Sequence
  derived and/or modified sequence
atgatcctagtcctggttaaagccctcagtgacgtgtgtgctggaacttccggatttctgctcgatttctctagccagacctccccaggaacagacaatggggaggctttgccagagtccattccctccgccccaggcactctgccccattttatagaagagccagatgatgcctatatcattaaaagcaatcctatcgctctgaggtgtaaagctaggccagcgatgcaaatattctttaaatgtaacggtgagtgggtgcaccaaaatgaacacgtaagtgaggaaactctggatgagagctccggtctgaaagtgcgtgaggtgtttattaacgtgacacgccagcaggtggaggattttcacggacccgaggactactggtgtcagtgtgttgcatggtcacatctgggcacctccaagtcccggaaggcctctgtaaggatcgcttacctcagaaagaactttgagcaagatccacaggggagggaggtccctatcgaggggatgatcgtgctgcattgcaggccccctgaaggcgttccagcggctgaggtggagtggctcaagaacgaagagccaattgactctgaacaggatgagaatatcgacacacgagctgaccacaaccttatcatccggcaggctcggctgagcgatagcggcaactacacctgtatggccgctaacatagtggcgaagcgacgcagcctgagcgctacagtcgtagtgtatgtgaacgggggatggtcttcttggacagagtggagtgcctgcaacgtgagatgcggcagaggatggcagaagcggagccgaacatgtaccaatcccgctcctctgaacgggggtgccttctgcgaaggtatgtcggtgcaaaagatcacttgcacgtccctgtgtccagtcgatggaagctgggaagtctggagcgaatggtccgtgtgtagccccgaatgtgaacatctgaggattagggagtgcacagcaccgcctccaagaaacggtggcaaattttgtgaaggactgtctcaggaatcggagaattgcacagatggcttgtgtatcttggacaagaaacccctgcacgagatcaaacctcaaagcatcgaaaacgctagcgacatcgcattgtacagcgggctcggagccgcagtggtcgctgtcgcggtgttagtgattggcgtaaccctgtacagacggtcacagtcggactatggagtcgacgtaatcgacagcagcgcactgacagggggattccaaaccttcaacttcaagactgtgcgccagggcaattctctgctgttaaacagcgccatgcagcccgacttgacagtgtcacgcacgtatagcgggcctatttgtttgcaagatcctctggacaaggaattgatgaccgaaagctcattattcaacccactgtccgacataaaggtgaaagtacagagctcatttatggtttcacttggcgtcagtgaacgggcagagtaccacggcaaaaatcattctcgaaccttcccccacggcaataatcattcatttagcacaatgcacccacggaacaagatgccgtatattcagaatctgtctagcttgccgaccaggaccgagttgcgtaccaccggtgtcttcggccacctgggcggacggctcgtgatgccgaataccggggtctcgctactgattcctcacggagccataccagaggagaatagttgggaaatctacatgagcataaatcagggggagccctcactacagagcgatggcagcgaagtgctcctgtcgccagaggtcacctgtgggcctcccgacatgatagtaaccacacccttcgctttgaccatcccccactgcgcagatgtgagcagtgaacactggaatattcacctcaagaagagaacacagcagggcaaatgggaagaggttatgtctgtagaagatgaatcaacgtcctgttactgcctcctcgacccttttgcttgccatgtcctgctggactccttcggcacttacgcactcaccggagaaccaatcaccgattgcgctgttaaacagttaaaagtggcagtttttggttgcatgtcctgcaattccttggactacaacttaagagtgtactgtgtggataataccccttgcgcatttcaggaggtcgtgagcgatgagaggcatcaaggaggccagctgctggaggaacccaaacttctgcattttaaggggaatacatttagtcttcaaatctcagtgttggacatcccaccatttttgtggcggatcaaaccctttaccgcttgtcaggaggttccattttcaagagtctggtgttcgaataggcagccactgcattgtgcattctcactcgaacgatacactccaaccacaacccaactgagttgcaagatctgtattcgacagctgaaaggccacgagcagattctgcaggtacagacgtcaattctggaatccgagcgggaaacaattacgttttttgctcaggaggattccacctttcctgcccaaactgggcctaaagcctttaaaatcccgtactccatcagacagcggatctgtgccaccttcgatactcctaacgccaaaggcaaggactggcagatgttggctcagaaaaactctataaatcggaacctgtcctactttgctacccagagtagccccagtgccgtgatactgaatttgtgggaggcacgccatcagcacgacggcgatctggactccctcgcgtgtgcacttgaggagatcgggagaacccatactaagctgtccaacatctccgagtctcaactggacgaagcagactttaactattccagacagaacgggttgtag

SEQ ID NO: 233477 - DNA, 3252 bp, Artificial Sequence
  derived and/or modified sequence
cggactctcgcctccgctccgtagttcggggcccggcagcggcgcgagggctgggaactgcgcggcggggactgcgggcgactccggcatccgcgctggcggcagcggtcgccgcgccgtgggaagctatggggacgcgccctttctcggggtgcccattcagcggcggctcggagctccctgccccgctgctttaggaagcgatcgtggagcagagtcactctctgaagactcccgagacccattcgactcgggaccctcatcgccgaccctttcccgggctcccggagcgtgaagaagagccgccctccggaacgcggcgaggagcatggggagagcggcggccaccgcaggcggcggcggaggggcgcgccgctggctcccgtggctggggctgtgcttctgggcggcagggaccgcggctgcccgaggaactgacaatggcgaagcccttcccgaatccatcccatcagctcctgggacactgcctcatttcatagaggagccagatgatgcttatattatcaagagcaaccctattgcactcaggtgcaaagcgaggccagccatgcagatattcttcaaatgcaacggcgagtgggtccatcagaacgagcacgtctctgaagagactctggacgagagctcaggtttgaaggtccgcgaagtgttcatcaatgttactaggcaacaggtggaggacttccatgggcccgaggactattggtgccagtgtgtggcgtggagccacctgggtacctccaagagcaggaaggcctctgtgcgcatagcctatttacggaaaaactttgaacaagacccacaaggaagggaagttcccattgaaggcatgattgtactgcactgccgcccaccagagggagtccctgctgccgaggtggaatggctgaaaaatgaagagcccattgactctgaacaagacgagaacattgacaccagggctgaccataacctgatcatcaggcaggcacggctctcggactcaggaaattacacctgcatggcagccaacatcgtggctaagaggagaagcctgtcggccactgttgtggtctacgtgaatggaggctggtcttcctggacagagtggtcagcctgcaatgttcgctgtggtagaggatggcagaaacgttcccggacctgcaccaacccagctcctctcaatggtggggccttttgtgagggaatgtcagtgcagaaaataacctgcacttctctttgtcctgtggatgggagctgggaagtgtggagcgaatggtccgtctgcagtccagagtgtgaacatttgcggatccgggagtgcacagcaccacccccgagaaatgggggcaaattctgtgaaggtctaagccaggaatctgaaaactgcacagatggtctttgcatcctagataaaaaacctcttcatgaaataaaaccccaaagcattgagaatgccagcgacattgctttgtactcgggcttgggtgctgccgtcgtggccgttgcagtcctggtcattggtgtcaccctttacagacggagccagagtgactatggcgtggacgtcattgactcttctgcattgacaggtggcttccagaccttcaacttcaaaacagtccgtcaaggtaactccctgctcctgaattctgccatgcagccagatctgacagtgagccggacatacagcggacccatctgtctgcaggaccctctggacaaggagctcatgacagagtcctcactctttaaccctttgtcggacatcaaagtgaaagtccagagctcgttcatggtttccctgggagtgtctgagagagctgagtaccacggcaagaatcattccaggacttttccccatggaaacaaccacagctttagtacaatgcatcccagaaataaaatgccctacatccaaaatctgtcatcactccccacaaggacagaactgaggacaactggtgtctttggccatttaggggggcgcttagtaatgccaaatacaggggtgagcttactcataccacacggtgccatcccagaggagaattcttgggagatttatatgtccatcaaccaaggtgaacccagcctccagtcagatggctctgaggtgctcctgagtcctgaagtcacctgtggtcctccagacatgatcgtcaccactccctttgcattgaccatcccgcactgtgcagatgtcagttctgagcattggaatatccatttaaagaagaggacacagcagggcaaatgggaggaagtgatgtcagtggaagatgaatctacatcctgttactgccttttggacccctttgcgtgtcatgtgctcctggacagctttgggacctatgcgctcactggagagccaatcacagactgtgccgtgaagcaactgaaggtggcggtttttggctgcatgtcctgtaactccctggattacaacttgagagtttactgtgtggacaataccccttgtgcatttcaggaagtggtttcagatgaaaggcatcaaggtggacagctcctggaagaaccaaaattgctgcatttcaaagggaatacctttagtcttcagatttctgtccttgatattcccccattcctctggagaattaaaccattcactgcctgccaggaagtcccgttctcccgcgtgtggtgcagtaaccggcagcccctgcactgtgccttctccctggagcgttatacgcccactaccacccagctgtcctgcaaaatctgcattcggcagctcaaaggccatgaacagatcctccaagtgcagacatcaatcctagagagtgaacgagaaaccatcactttcttcgcacaagaggacagcactttccctgcacagactggccccaaagccttcaaaattccctactccatcagacagcggatttgtgctacatttgatacccccaatgccaaaggcaaggactggcagatgttagcacagaaaaacagcatcaacaggaatttatcttatttcgctacacaaagtagcccatctgctgtcattttgaacctgtgggaagctcgtcatcagcatgatggtgatcttgactccctggcctgtgcccttgaagagattgggaggacacacacgaaactctcaaacatttcagaatcccagcttgatgaagccgacttcaactacagcaggcaaaatggactctagtccacttcctcccatgagacagagtgatggccagcttggggacatttgctttaaatgggaaa

SEQ ID NO: 233478 - DNA, 7002 bp, Artificial Sequence
  derived and/or modified sequence
ttaaataagtagggattgtttaaaaaaaaaagctgtaatatgttatctgggggtggatgatcctggtgttagttaaagctctcagtgatgtctgtgctgggacttccgggttcctgttggacttttcctcccaaacttcaccaggaactgacaatggcgaagcccttcccgaatccatcccatcagctcctgggacactgcctcatttcatagaggagccagatgatgcttatattatcaagagcaaccctattgcactcaggtgcaaagcgaggccagccatgcagatattcttcaaatgcaacggcgagtgggtccatcagaacgagcacgtctctgaagagactctggacgagagctcaggtttgaaggtccgcgaagtgttcatcaatgttactaggcaacaggtggaggacttccatgggcccgaggactattggtgccagtgtgtggcgtggagccacctgggtacctccaagagcaggaaggcctctgtgcgcatagcctatttacggaaaaactttgaacaagacccacaaggaagggaagttcccattgaaggcatgattgtactgcactgccgcccaccagagggagtccctgctgccgaggtggaatggctgaaaaatgaagagcccattgactctgaacaagacgagaacattgacaccagggctgaccataacctgatcatcaggcaggcacggctctcggactcaggaaattacacctgcatggcagccaacatcgtggctaagaggagaagcctgtcggccactgttgtggtctacgtgaatggaggctggtcttcctggacagagtggtcagcctgcaatgttcgctgtggtagaggatggcagaaacgttcccggacctgcaccaacccagctcctctcaatggtggggccttttgtgagggaatgtcagtgcagaaaataacctgcacttctctttgtcctgtggatgggagctgggaagtgtggagcgaatggtccgtctgcagtccagagtgtgaacatttgcggatccgggagtgcacagcaccacccccgagaaatgggggcaaattctgtgaaggtctaagccaggaatctgaaaactgcacagatggtctttgcatcctagataaaaaacctcttcatgaaataaaaccccaaagcattgagaatgccagcgacattgctttgtactcgggcttgggtgctgccgtcgtggccgttgcagtcctggtcattggtgtcaccctttacagacggagccagagtgactatggcgtggacgtcattgactcttctgcattgacaggtggcttccagaccttcaacttcaaaacagtccgtcaaggtaactccctgctcctgaattctgccatgcagccagatctgacagtgagccggacatacagcggacccatctgtctgcaggaccctctggacaaggagctcatgacagagtcctcactctttaaccctttgtcggacatcaaagtgaaagtccagagctcgttcatggtttccctgggagtgtctgagagagctgagtaccacggcaagaatcattccaggacttttccccatggaaacaaccacagctttagtacaatgcatcccagaaataaaatgccctacatccaaaatctgtcatcactccccacaaggacagaactgaggacaactggtgtctttggccatttaggggggcgcttagtaatgccaaatacaggggtgagcttactcataccacacggtgccatcccagaggagaattcttgggagatttatatgtccatcaaccaaggtgaacccagcctccagtcagatggctctgaggtgctcctgagtcctgaagtcacctgtggtcctccagacatgatcgtcaccactccctttgcattgaccatcccgcactgtgcagatgtcagttctgagcattggaatatccatttaaagaagaggacacagcagggcaaatgggaggaagtgatgtcagtggaagatgaatctacatcctgttactgccttttggacccctttgcgtgtcatgtgctcctggacagctttgggacctatgcgctcactggagagccaatcacagactgtgccgtgaagcaactgaaggtggcggtttttggctgcatgtcctgtaactccctggattacaacttgagagtttactgtgtggacaataccccttgtgcatttcaggaagtggtttcagatgaaaggcatcaaggtggacagctcctggaagaaccaaaattgctgcatttcaaagggaatacctttagtcttcagatttctgtccttgatattcccccattcctctggagaattaaaccattcactgcctgccaggaagtcccgttctcccgcgtgtggtgcagtaaccggcagcccctgcactgtgccttctccctggagcgttatacgcccactaccacccagctgtcctgcaaaatctgcattcggcagctcaaaggccatgaacagatcctccaagtgcagacatcaatcctagagagtgaacgagaaaccatcactttcttcgcacaagaggacagcactttccctgcacagactggccccaaagccttcaaaattccctactccatcagacagcggatttgtgctacatttgatacccccaatgccaaaggcaaggactggcagatgttagcacagaaaaacagcatcaacaggaatttatcttatttcgctacacaaagtagcccatctgctgtcattttgaacctgtgggaagctcgtcatcagcatgatggtgatcttgactccctggcctgtgcccttgaagagattgggaggacacacacgaaactctcaaacatttcagaatcccagcttgatgaagccgacttcaactacagcaggcaaaatggactctagtccacttcctcccatgagacagagtgatggccagcttggggacatttgctttaaatgggaaagaggccgctttctgcccagtggcgttgggggaattcagccttcatttataatcagtgagattcccctgttgaagaaactaaattttatataggtaaaacatgttaatagggaagagtacaagctctcttacatataagagggctctactatctccttggaatccacatttgggttaactcctcagatttggagtggcaaggataaaagtgagggcagaagtagctgtgggaaaagatgagctatgataatgctgggaaggcagagattgattaagtgcatgctttgaaataggtttttaatgatgtgccccaaagggccagctgattctggtactagattgtcagagttttctaccaactggcatctgtgatgtcagagatcattgtaaaaatggcttttagacgtgaaacagggttgccaacccatttgtatgacttcaacaacgtcaaggagggcatttagaatttagaatctgagcacatcacaccagcaccagctccctgtctcttctagccacttaatggagacacaatggagaggtaagacagaccacaaactagttcttatagtgtactccaccttttacttttttcctgagacaaatctacccttattctttcttcctcttccttaccccttgcagtagggaggtatcaaggagcataattaaacttgtcaatacggaaagttgttttttctaacacaacaaagtgggaccatctctattcccatctaagccactcaaattgctgagtgctattagaacacagcttattacatggatatggggacaggagagattaaagcaggttcaaaaacacatgaactgcagatgccataggcctcaaatcagctgtaattctaggagacacgtgttgatctagttatctaacattgttgttataagaaaatgagtttactgcatttttcaatccagattcttgaaattgtctaacatgtgggtactgtgtcatcacaaaatctctcagtaaggctatatgtgatcctcattttgcctcttgggaaattagcagatagtctttgctctaaatgatatctgagtaaatagacttgaggaatcctctaccacagtgtccctgaaaccacatgcatcattcaggaagccttcaccctgtgactattcagcctccctgaatatgctttctctatagaaccactaacatatggctattgctctatgatttttttttttacattaggaggcagtgatattgtggaagattgaaatccacagataattcatgaccctcatcttatcactttactccatctttttatcctattaaattatttttgacaagatgtcctggtagactaaaggtgaacagatttgctcttgctcatcttctggtggatattttaacttgctattcacaatcaggacaaccaaagtcaaggacccagatgaaccacaaggcagctagtcagctacttagaggttggttacattcgaataaaaagtagtcagggaatgggggaggtggggagttggggagtacttggcagttgggatatgatccatttttttaaacaagttttttgtagatcccttgtaaaataataataataatgttgtgaatctccatgccaagtgaaaaaggcctaaagatgagttgaatttgtgataccatgggtaaggcatggaagaactcttgaatgtgttggccattttctctaactaacatgtggtatgtatggtcccctatattagatagaagtctttgctacatgtaattcaaaagcatctcgcttttctcaggaaccaaaggcttatgatgtaggacaaagaaatcatcttagaactgtcaagcatattttcacaataccatgtcaagatcaggaaaacacccttttgctagtgtgcttaacttatttatttcttctaggaaacaatagataaacagcatgaaaatgtaaatcatctggcatcactgatagaatttctgaaagagaaagagaagtagatggtcaaccagtcactagttggttggcatgaggtggtgtgcagaggaaagctgcattcactattgagtaaaaacttgtagaaagcacattatagagcttatgttggaatccatcttggaggatttttgttttaaactgtctttagcattttccctcttcccttctaatgggcattataattgtttcatctactctgtgaatctacataggtctttttttttagatgtttgatacattttaagtatttttaaatagatgaaaattctaaatgattttccctcaaatctatctagattattttaagatgagacaagattattgtcaatccctgaatgtctggagttacctcccatggatttttttttcctttggcctgggttttataaacaacttgaacatcatatcatataggataacaaaggaggaagttaacttaattcacctcagacttcagcctaagattcaatcaaattcatccttcagcctgtcttgtttcttctttatgtttcttttacttattgctgctaggatcctacataggatttctatagaaatgtatgaaattctgtggtcactgcatgtcaggattgcacagtatgttacaatacaatttcaaagagaacccacatttgtgagatttacagaccaaggtgtggtggaggaggtagaattgcagatcagataaaaagtgagcttacacttgaacttagttattcactgtgacctaaatttagtcctattgtaatatgtgcctgtcacaacacaaatacccctcttgaaagagatttactcatctatccaagcacttaatttggaaattttattgtcctattgcaaaatgaaacaaaattaaaagtggcctcgagtacttggtaagttacttaaaatttttacaaaaatatcccactcaatgccaaatctttcagtcctcaaaggcatttaagtccaatagtcatgctttaaatatggctttaaattatgccaccaaaatggtgcacttcacagattcaccagactgtagcatcataaagttaatttacagtttttacaacattgcttctacattcttactggtttacattaaaatcctttaagccaaaaggaagcttgctctatggatttaaatgcaaacttcatttaccagtgcaggaagtctcataaaactcagatgtactcccacaaaaattttattggcctttttgtaagagatgaaaaagaattgacacagttctctttaaagagaagaacttttttattattatttttatctccaactgcaggtggtgtcttttgccaaggtctctgtatttttctttcagttgtctttgggaggggatgttaagtcaaatcactaaaacagggttctctttggattaaaagttctggatttattgcaactattttccttgagaaacattctcagcatcaggattgataaacaaatgtagatgattaaaataggataattggttttagataatatcttctactgccaaacttctggcaaatttacctgtgaatttcaaaatgttataaaatctcttgatatgcttttgtttttccttttagccattttctcttcaatttcttagtccctctgccctctgtaaatgtgttgagtgatatagctatcagatgtattgaaggcaaagttctcgcagaggtctctgttccagctctgtaaaggtcacaggaatcgtgaaggagctgagaaatcttcctctccggcccactgtctgtggcccattgtcattgtttcctcatgaaacattgcagagtttgaatcctcagtaactctcattgactggattagaggtgatggccacagcaaatgggagagcaaaatgttggcctacagagaatgacacaattttattcgcctttggtgttagttgccatagtgctgtatttgaaaatcgatgctttagccaaaagctgaatgaccaccgtttccgtagtttccactgttttgtctgcatagaattttcctgaactacaagcaaaaatgtattttgtccaatgtcacaaaagtgaaaatgttactaatctt

SEQ ID NO: 233479 - protein, 651 aa, Artificial Sequence
  derived and/or modified sequence
MAGHPWHGTAALASSQAWRDGRERQALVSCRALYTYEDGSDDLKLAASGEGGLQELSGHFENQKVMYGFCSVKDSQAALPKYVLINWVGEDVPDARKCACASHVAKVAEFFQGVDVIVNASSVEDIDAGAIGQRLSNGLARLSSPVLHRLRLREDENAEPVGTTYQKTDAAVEMKRINREQFWEQAKKEEELRKEEERKKALDERLRFEQERMEQERQEQEERERRYREREQQIEEHRRKQQTLEAEEAKRRLKEQSIFGDHRDEEEETHMKKSESEVEEAAAIIAQRPDNPREFFKQQERVASASAGSCDVPSPFNHRPGSHLDSHRRMAPTPIPTRSPSDSSTASTPVAEQIERALDEVTSSQPPPLPPPPPPAQETQEPSPILDSEETRAAAPQAWAGPMEEPPQAQAPPRGPGSPAEDLMFMESAEQAVLAAPVEPATADATEIHDAADTIETDTATADTTVANNVPPAATSLIDLWPGNGEGASTLQGEPRAPTPPSGTEVTLAEVPLLDEVAPEPLLPAGEGCATLLNFDELPEPPATFCDPEEVEGESLAAPQTPTLPSALEELEQEQEPEPHLLTNGETTQKEGTQASEGYFSQSQEEEFAQSEELCAKAPPPVFYNKPPEIDITCWDADPVPEEEEGFEGGD

SEQ ID NO: 233480 - DNA, 1956 bp, Artificial Sequence
  derived and/or modified sequence
atggctggtcacccctggcatgggaccgcggcactggcctctagtcaagcgtggagagacggccgtgagaggcaggcactggtctcctgccgggccctgtatacatatgaagacggatcggacgacctgaaactcgccgctagcggcgaggggggcctacaagaattgagtggccattttgaaaatcagaaagtgatgtacggcttctgctccgttaaggacagtcaggccgccttacctaagtacgtgctcataaactgggtcggagaagacgtaccagacgctagaaaatgcgcttgtgcgtctcatgttgccaaggtagccgagtttttccaaggagtggatgtgattgttaatgccagttctgtggaagatattgatgccggtgccattggtcaacgtttgtcaaatgggctagcccggctttcttcaccagtactgcaccgtctgagattgcgggaagatgagaacgcagagcccgttggaaccacctaccagaaaaccgatgcagccgtcgagatgaagcgcataaacagggagcagttctgggagcaggccaagaaagaggaagagctacgtaaggaagaggaaaggaagaaggcccttgatgagcgcctaagatttgagcaggagagaatggagcaggaacggcaagagcaggaggaacgtgagcggcggtatcgggaacgagagcagcagattgaagaacatcgtaggaagcagcagacacttgaagccgaagaggccaaacggagactgaaagaacagagcatcttcggagaccatcgtgatgaggaggaggaaacccatatgaaaaaatctgagtccgaggttgaagaggcagcagctatcattgcccagcgccctgacaaccccagagagtttttcaagcagcaggagcgagtggccagcgccagcgctggctcttgcgacgttcccagtccctttaatcatagaccaggctcccacctcgactcccatcgtcgcatggctcctaccccgattcctacgaggagcccttccgactcatctaccgcttcgaccccagtagctgagcagatcgaaagagccctggacgaagtgacgtcatcgcaaccacctccccttccacccccaccacccccggcgcaagagacacaggaaccgtccccgatcctggacagcgaagaaacccgggcggcggctccccaggcatgggccggaccaatggaagaaccaccacaggcgcaggccccaccacgggggcctggatcacccgctgaggacctgatgtttatggaatctgccgagcaggccgtgctggcagctccagtcgagccagccacagcagacgccactgaaatccacgacgctgcggataccatcgaaacagacactgctactgcagacactacagtggctaataacgtgccgcccgctgctacctcgttgattgacctgtggcccggcaatggtgagggcgcctctactctccagggcgaaccacgtgcccccacgcctcctagtggtaccgaggtcacattggctgaggtgcccctgctagacgaggtggcccctgagccactcttgcctgccggcgaaggatgcgccacgctgctgaactttgatgaactcccggaacctcctgctactttctgtgatcctgaggaagttgagggggagagcttggcagctccacagacacccacccttccctctgctctggaagagctggaacaggagcaagagccggaacctcaccttctgacaaatggcgaaacaacacagaaggagggaactcaggcctccgagggttatttttcacagagtcaggaggaggaattcgcacagtctgaggagctgtgcgccaaggcccctccaccggtgttttacaacaaaccccctgagatagatatcacgtgttgggacgccgatcccgtacctgaggaggaggaaggctttgaaggaggcgactag

SEQ ID NO: 233481 - DNA, 1956 bp, Artificial Sequence
  derived and/or modified sequence
atggccggccacccctggcatggaacagctgccctggccagcagccaggcctggagagatggccgggagcggcaggccctggtgtcctgccgggccctgtacacctatgaagatggcagtgatgacctgaagctggccgccagcggggagggcggcctgcaggagctgagcggccactttgagaaccagaaggtgatgtatggcttctgcagcgtgaaggacagccaggccgccctgcccaagtatgtgctgatcaactgggtgggggaggatgtgcctgatgccaggaaatgtgcctgtgccagccacgtggccaaggtggccgagttcttccagggcgtggatgtgattgtgaatgccagctctgtggaggacattgatgctggggccatcggccagaggctgagcaatggcctggcccggctgagcagccctgtgctgcaccggctgcggctgcgggaggatgaaaatgctgagcctgtgggcaccacctaccagaagacagatgctgctgtggagatgaagaggatcaaccgggagcagttctgggagcaggccaagaaggaggaggagctgaggaaggaggaggagaggaagaaggccctggatgagcggctgcgctttgagcaggagaggatggagcaggagcggcaggagcaggaggagcgggagcggcgctaccgggagcgggagcagcagatcgaggagcacaggaggaagcagcagaccctggaggccgaggaggccaagaggcggctgaaggagcagagcatctttggagaccacagagatgaggaggaggagacccacatgaagaagtctgagagcgaggtggaggaggccgccgccatcatcgcccagaggccagacaacccccgggagttcttcaagcagcaggagcgggtggccagcgccagcgctggcagctgtgatgtgcccagccccttcaaccaccggcccggcagccacctggacagccacaggaggatggcccccacccccatccccaccaggagccccagcgacagcagcacagccagcacccctgtggccgagcagatcgagcgggccctggatgaggtgaccagcagccagcccccacccctgcccccacctcctcctccagcccaggagacccaggagcccagccccatcctggacagcgaggagaccagggctgctgccccccaggcctgggccggccccatggaggagcccccccaggcccaggccccaccccggggccctggcagccctgctgaggacctgatgttcatggagagcgctgagcaggccgtgctggccgcccctgtggagcccgccacagcagatgccacagagatccatgatgctgctgacaccattgaaacagacacagccacagctgacaccaccgtggccaacaacgtgcccccagctgccaccagcctgattgacctgtggccaggaaatggagagggcgccagcaccctgcagggcgagccccgggcccccaccccacccagcggcacagaggtgaccctggccgaggtgcccctgctggatgaggtggcccctgagcccctgctgcctgctggggagggctgtgccaccctgctgaactttgatgagctgcctgagcccccagccaccttctgtgaccctgaggaggtggagggggagagcctggccgccccccagacccccaccctgcccagcgccctggaggagctggagcaggagcaggagcctgagccccacctgctgaccaacggggagaccacccagaaggagggcacccaggccagcgagggctacttcagccagagccaggaggaggagtttgcccagagcgaggagctgtgtgccaaggcccctcctcctgtgttctacaacaagcccccagaaattgacatcacctgctgggatgctgaccctgtgcctgaggaggaggagggctttgaaggaggagactag

SEQ ID NO: 233482 - DNA, 1956 bp, Artificial Sequence
  derived and/or modified sequence
atggccggccacccctggcacggcaccgccgccctggccagcagccaggcctggcgcgacggcagagaacgccaggcactggtgtcctgtcgggccctttatacctacgaggacggctctgacgatctcaaactggctgcctctggggaagggggtctccaggagctcagcggccatttcgaaaatcagaaggtgatgtacggattttgttctgtgaaagacagccaggcagctcttccaaagtatgtgctcataaattgggttggcgaggacgttcctgacgcacgtaagtgtgcttgcgcctcacacgtagccaaagtggctgaattctttcaaggcgtggatgtgatcgtcaatgcttcctccgtggaggacatcgatgccggtgccattggccagagacttagcaacggcttggctagactgtcctctcctgttctccaccggctgcggctgagagaggacgaaaatgcagagccagtagggactacataccagaaaacggatgctgcggtggaaatgaagcgcattaatagggagcagttttgggaacaggccaaaaaggaggaagagctcagaaaggaggaggaacggaaaaaagccttggacgagcgtctgaggtttgagcaagaaagaatggagcaggaaagacaggaacaagaggagagggaaagacgctatagggaaagagaacagcagatcgaggaacatcgccggaaacaacagactcttgaggctgaggaggctaagaggcgtttgaaggaacagtcgatcttcggcgatcatagagacgaagaagaagagactcacatgaagaaaagcgaaagtgaggtggaagaagctgctgctataatcgcgcaacgcccagacaacccacgcgagtttttcaaacaacaggaacgcgtggccagtgcctccgctggatcatgcgacgtcccatccccattcaaccaccggcctgggtcacatttggatagccaccgaagaatggcccctacaccaatccccaccaggagcccatccgactctagcacagcttccacgccggtcgccgagcagatcgaacgggccctagacgaagtcaccagttcccagccaccacccctgccaccaccgcccccccctgctcaggagacccaggaaccatcacccatacttgactcagaagaaactcgggcggccgccccgcaagcttgggcagggcccatggaagaaccgcctcaggcccaggcacccccccgggggccaggctcccctgccgaagatctaatgttcatggaatcagcggagcaggcagtgctggccgcccccgttgagccggctactgccgacgcgaccgaaatccacgacgctgccgacaccatcgaaactgacacggccactgcagacaccaccgttgcaaataatgtgcctccagcggctacgtccctgatcgatttgtggccagggaatggggagggcgccagcacactccagggcgagccccgggcacccacacctcctagtggcaccgaagtaacactcgctgaggtgcctttactagatgaggttgccccagagcccctccttcctgccggggagggatgcgccaccctgctgaacttcgacgagctgccagagccccccgccaccttctgtgatccggaggaagtggagggggagtcactggccgctccccaaacacccacactcccctcggcactagaggaactggagcaggaacaggaacctgagccccaccttctcacgaacggggaaactacacagaaggaagggacccaggccagcgaggggtatttcagccagtcccaggaggaggagtttgcccaatccgaagaactgtgcgccaaggccccccctcccgtcttctataataaaccacctgagatcgatataacatgctgggatgccgaccccgttccagaggaagaagaaggctttgaggggggggattag

SEQ ID NO: 233483 - DNA, 1956 bp, Artificial Sequence
  derived and/or modified sequence
atggctggacacccctggcacggtaccgcagccctcgcttctagtcaggcctggagagatggcagagagaggcaggctcttgtttcttgtcgggcactgtatacctacgaggacggatctgacgacttgaaactagcagcctcgggcgagggaggtctccaagaattgtcaggccacttcgaaaaccagaaggtgatgtacggcttttgttccgtgaaggactcacaggcagctcttcccaaatacgttctgattaattgggtgggggaagacgtcccggacgcacgaaagtgcgcgtgcgcatctcatgtcgccaaggtggcagaattcttccagggggtggacgtcatcgttaatgccagctcagtggaggacatagacgctggtgctattgggcaacgcctctctaatggcctggcccgactgtcatcacctgtgttgcaccgtttacggctgagggaggatgagaatgccgagccagtggggaccacttaccaaaagacggatgctgcagtggaaatgaaaaggatcaacagggagcagttttgggaacaggctaagaaggaagaagagttgagaaaagaggaagagaggaagaaggccttggacgagagactgcggttcgaacaagagaggatggagcaggagcgacaagagcaggaggaacgtgagcgcaggtatcgagagcgtgaacagcagatagaagaacatagacgcaaacagcagactctcgaagctgaggaggccaagagacgcttgaaagaacagtctatctttggcgaccatagggatgaagaagaggaaactcacatgaagaagtctgaatctgaagtggaggaggccgctgctattatcgcccaacggcctgataatcctagagaattcttcaaacagcaagagcgcgtggcaagcgcctcggcgggatcatgcgacgtccccagcccctttaaccaccgcccaggatcacatctcgactctcataggcggatggccccaacaccgattcccactaggtccccctcagatagttccacagcctctaccccagtagccgagcagatagaacgagctctggacgaagtgactagctcccagcccccacccctcccgcctccacccccacccgctcaggagacccaggaaccttccccaattctcgactccgaagaaaccagagcagctgccccacaggcttgggccggtcctatggaagagccaccacaggcccaggcgccaccgcgtggccctgggagtccggctgaagatttgatgtttatggaatcagctgaacaagccgtcctggcagcccctgtagaacctgctaccgcagatgcaaccgagatacacgacgctgccgacacgatcgagacagacactgcgacagcagataccactgtggctaataatgtgccaccagccgctacgtccctcatcgatctgtggcctgggaatggcgagggcgctagtaccctccagggtgagcctagggctccaaccccgccatccggaacggaagtaactctggccgaagttccgcttcttgatgaggttgcgccagagccgctactccctgccggagagggttgtgcgactcttctaaactttgacgagctgcccgaacctcccgcaacattctgcgacccggaagaagtggagggcgagtcactcgctgcaccccaaacaccaaccctgccctcggcgctcgaggagcttgagcaggagcaggagcccgagcctcatcttctcaccaacggagaaacaacgcagaaggaaggcacacaagcttccgaagggtactttagccagagtcaggaggaggagttcgcccagagcgaggagttgtgcgcaaaggctccccctcccgttttctacaacaaaccccctgaaattgatattacatgctgggacgccgatccagtgcctgaggaggaagaagggttcgagggcggagactag

SEQ ID NO: 233484 - DNA, 1956 bp, Artificial Sequence
  derived and/or modified sequence
atggccggccacccctggcacggcaccgccgccctggccagcagccaggcctggagagacggcagagagagacaggccctggtgagctgcagagccctgtacacctacgaggacggcagcgacgacctgaagctggccgccagcggcgagggcggcctgcaggagctgagcggccacttcgagaaccagaaggtgatgtacggcttctgcagcgtgaaggacagccaggccgccctgcccaagtacgtgctgatcaactgggtgggcgaggacgtgcccgacgccagaaagtgcgcctgcgccagccacgtggccaaggtggccgagttcttccagggcgtggacgtgatcgtgaacgccagcagcgtggaggacatcgacgccggcgccatcggccagagactgagcaacggcctggccagactgagcagccccgtgctgcacagactgagactgagagaggacgagaacgccgagcccgtgggcaccacctaccagaagaccgacgccgccgtggagatgaagagaatcaacagagagcagttctgggagcaggccaagaaggaggaggagctgagaaaggaggaggagagaaagaaggccctggacgagagactgagattcgagcaggagagaatggagcaggagagacaggagcaggaggagagagagagaagatacagagagagagagcagcagatcgaggagcacagaagaaagcagcagaccctggaggccgaggaggccaagagaagactgaaggagcagagcatcttcggcgaccacagagacgaggaggaggagacccacatgaagaagagcgagagcgaggtggaggaggccgccgccatcatcgcccagagacccgacaaccccagagagttcttcaagcagcaggagagagtggccagcgccagcgccggcagctgcgacgtgcccagccccttcaaccacagacccggcagccacctggacagccacagaagaatggcccccacccccatccccaccagaagccccagcgacagcagcaccgccagcacccccgtggccgagcagatcgagagagccctggacgaggtgaccagcagccagcccccccccctgccccccccccccccccccgcccaggagacccaggagcccagccccatcctggacagcgaggagaccagagccgccgccccccaggcctgggccggccccatggaggagcccccccaggcccaggccccccccagaggccccggcagccccgccgaggacctgatgttcatggagagcgccgagcaggccgtgctggccgcccccgtggagcccgccaccgccgacgccaccgagatccacgacgccgccgacaccatcgagaccgacaccgccaccgccgacaccaccgtggccaacaacgtgccccccgccgccaccagcctgatcgacctgtggcccggcaacggcgagggcgccagcaccctgcagggcgagcccagagcccccaccccccccagcggcaccgaggtgaccctggccgaggtgcccctgctggacgaggtggcccccgagcccctgctgcccgccggcgagggctgcgccaccctgctgaacttcgacgagctgcccgagccccccgccaccttctgcgaccccgaggaggtggagggcgagagcctggccgccccccagacccccaccctgcccagcgccctggaggagctggagcaggagcaggagcccgagccccacctgctgaccaacggcgagaccacccagaaggagggcacccaggccagcgagggctacttcagccagagccaggaggaggagttcgcccagagcgaggagctgtgcgccaaggcccccccccccgtgttctacaacaagccccccgagatcgacatcacctgctgggacgccgaccccgtgcccgaggaggaggagggcttcgagggcggcgactag

SEQ ID NO: 233485 - DNA, 3072 bp, Artificial Sequence
  derived and/or modified sequence
ggcggccggacgcggcccggaggcgcggggtcccgatgtggggcccggggccgcgtggccctgcgggagcccatcccccaccctaccccccgggcccgggggacaggtgtgcacggggcggccaagggcaccttcgccaccttcgagcgggcgaggtccgggcggggacggggcggggaccgagctagcggagccagcgcagcctgcccggctcagcccggcccggccacagcacaaaggaaagcgagggcgggggaggagcggagcgggctgggggccgggcgccccgcccaccggggggcctctcggagtgggccgccctccccccgaaacctgggctggagtgaggtggaaggatgtttgctgccacatggcgaccgcgaagtgactcccttaccgccgcgggtcgcggaggaggcagggggaaggtgcccatctggttcctaggcctcctctccctgctggcagatgggaacaggttcttcttgaggaaactgaggcaaagaggagggcaggtctgagggaccccgcttgggctggcctcacccgcacactgggagggcagccaggtggggactctgacctgggggcttctggaggagaggatgagatggctgggcatccatggcatggtactgcagcactggccagcagccaggcctggagggatggacgcgagagacaagctctcgtgtcctgcagggctctgtacacatatgaagatggctccgatgacctcaagcttgcagcatcaggagaagggggcttgcaggagctttcgggacactttgagaaccagaaggtgatgtacggcttctgcagtgtcaaggactcccaagctgctctgccaaaatacgtgctcatcaactgggtgggcgaagatgtgcctgatgcccgcaagtgcgcttgtgccagccacgtggctaaggtggcggagttcttccagggtgtcgacgtgatcgtgaacgccagcagcgtggaagacatagacgcgggtgccatcgggcagcggctctctaacgggctggcgcgactctccagccctgtgctgcaccgactgcggctgcgagaggatgagaacgcagagcccgtgggcaccacctaccagaagacggatgcagctgtggaaatgaagcggattaaccgagagcagttctgggagcaggccaagaaggaagaagagctgcggaaggaggaggagcggaagaaggccctggatgagaggctcaggttcgagcaggagcggatggagcaggagcggcaggagcaagaggagcgcgagcggcgctaccgggagcgggagcagcagatcgaggagcacaggaggaaacagcagactttagaagcggaagaggccaagaggcggttgaaggagcagtctatctttggtgaccatcgggatgaggaggaagagacccacatgaagaagtcagagtcggaggtggaggaggcagcagctattattgcccagcggcctgacaacccaagggagttcttcaagcagcaggaaagagtcgcatcggcctctgcgggcagctgtgatgtaccctcgcccttcaaccatcgaccaggcagccacctggacagccaccggaggatggcgcccactcccatccccacgcggagcccgtctgactccagcaccgcctccacccctgtcgctgagcagatagagcgggccctggatgaggtcacctcctcgcagcctccaccactgccaccgccacccccaccagcccaagagacccaggagcccagccccatcctagacagtgaggagaccagagcagcagcccctcaggcctgggccggccccatggaggagccccctcaggcacaggcgcctccccgggggccaggcagccctgcagaggacttgatgttcatggagtctgcagagcaggctgtcctggctgctcccgtggagcctgccacagctgacgccacggagatccacgatgcagctgacaccattgaaactgacactgccactgctgacaccactgttgccaacaacgtaccccccgccgccaccagcctcattgacctatggcctggcaacggggaaggggcctccacactccagggtgagcccagggcccccacgccaccctcgggtactgaggtcaccctggcagaggtgcccctgctggatgaggtggctccggagccactgctgccagcaggcgaaggctgtgccacccttctcaactttgatgagctgcctgagccgccagccaccttctgtgacccagaggaagtggaaggggagtccctggctgccccccagaccccaactctgccctcagcccttgaggagctggagcaagagcaggagccggagccccacctgctaaccaatggcgagaccacccagaaggaggggacccaggccagtgaggggtacttcagtcaatcacaggaggaggagtttgcccaatcggaagagctctgtgccaaggctccgcctcctgtgttctacaacaagcctccagagatcgacatcacatgctgggatgcagacccagttccagaagaggaggagggcttcgagggtggtgattagcggtggcgccagccctaggctacccttgccaaggccgcccacctgcatcagcctctggccagacggcccgccgtgcctgcattcgcagcagctccgcctggcacccactccggattccggccctggctggggacttggccgcttccctacccacagggcctgacttttacagcttttctctttttttaaaaagttgataggagacttgtacagttgactggctttcctctcgttggtagttgagacgctgttgcaaattccacccctccttccctggtccagattgtagctcttagtcctccctgctcagctggccgggttggaggcctcaccctgcttggggcctggcgtggggggagctctggtgggaaaatgtcccccacctcttttcctagttttatgtttcttgggaaaatatcactttgtattctctgtccagggcttcagatattttgcacgaattttaaaacatggcaataaatggctcgtgggctctggctccctgg

SEQ ID NO: 233486 - protein, 313 aa, Artificial Sequence
  derived and/or modified sequence
MIGQKTLYSFFSPSPARKRHAPSPEPAVQGTGVAGVPEESGDAAAIPAKKAPAGQEEPGTPPSSPLSAEQLDRIQRNKAAALLRLAARNVPVGFGESWKKHLSGEFGKPYFIKLMGFVAEERKHYTVYPPPHQVFTWTQMCDIKDVKVVILGQDPYHGPNQAHGLCFSVQRPVPPPPSLENIYKELSTDIEDFVHPGHGDLSGWAKQGVLLLNAVLTVRAHQANSHKERGWEQFTDAVVSWLNQNSNGLVFLLWGSYAQKKGSAIDRKRHHVLQTAHPSPLSVYRGFFGCRHFSKTNELLQKSGKKPIDWKEL

SEQ ID NO: 233487 - protein, 270 aa, Artificial Sequence
  derived and/or modified sequence
MGVFCLGPWGLGRKLRTPGKGPLSAEQLDRIQRNKAAALLRLAARNVPVGFGESWKKHLSGEFGKPYFIKLMGFVAEERKHYTVYPPPHQVFTWTQMCDIKDVKVVILGQDPYHGPNQAHGLCFSVQRPVPPPPSLENIYKELSTDIEDFVHPGHGDLSGWAKQGVLLLNAVLTVRAHQANSHKERGWEQFTDAVVSWLNQNSNGLVFLLWGSYAQKKGSAIDRKRHHVLQTAHPSPLSVYRGFFGCRHFSKTNELLQKSGKKPIDWKEL

SEQ ID NO: 233488 - DNA, 942 bp, Artificial Sequence
  derived and/or modified sequence
atgatcggccagaagaccctgtacagcttcttcagccccagccccgccagaaagagacacgcccccagccccgagcccgccgtgcagggcaccggcgtggccggcgtgcccgaggagagcggcgacgccgccgccatccccgccaagaaggcccccgccggccaggaggagcccggcaccccccccagcagccccctgagcgccgagcagctggacagaatccagagaaacaaggccgccgccctgctgagactggccgccagaaacgtgcccgtgggcttcggcgagagctggaagaagcacctgagcggcgagttcggcaagccctacttcatcaagctgatgggcttcgtggccgaggagagaaagcactacaccgtgtacccccccccccaccaggtgttcacctggacccagatgtgcgacatcaaggacgtgaaggtggtgatcctgggccaggacccctaccacggccccaaccaggcccacggcctgtgcttcagcgtgcagagacccgtgccccccccccccagcctggagaacatctacaaggagctgagcaccgacatcgaggacttcgtgcaccccggccacggcgacctgagcggctgggccaagcagggcgtgctgctgctgaacgccgtgctgaccgtgagagcccaccaggccaacagccacaaggagagaggctgggagcagttcaccgacgccgtggtgagctggctgaaccagaacagcaacggcctggtgttcctgctgtggggcagctacgcccagaagaagggcagcgccatcgacagaaagagacaccacgtgctgcagaccgcccaccccagccccctgagcgtgtacagaggcttcttcggctgcagacacttcagcaagaccaacgagctgctgcagaagagcggcaagaagcccatcgactggaaggagctgtag

SEQ ID NO: 233489 - DNA, 942 bp, Artificial Sequence
  derived and/or modified sequence
atgatcgggcaaaagactctctatagcttcttcagcccttccccagcgaggaagcggcacgcgccatccccagagcccgctgttcagggaaccggggtcgcaggtgtccccgaagagagcggtgacgccgccgcgatccccgcaaaaaaggcccccgccgggcaggaagaaccaggtacccctccctcctccccgctgagcgctgagcagctggataggatccagcggaataaggcggcagccctgcttaggctggcagctagaaatgtgccggttggatttggagagagctggaagaagcacctgtcgggggaatttggaaaaccatatttcattaaattaatgggattcgtggctgaagaaagaaaacactataccgtgtatccccctccccatcaggtgttcacctggacccagatgtgcgacatcaaagatgtgaaggtggtcattctgggtcaggatccctaccacggacccaaccaagcacacgggttatgtttcagtgttcaacggcctgttccacccccccctagcctggaaaacatatataaggaattatccaccgacatcgaagactttgtgcaccctggtcacggtgacctgagcggttgggccaaacagggagttcttcttttgaacgctgtcctgaccgtgagggctcaccaggcgaatagccataaagagcggggctgggagcaattcaccgatgctgtcgtttcgtggctgaaccaaaattctaacggactggtattcctgctgtggggctcttatgcacagaaaaagggtagcgccattgaccgaaaacggcaccacgttctgcagacggctcacccttcacctctgtccgtgtatcgaggattcttcggctgtagacacttctctaagacgaatgagttgctacagaagagcgggaaaaaaccaattgattggaaggagctctag

SEQ ID NO: 233490 - DNA, 942 bp, Artificial Sequence
  derived and/or modified sequence
atgattggccagaagaccctgtacagcttcttcagccccagccctgccaggaagagacatgcccccagccctgagcctgctgtgcagggcactggagtggccggcgtgcctgaggagagcggagatgctgctgccatcccagccaagaaggccccagctggccaggaggagcccggcaccccacccagcagccccctgtctgctgagcagctggaccgcatccagaggaacaaggccgccgccctgctgcggctggccgccagaaatgtgcctgtgggctttggagagagctggaagaagcacctgtctggagaatttgggaagccctacttcatcaagctgatgggctttgtggccgaggagaggaagcactacacagtgtaccccccaccccaccaggtgttcacctggacccagatgtgtgacatcaaggatgtgaaggtggtgatcctgggccaggacccctaccacggccccaaccaggcccacggcctgtgcttctctgtgcagaggcctgtgcccccaccacccagcctggagaacatctacaaggagctgagcacagacattgaagattttgtgcaccctggccacggggacctgagcggctgggccaagcagggcgtgctgctgctgaatgctgtgctgactgtgcgggcccaccaggccaacagccacaaggagcggggctgggagcagttcacagatgctgtggtgtcctggctgaaccagaacagcaatggcctggtgttcctgctgtggggcagctatgcccagaagaagggcagcgccatcgacaggaagaggcaccacgtgctgcagacagcccaccccagccccctgtctgtgtaccggggcttcttcggctgccgccacttcagcaagaccaatgagctgctgcagaagagcggcaagaagcccatcgactggaaggagctgtag

SEQ ID NO: 233491 - DNA, 942 bp, Artificial Sequence
  derived and/or modified sequence
atgatcggccagaagaccctgtacagcttcttcagccccagccccgcaagaaagcgccatgccccgagccctgaacctgccgtgcagggaactggtgtggcaggtgtccctgaagagtctggggacgccgccgcgattccggcgaaaaaagcccctgccggccaagaggaaccgggtacacccccgagtagtcctttgtctgccgaacagttagacaggatacagcgtaacaaagccgctgcactccttcggctcgcagctcgaaacgtcccagtgggcttcggagagtcgtggaagaaacacctgtccggagagttcgggaaaccatacttcataaagctgatgggtttcgtggccgaagaaaggaaacactatactgtgtacccacctcctcatcaggtgtttacttggacccagatgtgcgacattaaggacgtgaaggtggtgatactcggccaggacccctatcacggtccgaaccaggctcatggcctttgttttagtgtgcaacgacccgtcccgcctcctccctcactggagaatatttataaagagctctcaactgacatcgaagattttgtccacccaggacacggagatctcagtggctgggccaagcagggagtgctgttactcaacgcggtgctgaccgtcagggcccatcaggcaaacagtcataaggagcgcggctgggagcagttcactgacgcagttgtatcttggctgaaccagaacagtaatggcctagtgtttctcctatgggggtcatatgctcagaagaaagggtctgctattgaccgtaagcggcaccacgtgctccagaccgctcatccatcgcctctctcagtttaccgagggttcttcggatgcaggcacttcagcaagacgaatgagttgctgcagaagtcagggaagaagcccatagattggaaggaactatag

SEQ ID NO: 233492 - DNA, 942 bp, Artificial Sequence
  derived and/or modified sequence
atgatcgggcagaagactttgtatagctttttcagtccaagcccggcaagaaaaagacacgccccatcacccgagccggcagtgcaggggactggtgtagcaggagtgcccgaggagtccggagatgccgcagcaatcccagcgaagaaagcgccagcgggtcaggaagagcctggaactcctccctcctcacctttatccgccgaacaattggataggatccaacggaacaaggcagccgctctgctgaggctggctgcgaggaacgtccctgtgggttttggcgaatcttggaaaaaacacctgagcggtgagtttggaaagccgtattttattaaacttatgggttttgttgccgaggagcgtaagcattacacagtgtacccaccgcctcatcaggtgttcacgtggacacaaatgtgtgatattaaagacgtcaaagtggtgattctcggccaagacccatatcatgggccaaatcaggctcacggactgtgcttctcggtccagcgaccggtgcctcctcctcccagcctggagaacatatacaaggaactgtcaacagatatcgaagacttcgtacatcctggtcatggagacctgagcgggtgggcgaaacaaggtgtccttctgttaaacgccgtacttacagtgcgagcccatcaggccaactcacacaaagagcgcggatgggaacagttcaccgatgcggtggttagctggctgaaccagaacagcaatggccttgtgtttctgttatggggctcctacgcacagaagaagggatccgctattgatagaaagcgacaccacgtgttgcagaccgcccacccttccccgctgtctgtttataggggcttctttggatgccggcacttcagcaagactaatgaattgctgcaaaagagcggcaaaaagcctattgactggaaggaactctag

SEQ ID NO: 233493 - DNA, 2071 bp, Artificial Sequence
  derived and/or modified sequence
gcatgcgcgggccgcttggcgccaattgctgaccgccacagccacagccagggctagcctcgccggttcccgggtggcgcgcgttcgctgcctcctcagctccaggatgatcggccagaagacgctctactcctttttctcccccagccccgccaggaagcgacacgcccccagccccgagccggccgtccaggggaccggcgtggctggggtgcctgaggaaagcggagatgcggcggccatcccagccaagaaggccccggctgggcaggaggagcctgggacgccgccctcctcgccgctgagtgccgagcagttggaccggatccagaggaacaaggccgcggccctgctcagactcgcggcccgcaacgtgcccgtgggctttggagagagctggaagaagcacctcagcggggagttcgggaaaccgtattttatcaagctaatgggatttgttgcagaagaaagaaagcattacactgtttatccacccccacaccaagtcttcacctggacccagatgtgtgacataaaagatgtgaaggttgtcatcctgggacaggatccatatcatggacctaatcaagctcacgggctctgctttagtgttcaaaggcctgttccgcctccgcccagtttggagaacatttataaagagttgtctacagacatagaggattttgttcatcctggccatggagatttatctgggtgggccaagcaaggtgttctccttctcaacgctgtcctcacggttcgtgcccatcaagccaactctcataaggagcgaggctgggagcagttcactgatgcagttgtgtcctggctaaatcagaactcgaatggccttgttttcttgctctggggctcttatgctcagaagaagggcagtgccattgataggaagcggcaccatgtactacagacggctcatccctcccctttgtcagtgtatagagggttctttggatgtagacacttttcaaagaccaatgagctgctgcagaagtctggcaagaagcccattgactggaaggagctgtgatcatcagctgaggggtggcctttgagaagctgctgttaacgtatttgccagttacgaagttccactgaaaattttcctattaattcttaagtactctgcataagggggaaaagcttccagaaagcagccatgaaccaggctgtccaggaatggcagctgtatccaaccacaaacaacaaaggctaccctttgaccaaatgtctttctctgcaacatggcttcggcctaaaatatgcagaagacagatgaggtcaaatactcagttggctctctttatctcccttgcctttatggtgaaacaggggagatgtgcacctttcaggcacagccctagtttggcgcctgctgctccttggttttgcctggttagactttcagtgacagatgttggggtgtttttgcttagaaaggtccccttgtctcagccttgcagggcaggcatgccagtctctgccagttccactgcccccttgatctttgaaggagtcctcaggcccctcgcagcataaggatgttttgcaactttccagaatctggcccagaaattagggctcaatttcctgattgtagtagaggttaagattgctgtgagctttatcagataagagaccgagagaagtaagctgggtcttgttattccttgggtgttggtggaataagcagtggaatttgaacaaggaagaggagaaaagggaattttgtctttatggggtggggtgattttctcctagggttatgtccagttggggtttttaaggcagcacagactgccaagtactgttttttttaaccgactgaaatcactttgggatattttttcctgcaacactggaaagttttagttttttaagaagtactcatgcagatatatatatatatatttttcccagtcctttttttaagagacggtctttattgggtctgcacctccatccttgatcttgttagcaatgctgtttttgctgttagtcgggttagagttggctctacgcgaggtttgttaataaaagtttgttaaaagtt

SEQ ID NO: 233494 - protein, 277 aa, Artificial Sequence
  derived and/or modified sequence
MAAGRLFLSRLRAPFSSMAKSPLEGVSSSRGLHAGRGPRRLSIEGNIAVGKSTFVKLLTKTYPEWHVATEPVATWQNIQAAGTQKACTAQSLGNLLDMMYREPARWSYTFQTFSFLSRLKVQLEPFPEKLLQARKPVQIFERSVYSDRYIFAKNLFENGSLSDIEWHIYQDWHSFLLWEFASRITLHGFIYLQASPQVCLKRLYQRAREEEKGIELAYLEQLHGQHEAWLIHKTTKLHFEALMNIPVLVLDVNDDFSEEVTKQEDLMREVNTFVKNL

SEQ ID NO: 233495 - protein, 239 aa, Artificial Sequence
  derived and/or modified sequence
MAAGRLFLSRLRAPFSSMAKSPLEGVSSSRGLHAGRGPRRLSIEGNIACTAQSLGNLLDMMYREPARWSYTFQTFSFLSRLKVQLEPFPEKLLQARKPVQIFERSVYSDRYIFAKNLFENGSLSDIEWHIYQDWHSFLLWEFASRITLHGFIYLQASPQVCLKRLYQRAREEEKGIELAYLEQLHGQHEAWLIHKTTKLHFEALMNIPVLVLDVNDDFSEEVTKQEDLMREVNTFVKNL

SEQ ID NO: 233496 - protein, 255 aa, Artificial Sequence
  derived and/or modified sequence
MAAGRLFLSRLRAPFSSMAKSPLEGVSSSRGLHAGRGPRRLSIEGNIGNILKQIRMRAPIQETACTAQSLGNLLDMMYREPARWSYTFQTFSFLSRLKVQLEPFPEKLLQARKPVQIFERSVYSDRYIFAKNLFENGSLSDIEWHIYQDWHSFLLWEFASRITLHGFIYLQASPQVCLKRLYQRAREEEKGIELAYLEQLHGQHEAWLIHKTTKLHFEALMNIPVLVLDVNDDFSEEVTKQEDLMREVNTFVKNL

SEQ ID NO: 233497 - DNA, 834 bp, Artificial Sequence
  derived and/or modified sequence
atggccgccggccgcctgtttttaagtcgcctccgcgcaccctttagtagcatggccaagagtccccttgaaggggtatcatcttcccgcggcctccacgcgggacgcggtcctagaagactctcgatcgagggcaacattgccgtgggtaagagcacgttcgtgaaactactaaccaaaacctaccccgaatggcacgttgctaccgaaccggtcgccacctggcaaaacatccaggctgctggcacccaaaaagcctgcacggctcagtcccttggcaatttactagacatgatgtatcgcgagccagcccggtggtcttataccttccagacctttagttttctgagccgtttgaaggtgcaactggagccctttccagagaaactgctgcaggcccggaagcccgtgcagatttttgagcgcagcgtatacagtgacaggtacatttttgccaagaaccttttcgagaacggaagtctttccgacattgaatggcatatttatcaggactggcacagctttctgctgtgggaatttgcatcaagaatcactctacacggctttatctacctccaagcctctccgcaggtatgtctgaaaaggctataccaacgggcacgcgaggaagagaagggaattgagctggcgtatctggaacagttgcacggacagcatgaagcctggcttatccataaaacaacaaaactccacttcgaggcattgatgaacatccccgtactggtcttggacgtgaacgatgacttctccgaggaggtcaccaagcaagaagatctgatgcgggaagtaaatacgtttgtgaagaatctttag

SEQ ID NO: 233498 - DNA, 720 bp, Artificial Sequence
  derived and/or modified sequence
atggccgctggaagactgttcctgtccagactgcgcgctcccttcagctctatggctaagtcacccctggaaggtgttagcagttctaggggcctgcacgcaggtcgcggaccgcggagactgtccatcgagggaaacatcgcatgcactgcacagagccttggcaatctgttagatatgatgtatagggaacctgcacggtggtcatatacctttcagacattttcattcctcagtcggctgaaggtgcagctggaaccatttccagagaagctgcttcaagccagaaaacctgttcagatattcgagagatcggtttactcagataggtacatcttcgcaaaaaatctctttgagaacggcagtctgagcgacatagagtggcatatctatcaggactggcatagctttttactgtgggaattcgcttcaaggattaccttacatggtttcatctacctgcaggccagcccacaggtatgtctcaaacgcctgtatcagcgagccagagaagaagagaaagggatcgagcttgcttacctcgaacaactccacggtcagcatgaggcctggctcattcacaagaccactaaactccactttgaagctctgatgaatataccagtgctcgttcttgatgtgaatgacgacttttccgaggaagtgacgaagcaggaagaccttatgagagaagtcaatacatttgtaaaaaacttgtag

SEQ ID NO: 233499 - DNA, 768 bp, Artificial Sequence
  derived and/or modified sequence
atggccgccgggaggctgttcctcagtcggctgcgagctccattcagttctatggccaagtcgcctctcgagggggttagctcaagccgcggtctacacgcgggcagagggccgagaaggctcagtatagaaggcaacattgggaatatactgaagcagatccggatgcgcgcccctatccaggagacagcttgtaccgcacagagcctcggaaacctgcttgacatgatgtacagggagcctgctcgctggtcttacacattccaaacattcagttttctctctcgcctgaaggtgcaacttgaacctttcccggagaaactgttgcaggctcggaagcctgtccagattttcgaacggagtgtttattctgataggtatatttttgcaaaaaatctttttgaaaatggaagcctgtcggacatagaatggcacatataccaggactggcattcattcctcctgtgggaattcgctagccggatcacactccatgggttcatctaccttcaggcgagcccgcaggtgtgcctgaagcgcctgtaccaaagggccagagaggaggaaaaggggattgagctggcatacttagagcagctgcacggccaacacgaagcctggctgattcataaaacaaccaagctccatttcgaagctctgatgaatatccccgttctcgtcttagatgtcaacgacgatttctctgaagaggtcacaaaacaagaggatctgatgagagaggtaaacaccttcgtgaagaatttatag

SEQ ID NO: 233500 - DNA, 834 bp, Artificial Sequence
  derived and/or modified sequence
atggctgctggccgcctcttcctgagccggctgcgggcccccttcagctccatggccaagagccccctggagggcgtgagcagcagccggggcctgcacgccggccggggcccccggcggctgagcattgagggcaacattgctgtgggcaagagcacctttgtgaagctgctgaccaagacctacccagagtggcacgtggccacagagcctgtggccacctggcagaacatccaggccgccggcacccagaaggcctgcacagcccagagcctgggcaacctgctggacatgatgtaccgggagcccgcccgctggagctacaccttccagaccttctccttcctgagccggctgaaggtgcagctggagcccttccctgagaagctgctgcaggccaggaagcctgtgcagatctttgagaggtctgtgtacagcgaccgctacatctttgccaagaacctgtttgaaaatggcagcctgagtgacatcgagtggcacatctaccaggactggcacagcttcctgctgtgggagtttgccagccgcatcaccctgcacggcttcatctacctgcaggccagcccccaggtgtgcctgaagaggctgtaccagagggcccgggaggaggagaagggcatcgagctggcctacctggagcagctgcacggccagcacgaggcctggctgatccacaagaccaccaagctgcactttgaggccctgatgaacatccctgtgctggtgctggatgtgaatgatgacttcagcgaggaggtgaccaagcaggaggacctgatgagggaggtgaacacctttgtgaagaacctgtag

SEQ ID NO: 233501 - DNA, 720 bp, Artificial Sequence
  derived and/or modified sequence
atggctgctggccgcctcttcctgagccggctgcgggcccccttcagctccatggccaagagccccctggagggcgtgagcagcagccggggcctgcacgccggccggggcccccggcggctgagcattgagggcaacatcgcctgcacagcccagagcctgggcaacctgctggacatgatgtaccgggagcccgcccgctggagctacaccttccagaccttctccttcctgagccggctgaaggtgcagctggagcccttccctgagaagctgctgcaggccaggaagcctgtgcagatctttgagaggtctgtgtacagcgaccgctacatctttgccaagaacctgtttgaaaatggcagcctgagtgacatcgagtggcacatctaccaggactggcacagcttcctgctgtgggagtttgccagccgcatcaccctgcacggcttcatctacctgcaggccagcccccaggtgtgcctgaagaggctgtaccagagggcccgggaggaggagaagggcatcgagctggcctacctggagcagctgcacggccagcacgaggcctggctgatccacaagaccaccaagctgcactttgaggccctgatgaacatccctgtgctggtgctggatgtgaatgatgacttcagcgaggaggtgaccaagcaggaggacctgatgagggaggtgaacacctttgtgaagaacctgtag

SEQ ID NO: 233502 - DNA, 768 bp, Artificial Sequence
  derived and/or modified sequence
atggctgctggccgcctcttcctgagccggctgcgggcccccttcagctccatggccaagagccccctggagggcgtgagcagcagccggggcctgcacgccggccggggcccccggcggctgagcattgagggcaacatcggcaacatcctgaagcagatccgcatgagggcccccatccaggagacagcctgcacagcccagagcctgggcaacctgctggacatgatgtaccgggagcccgcccgctggagctacaccttccagaccttctccttcctgagccggctgaaggtgcagctggagcccttccctgagaagctgctgcaggccaggaagcctgtgcagatctttgagaggtctgtgtacagcgaccgctacatctttgccaagaacctgtttgaaaatggcagcctgagtgacatcgagtggcacatctaccaggactggcacagcttcctgctgtgggagtttgccagccgcatcaccctgcacggcttcatctacctgcaggccagcccccaggtgtgcctgaagaggctgtaccagagggcccgggaggaggagaagggcatcgagctggcctacctggagcagctgcacggccagcacgaggcctggctgatccacaagaccaccaagctgcactttgaggccctgatgaacatccctgtgctggtgctggatgtgaatgatgacttcagcgaggaggtgaccaagcaggaggacctgatgagggaggtgaacacctttgtgaagaacctgtag

SEQ ID NO: 233503 - DNA, 834 bp, Artificial Sequence
  derived and/or modified sequence
atggccgccggccggctgttcctgagccggctgcgggcccccttcagctccatggctaagagcccacttgagggcgtttccagttctcggggccttcacgcgggaaggggacctagacgcctgtcgatcgaaggcaatattgccgtaggcaaatcaaccttcgtaaaattattgactaagacataccctgagtggcatgtggctacagaaccagtggcgacgtggcaaaatattcaggcagcaggtactcagaaagcatgtacggcccagagtttgggcaacctgctggacatgatgtatagggaacctgcacgatggagctacacattccagaccttttctttcttaagtaggctcaaggtccaattagagccctttcccgagaagctgctgcaggcgagaaagcctgttcagatctttgagagatctgtgtacagcgataggtacatctttgccaaaaacctgttcgaaaacggaagtctctccgacattgagtggcacatctatcaggactggcattcattcctgctttgggaatttgcctcacgtatcactctgcatggctttatttacctgcaggccagtccccaggtgtgtctgaagcggttataccagcgggcacgggaagaggagaaagggattgaacttgcctacctggaacagctgcacgggcagcacgaggcatggctgatacacaagacaaccaagctgcactttgaggccttaatgaacattccagtactggtgctggacgtgaacgatgatttctctgaggaggtcaccaagcaagaggatctgatgagagaggtcaacacattcgtgaagaatctttag

SEQ ID NO: 233504 - DNA, 720 bp, Artificial Sequence
  derived and/or modified sequence
atggccgccggccggctgttcctgagccggctgcgggcccccttctcctccatggccaaaagccctcttgaaggagtgtcctctagccgggggcttcatgcggggcgcggtccacggcggctgagcatcgaagggaacatcgcctgtacagcacagagcctgggaaatctgctggatatgatgtatcgcgaaccagcccgctggtcctacaccttccagaccttttccttcctgtcccgccttaaagtgcagctcgagcctttccccgagaagttgcttcaagcaaggaagcctgtccagatctttgagcgatcggtgtactccgataggtacattttcgcaaaaaacctctttgaaaatggatctctgtccgacatcgaatggcacatctatcaggattggcactctttcctgctctgggagtttgcgagcagaattaccctgcatggcttcatctatctccaggctagcccccaggtgtgcctgaagcggctgtaccagcgtgctcgggaggaggaaaagggaatcgagctggcatacttggaacagctgcacggacagcacgaagcctggctgattcacaagactaccaagctacactttgaagccctgatgaacatcccggtgctggtgctggatgttaatgatgatttttcagaggaggtgaccaagcaagaggatctgatgcgggaggtgaacacattcgtgaaaaatctgtag

SEQ ID NO: 233505 - DNA, 768 bp, Artificial Sequence
  derived and/or modified sequence
atggccgccggccggctgttcctgagccggctgcgggcccccttctccagcatggccaagtctcccctggagggcgtatcttcatccaggggactgcacgcaggacgaggccctaggcggctttctatcgaagggaatattggcaacatcctgaagcaaattcgaatgagggccccaattcaagagacagcctgtacagcccagtccctgggcaatctgctcgacatgatgtatagagagccagcacgctggtcatatacattccaaacatttagctttttatctaggctgaaggtacagctggagccttttcccgagaaactgcttcaggcgaggaaaccagtgcagattttcgagcggtccgtctacagtgacaggtatatcttcgccaaaaatctttttgaaaacggttccctgagtgatatagagtggcacatctaccaggactggcactctttcctgctgtgggagttcgcgtccagaatcacactacacggcttcatttatctgcaagcttctccacaggtctgcctgaaacggttgtaccaaagagctcgcgaggaggagaagggcattgagttagcctacctcgagcagttgcatgggcagcacgaggcctggctaatacacaaaaccaccaagctccattttgaggccctcatgaacatccccgtgttggtactggacgtcaatgatgactttagtgaggaggtgactaagcaggaagacctgatgcgcgaggtgaacaccttcgtcaaaaatctgtag

SEQ ID NO: 233506 - DNA, 834 bp, Artificial Sequence
  derived and/or modified sequence
atggctgccggacggttgttcctgtccagactgagagctcccttttcttcgatggccaaatcccctcttgagggcgtgtcatcttctcgaggcctgcatgctggccgtggcccacgtcggcttagcatcgagggcaacatagctgtgggaaagtccactttcgtcaaactcctgaccaagacatatcccgaatggcacgttgctaccgaacctgtcgcaacgtggcagaacattcaggcggcaggcactcagaaggcttgtacagcccaatctctgggcaatctgctggatatgatgtaccgagagccagctcgatggtcttatacattccagacgttctccttccttagtcgcctgaaggtccagctggaaccattccctgagaagctgttacaggccagaaaaccagtgcagatcttcgagagaagtgtgtactcggataggtacatcttcgcaaaaaatttgttcgaaaatgggagcctgtcagacatcgagtggcatatctaccaagactggcattctttcctcttgtgggagttcgcaagtagaattaccctgcatggattcatttatcttcaggcgtccccacaggtgtgtctgaagcgtttgtatcagagggctagggaagaagaaaagggcatcgagctcgcatacctggagcagcttcatggccagcacgaggcctggctgatccataagacaaccaaattgcatttcgaggctctgatgaacattcctgtcctcgtgctcgacgtcaacgacgacttctccgaggaagtcacaaagcaagaagacctgatgcgcgaagtgaatacattcgttaaaaatttatag

SEQ ID NO: 233507 - DNA, 720 bp, Artificial Sequence
  derived and/or modified sequence
atggcagccggaaggctgtttttatccagactgcgcgcaccctttagcagcatggcgaaaagccctcttgagggggttagctctagccgaggcctgcatgcaggcaggggccctagacgcttatccattgagggcaatatagcatgtaccgcgcagtctctaggaaaccttcttgatatgatgtaccgcgaacctgctaggtggagctacacattccagactttctcttttttgagtcgcctgaaagtgcagcttgagcccttccccgagaagcttttgcaagctcgcaaacctgtgcagattttcgagcgctcggtgtattccgatcgatatatctttgccaaaaacctgttcgagaatggcagcctgtctgacatcgaatggcatatctatcaagactggcattcattcctcctgtgggaatttgcctctcggatcaccttgcatggcttcatttatctgcaggcttcaccccaggtgtgtctgaaacgactttatcagagggcccgagaagaagagaaaggcatagagctggcttacctggaacaattgcatggacagcatgaggcatggctcatccataagaccacaaagcttcactttgaggccctgatgaatatccccgtgctggtattagacgtgaacgatgacttctccgaagaggtgacaaagcaggaagaccttatgagagaagtgaatacattcgtcaagaacctctag

SEQ ID NO: 233508 - DNA, 768 bp, Artificial Sequence
  derived and/or modified sequence
atggctgccggacggctctttttaagccgcctgagggcccctttctccagtatggccaaaagcccattggaaggcgtgagttcctcccgcggattacatgcaggaaggggcccacggagactctctatcgaaggcaacatcgggaatatacttaagcagattcgcatgagagcccctattcaggagaccgcatgcacagcccagtcacttggaaacttactggatatgatgtatagagagccggctcgctggagttacacttttcaaaccttctcattcttgtctcgactcaaagtccagctggaaccgtttcctgagaaactgttgcaggcaagaaaaccagtccagatttttgagcgctcagtatactcggatagatatatattcgcaaaaaatctctttgagaacggctcactatctgatattgagtggcatatctaccaggattggcatagctttctcctgtgggagtttgccagtcgtataaccctacatgggttcatttacctgcaggctagtccccaagtgtgcctaaaacgcctgtaccagcgggcacgggaagaggaaaagggaatcgagctggcctacctggagcagctccatggccagcacgaagcttggctcattcacaagacaactaagcttcatttcgaagccttaatgaacatccctgtactggtgctagacgtgaacgacgacttcagcgaggaggtgactaaacaggaggatctaatgcgagaggtgaatacattcgtgaagaacctgtag

SEQ ID NO: 233509 - DNA, 834 bp, Artificial Sequence
  derived and/or modified sequence
atggccgccggcagactgttcctgagcagactgagagcccccttcagcagcatggccaagagccccctggagggcgtgagcagcagcagaggcctgcacgccggcagaggccccagaagactgagcatcgagggcaacatcgccgtgggcaagagcaccttcgtgaagctgctgaccaagacctaccccgagtggcacgtggccaccgagcccgtggccacctggcagaacatccaggccgccggcacccagaaggcctgcaccgcccagagcctgggcaacctgctggacatgatgtacagagagcccgccagatggagctacaccttccagaccttcagcttcctgagcagactgaaggtgcagctggagcccttccccgagaagctgctgcaggccagaaagcccgtgcagatcttcgagagaagcgtgtacagcgacagatacatcttcgccaagaacctgttcgagaacggcagcctgagcgacatcgagtggcacatctaccaggactggcacagcttcctgctgtgggagttcgccagcagaatcaccctgcacggcttcatctacctgcaggccagcccccaggtgtgcctgaagagactgtaccagagagccagagaggaggagaagggcatcgagctggcctacctggagcagctgcacggccagcacgaggcctggctgatccacaagaccaccaagctgcacttcgaggccctgatgaacatccccgtgctggtgctggacgtgaacgacgacttcagcgaggaggtgaccaagcaggaggacctgatgagagaggtgaacaccttcgtgaagaacctgtag

SEQ ID NO: 233510 - DNA, 720 bp, Artificial Sequence
  derived and/or modified sequence
atggccgccggcagactgttcctgagcagactgagagcccccttcagcagcatggccaagagccccctggagggcgtgagcagcagcagaggcctgcacgccggcagaggccccagaagactgagcatcgagggcaacatcgcctgcaccgcccagagcctgggcaacctgctggacatgatgtacagagagcccgccagatggagctacaccttccagaccttcagcttcctgagcagactgaaggtgcagctggagcccttccccgagaagctgctgcaggccagaaagcccgtgcagatcttcgagagaagcgtgtacagcgacagatacatcttcgccaagaacctgttcgagaacggcagcctgagcgacatcgagtggcacatctaccaggactggcacagcttcctgctgtgggagttcgccagcagaatcaccctgcacggcttcatctacctgcaggccagcccccaggtgtgcctgaagagactgtaccagagagccagagaggaggagaagggcatcgagctggcctacctggagcagctgcacggccagcacgaggcctggctgatccacaagaccaccaagctgcacttcgaggccctgatgaacatccccgtgctggtgctggacgtgaacgacgacttcagcgaggaggtgaccaagcaggaggacctgatgagagaggtgaacaccttcgtgaagaacctgtag

SEQ ID NO: 233511 - DNA, 768 bp, Artificial Sequence
  derived and/or modified sequence
atggccgccggcagactgttcctgagcagactgagagcccccttcagcagcatggccaagagccccctggagggcgtgagcagcagcagaggcctgcacgccggcagaggccccagaagactgagcatcgagggcaacatcggcaacatcctgaagcagatcagaatgagagcccccatccaggagaccgcctgcaccgcccagagcctgggcaacctgctggacatgatgtacagagagcccgccagatggagctacaccttccagaccttcagcttcctgagcagactgaaggtgcagctggagcccttccccgagaagctgctgcaggccagaaagcccgtgcagatcttcgagagaagcgtgtacagcgacagatacatcttcgccaagaacctgttcgagaacggcagcctgagcgacatcgagtggcacatctaccaggactggcacagcttcctgctgtgggagttcgccagcagaatcaccctgcacggcttcatctacctgcaggccagcccccaggtgtgcctgaagagactgtaccagagagccagagaggaggagaagggcatcgagctggcctacctggagcagctgcacggccagcacgaggcctggctgatccacaagaccaccaagctgcacttcgaggccctgatgaacatccccgtgctggtgctggacgtgaacgacgacttcagcgaggaggtgaccaagcaggaggacctgatgagagaggtgaacaccttcgtgaagaacctgtag

SEQ ID NO: 233512 - DNA, 1144 bp, Artificial Sequence
  derived and/or modified sequence
aacggtgcgctggagcgagtgagcagcgatacctagggcggaagtgctctcggcggaagtgatcgctgtgtgaatcgtgggtgggatggccgcgggccgcctctttctaagtcggcttcgagcacccttcagttccatggccaagagcccactcgagggcgtttcctcctccagaggcctgcacgcggggcgcgggccccgaaggctctccatcgaaggcaacattgctgtgggaaagtccacgtttgtgaagttactcacgaaaacttacccagaatggcacgtagctacagaacctgtagcaacatggcagaatatccaggctgctggcacccaaaaagcctgcactgcccaaagtcttggaaacttgctggatatgatgtaccgggagccagcacgatggtcctacacattccagacattttcctttttgagccgcctgaaagtacagctggagcccttccctgagaaactcttacaggccaggaagccagtacagatctttgagaggtctgtgtacagtgacaggtatatctttgcaaagaatctttttgaaaatggttccctcagtgacatcgagtggcatatctatcaggactggcattcttttctcctgtgggagtttgccagccggatcacattacatggcttcatctacctccaggcttctccccaggtttgtttgaagagactgtaccagagggccagggaggaggagaaaggaattgagctggcctatctagagcagctgcatggccaacacgaagcctggcttattcacaagacaacgaagctccactttgaggctctgatgaacattccagtgctggtgttggatgtcaatgatgatttttctgaggaagtaaccaaacaagaagacctcatgagagaggtaaacacctttgtaaagaatctgtaaccaataccatgaagttcaggctgtgatctgggctccctgactttctgaagctagaaaaatgttgtgtctcccaaccacctttccatccccagcccctctcatccctggagcactctgccgctcaagagctggtttgttaattattgttagactttgccattgttttcttttgtacctgaagcattttgaaaataaagtttacttaagttatgcttgtttttctaa

SEQ ID NO: 233513 - DNA, 933 bp, Artificial Sequence
  derived and/or modified sequence
gggatggccgcgggccgcctctttctaagtcggcttcgagcacccttcagttccatggccaagagcccactcgagggcgtttcctcctccagaggcctgcacgcggggcgcgggccccgaaggctctccatcgaaggcaacattgcctgcactgcccaaagtcttggaaacttgctggatatgatgtaccgggagccagcacgatggtcctacacattccagacattttcctttttgagccgcctgaaagtacagctggagcccttccctgagaaactcttacaggccaggaagccagtacagatctttgagaggtctgtgtacagtgacaggtatatctttgcaaagaatctttttgaaaatggttccctcagtgacatcgagtggcatatctatcaggactggcattcttttctcctgtgggagtttgccagccggatcacattacatggcttcatctacctccaggcttctccccaggtttgtttgaagagactgtaccagagggccagggaggaggagaaaggaattgagctggcctatctagagcagctgcatggccaacacgaagcctggcttattcacaagacaacgaagctccactttgaggctctgatgaacattccagtgctggtgttggatgtcaatgatgatttttctgaggaagtaaccaaacaagaagacctcatgagagaggtaaacacctttgtaaagaatctgtaaccaataccatgaagttcaggctgtgatctgggctccctgactttctgaagctagaaaaatgttgtgtctcccaaccacctttccatccccagcccctctcatccctggagcactctgccgctcaagagctggtttgttaattattgttagactttgccattgttttcttttgtacctgaagcattttgaaaataaagtttacttaagtta

SEQ ID NO: 233514 - DNA, 981 bp, Artificial Sequence
  derived and/or modified sequence
gggatggccgcgggccgcctctttctaagtcggcttcgagcacccttcagttccatggccaagagcccactcgagggcgtttcctcctccagaggcctgcacgcggggcgcgggccccgaaggctctccatcgaaggcaacattggtaacatcctcaagcaaatcagaatgagagcacccattcaggaaaccgcctgcactgcccaaagtcttggaaacttgctggatatgatgtaccgggagccagcacgatggtcctacacattccagacattttcctttttgagccgcctgaaagtacagctggagcccttccctgagaaactcttacaggccaggaagccagtacagatctttgagaggtctgtgtacagtgacaggtatatctttgcaaagaatctttttgaaaatggttccctcagtgacatcgagtggcatatctatcaggactggcattcttttctcctgtgggagtttgccagccggatcacattacatggcttcatctacctccaggcttctccccaggtttgtttgaagagactgtaccagagggccagggaggaggagaaaggaattgagctggcctatctagagcagctgcatggccaacacgaagcctggcttattcacaagacaacgaagctccactttgaggctctgatgaacattccagtgctggtgttggatgtcaatgatgatttttctgaggaagtaaccaaacaagaagacctcatgagagaggtaaacacctttgtaaagaatctgtaaccaataccatgaagttcaggctgtgatctgggctccctgactttctgaagctagaaaaatgttgtgtctcccaaccacctttccatccccagcccctctcatccctggagcactctgccgctcaagagctggtttgttaattattgttagactttgccattgttttcttttgtacctgaagcattttgaaaataaagtttacttaagtta

SEQ ID NO: 233515 - protein, 189 aa, Artificial Sequence
  derived and/or modified sequence
MAAGRLFLSRLRAPFSSMAKSPLEGVSSSRGLHAGRGPRRLSIEGNIAVGKSTFVKLLTKTYPEWHVATEPVATWQNIQAAGTQKACTAQSLGNLLDMMYREPARWSYTFQTFSFLSRLKVQLEPFPEKLLQARKPVQIFERSVYSDRLHFEALMNIPVLVLDVNDDFSEEVTKQEDLMREVNTFVKNL

SEQ ID NO: 233516 - DNA, 570 bp, Artificial Sequence
  derived and/or modified sequence
atggctgcgggcagactattcctgtccagattaagggccccctttagtagcatggccaagagccctctggagggtgttagttcgtctaggggcctgcacgctggaagaggtcctcgccggctaagcatcgagggaaacattgctgtgggaaagagcactttcgtgaaattgctgaccaaaacttaccctgaatggcacgtggctaccgagccagtcgctacctggcaaaacatacaggcagcaggcacccagaaagcctgcacagctcagtcactcgggaaccttctggatatgatgtatagagagccagcccgctggtcctacacctttcagaccttcagtttcctgagccggttaaaagtgcaattggagcctttcccggaaaagcttctgcaggcacgtaaacccgtgcagatctttgagcgttctgtgtactccgatcgcctgcactttgaggctctcatgaacatccccgttctggtgctcgacgtgaacgatgatttcagcgaggaggttacaaagcaggaggacctcatgcgggaggtgaacacgttcgttaaaaacttatag

SEQ ID NO: 233517 - DNA, 570 bp, Artificial Sequence
  derived and/or modified sequence
atggctgctggccgcctcttcctgagccggctgcgggcccccttcagctccatggccaagagccccctggagggcgtgagcagcagccggggcctgcacgccggccggggcccccggcggctgagcattgagggcaacattgctgtgggcaagagcacctttgtgaagctgctgaccaagacctacccagagtggcacgtggccacagagcctgtggccacctggcagaacatccaggccgccggcacccagaaggcctgcacagcccagagcctgggcaacctgctggacatgatgtaccgggagcccgcccgctggagctacaccttccagaccttctccttcctgagccggctgaaggtgcagctggagcccttccctgagaagctgctgcaggccaggaagcctgtgcagatctttgagaggtctgtgtacagcgaccggctgcactttgaggccctgatgaacatccctgtgctggtgctggatgtgaatgatgacttcagcgaggaggtgaccaagcaggaggacctgatgagggaggtgaacacctttgtgaagaacctgtag

SEQ ID NO: 233518 - DNA, 570 bp, Artificial Sequence
  derived and/or modified sequence
atggccgccggccggctgttcctgagccggctgcgggcccccttctctagcatggctaagtccccattggagggcgtttcttccagtcgtgggttgcatgccggccgaggacctcgtcggctatcaatcgagggcaatatcgcggtgggcaaatccactttcgtaaagctgctgaccaagacctatccagagtggcatgtcgccaccgagccagtggccacttggcagaacattcaggcggcaggcacccaaaaggcgtgcactgctcagtcattgggtaacctgctagacatgatgtatcgtgaaccggctaggtggagctacacattccagactttctcttttctctcgcgcctgaaagtgcagttagagcctttccccgaaaagctcctgcaggcgcgcaaacctgtacagatcttcgaacggagcgtgtacagtgaccggttacacttcgaagccttgatgaacatccccgtattggtgttagacgtgaacgacgacttttccgaagaagttacaaaacaagaggatctcatgcgcgaagttaatacctttgtcaaaaacctgtag

SEQ ID NO: 233519 - DNA, 570 bp, Artificial Sequence
  derived and/or modified sequence
atggcagcaggccgtctctttctgtccaggcttagagcccctttcagcagtatggcaaaaagccccttggaaggggtgagctctagcagaggtctgcatgccggtaggggcccacgtcgcctcagtatcgagggcaacatcgctgtcgggaaatcaaccttcgtgaagctactgactaagacctaccctgaatggcacgtcgcaacagagcctgtggcaacatggcagaacatccaggccgctgggactcagaaagcctgtactgcacagtcactgggtaacctgttagacatgatgtacagagaacccgctagatggagttacacgtttcagacatttagctttctgagtcgtctgaaggtgcagttggagccgtttcccgaaaagctcttgcaggcccgaaagccagttcagattttcgagcggtcagtgtacagcgaccgcctccactttgaggccttgatgaacatcccagtgttggtcctggacgtgaacgacgatttctccgaggaagttaccaaacaggaagatcttatgagagaggtaaatacattcgtgaaaaacctgtag

SEQ ID NO: 233520 - DNA, 570 bp, Artificial Sequence
  derived and/or modified sequence
atggccgccggcagactgttcctgagcagactgagagcccccttcagcagcatggccaagagccccctggagggcgtgagcagcagcagaggcctgcacgccggcagaggccccagaagactgagcatcgagggcaacatcgccgtgggcaagagcaccttcgtgaagctgctgaccaagacctaccccgagtggcacgtggccaccgagcccgtggccacctggcagaacatccaggccgccggcacccagaaggcctgcaccgcccagagcctgggcaacctgctggacatgatgtacagagagcccgccagatggagctacaccttccagaccttcagcttcctgagcagactgaaggtgcagctggagcccttccccgagaagctgctgcaggccagaaagcccgtgcagatcttcgagagaagcgtgtacagcgacagactgcacttcgaggccctgatgaacatccccgtgctggtgctggacgtgaacgacgacttcagcgaggaggtgaccaagcaggaggacctgatgagagaggtgaacaccttcgtgaagaacctgtag

SEQ ID NO: 233521 - DNA, 880 bp, Artificial Sequence
  derived and/or modified sequence
aacggtgcgctggagcgagtgagcagcgatacctagggcggaagtgctctcggcggaagtgatcgctgtgtgaatcgtgggtgggatggccgcgggccgcctctttctaagtcggcttcgagcacccttcagttccatggccaagagcccactcgagggcgtttcctcctccagaggcctgcacgcggggcgcgggccccgaaggctctccatcgaaggcaacattgctgtgggaaagtccacgtttgtgaagttactcacgaaaacttacccagaatggcacgtagctacagaacctgtagcaacatggcagaatatccaggctgctggcacccaaaaagcctgcactgcccaaagtcttggaaacttgctggatatgatgtaccgggagccagcacgatggtcctacacattccagacattttcctttttgagccgcctgaaagtacagctggagcccttccctgagaaactcttacaggccaggaagccagtacagatctttgagaggtctgtgtacagtgacaggctccactttgaggctctgatgaacattccagtgctggtgttggatgtcaatgatgatttttctgaggaagtaaccaaacaagaagacctcatgagagaggtaaacacctttgtaaagaatctgtaaccaataccatgaagttcaggctgtgatctgggctccctgactttctgaagctagaaaaatgttgtgtctcccaaccacctttccatccccagcccctctcatccctggagcactctgccgctcaagagctggtttgttaattattgttagactttgccattgttttcttttgtacctgaagcattttgaaaataaagtttacttaagttatgcttgtttttctaa

SEQ ID NO: 233522 - protein, 1143 aa, Artificial Sequence
  derived and/or modified sequence
MYLWLKLLAFGFAFLDTEVFVTGQSPTPSPTDAYLNASETTTLSPSGSAVISTTTIATTPSKPTCDEKYANITVDYLYNKETKLFTAKLNVNENVECGNNTCTNNEVHNLTECKNASVSISHNSCTAPDKTLILDVPPGVEKFQLHDCTQVEKADTTICLKWKNIETFTCDTQNITYRFQCGNMIFDNKEIKLENLEPEHEYKCDSEILYNNHKFTNASKIIKTDFGSPGEPQIIFCRSEAAHQGVITWNPPQRSFHNFTLCYIKETEKDCLNLDKNLIKYDLQNLKPYTKYVLSLHAYIIAKVQRNGSAAMCHFTTKSAPPSQVWNMTVSMTSDNSMHVKCRPPRDRNGPHERYHLEVEAGNTLVRNESHKNCDFRVKDLQYSTDYTFKAYFHNGDYPGEPFILHHSTSYNSKALIAFLAFLIIVTSIALLVVLYKIYDLHKKRSCNLDEQQELVERDDEKQLMNVEPIHADILLETYKRKIADEGRLFLAEFQSIPRVFSKFPIKEARKPFNQNKNRYVDILPYDYNRVELSEINGDAGSNYINASYIDGFKEPRKYIAAQGPRDETVDDFWRMIWEQKATVIVMVTRCEEGNRNKCAEYWPSMEEGTRAFGDVVVKINQHKRCPDYIIQKLNIVNKKEKATGREVTHIQFTSWPDHGVPEDPHLLLKLRRRVNAFSNFFSGPIVVHCSAGVGRTGTYIGIDAMLEGLEAENKVDVYGYVVKLRRQRCLMVQVEAQYILIHQALVEYNQFGETEVNLSELHPYLHNMKKRDPPSEPSPLEAEFQRLPSYRSWRTQHIGNQEENKSKNRNSNVIPYDYNRVPLKHELEMSKESEHDSDESSDDDSDSEEPSKYINASFIMSYWKPEVMIAAQGPLKETIGDFWQMIFQRKVKVIVMLTELKHGDQEICAQYWGEGKQTYGDIEVDLKDTDKSSTYTLRVFELRHSKRKDSRTVYQYQYTNWSVEQLPAEPKELISMIQVVKQKLPQKNSSEGNKHHKSTPLLIHCRDGSQQTGIFCALLNLLESAETEEVVDIFQVVKALRKARPGMVSTFEQYQFLYDVIASTYPAQNGQVKKNNHQEDKIEFDNEVDKVKQDANCVNPLGAPEKLPEAKEQAEGSEPTSGTEGPEHSVNGPASPALNQGS

SEQ ID NO: 233523 - protein, 146 aa, Artificial Sequence
  derived and/or modified sequence
MYLWLKLLAFGFAFLDTEVFVTGQSPTPSPTDAYLNASETTTLSPSGSAVISTTTIATTPSKPTCDEKYANITVDYLYNKETKLFTAKLNVNENVECGNNTCTNNEVHNLTECKNASVSISHNSCTAPDKTLILDVPPGVEKFQLH

SEQ ID NO: 233524 - DNA, 3432 bp, Artificial Sequence
  derived and/or modified sequence
atgtacctgtggctgaagctgctggccttcggcttcgccttcctggacaccgaggtgttcgtgaccggccagagccccacccccagccccaccgacgcctacctgaacgccagcgagaccaccaccctgagccccagcggcagcgccgtgatcagcaccaccaccatcgccaccacccccagcaagcccacctgcgacgagaagtacgccaacatcaccgtggactacctgtacaacaaggagaccaagctgttcaccgccaagctgaacgtgaacgagaacgtggagtgcggcaacaacacctgcaccaacaacgaggtgcacaacctgaccgagtgcaagaacgccagcgtgagcatcagccacaacagctgcaccgcccccgacaagaccctgatcctggacgtgccccccggcgtggagaagttccagctgcacgactgcacccaggtggagaaggccgacaccaccatctgcctgaagtggaagaacatcgagaccttcacctgcgacacccagaacatcacctacagattccagtgcggcaacatgatcttcgacaacaaggagatcaagctggagaacctggagcccgagcacgagtacaagtgcgacagcgagatcctgtacaacaaccacaagttcaccaacgccagcaagatcatcaagaccgacttcggcagccccggcgagccccagatcatcttctgcagaagcgaggccgcccaccagggcgtgatcacctggaaccccccccagagaagcttccacaacttcaccctgtgctacatcaaggagaccgagaaggactgcctgaacctggacaagaacctgatcaagtacgacctgcagaacctgaagccctacaccaagtacgtgctgagcctgcacgcctacatcatcgccaaggtgcagagaaacggcagcgccgccatgtgccacttcaccaccaagagcgccccccccagccaggtgtggaacatgaccgtgagcatgaccagcgacaacagcatgcacgtgaagtgcagaccccccagagacagaaacggcccccacgagagataccacctggaggtggaggccggcaacaccctggtgagaaacgagagccacaagaactgcgacttcagagtgaaggacctgcagtacagcaccgactacaccttcaaggcctacttccacaacggcgactaccccggcgagcccttcatcctgcaccacagcaccagctacaacagcaaggccctgatcgccttcctggccttcctgatcatcgtgaccagcatcgccctgctggtggtgctgtacaagatctacgacctgcacaagaagagaagctgcaacctggacgagcagcaggagctggtggagagagacgacgagaagcagctgatgaacgtggagcccatccacgccgacatcctgctggagacctacaagagaaagatcgccgacgagggcagactgttcctggccgagttccagagcatccccagagtgttcagcaagttccccatcaaggaggccagaaagcccttcaaccagaacaagaacagatacgtggacatcctgccctacgactacaacagagtggagctgagcgagatcaacggcgacgccggcagcaactacatcaacgccagctacatcgacggcttcaaggagcccagaaagtacatcgccgcccagggccccagagacgagaccgtggacgacttctggagaatgatctgggagcagaaggccaccgtgatcgtgatggtgaccagatgcgaggagggcaacagaaacaagtgcgccgagtactggcccagcatggaggagggcaccagagccttcggcgacgtggtggtgaagatcaaccagcacaagagatgccccgactacatcatccagaagctgaacatcgtgaacaagaaggagaaggccaccggcagagaggtgacccacatccagttcaccagctggcccgaccacggcgtgcccgaggacccccacctgctgctgaagctgagaagaagagtgaacgccttcagcaacttcttcagcggccccatcgtggtgcactgcagcgccggcgtgggcagaaccggcacctacatcggcatcgacgccatgctggagggcctggaggccgagaacaaggtggacgtgtacggctacgtggtgaagctgagaagacagagatgcctgatggtgcaggtggaggcccagtacatcctgatccaccaggccctggtggagtacaaccagttcggcgagaccgaggtgaacctgagcgagctgcacccctacctgcacaacatgaagaagagagacccccccagcgagcccagccccctggaggccgagttccagagactgcccagctacagaagctggagaacccagcacatcggcaaccaggaggagaacaagagcaagaacagaaacagcaacgtgatcccctacgactacaacagagtgcccctgaagcacgagctggagatgagcaaggagagcgagcacgacagcgacgagagcagcgacgacgacagcgacagcgaggagcccagcaagtacatcaacgccagcttcatcatgagctactggaagcccgaggtgatgatcgccgcccagggccccctgaaggagaccatcggcgacttctggcagatgatcttccagagaaaggtgaaggtgatcgtgatgctgaccgagctgaagcacggcgaccaggagatctgcgcccagtactggggcgagggcaagcagacctacggcgacatcgaggtggacctgaaggacaccgacaagagcagcacctacaccctgagagtgttcgagctgagacacagcaagagaaaggacagcagaaccgtgtaccagtaccagtacaccaactggagcgtggagcagctgcccgccgagcccaaggagctgatcagcatgatccaggtggtgaagcagaagctgccccagaagaacagcagcgagggcaacaagcaccacaagagcacccccctgctgatccactgcagagacggcagccagcagaccggcatcttctgcgccctgctgaacctgctggagagcgccgagaccgaggaggtggtggacatcttccaggtggtgaaggccctgagaaaggccagacccggcatggtgagcaccttcgagcagtaccagttcctgtacgacgtgatcgccagcacctaccccgcccagaacggccaggtgaagaagaacaaccaccaggaggacaagatcgagttcgacaacgaggtggacaaggtgaagcaggacgccaactgcgtgaaccccctgggcgcccccgagaagctgcccgaggccaaggagcaggccgagggcagcgagcccaccagcggcaccgagggccccgagcacagcgtgaacggccccgccagccccgccctgaaccagggcagctag

SEQ ID NO: 233525 - DNA, 441 bp, Artificial Sequence
  derived and/or modified sequence
atgtacctgtggctgaagctgctggccttcggcttcgccttcctggacaccgaggtgttcgtgaccggccagagccccacccccagccccaccgacgcctacctgaacgccagcgagaccaccaccctgagccccagcggcagcgccgtgatcagcaccaccaccatcgccaccacccccagcaagcccacctgcgacgagaagtacgccaacatcaccgtggactacctgtacaacaaggagaccaagctgttcaccgccaagctgaacgtgaacgagaacgtggagtgcggcaacaacacctgcaccaacaacgaggtgcacaacctgaccgagtgcaagaacgccagcgtgagcatcagccacaacagctgcaccgcccccgacaagaccctgatcctggacgtgccccccggcgtggagaagttccagctgcactag

SEQ ID NO: 233526 - DNA, 3432 bp, Artificial Sequence
  derived and/or modified sequence
atgtatttgtggctaaagctattagcattcggcttcgcttttttagatacagaggttttcgtcaccggccaaagtccaacaccgtccccaaccgatgcttacttaaatgcatccgagaccaccactctcagtcctagcgggtctgcagtgattagcacaactacgatagcaactaccccctcaaagccgacctgcgatgagaaatacgctaacattacagttgactatctgtataacaaagaaacgaaactttttaccgccaaacttaacgttaatgaaaacgtggaatgcggaaataacacttgtaccaacaacgaggttcacaacttgactgagtgcaagaacgcctctgttagtatatcacataacagctgcactgctcccgacaagacattgatcctcgacgtgccacccggggtcgagaagttccagctacatgactgtacccaggtggagaaggccgatacaaccatttgcctgaagtggaagaacattgagaccttcacctgcgatacccagaacattacttatcggttccagtgtgggaatatgatcttcgacaacaaagagataaaacttgagaacctggagcctgagcacgagtacaagtgtgactccgagatactctataataatcataaattcactaacgcttcgaagatcataaagacagatttcggcagccctggcgagccccagatcattttctgccgttctgaggcagctcatcaaggagtgatcacctggaatccccctcaacggtcattccataacttcacgctctgctacatcaaagagaccgagaaggattgtttaaacctggacaaaaacctgattaaatatgacctccagaatctgaagccctataccaaatatgtcctgagcctccacgcatatataatcgccaaggtccagcgcaatggcagtgccgctatgtgccactttaccactaagtctgctccgccatcccaggtgtggaacatgactgtctctatgaccagtgacaactctatgcacgtgaaatgcaggccaccgcgggaccggaacgggccccatgaacggtaccatctggaggtagaggccgggaacaccctagtgcgcaatgagtcccataagaactgcgattttcgagttaaagacctccagtattccacagattacacgtttaaggcctatttccacaatggagactaccctggagagccattcatactgcaccacagtacatcgtataactccaaggctttaatagcattcctggcatttctcattattgtcaccagcatcgcattgctggtagtcctctataagatttacgacctccacaaaaagagaagttgcaacctggacgaacaacaagagctggtcgagcgggacgacgaaaagcagctgatgaatgttgagcccattcacgccgacatcctcctggagacatacaagcggaagatcgccgatgagggccgcctctttttggcagaatttcagtccatcccacgcgtctttagtaaattccccatcaaggaggctcggaagcccttcaaccagaacaagaaccgatatgtggatatcctcccatacgattacaaccgtgttgagctgagtgagataaacggggacgccggcagtaattatatcaatgctagctatatcgacggcttcaaggaacctcgcaaatatattgcggctcagggccccagagacgagactgtggacgatttctggagaatgatttgggagcagaaagcaacggtcatagtgatggtgactagatgtgaagaaggcaatcggaataagtgcgccgagtactggccctccatggaggaggggactagagcatttggtgatgtggtcgtgaaaatcaaccagcataaaaggtgcccagactacatcattcagaagcttaacatagtcaataagaaagagaaggccacagggcgcgaggtaacccacatccaattcacatcttggcctgaccatggagtccctgaggacccacatctgctcctgaagttgagaagacgggtaaacgcattttctaatttcttttcagggcctatcgtagtccactgctccgctggagtcggacgtacaggaacatacataggcattgacgctatgctcgaaggtctggaagccgagaataaggttgatgtctatggctacgtggttaagctaagacgtcagcgctgcttgatggtccaggtggaagcacagtatatcctgatccatcaggctctcgtcgagtacaatcagtttggtgagacagaggtcaacctcagcgagctgcatccttatttgcacaatatgaagaagagagatccaccctcagaaccatctcctctggaagctgaattccagcggctgcctagctaccgaagttggcgcactcagcacatcggtaatcaggaggagaataaaagtaagaaccgcaattctaacgtaattccatatgactataaccgagttcctcttaaacatgagctggagatgtctaaggagagcgaacacgatagcgacgaatcaagtgacgacgacagcgactccgaggagccatctaaatatatcaacgcctcctttatcatgtcctactggaagcctgaagtcatgatcgccgctcagggccccttgaaagagaccataggcgacttttggcagatgatcttccaaaggaaggtcaaagtcatcgtaatgctaacagagctgaaacatggcgaccaggaaatctgcgcccagtactggggcgagggtaaacagacatatggcgacattgaagtggacctgaaggatactgataaatcatctacatacactttgcgggtctttgagctgagacactcgaaacggaaagactcgcgcaccgtgtatcagtaccagtatacaaactggagcgtcgaacaactgccagccgagccaaaagagctcatcagtatgattcaggttgtgaaacagaaattacctcagaagaactcatctgaggggaataagcaccataagagcaccccgctgctgatacactgtagggatggtagccaacaaactggcattttttgtgctctactgaatctcctcgagtctgcggagacggaggaagttgtggacatattccaggtagtaaaagccctgcgtaaggcacgtccaggaatggtttccacatttgaacagtatcagtttctttatgacgtcattgcatccacctacccagcccagaacggtcaagttaaaaaaaacaaccaccaggaagacaagattgaatttgacaatgaggtggataaggtgaaacaggacgccaattgcgtgaatcctctaggcgctcccgaaaagctgcctgaagcgaaggagcaggccgaaggcagcgagcccacttccggaacagaaggtcctgaacacagcgttaacgggcccgcttcccctgcgttgaaccaaggttcatag

SEQ ID NO: 233527 - DNA, 3432 bp, Artificial Sequence
  derived and/or modified sequence
atgtacctctggctgaagcttttagcctttgggtttgccttcttagatacggaggtcttcgttaccggtcagagcccgacccccagtccaacagacgcttacttaaacgcctccgagacaactaccctgtctccgtctggaagtgctgtgatatctacaaccaccatcgccaccactccatccaagccaacatgcgatgagaaatacgcaaacataaccgtggactacctctataacaaggagaccaagttgttcacagcaaagctgaacgtcaatgagaacgtagagtgcggcaataacacatgcactaataatgaagtacacaatctcaccgagtgcaaaaatgcttccgtatccatctctcataatagctgcaccgcacccgataaaactcttattctcgacgtgccccccggcgtcgagaaatttcagttgcatgactgtacacaggtggagaaggctgacacaactatctgcttgaagtggaagaatatcgagacattcacgtgtgatactcagaacattacgtacagatttcagtgtggtaacatgatttttgataacaaagaaattaagctggaaaacctggagccggaacatgagtacaagtgtgattccgagatcctatacaataatcataagtttacgaacgccagcaagattattaaaaccgactttggctctcctggggagccgcagatcatattttgccgcagcgaggctgcccaccagggcgtcatcacttggaacccacctcagagaagcttccacaacttcacactgtgctatattaaggaaacagagaaagactgcctgaacctggataaaaatttaataaaatatgaccttcagaatttgaagccttataccaagtatgtgctgagtttgcatgcctacatcatagcaaaggtgcagaggaacggttcagccgctatgtgtcactttactaccaaaagcgcccccccttcacaggtctggaacatgactgtctcaatgaccagcgataactcaatgcacgtcaaatgcaggccaccaagagacagaaatggaccgcatgagagataccacttggaggtggaagctgggaacaccctggttaggaacgagagccacaaaaattgcgactttcgtgtcaaagacttacagtatagtactgactatacatttaaggcctatttccacaatggcgactacccgggcgaaccgttcatccttcatcattcaacaagctacaatagcaaagccttgatcgccttcctagcctttctaattatagtaaccagtatcgccttactggtggtcctgtataagatttatgacctccacaaaaaaagatcttgcaatctggacgagcaacaagagctggtcgagagagatgacgagaaacagctgatgaacgtcgagcccatccacgcagatattttgctggagacatacaagaggaaaattgccgacgagggcaggctctttctggctgaattccaatcaattccgagggtgttcagcaagtttcccatcaaggaggcacgcaagccttttaatcaaaacaaaaaccggtacgtagacattctgccttacgactacaaccgtgtggagctgagtgaaatcaacggtgacgcaggttccaattatatcaatgcaagttacatcgacgggttcaaagaaccaagaaagtacatcgccgcccagggtccgcgcgacgagacggtggacgacttctggaggatgatctgggagcagaaggccacagtgattgtgatggtgacccgatgtgaggaaggcaataggaataaatgtgcagagtactggcccagtatggaggaaggcacgcgtgctttcggcgacgtcgtagtcaagataaaccagcacaagcgctgccccgattacatcatccagaagcttaacatcgtaaataaaaaagagaaggctactggcagagaggtgacacatattcaatttactagctggcctgatcacggcgttccggaggaccctcacctcttactgaagctcagacgaagagtcaatgcattctctaatttcttctcaggcccaatcgtcgtgcactgtagtgccggtgtaggccggactggcacgtacatcggtatcgacgctatgttagaggggttggaggctgagaataaggtcgacgtgtatggatacgttgtgaaattgcgccggcagcggtgcctgatggtgcaggttgaagctcagtacatccttatccatcaggccctcgtggaatataaccaatttggcgagacagaggtcaatctgagtgagctgcatccttacctccacaacatgaagaagcgggatcctccctctgagcctagccctctagaggccgaatttcagaggttaccttcctatcggtcatggcgtacacagcacattggcaatcaagaggagaataagtcgaagaatcgaaacagcaacgttattccatatgactacaaccgggtgcctctgaagcatgaattagaaatgagcaaggagagcgagcatgacagtgatgaatcaagcgatgacgattcagactccgaagaaccttcaaaatacatcaatgccagctttatcatgtcgtactggaaacctgaggtgatgatcgcagcacagggccctcttaaagagactattggggatttttggcaaatgatattccaacggaaggttaaggtcattgttatgttgaccgagctgaagcatggagaccaagaaatttgcgcccagtactggggagagggaaagcagacctatggcgatattgaggtggatctgaaagacacggacaaatcgagcacctataccttgcgcgttttcgagctgcggcatagtaagcggaaggactctcgcactgtctaccaatatcagtatacaaattggagtgtggagcaactgccagcagagcccaaggagttgatatccatgatacaggtggtgaaacagaagttgcctcagaaaaacagcagtgaggggaataagcatcataaatcaacgccccttctgatccattgtagggacgggtctcaacaaaccggcatcttctgcgctctgctcaatctgttagagtcagcggaaacagaagaagtcgtggatatatttcaggtggtgaaagccctgcgcaaagctcggcccggaatggtgtccacattcgaacagtatcagtttctctacgacgtgattgcctcgacctaccccgcacagaacggtcaagtgaaaaagaacaatcatcaggaagacaagattgaattcgataatgaggtggataaggttaagcaggatgctaactgtgttaacccattgggggcccctgaaaagctgccagaggccaaagagcaggctgagggctccgagcccacatccggaaccgaggggcccgaacacagcgtgaatgggcccgccagtcctgctctgaaccagggaagctag

SEQ ID NO: 233528 - DNA, 441 bp, Artificial Sequence
  derived and/or modified sequence
atgtacttatggcttaaattgcttgccttcggattcgcctttctagataccgaagtgttcgtaacagggcagtcgcctactccttctccgactgacgcttacttgaatgcttcagagactactacattgagtccctctggcagcgctgtcatcagcacgacaacaatcgcgacaacaccaagcaagcctacttgcgatgaaaagtacgccaatatcaccgtggactacttatacaacaaggaaacgaagctcttcactgcgaagctgaacgtgaacgaaaacgtggagtgtggaaacaatacctgcacgaacaatgaggtccacaatctgactgagtgcaagaacgctagtgtttcgatttcgcataatagctgtacagcacccgataagaccctcatcctggacgtgccacccggagtcgagaagttccaactgcattag

SEQ ID NO: 233529 - DNA, 3432 bp, Artificial Sequence
  derived and/or modified sequence
atgtacctgtggctgaagctgctggccttcggctttgccttcctggacacagaggtgtttgtgacaggccagagccccacccccagccccacagatgcctacctgaatgccagcgagaccaccaccctgagccccagcggcagcgctgtgatcagcaccaccaccatcgccaccacccccagcaagcccacctgtgatgagaagtatgccaacatcaccgtggactacctgtacaacaaggagaccaagctgttcaccgccaagctgaatgtgaatgaaaatgtggagtgtggcaacaacacctgcaccaacaatgaggtgcacaacctgacagagtgcaagaatgcctctgtgtccatcagccacaacagctgcacagccccagacaagaccctcatcctggatgtgcccccaggagtggagaagttccagctgcatgactgcacccaggtggagaaggctgacaccaccatctgcctgaagtggaagaacatcgagaccttcacctgtgacacccagaacatcacctaccgcttccagtgtggcaacatgatctttgacaacaaggagatcaagctggagaacctggagcctgagcacgagtacaagtgtgacagcgagatcctgtacaacaaccacaagttcaccaatgccagcaagatcatcaagacagactttggcagccctggagagccccagatcatcttctgccgctctgaggccgcccaccagggcgtcatcacctggaaccccccccagaggagcttccacaacttcaccctgtgctacatcaaggagacagagaaggactgcctgaacctggacaagaacctgatcaagtatgacctgcagaacctgaagccctacaccaagtatgtgctgagcctgcacgcctacatcatcgccaaggtgcagagaaatggatctgctgccatgtgccacttcaccaccaagagcgccccacccagccaggtgtggaacatgacagtgtccatgaccagtgacaacagcatgcacgtgaagtgccggcccccccgggacagaaatggcccccatgagcgctaccacctggaggtggaggccggcaacaccctggtgagaaatgaaagccacaagaactgtgacttccgggtgaaggacctgcagtacagcacagactacaccttcaaggcctacttccacaatggagactacccaggagagcccttcatcctgcaccacagcaccagctacaacagcaaggccctgattgccttcctggccttcctgatcatcgtgaccagcatcgccctgctggtggtgctgtacaagatctatgacctgcacaagaagaggagctgcaacctggatgagcagcaggagctggtggagagagatgatgagaagcagctgatgaatgtggagcccatccacgccgacatcctgctggagacctacaagaggaagattgctgatgagggccgcctcttcctggccgagttccagagcatccccagggtcttcagcaagttccccatcaaggaggccaggaagcccttcaaccagaacaagaaccgctacgtggacatcctgccctatgactacaacagagtggagctgtctgagatcaatggagatgctggcagcaactacatcaatgccagctacattgatggcttcaaggagcccaggaagtacatcgccgcccagggccccagagatgaaacagtggatgacttctggaggatgatctgggagcagaaggccaccgtgattgtgatggtgacccgctgtgaggagggcaacagaaacaagtgtgccgagtactggcccagcatggaggagggcacccgggcctttggagatgtggtggtgaagatcaaccagcacaagcgctgcccagactacatcatccagaagctgaacatcgtgaacaagaaggagaaggccaccggccgggaggtgacccacatccagttcacctcctggccagaccatggagtgcctgaggacccccacctgctgctgaagctgcggaggagagtgaatgccttcagcaacttcttcagcggccccatcgtggtgcactgcagcgctggggtgggccgcacaggcacctacatcggcattgatgccatgctggagggcctggaggccgagaacaaggtggatgtgtatggctacgtggtgaagctgcggcggcagcgctgcctgatggtgcaggtggaggcccagtacatcctgatccaccaggccctggtggagtacaaccagtttggagaaacagaggtgaacctgtctgagctgcacccctacctgcacaacatgaagaagagggacccccccagcgagcccagccccctggaggccgagttccagaggctgcccagctaccgctcctggaggacccagcacatcggcaaccaggaggagaacaagagcaagaacagaaacagcaatgtcatcccctatgactacaacagagtgcccctgaagcatgagctggagatgagcaaggagagcgagcatgacagtgatgagagcagtgatgatgacagcgacagcgaggagcccagcaagtacatcaatgccagcttcatcatgagctactggaagccagaggtgatgattgctgcccagggccccctgaaggagaccatcggggacttctggcagatgatcttccagaggaaggtgaaggtgattgtgatgctgacagagctgaagcatggagaccaggagatctgtgcccagtactggggcgagggcaagcagacctacggggacatcgaggtggacctgaaggacacagacaagagcagcacctacaccctgcgggtgtttgagctgcggcacagcaagaggaaggacagcaggacagtgtaccagtaccagtacaccaactggagcgtggagcagctgcctgctgagcccaaggagctgatctccatgatccaggtggtgaagcagaagctgccccagaagaacagcagcgagggcaacaagcaccacaagagcacccccctgctgatccactgcagagatggcagccagcagacaggcatcttctgtgccctgctgaacctgctggagagcgctgagacagaggaggtggtggacatcttccaggtggtgaaggccctgaggaaggcccggcccggcatggtgtccacctttgagcagtaccagttcctgtatgatgtgattgccagcacctacccagcccagaatggccaggtgaagaagaacaaccaccaggaggacaagattgaatttgacaatgaggtggacaaggtgaagcaggatgccaactgtgtgaaccccctgggcgcccctgagaagctgcctgaggccaaggagcaggccgagggcagcgagcccaccagcggcacagagggccctgagcacagcgtgaatggacctgccagccctgccctgaaccagggcagctag

SEQ ID NO: 233530 - DNA, 441 bp, Artificial Sequence
  derived and/or modified sequence
atgtacctgtggctgaagctgctggccttcggctttgccttcctggacacagaggtgtttgtgacaggccagagccccacccccagccccacagatgcctacctgaatgccagcgagaccaccaccctgagccccagcggcagcgctgtgatcagcaccaccaccatcgccaccacccccagcaagcccacctgtgatgagaagtatgccaacatcaccgtggactacctgtacaacaaggagaccaagctgttcaccgccaagctgaatgtgaatgaaaatgtggagtgtggcaacaacacctgcaccaacaatgaggtgcacaacctgacagagtgcaagaatgcctctgtgtccatcagccacaacagctgcacagccccagacaagaccctcatcctggatgtgcccccaggagtggagaagttccagctgcactag

SEQ ID NO: 233531 - DNA, 3432 bp, Artificial Sequence
  derived and/or modified sequence
atgtacctgtggctgaagctgctggccttcggcttcgccttcctggatactgaggtgttcgttactggacagtccccgacccccagccccacagacgcttacctgaacgcttccgaaaccaccacactttctcctagcggatcggccgttataagtaccacgaccattgcgaccaccccttccaaacccacctgtgatgaaaagtatgccaacatcaccgtggattatctctacaataaagagacaaaattattcactgcgaagttgaacgtgaatgagaatgtggagtgtgggaataatacatgtacgaataatgaggttcacaaccttactgagtgcaagaatgcctccgtcagcattagccataacagctgtaccgctccagacaagaccttgatactagacgtgccccccggcgtggaaaaatttcaacttcacgactgtactcaggttgaaaaggccgacacaacaatatgtcttaagtggaagaacatagaaacctttacttgtgatacacagaatattacttatagatttcaatgtggcaatatgatctttgacaacaaggagataaaactggaaaatctggagccggaacatgaatataaatgtgattcagagatactgtataacaaccataaattcacaaacgctagcaagattattaagaccgacttcgggtcccccggggagccgcaaataattttttgcaggagtgaagctgctcaccagggtgtgatcacttggaatcctccacaaaggtctttccataacttcacactgtgctatattaaagaaacagagaaggactgcctcaacttggataagaacctgatcaagtacgacctccagaatttgaagccatatacaaagtacgtgctaagcctccatgcctacatcattgccaaggtccagagaaacggatcagcagcgatgtgtcactttacaaccaagtctgctcccccttcacaggtgtggaatatgaccgtctccatgacttccgataactcaatgcatgtcaagtgtagacctccccgggatcggaatggcccacacgagaggtatcatctggaggtggaggccggcaacaccttggtcagaaatgagtcccataagaattgtgactttagagtcaaggatctccagtacagcacagactataccttcaaggcctattttcacaatggcgattaccctggcgaaccgttcattttacaccattctacgtcgtacaactctaaggccttgattgcctttctggctttcctgatcatcgttaccagtatagctctcctcgtggtcctgtacaaaatctatgacctacacaagaaacgttcttgcaacctggacgagcagcaggagttggtcgagagagacgatgaaaaacagctgatgaatgtggaacccatccatgcagatatccttctcgaaacctataagaggaagattgccgacgagggaagactgtttctggctgagtttcagagcattccacgcgtattttcaaagtttccgatcaaggaggcccgcaagccctttaatcagaacaaaaatcgatatgtggatatattaccgtatgattacaacagggttgagctcagcgaaattaacggcgatgctggttccaactatatcaacgcgtcttacatcgatggctttaaggagccacggaagtatatagccgcacaggggccgagagatgagacagtagatgacttctggaggatgatttgggagcaaaaggcaaccgtgatcgttatggtcacccgatgcgaggaaggaaataggaacaaatgtgcagaatattggccctccatggaagagggcaccagagctttcggagacgtcgtagtaaaaatcaaccagcacaagcgatgccctgattacattatccagaaacttaacatagtgaataagaaggaaaaggctacagggcgtgaagttacacacatccagttcacctcatggccggaccacggagttcctgaagatccgcatctgctccttaagctgcgacgccgcgtgaacgcgttctccaactttttctctggtcctatcgtggtgcattgttcagctggtgtggggcgaacgggaacttatattggcattgatgccatgctggaaggcctcgaagccgaaaacaaggtcgatgtctatggctacgtggtcaagcttcggaggcaaaggtgcctcatggtgcaagttgaggctcagtatattctgatccaccaggcacttgtagaatataaccaattcggcgagacggaggtgaacctttcagagcttcacccttacctacacaatatgaaaaaacgcgaccccccgtctgagccctccccgttagaggctgagtttcagcgcctgccttcgtatcggtcgtggcgaacacagcacattggcaaccaggaagagaacaagtcaaagaaccgcaatagcaatgtaatcccatacgactacaaccgcgtgccgctgaaacacgagctggaaatgagtaaagagtctgagcacgattcagacgagtcttcagacgacgattccgattcggaagagccctccaagtatatcaatgcatcgttcattatgtcatactggaagccagaggtcatgatcgccgcgcaggggcctcttaaggagacaattggggacttctggcagatgatctttcagagaaaggtaaaggtgatcgtgatgctgacagagttgaaacacggtgaccaggagatctgtgctcagtactggggcgaaggcaagcagacctacggagatatagaagtcgatttgaaagacacagataaaagcagcacttatactttgcgggtctttgagttgagacatagtaagagaaaggattctcgaacggtgtaccagtaccaatatacaaattggtcagtcgaacagctacccgcagaaccgaaagagttgatttctatgatccaggtggtcaagcagaaactgccacagaaaaatagctctgagggaaataaacaccataaatctacccccttgctcatccattgtcgggatgggtcgcagcagaccgggatcttttgcgctcttctgaatcttttggaatccgcggagacggaagaagtagttgatatattccaggttgtcaaggccttgagaaaggcacgtccggggatggtctcaacattcgaacagtaccagttcctctatgacgtgattgcgtcgacttaccccgcacagaacgggcaggtgaaaaaaaacaaccatcaagaagacaagatagaatttgataatgaagttgataaggttaagcaggacgccaactgtgttaatccactgggtgccccagagaagctcccggaagcaaaggagcaagccgagggatcggagcccacttctgggaccgaaggtcctgagcattccgtaaacgggccagcaagcccagctctgaaccagggatcttag

SEQ ID NO: 233532 - DNA, 3432 bp, Artificial Sequence
  derived and/or modified sequence
atgtacctgtggctgaagctgctggccttcggcttcgccttcctggacacagaggtcttcgtgacaggacagagtcccaccccaagcccgacagatgcgtacctgaatgccagcgagaccaccaccttgagtccatctggcagcgccgtgatcagtacaaccacaatagcaacaacccctagtaagcccacatgtgacgagaagtacgccaacataacagtggactacctctataacaaagagacaaagctgtttacagcaaaactcaatgtaaacgaaaacgtggagtgtggtaataatacctgcacaaacaatgaagtgcataatttgacagagtgtaaaaatgcctctgtttcaatcagccacaatagttgcactgcccctgataagacacttatcctggacgtgccgcctggggtcgaaaagttccagctgcatgactgtacacaggtagagaaggccgatacaacaatctgcctgaaatggaagaacattgaaacttttacgtgcgacactcaaaatataacttaccggtttcaatgtggcaacatgatcttcgacaataaggagataaagctcgagaatctggaacccgaacacgagtataaatgtgattctgagattctgtataacaatcacaagtttactaatgcaagcaaaattatcaagacggacttcggttcccctggagagcctcagatcattttctgtaggagcgaggccgcgcaccaaggagtgatcacttggaaccctccccaacggagcttccataatttcacactttgttatatcaaggagactgagaaagactgcctgaatttagacaagaacctaatcaagtacgacctgcagaatctcaagccctatacaaagtatgtcctgtctctgcatgcgtacataatcgcgaaagtgcagcgaaacgggagcgcagcaatgtgccattttaccacaaagagcgcaccaccatcccaggtgtggaatatgacagtatctatgacaagtgacaactctatgcatgtgaaatgcaggcccccaagagaccggaacggccctcacgagcgataccatctggaggtggaggccgggaatactctggtgagaaatgagtcacacaagaactgtgattttcgagtcaaagacttacagtactcaacagattacacgtttaaagcctactttcataacggcgattacccaggagaaccatttatactgcatcactccacaagttataatagcaaagcgttgattgccttcttggctttcctgataatagtgactagcatcgctttactcgttgttctgtacaagatatacgatctgcacaaaaaacgtagctgcaacctcgatgagcaacaagagctggtcgagcgggacgacgaaaaacaattgatgaacgttgaacctatccacgccgacatactcctggagacttataagcgaaagattgccgatgagggacgcctcttcttagctgaattccaatcaattccccgggtgttctccaaattccctattaaggaagctcgtaagccatttaatcaaaataagaaccgatatgttgacatccttccttatgactacaatagggtggaactgagcgagataaatggcgatgccggcagcaattacattaatgctagctacatagatggattcaaggaacctcgcaagtatatcgcggctcagggcccccgggacgagacagtagatgacttttggcgcatgatttgggagcagaaggcgacagtgatagtgatggttacacgatgtgaagagggcaatcggaacaaatgcgccgagtactggccctctatggaggagggaacacgcgcttttggagacgttgtggtgaaaatcaaccaacacaaacgttgccctgactatataattcagaagctgaacattgtcaacaagaaggagaaagccacgggcagagaagtcacccatatccagttcacttcttggcctgatcacggggtccccgaggacccacacctgctgttgaaactgcggaggagagttaacgccttttccaacttcttctcggggccaatcgtggtgcactgcagtgctggagtcggacgcaccggaacatacattgggattgacgctatgttggagggcctggaggccgagaataaggttgacgtgtacggatacgttgtgaaactgagaagacagcgatgtcttatggtccaggtggaagctcagtatattcttatccatcaggcactcgtagaatacaatcagtttggcgaaaccgaagtcaacctgagcgagctgcacccttacctgcacaacatgaagaagagggacccaccttcagaaccatcaccgctcgaagccgagtttcagagattgccctcataccgtagttggcgaactcagcacatcggtaaccaggaggagaataagagtaaaaaccgcaatagcaacgtgattccatatgattacaacagggtcccacttaagcatgaacttgaaatgtctaaggaatctgagcacgacagtgatgagtcctcggacgacgactctgatagcgaggaaccatctaagtatatcaatgcctcgttcattatgagttactggaaacctgaggtgatgatcgccgcacaaggcccacttaaagaaactatcggcgacttctggcaaatgatctttcagagaaaggtgaaagtgattgtgatgctcacagagctcaaacacggtgatcaggagatctgcgcccagtattggggtgaggggaagcagacttacggagatattgaggtcgatcttaaagacacagacaagagtagtacatacaccctgcgcgtcttcgagctccggcacagcaagcgtaaggacagccgcactgtgtatcaatatcagtacacaaattggtccgtcgagcagctgcctgctgagccgaaagaattaatctctatgatccaggtcgtgaaacagaaactgccccagaaaaacagctcagagggtaacaaacatcacaaatccacacctcttctcatccactgtcgcgatggcagccaacagactggaatcttttgcgcactgctcaatcttttagagtccgctgaaaccgaggaggtggtagacatcttccaggtggtgaaggccttgcgcaaggccaggcccggcatggttagcacattcgaacaataccagttcctctacgatgttattgcgagtacataccccgcccaaaacggacaagtgaagaagaataaccatcaggaagataagattgaattcgacaacgaggtggacaaagttaaacaggacgctaactgcgtaaacccattgggagctccagagaaacttcctgaagcaaaagaacaggcagaaggtagcgagccgaccagcggcactgaaggacctgaacactcagtaaacgggccagcatccccagccttaaaccaaggctcatag

SEQ ID NO: 233533 - DNA, 441 bp, Artificial Sequence
  derived and/or modified sequence
atgtacctgtggctgaagctgctggccttcggcttcgccttcctggatacggaagtattcgtaacaggacagagcccgacgccatcacccaccgacgcgtacctgaacgcaagcgaaacaacgacgcttagcccttccggcagcgcagtgatttcaacgacaaccatcgcgaccaccccgtccaaacccacttgtgacgagaaatatgcaaacattacggttgattacctgtataacaaggagaccaaattattcaccgccaagctaaacgtgaacgagaacgtagaatgcggcaataatacttgcaccaataacgaggtgcacaacttaactgagtgtaagaatgccagtgtcagcatatctcataatagctgtaccgcccccgataagaccctcatcctggatgtccctcctggcgttgaaaagtttcaactccactag

SEQ ID NO: 233534 - DNA, 3432 bp, Artificial Sequence
  derived and/or modified sequence
atgtacctgtggctgaagcttctggcctttggcttcgctttcctggacacggaagtgtttgtaaccggacagagccctacacccagcccaactgacgcctatctcaacgccagcgaaaccacaacgctgtcgccatctgggtcggcggttatttccacaaccactattgctacaacaccctccaaacctacatgcgatgaaaaatacgcaaacattactgtggactacctgtacaacaaggagaccaagctctttacagcgaagttgaatgtcaacgagaacgtcgaatgcggcaataacacttgcaccaacaatgaggtccataacctgaccgaatgtaagaatgccagcgtgtccatttcccataatagctgcactgctcctgataaaaccttaattttggacgtgcctcccggagtagaaaagtttcaattgcatgattgcactcaagttgagaaagcggacaccactatatgtctgaaatggaagaacatcgagacttttacatgcgacacacagaacattacataccggttccagtgcggcaatatgatcttcgataataaggagatcaagctggaaaacctggagcccgagcatgagtataaatgtgacagcgaaatcctttacaacaatcataagttcactaatgctagtaaaataatcaaaaccgactttgggtcccctggggaaccccagatcatcttctgtaggtcagaagccgcacatcagggtgtcataacatggaatccccctcagcggtcatttcacaacttcaccttgtgttacatcaaggagactgaaaaggattgtctgaatttggataaaaatctgatcaaatacgacctgcagaatcttaagccctacaccaaatacgtgctgtctctgcatgcatatattattgctaaggtgcaacgaaatggctccgcagcaatgtgccacttcacaacgaagagtgccccacccagtcaggtgtggaacatgacagtgagtatgacaagtgataattccatgcacgtgaagtgtagaccccctagggaccgaaatggtcctcacgaacggtaccatcttgaggtggaggcgggtaatacactcgtgcggaatgagagtcataaaaactgtgacttcagggtcaaggacctacagtactcaactgattacacatttaaagcctatttccataacggagattaccccggtgagccattcatcctccaccacagcacctcatacaactccaaagccttgattgcctttctggcattcctgatcatcgtcacatccattgcactcctagtggttctgtacaaaatttacgacctgcataaaaagaggtcatgcaacctggacgagcaacaggagctggtggagcgtgatgacgagaagcagttgatgaatgtggagccaatccatgccgacatcttgcttgagacctataaacggaaaattgccgatgagggcaggcttttccttgccgagtttcagtcaatccccagagtcttcagcaagtttcccatcaaagaagcacgaaaacccttcaatcagaacaaaaacagatacgtggacatattgccctacgactataacagagtggaattgagtgagatcaacggggacgctgggtccaactacattaacgcctcatatatcgacgggttcaaggagccaaggaaatacatcgctgcccagggaccacgagacgagacagttgatgatttctggcggatgatctgggagcagaaagccactgtgatcgtgatggtgaccagatgtgaagagggtaatagaaataaatgcgctgagtattggccgtctatggaggagggtacaagagccttcggggatgtcgtagtgaaaatcaatcagcataagcggtgccctgactatatcatccagaagctaaacatagtgaacaagaaggaaaaagctactggcagggaggttactcacattcagttcacatcctggccagaccatggtgtgccagaggacccacaccttttgctgaaactgcggcgacgagtgaacgcattctccaattttttctcgggtccaatagttgtgcactgtagcgccggagtcggcaggacaggaacgtacatcggcatagatgcaatgttagagggtctggaagctgagaataaagtcgacgtatatggctatgtggttaagctgcgcagacagcgctgtttaatggtacaggtagaagcccagtatatccttattcaccaggccctcgtggagtataatcagtttggggagacagaggtgaacctctccgagctgcacccgtacctacacaacatgaaaaaacgagaccctccatcagagcccagcccactggaagccgaattccagaggcttccatcatatcgttcttggcggactcagcacatcggcaaccaggaggaaaacaaatccaaaaatcggaactcaaatgtcattccatatgactataaccgcgtccccttaaagcatgagctagaaatgtcgaaagagtccgagcatgatagcgatgagtctagtgacgatgatagcgatagcgaagaaccctccaagtacatcaatgcttccttcatcatgtcttactggaagccagaggtaatgatagcggctcaagggccactcaaggagaccatcggggacttttggcagatgatctttcagcgaaaagtgaaggtgatagttatgttgactgaactgaagcatggcgaccaggagatttgcgcccagtattggggcgaaggcaagcaaacttacggggatatcgaagtcgaccttaaggatacggacaaaagcagcacctataccctgcgcgttttcgagctgagacactctaagagaaaagactcccggacagtgtatcaatatcagtatacgaactggagcgtggaacaactgcctgcagagcctaaggagttaatttctatgatccaagtggtgaaacagaaactgcctcaaaaaaatagttcagaaggcaataaacatcataagtctactccactcttaattcattgcagggatgggtctcagcagactggtatcttctgcgccttgctgaatctgttggaatcagcagagaccgaagaagtggtggacatcttccaagtggtgaaagccctgagaaaggctcggcctggaatggtctccacatttgagcagtaccagttcctttatgatgtgatcgcaagcacctacccagcacagaacggtcaagtgaagaaaaataatcatcaggaggacaagattgaattcgacaatgaggttgataaagtgaagcaagacgcaaattgcgtgaatcctctaggcgctccagagaaactgccagaggccaaggaacaagcggaaggtagtgagcccacctctggtaccgaggggcctgaacatagcgtgaacggacccgcaagcccagccttgaatcagggtagctag

SEQ ID NO: 233535 - DNA, 3432 bp, Artificial Sequence
  derived and/or modified sequence
atgtacctgtggctaaagctgctggcttttggatttgcattcttggatacggaagtattcgtgacaggccagtctccaacgccatcacctaccgatgcgtacctcaacgcttcggaaactacaacactatcccccagtggttccgcggtcatctcaacaactactattgctacaacaccctcaaaacctacatgtgacgaaaaatatgctaacatcacagtggattatctctacaacaaggaaaccaagctgtttacggccaaactgaatgttaatgagaacgttgaatgtggtaataacacttgtaccaacaatgaggtgcacaatctgaccgaatgcaagaacgctagtgtgagcattagccacaactcatgcacagcaccagacaagactctgatcctagatgtacccccaggggtggagaagttccagctgcatgattgcacacaggtagagaaggcagacactaccatatgcctgaagtggaaaaatatagaaacattcacctgtgacactcagaacattacatataggtttcagtgtggtaatatgatttttgataataaagagattaagctggagaacctggaacctgagcacgagtacaaatgcgactccgaaatcttatataacaatcacaagttcaccaatgccagcaaaatcatcaaaacggactttggctctcccggagagccacaaataatcttctgtagaagtgaggccgcacaccaaggcgtcatcacgtggaatcctcctcagcgctcctttcacaactttacactgtgttacatcaaggagactgagaaagattgcctcaatttggataaaaacctcattaagtacgacctgcagaatctcaaaccttatacaaagtatgtgctgagtcttcatgcttacatcatagccaaggtccagagaaatggctccgcggctatgtgtcatttcacaacaaaatcagcaccgccaagccaggtttggaatatgacagtttctatgacttccgacaactctatgcacgtgaaatgtcgtccccctcgtgaccggaatgggcctcatgaacggtaccacctggaggttgaagctggcaataccctggtcagaaatgaatcacataaaaattgcgacttcagggtgaaggacttacagtactcaaccgattatacattcaaggcttattttcataatggcgattaccctggagaacctttcatcttgcaccatagcacctcatacaactcgaaagctttaatcgcttttctagcatttctgataatcgtgacttccattgctctgctggtcgtgctttacaaaatctatgacctgcataagaagcggtcttgtaaccttgacgaacagcaggagctggtggaaagagacgatgagaagcagctcatgaacgttgagcctatacacgccgatatcctcctcgaaacatacaaacggaagatcgctgatgaaggccgattattcctcgcggagttccaaagcatccctcgagtgtttagcaaattccctattaaggaagcgaggaaacccttcaaccagaacaaaaaccggtatgtggacatccttccctatgattataaccgcgtggagttaagtgagatcaatggcgacgctggcagcaactatatcaatgcctcatacatagacggttttaaggagccaaggaagtacattgccgctcaagggcctcgcgatgagacggtggatgatttttggagaatgatttgggaacagaaggctaccgtgattgtaatggtgacacgttgtgaggagggcaataggaataaatgcgccgagtactggccttctatggaggagggaacccgtgcattcggagacgtcgttgtgaagatcaatcaacacaaaaggtgccccgactacattatacagaagctgaatattgtcaataagaaggaaaaagctactggcagggaggtgacccacatccaatttacatcttggccagaccatggggtgcctgaagatcctcacctgctcctcaagctgcgacggcgtgtgaatgctttctccaactttttctccgggccaattgtagtgcattgtagtgctggcgtcggacggacaggtacctatattgggatcgacgcaatgctagaggggctagaggcagagaacaaggtggacgtgtacggatatgtggtgaagttacggcgtcagcgctgcttgatggttcaggtggaagcacagtatatcctgattcatcaggctctggttgaatataaccagttcggcgagaccgaagttaacctgtctgagttacatccttatttgcacaatatgaaaaagcgtgaccctccctcggagccatccccactggaggccgaatttcagcgacttcccagctacaggtcctggaggactcaacacattgggaaccaggaagagaacaaaagcaaaaacaggaactctaatgtgattccttatgactacaacagagtaccccttaagcatgaattggaaatgagcaaggaatcagaacatgacagtgacgagagttctgatgatgattctgactcagaggaaccctccaagtacataaacgcttcttttataatgagttattggaagccagaggtgatgatagctgctcagggcccactgaaggaaacaatcggggatttttggcaaatgatttttcagaggaaggttaaggtgatcgtgatgctcaccgaactgaaacacggagatcaagaaatttgtgcgcaatactggggggaaggaaagcagacctacggcgatattgaagtcgacctgaaggacacagacaaatcctctacatacacgctgcgggtttttgaactgagacacagcaagcgcaaggactctcgcaccgtgtaccagtaccagtacacaaattggagcgttgaacagcttcctgctgagcctaaggagctgatcagcatgattcaagttgttaaacagaagctgccgcaaaaaaattcctccgaaggcaataaacatcataagagcacacccctcctgatacattgtagagatggcagccagcagacaggtatattctgtgcactcctgaaccttctggaatctgccgaaacagaggaggtcgtggacatctttcaagttgttaaggccttgcggaaggcccgaccaggcatggtgagtacattcgagcagtatcagttcttgtatgacgtgatagcttcaacctatcccgcacagaacggccaggttaagaagaacaatcaccaggaagataagatcgagttcgacaatgaggtcgataaggtgaagcaggatgcgaattgcgtgaacccgctgggagcgcctgaaaaacttccagaagccaaggagcaggccgaggggtcagaaccgaccagcggcactgaaggaccagaacatagcgtgaatggccctgcttcccccgctctgaatcaggggtcttag

SEQ ID NO: 233536 - DNA, 441 bp, Artificial Sequence
  derived and/or modified sequence
atgtatctgtggttgaagctgctggcattcggatttgccttcctggataccgaggttttcgttaccgggcagagccccactccttctcccactgatgcctatctcaacgcttccgaaacaacaacacttagtccttccgggagtgccgtcatttcaaccaccaccatagccaccactccatcaaaacctacttgtgacgagaagtatgcaaacatcaccgtggactacctctacaataaagagacaaagctattcactgctaagctcaacgtcaacgaaaacgtggaatgcggaaacaacacgtgtaccaataatgaagtgcacaatctgaccgagtgcaaaaacgcttctgtgtccattagtcacaatagttgtactgccccagataaaacgctcatcctcgacgtgccaccaggcgttgagaagttccagttgcactag

SEQ ID NO: 233537 - DNA, 4838 bp, Artificial Sequence
  derived and/or modified sequence
ggagaagttagtaaaaccgaatctgacatcatcacctagcagttcatgcagctagcaagtggtttgttcttagggtaacagaggaggaaattgttcctcgtctgataagacaacagtggagaaaggacgcatgctgtttcttagggacacggctgacttccagatatgaccatgtatttgtggcttaaactcttggcatttggctttgcctttctggacacagaagtatttgtgacagggcaaagcccaacaccttcccccactgatgcctaccttaatgcctctgaaacaaccactctgagcccttctggaagcgctgtcatttcaaccacaacaatagctactactccatctaagccaacatgtgatgaaaaatatgcaaacatcactgtggattacttatataacaaggaaactaaattatttacagcaaagctaaatgttaatgagaatgtggaatgtggaaacaatacttgcacaaacaatgaggtgcataaccttacagaatgtaaaaatgcgtctgtttccatatctcataattcatgtactgctcctgataagacattaatattagatgtgccaccaggggttgaaaagtttcagttacatgattgtacacaagttgaaaaagcagatactactatttgtttaaaatggaaaaatattgaaacctttacttgtgatacacagaatattacctacagatttcagtgtggtaatatgatatttgataataaagaaattaaattagaaaaccttgaacccgaacatgagtataagtgtgactcagaaatactctataataaccacaagtttactaacgcaagtaaaattattaaaacagattttgggagtccaggagagcctcagattattttttgtagaagtgaagctgcacatcaaggagtaattacctggaatccccctcaaagatcatttcataattttaccctctgttatataaaagagacagaaaaagattgcctcaatctggataaaaacctgatcaaatatgatttgcaaaatttaaaaccttatacgaaatatgttttatcattacatgcctacatcattgcaaaagtgcaacgtaatggaagtgctgcaatgtgtcatttcacaactaaaagtgctcctccaagccaggtctggaacatgactgtctccatgacatcagataatagtatgcatgtcaagtgtaggcctcccagggaccgtaatggcccccatgaacgttaccatttggaagttgaagctggaaatactctggttagaaatgagtcgcataagaattgcgatttccgtgtaaaagatcttcaatattcaacagactacacttttaaggcctattttcacaatggagactatcctggagaaccctttattttacatcattcaacatcttataattctaaggcactgatagcatttctggcatttctgattattgtgacatcaatagccctgcttgttgttctctacaaaatctatgatctacataagaaaagatcctgcaatttagatgaacagcaggagcttgttgaaagggatgatgaaaaacaactgatgaatgtggagccaatccatgcagatattttgttggaaacttataagaggaagattgctgatgaaggaagactttttctggctgaatttcagagcatcccgcgggtgttcagcaagtttcctataaaggaagctcgaaagccctttaaccagaataaaaaccgttatgttgacattcttccttatgattataaccgtgttgaactctctgagataaacggagatgcagggtcaaactacataaatgccagctatattgatggtttcaaagaacccaggaaatacattgctgcacaaggtcccagggatgaaactgttgatgatttctggaggatgatttgggaacagaaagccacagttattgtcatggtcactcgatgtgaagaaggaaacaggaacaagtgtgcagaatactggccgtcaatggaagagggcactcgggcttttggagatgttgttgtaaagatcaaccagcacaaaagatgtccagattacatcattcagaaattgaacattgtaaataaaaaagaaaaagcaactggaagagaggtgactcacattcagttcaccagctggccagaccacggggtgcctgaggatcctcacttgctcctcaaactgagaaggagagtgaatgccttcagcaatttcttcagtggtcccattgtggtgcactgcagtgctggtgttgggcgcacaggaacctatatcggaattgatgccatgctagaaggcctggaagccgagaacaaagtggatgtttatggttatgttgtcaagctaaggcgacagagatgcctgatggttcaagtagaggcccagtacatcttgatccatcaggctttggtggaatacaatcagtttggagaaacagaagtgaatttgtctgaattacatccatatctacataacatgaagaaaagggatccacccagtgagccgtctccactagaggctgaattccagagacttccttcatataggagctggaggacacagcacattggaaatcaagaagaaaataaaagtaaaaacaggaattctaatgtcatcccatatgactataacagagtgccacttaaacatgagctggaaatgagtaaagagagtgagcatgattcagatgaatcctctgatgatgacagtgattcagaggaaccaagcaaatacatcaatgcatcttttataatgagctactggaaacctgaagtgatgattgctgctcagggaccactgaaggagaccattggtgacttttggcagatgatcttccaaagaaaagtcaaagttattgttatgctgacagaactgaaacatggagaccaggaaatctgtgctcagtactggggagaaggaaagcaaacatatggagatattgaagttgacctgaaagacacagacaaatcttcaacttatacccttcgtgtctttgaactgagacattccaagaggaaagactctcgaactgtgtaccagtaccaatatacaaactggagtgtggagcagcttcctgcagaacccaaggaattaatctctatgattcaggtcgtcaaacaaaaacttccccagaagaattcctctgaagggaacaagcatcacaagagtacacctctactcattcactgcagggatggatctcagcaaacgggaatattttgtgctttgttaaatctcttagaaagtgcggaaacagaagaggtagtggatatttttcaagtggtaaaagctctacgcaaagctaggccaggcatggtttccacattcgagcaatatcaattcctatatgacgtcattgccagcacctaccctgctcagaatggacaagtaaagaaaaacaaccatcaagaagataaaattgaatttgataatgaagtggacaaagtaaagcaggatgctaattgtgttaatccacttggtgccccagaaaagctccctgaagcaaaggaacaggctgaaggttctgaacccacgagtggcactgaggggccagaacattctgtcaatggtcctgcaagtccagctttaaatcaaggttcataggaaaagacataaatgaggaaactccaaacctcctgttagctgttatttctatttttgtagaagtaggaagtgaaaataggtatacagtggattaattaaatgcagcgaaccaatatttgtagaagggttatattttactactgtggaaaaatatttaagatagttttgccagaacagtttgtacagacgtatgcttattttaaaattttatctcttattcagtaaaaaacaacttctttgtaatcgttatgtgtgtatatgtatgtgtgtatgggtgtgtgtttgtgtgagagacagagaaagagagagaattctttcaagtgaatctaaaagcttttgcttttcctttgtttttatgaagaaaaaatacattttatattagaagtgttaacttagcttgaaggatctgtttttaaaaatcataaactgtgtgcagactcaataaaatcatgtacatttctgaaatgacctcaagatgtcctccttgttctactcatatatatctatcttatatagtttactattttacttctagagatagtacataaaggtggtatgtgtgtgtatgctactacaaaaaagttgttaactaaattaacattgggaaatcttatattccatatattagcatttagtccaatgtctttttaagcttatttaattaaaaaatttccagtgagcttatcatgctgtctttacatggggttttcaattttgcatgctcgattattccctgtacaatatttaaaatttattgcttgatacttttgacaacaaattaggttttgtacaattgaacttaaataaatgtcattaaaataaataaatgcaatatgtattaatattcattgtataaaaatagaagaatacaaacatatttgttaaatatttacatatgaaatttaatatagctatttttatggaatttttcattgatatgaaaaatatgatattgcatatgcatagttcccatgttaaatcccattcataactttcattaaagcatttactttgaatttctccaatgcttagaatgtttttaccaggaatggatgtcgctaatcataataaaattcaaccattatttttttcttgtttataatacattgtgttatatgttcaaatatgaaatgtgtatgcacctattgaaatatgtttaatgcatttattaacatttgcaggacacttttacaggccccaattatccaatagtctaataattgtttaagatctag

SEQ ID NO: 233538 - DNA, 4626 bp, Artificial Sequence
  derived and/or modified sequence
agaggaggaaattgttcctcgtctgataagacaacagtggagaaaggacgcatgctgtttcttagggacacggctgacttccagatatgaccatgtatttgtggcttaaactcttggcatttggctttgcctttctggacacagaagtatttgtgacagggcaaagcccaacaccttcccccactgatgcctaccttaatgcctctgaaacaaccactctgagcccttctggaagcgctgtcatttcaaccacaacaatagctactactccatctaagccaacatgtgatgaaaaatatgcaaacatcactgtggattacttatataacaaggaaactaaattatttacagcaaagctaaatgttaatgagaatgtggaatgtggaaacaatacttgcacaaacaatgaggtgcataaccttacagaatgtaaaaatgcgtctgtttccatatctcataattcatgtactgctcctgataagacattaatattagatgtgccaccaggggttgaaaagtttcagttacatgattgtacacaagttgaaaaagcagatactactatttgtttaaaatggaaaaatattgaaacctttacttgtgatacacagaatattacctacagatttcagtgtggtaatatgatatttgataataaagaaattaaattagaaaaccttgaacccgaacatgagtataagtgtgactcagaaatactctataataaccacaagtttactaacgcaagtaaaattattaaaacagattttgggagtccaggagagcctcagattattttttgtagaagtgaagctgcacatcaaggagtaattacctggaatccccctcaaagatcatttcataattttaccctctgttatataaaagagacagaaaaagattgcctcaatctggataaaaacctgatcaaatatgatttgcaaaatttaaaaccttatacgaaatatgttttatcattacatgcctacatcattgcaaaagtgcaacgtaatggaagtgctgcaatgtgtcatttcacaactaaaagtgctcctccaagccaggtctggaacatgactgtctccatgacatcagataatagtatgcatgtcaagtgtaggcctcccagggaccgtaatggcccccatgaacgttaccatttggaagttgaagctggaaatactctggttagaaatgagtcgcataagaattgcgatttccgtgtaaaagatcttcaatattcaacagactacacttttaaggcctattttcacaatggagactatcctggagaaccctttattttacatcattcaacatcttataattctaaggcactgatagcatttctggcatttctgattattgtgacatcaatagccctgcttgttgttctctacaaaatctatgatctacataagaaaagatcctgcaatttagatgaacagcaggagcttgttgaaagggatgatgaaaaacaactgatgaatgtggagccaatccatgcagatattttgttggaaacttataagaggaagattgctgatgaaggaagactttttctggctgaatttcagagcatcccgcgggtgttcagcaagtttcctataaaggaagctcgaaagccctttaaccagaataaaaaccgttatgttgacattcttccttatgattataaccgtgttgaactctctgagataaacggagatgcagggtcaaactacataaatgccagctatattgatggtttcaaagaacccaggaaatacattgctgcacaaggtcccagggatgaaactgttgatgatttctggaggatgatttgggaacagaaagccacagttattgtcatggtcactcgatgtgaagaaggaaacaggaacaagtgtgcagaatactggccgtcaatggaagagggcactcgggcttttggagatgttgttgtaaagatcaaccagcacaaaagatgtccagattacatcattcagaaattgaacattgtaaataaaaaagaaaaagcaactggaagagaggtgactcacattcagttcaccagctggccagaccacggggtgcctgaggatcctcacttgctcctcaaactgagaaggagagtgaatgccttcagcaatttcttcagtggtcccattgtggtgcactgcagtgctggtgttgggcgcacaggaacctatatcggaattgatgccatgctagaaggcctggaagccgagaacaaagtggatgtttatggttatgttgtcaagctaaggcgacagagatgcctgatggttcaagtagaggcccagtacatcttgatccatcaggctttggtggaatacaatcagtttggagaaacagaagtgaatttgtctgaattacatccatatctacataacatgaagaaaagggatccacccagtgagccgtctccactagaggctgaattccagagacttccttcatataggagctggaggacacagcacattggaaatcaagaagaaaataaaagtaaaaacaggaattctaatgtcatcccatatgactataacagagtgccacttaaacatgagctggaaatgagtaaagagagtgagcatgattcagatgaatcctctgatgatgacagtgattcagaggaaccaagcaaatacatcaatgcatcttttataatgagctactggaaacctgaagtgatgattgctgctcagggaccactgaaggagaccattggtgacttttggcagatgatcttccaaagaaaagtcaaagttattgttatgctgacagaactgaaacatggagaccaggaaatctgtgctcagtactggggagaaggaaagcaaacatatggagatattgaagttgacctgaaagacacagacaaatcttcaacttatacccttcgtgtctttgaactgagacattccaagaggaaagactctcgaactgtgtaccagtaccaatatacaaactggagtgtggagcagcttcctgcagaacccaaggaattaatctctatgattcaggtcgtcaaacaaaaacttccccagaagaattcctctgaagggaacaagcatcacaagagtacacctctactcattcactgcagggatggatctcagcaaacgggaatattttgtgctttgttaaatctcttagaaagtgcggaaacagaagaggtagtggatatttttcaagtggtaaaagctctacgcaaagctaggccaggcatggtttccacattcgagcaatatcaattcctatatgacgtcattgccagcacctaccctgctcagaatggacaagtaaagaaaaacaaccatcaagaagataaaattgaatttgataatgaagtggacaaagtaaagcaggatgctaattgtgttaatccacttggtgccccagaaaagctccctgaagcaaaggaacaggctgaaggttctgaacccacgagtggcactgaggggccagaacattctgtcaatggtcctgcaagtccagctttaaatcaaggttcataggaaaagacataaatgaggaaactccaaacctcctgttagctgttatttctatttttgtagaagtaggaagtgaaaataggtatacagtggattaattaaatgcagcgaaccaatatttgtagaagggttatattttactactgtggaaaaatatttaagatagttttgccagaacagtttgtacagacgtatgcttattttaaaattttatctcttattcagtaaaaaacaacttctttgtaatcgttatgtgtgtatatgtatgtgtgtatgggtgtgtgtttgtgtgagagacagagaaagagagagaattctttcaagtgaatctaaaagcttttgcttttcctttgtttttatgaagaaaaaatacattttatattagaagtgttaacttagcttgaaggatctgtttttaaaaatcataaactgtgtgcagactcaataaaatcatgtacatttctgaaatgacctcaagatgtcctccttgttctactcatatatatctatcttatatagtttactattttacttctagagatagtacataaaggtggtatgtgtgtgtatgctactacaaaaaagttgttaactaaattaacattgggaaatcttatattccatatattagcatttagtccaatgtctttttaagcttatttaattaaaaaatttccagtgagcttatcatgctgtctttacatggggttttcaattttgcatgctcgattattccctgtacaatatttaaaatttattgcttgatacttttgacaacaaattaggttttgtacaattgaacttaaataaatgtcattaaaataaataaatgcaatatgtattaatattcattgtataaaaatagaagaatacaaacatatttgttaaatatttacatatgaaatttaatatagctatttttatggaatttttcattgatatgaaaaatatgatattgcatatgcatagttcccatgttaaatcccattcataactttcattaaagcatttactttgaatttctccaatgcttagaatgtttttaccaggaatggatgtcgctaatcataataaaattcaaccattatttttttcttgtttataa

SEQ ID NO: 233539 - DNA, 517 bp, Artificial Sequence
  derived and/or modified sequence
tagttttttcattcatttggccgtctcaaaggacgcatgctgtttcttagggacacggctgacttccagatatgaccatgtatttgtggcttaaactcttggcatttggctttgcctttctggacacagaagtatttgtgacagggcaaagcccaacaccttcccccactgatgcctaccttaatgcctctgaaacaaccactctgagcccttctggaagcgctgtcatttcaaccacaacaatagctactactccatctaagccaacatgtgatgaaaaatatgcaaacatcactgtggattacttatataacaaggaaactaaattatttacagcaaagctaaatgttaatgagaatgtggaatgtggaaacaatacttgcacaaacaatgaggtgcataaccttacagaatgtaaaaatgcgtctgtttccatatctcataattcatgtactgctcctgataagacattaatattagatgtgccaccaggggttgaaaagtttcagttacatga

SEQ ID NO: 233540 - protein, 775 aa, Artificial Sequence
  derived and/or modified sequence
MASRAVVRARRCPQCPQVRAAAAAPAWAALPLSRSLPPCSNSSSFSMPLFLLLLLVLLLLLEDAGAQQGDGCGHTVLGPESGTLTSINYPQTYPNSTVCEWEIRVKMGERVRIKFGDFDIEDSDSCHFNYLRIYNGIGVSRTEIGKYCGLGLQMNHSIESKGNEITLLFMSGIHVSGRGFLASYSVIDKQDLITCLDTASNFLEPEFSKYCPAGCLLPFAEISGTIPHGYRDSSPLCMAGVHAGVVSNTLGGQISVVISKGIPYYESSLANNVTSVVGHLSTSLFTFKTSGCYGTLGMESGVIADPQITASSVLEWTDHTGQENSWKPKKARLKKPGPPWAAFATDEYQWLQIDLNKEKKITGIITTGSTMVEHNYYVSAYRILYSDDGQKWTVYREPGVEQDKIFQGNKDYHQDVRNNFLPPIIARFIRVNPTQWQQKIAMKMELLGCQFIPKGRPPKLTQPPPPRNSNDLKNTTAPPKIAKGRAPKFTQPLQPRSSNEFPAQTEQTTASPDIRNTTVTPNVTKDVALAAVLVPVLVMVLTTLILILVCAWHWRNRKKKTEGTYDLPYWDRAGWWKGMKQFLPAKAVDHEETPVRYSSSEVNHLSPREVTTVLQADSAEYAQPLVGGIVGTLHQRSTFKPEEGKEAGYADLDPYNSPGQEVYHAYAEPLPITGPEYATPIIMDMSGHPTTSVGQPSTSTFKATGNQPPPLVGTYNTLLSRTDSCSSAQAQYDTPKAGKPGLPAPDELVYQVPQSTQEVSGAGRDGECDVFKEIL

SEQ ID NO: 233541 - protein, 789 aa, Artificial Sequence
  derived and/or modified sequence
MASRAVVRARRCPQCPQVRAAAAAPAWAALPLSRSLPPCSNSSSFSMPLFLLLLLVLLLLLEDAGAQQGDGCGHTVLGPESGTLTSINYPQTYPNSTVCEWEIRVKMGERVRIKFGDFDIEDSDSCHFNYLRIYNGIGVSRTEIGKYCGLGLQMNHSIESKGNEITLLFMSGIHVSGRGFLASYSVIDKQDLITCLDTASNFLEPEFSKYCPAGCLLPFAEISGTIPHGYRDSSPLCMAGVHAGVVSNTLGGQISVVISKGIPYYESSLANNVTSVVGHLSTSLFTFKTSGCYGTLGMESGVIADPQITASSVLEWTDHTGQENSWKPKKARLKKPGPPWAAFATDEYQWLQIDLNKEKKITGIITTGSTMVEHNYYVSAYRILYSDDGQKWTVYREPGVEQDKIFQGNKDYHQDVRNNFLPPIIARFIRVNPTQWQQKIAMKMELLGCQFIPKGRPPKLTQPPPPRNSNDLKNTTAPPKIAKGRAPKFTQPLQPRSSNEFPAQTEQTTASPDIRNTTVTPNVTKDVALAAVLVPVLVMVLTTLILILVCAWHWRNRKKKTEGTYDLPYWDRAGFYLMVSLACRHNEGWWKGMKQFLPAKAVDHEETPVRYSSSEVNHLSPREVTTVLQADSAEYAQPLVGGIVGTLHQRSTFKPEEGKEAGYADLDPYNSPGQEVYHAYAEPLPITGPEYATPIIMDMSGHPTTSVGQPSTSTFKATGNQPPPLVGTYNTLLSRTDSCSSAQAQYDTPKAGKPGLPAPDELVYQVPQSTQEVSGAGRDGECDVFKEIL

SEQ ID NO: 233542 - protein, 379 aa, Artificial Sequence
  derived and/or modified sequence
MPLFLLLLLVLLLLLEDAGAQQGDGCGHTVLGPESGTLTSINYPQTYPNSTVCEWEIRVKMGERVRIKFGDFDIEDSDSCHFNYLRIYNGIGVSRTEIGKYCGLGLQMNHSIESKGNEITLLFMSGIHVSGRGFLASYSVIDKQGSNYLFGHCIQFWNLSSGKYCPAGCLLPFAEISGTIPHGYRDSSPLCMAGVHAGVVSNTLGGQISVVISKGIPYYESSLANNVTSVVSVSLLMVFILFFVSGCYGTLGMESGDRGSSNNSIVLEWTDHTGQENSWKPKKQAEKTWTALGFATDEYQWLQIDLNKEKKITGIITTGSTMVTITMCLPTESCTVMMGRNGLCTESLVEQDKIFQGNKDYHQDVRNNFLPPIIARFIR

SEQ ID NO: 233543 - DNA, 2328 bp, Artificial Sequence
  derived and/or modified sequence
atggccagcagagccgtggtgagagccagaagatgcccccagtgcccccaggtgagagccgccgccgccgcccccgcctgggccgccctgcccctgagcagaagcctgcccccctgcagcaacagcagcagcttcagcatgcccctgttcctgctgctgctgctggtgctgctgctgctgctggaggacgccggcgcccagcagggcgacggctgcggccacaccgtgctgggccccgagagcggcaccctgaccagcatcaactacccccagacctaccccaacagcaccgtgtgcgagtgggagatcagagtgaagatgggcgagagagtgagaatcaagttcggcgacttcgacatcgaggacagcgacagctgccacttcaactacctgagaatctacaacggcatcggcgtgagcagaaccgagatcggcaagtactgcggcctgggcctgcagatgaaccacagcatcgagagcaagggcaacgagatcaccctgctgttcatgagcggcatccacgtgagcggcagaggcttcctggccagctacagcgtgatcgacaagcaggacctgatcacctgcctggacaccgccagcaacttcctggagcccgagttcagcaagtactgccccgccggctgcctgctgcccttcgccgagatcagcggcaccatcccccacggctacagagacagcagccccctgtgcatggccggcgtgcacgccggcgtggtgagcaacaccctgggcggccagatcagcgtggtgatcagcaagggcatcccctactacgagagcagcctggccaacaacgtgaccagcgtggtgggccacctgagcaccagcctgttcaccttcaagaccagcggctgctacggcaccctgggcatggagagcggcgtgatcgccgacccccagatcaccgccagcagcgtgctggagtggaccgaccacaccggccaggagaacagctggaagcccaagaaggccagactgaagaagcccggccccccctgggccgccttcgccaccgacgagtaccagtggctgcagatcgacctgaacaaggagaagaagatcaccggcatcatcaccaccggcagcaccatggtggagcacaactactacgtgagcgcctacagaatcctgtacagcgacgacggccagaagtggaccgtgtacagagagcccggcgtggagcaggacaagatcttccagggcaacaaggactaccaccaggacgtgagaaacaacttcctgccccccatcatcgccagattcatcagagtgaaccccacccagtggcagcagaagatcgccatgaagatggagctgctgggctgccagttcatccccaagggcagaccccccaagctgacccagccccccccccccagaaacagcaacgacctgaagaacaccaccgccccccccaagatcgccaagggcagagcccccaagttcacccagcccctgcagcccagaagcagcaacgagttccccgcccagaccgagcagaccaccgccagccccgacatcagaaacaccaccgtgacccccaacgtgaccaaggacgtggccctggccgccgtgctggtgcccgtgctggtgatggtgctgaccaccctgatcctgatcctggtgtgcgcctggcactggagaaacagaaagaagaagaccgagggcacctacgacctgccctactgggacagagccggctggtggaagggcatgaagcagttcctgcccgccaaggccgtggaccacgaggagacccccgtgagatacagcagcagcgaggtgaaccacctgagccccagagaggtgaccaccgtgctgcaggccgacagcgccgagtacgcccagcccctggtgggcggcatcgtgggcaccctgcaccagagaagcaccttcaagcccgaggagggcaaggaggccggctacgccgacctggacccctacaacagccccggccaggaggtgtaccacgcctacgccgagcccctgcccatcaccggccccgagtacgccacccccatcatcatggacatgagcggccaccccaccaccagcgtgggccagcccagcaccagcaccttcaaggccaccggcaaccagcccccccccctggtgggcacctacaacaccctgctgagcagaaccgacagctgcagcagcgcccaggcccagtacgacacccccaaggccggcaagcccggcctgcccgcccccgacgagctggtgtaccaggtgccccagagcacccaggaggtgagcggcgccggcagagacggcgagtgcgacgtgttcaaggagatcctgtag

SEQ ID NO: 233544 - DNA, 2370 bp, Artificial Sequence
  derived and/or modified sequence
atggccagcagagccgtggtgagagccagaagatgcccccagtgcccccaggtgagagccgccgccgccgcccccgcctgggccgccctgcccctgagcagaagcctgcccccctgcagcaacagcagcagcttcagcatgcccctgttcctgctgctgctgctggtgctgctgctgctgctggaggacgccggcgcccagcagggcgacggctgcggccacaccgtgctgggccccgagagcggcaccctgaccagcatcaactacccccagacctaccccaacagcaccgtgtgcgagtgggagatcagagtgaagatgggcgagagagtgagaatcaagttcggcgacttcgacatcgaggacagcgacagctgccacttcaactacctgagaatctacaacggcatcggcgtgagcagaaccgagatcggcaagtactgcggcctgggcctgcagatgaaccacagcatcgagagcaagggcaacgagatcaccctgctgttcatgagcggcatccacgtgagcggcagaggcttcctggccagctacagcgtgatcgacaagcaggacctgatcacctgcctggacaccgccagcaacttcctggagcccgagttcagcaagtactgccccgccggctgcctgctgcccttcgccgagatcagcggcaccatcccccacggctacagagacagcagccccctgtgcatggccggcgtgcacgccggcgtggtgagcaacaccctgggcggccagatcagcgtggtgatcagcaagggcatcccctactacgagagcagcctggccaacaacgtgaccagcgtggtgggccacctgagcaccagcctgttcaccttcaagaccagcggctgctacggcaccctgggcatggagagcggcgtgatcgccgacccccagatcaccgccagcagcgtgctggagtggaccgaccacaccggccaggagaacagctggaagcccaagaaggccagactgaagaagcccggccccccctgggccgccttcgccaccgacgagtaccagtggctgcagatcgacctgaacaaggagaagaagatcaccggcatcatcaccaccggcagcaccatggtggagcacaactactacgtgagcgcctacagaatcctgtacagcgacgacggccagaagtggaccgtgtacagagagcccggcgtggagcaggacaagatcttccagggcaacaaggactaccaccaggacgtgagaaacaacttcctgccccccatcatcgccagattcatcagagtgaaccccacccagtggcagcagaagatcgccatgaagatggagctgctgggctgccagttcatccccaagggcagaccccccaagctgacccagccccccccccccagaaacagcaacgacctgaagaacaccaccgccccccccaagatcgccaagggcagagcccccaagttcacccagcccctgcagcccagaagcagcaacgagttccccgcccagaccgagcagaccaccgccagccccgacatcagaaacaccaccgtgacccccaacgtgaccaaggacgtggccctggccgccgtgctggtgcccgtgctggtgatggtgctgaccaccctgatcctgatcctggtgtgcgcctggcactggagaaacagaaagaagaagaccgagggcacctacgacctgccctactgggacagagccggcttctacctgatggtgagcctggcctgcagacacaacgagggctggtggaagggcatgaagcagttcctgcccgccaaggccgtggaccacgaggagacccccgtgagatacagcagcagcgaggtgaaccacctgagccccagagaggtgaccaccgtgctgcaggccgacagcgccgagtacgcccagcccctggtgggcggcatcgtgggcaccctgcaccagagaagcaccttcaagcccgaggagggcaaggaggccggctacgccgacctggacccctacaacagccccggccaggaggtgtaccacgcctacgccgagcccctgcccatcaccggccccgagtacgccacccccatcatcatggacatgagcggccaccccaccaccagcgtgggccagcccagcaccagcaccttcaaggccaccggcaaccagcccccccccctggtgggcacctacaacaccctgctgagcagaaccgacagctgcagcagcgcccaggcccagtacgacacccccaaggccggcaagcccggcctgcccgcccccgacgagctggtgtaccaggtgccccagagcacccaggaggtgagcggcgccggcagagacggcgagtgcgacgtgttcaaggagatcctgtag

SEQ ID NO: 233545 - DNA, 1140 bp, Artificial Sequence
  derived and/or modified sequence
atgcccctgttcctgctgctgctgctggtgctgctgctgctgctggaggacgccggcgcccagcagggcgacggctgcggccacaccgtgctgggccccgagagcggcaccctgaccagcatcaactacccccagacctaccccaacagcaccgtgtgcgagtgggagatcagagtgaagatgggcgagagagtgagaatcaagttcggcgacttcgacatcgaggacagcgacagctgccacttcaactacctgagaatctacaacggcatcggcgtgagcagaaccgagatcggcaagtactgcggcctgggcctgcagatgaaccacagcatcgagagcaagggcaacgagatcaccctgctgttcatgagcggcatccacgtgagcggcagaggcttcctggccagctacagcgtgatcgacaagcagggcagcaactacctgttcggccactgcatccagttctggaacctgagcagcggcaagtactgccccgccggctgcctgctgcccttcgccgagatcagcggcaccatcccccacggctacagagacagcagccccctgtgcatggccggcgtgcacgccggcgtggtgagcaacaccctgggcggccagatcagcgtggtgatcagcaagggcatcccctactacgagagcagcctggccaacaacgtgaccagcgtggtgagcgtgagcctgctgatggtgttcatcctgttcttcgtgagcggctgctacggcaccctgggcatggagagcggcgacagaggcagcagcaacaacagcatcgtgctggagtggaccgaccacaccggccaggagaacagctggaagcccaagaagcaggccgagaagacctggaccgccctgggcttcgccaccgacgagtaccagtggctgcagatcgacctgaacaaggagaagaagatcaccggcatcatcaccaccggcagcaccatggtgaccatcaccatgtgcctgcccaccgagagctgcaccgtgatgatgggcagaaacggcctgtgcaccgagagcctggtggagcaggacaagatcttccagggcaacaaggactaccaccaggacgtgagaaacaacttcctgccccccatcatcgccagattcatcagatag

SEQ ID NO: 233546 - DNA, 6122 bp, Artificial Sequence
  derived and/or modified sequence
gcctgccagctagccggagccgcgggtgagcgcggcgagcggcgaccctggtgaggagcgcggcgcgggaggcacgttccttagctccgccgcggccgtcctccgcggctcgaggactccgcttccttccctcccctcccctgcgctccggcctggggtctcggcgcggggagcggagggaagggacgaaggaggagtaggtgaaagcggggtgaggggcggaagggtcccggcgcggggtgaggcgagggctgcctcttgttctcccgccgctgccgccgtctcctggtcgggtgccgcggccagaggcgcgcggggctgccgaggcacccgcactatgcaggcagactgccggccgccgcgatggcgagccgggcggtggtgagagccaggcgctgcccgcagtgtccccaagtccgggccgcggccgccgcccccgcctgggccgcgctccccctctcccgctccctccctccctgctccaactcctcctccttctccatgcctctgttcctcctgctcttacttgtcctgctcctgctgctcgaggacgctggagcccagcaaggtgatggatgtggacacactgtactaggccctgagagtggaacccttacatccataaactacccacagacctatcccaacagcactgtttgtgaatgggagatccgtgtaaagatgggagagagagttcgcatcaaatttggtgactttgacattgaagattctgattcttgtcactttaattacttgagaatttataatggaattggagtcagcagaactgaaataggcaaatactgtggtctggggttgcaaatgaaccattcaattgaatcaaaaggcaatgaaatcacattgctgttcatgagtggaatccatgtttctggacgcggatttttggcctcatactctgttatagataaacaagatctaattacttgtttggacactgcatccaattttttggaacctgagttcagtaagtactgcccagctggttgtctgcttccttttgctgagatatctggaacaattcctcatggatatagagattcctcgccattgtgcatggctggtgtgcatgcaggagtagtgtcaaacacgttgggcggccaaatcagtgttgtaattagtaaaggtatcccctattatgaaagttctttggctaacaacgtcacatctgtggtgggacacttatctacaagtctttttacatttaagacaagtggatgttatggaacactggggatggagtctggtgtgatcgcggatcctcaaataacagcatcatctgtgctggagtggactgaccacacagggcaagagaacagttggaaacccaaaaaagccaggctgaaaaaacctggaccgccttgggctgcttttgccactgatgaataccagtggttacaaatagatttgaataaggaaaagaaaataacaggcattataaccactggatccaccatggtggagcacaattactatgtgtctgcctacagaatcctgtacagtgatgatgggcagaaatggactgtgtacagagagcctggtgtggagcaagataagatatttcaaggaaacaaagattatcaccaggatgtgcgtaataactttttgccaccaattattgcacgttttattagagtgaatcctacccaatggcagcagaaaattgccatgaaaatggagctgctcggatgtcagtttattcctaaaggtcgtcctccaaaacttactcaacctccacctcctcggaacagcaatgacctcaaaaacactacagcccctccaaaaatagccaaaggtcgtgccccaaaatttacgcaaccactacaacctcgcagtagcaatgaatttcctgcacagacagaacaaacaactgccagtcctgatatcagaaatactaccgtaactccaaatgtaaccaaagatgtagcgctggctgcagttcttgtccctgtgctggtcatggtcctcactactctcattctcatattagtgtgtgcttggcactggagaaacagaaagaaaaaaactgaaggcacctatgacttaccttactgggaccgggcaggttggtggaaaggaatgaagcagtttcttcctgcaaaagcagtggaccatgaggaaaccccagttcgctatagcagcagcgaagttaatcacctgagtccaagagaagtcaccacagtgctgcaggctgactctgcagagtatgctcagccactggtaggaggaattgttggtacacttcatcaaagatctacctttaaaccagaagaaggaaaagaagcaggctatgcagacctagatccttacaactcaccagggcaggaagtttatcatgcctatgctgaaccactcccaattacggggcctgagtatgcaaccccaatcatcatggacatgtcagggcaccccacaacttcagttggtcagccctccacatccactttcaaggctacggggaaccaacctcccccactagtgggaacttacaatacacttctctccaggactgacagctgctcctcagcccaggcccagtatgataccccgaaagctgggaagccaggtctacctgccccagacgaattggtgtaccaggtgccacagagcacacaagaagtatcaggagcaggaagggatggggaatgtgatgtttttaaagaaatcctttgaagatgatgctgctttttacaaagcatcgttttaaagcacatggccttttttttttaattattagtggtagtaatatatagaatgtattacataactgtcactgaagtggttggggaaaatgtggtgactgaggtacaggaaactactaatcttgccatcttgctttaaggtgttatggtggcacagttactgctcgcctgttaaatttcaaatgtcctgtttgatactactgtagaacactatttttaatacagaaaaagctccctataatgcacttcagagaaattaaaaatcacagagtatttattaccaatgctgcaggtacattaatgaactcgagatggctctgtaagcctgactggcaataacgcacggtactgttcttgaaatacctaatggcttgaaattctagtctgtttgtgaaagatgggtactatcatgatttcctcttctattcctatattcttttctggattttttttaataattagtgatataagcattgtttttattgcagccatatccacttatccatcttaagatctgtagctgggattttctgacttgtaatgagcagggggattgctttttcactttgtgacactctttagagctttaatgcttcacagtatatggcctggtctcatccttgcgtgttccacttgaggccctttggtgtcttgccccattcttgtgtttataaaatgtttgagtatttctgatgagtgatgcttgccttagtctcatgaattcagatcccttcatgtcctttaagtatgctcctcaatgtgtaaacaggaacaactttatgatttgaaagctttaaaggagattcttctcccacccccaactttatttgcaatgggatttttcctaggagagttatgaaaagttgaaggcttctaagggaatactgtaaacatgacccacttatatttatcacagtgaaaggcaaaattattcactcagaagtaatataaattacctctttaaaaagtaaccagaatttgtcctttttggttttatacattcacaaacatatacatttttcttgagtctcaaggtattttatatttttagtcagaaaaaataatttttcatttcagttttccataaactgttacacaaaatataaacctaacgtgtatttttcaggactgcgtgatcgtgcactttgtgtggtaagaggtttgagtagtcctatatgtcacctagggaacagacattatagcttactagcaaatgaatattcatgccttgtttttgatacctcctggcagcttccatgtcaccacttgttcatacctgcccagagctagttttagacatggcaaaatagaaatcatctgtaatttattagctaacaatgtaaaaccatcttttaaagccttcagactgtcaagacgacatgagcagctcaccatatgataaaaatacataaatttgacattccctcttccataaacctttgtttgtagatttaatgttgaacagtacttttccataaagttctagtcacttctgttggcctgagccaccagattatgatgttgccagaattcactcaatttgaataaagatgaacagtatttgttttcttgtttccatgaattatatcagtattctaaaacatcgcttcagaaagagaactgtttatttctgcaggcttcctgtccttttgtggtatggttttttggccttattttcactggcttttccttctccaaactttgaggcgtgatttcattcattgaagaatcaatacatattttgtttcaaaatgtttgaaacaaaagacatagatggtagacttttattaaaacatatatggatgtggaaagcacatatattaatgcagtcatcccttttcaggtgggaagagagcaaaccagttgattttttaattcatccttagtacacagagaatatacttttcctcaagtaatatacctgtttgaagctttaagagagatgtttttggtaactatttcattttcccaaagaagtttgctattcttgtgttaattgtgtatacctgattgttttttcctggaggtttttgttgttgttgtttagttttgggtttttttttttttaagaggggcaagtgttttctgaaatgatgcatattttaagactcgattcatattgccactgtgctatccttgaactaccaataatttttataaaatatctagtttttactacttttatataaactttactttccagatgaagagctgagcctgattcaaatggtttttctgctttatacttctttttagttcattggtttttatagtagaggttttctattttttttttttttttttttactacatttatatgtctgatacatatacggctttggagacaatcaagtaacaactgaaaatgtgaaagtaaccatatctgacaaaattcccttgaatttttatcctttgcttgcaacatttaagactcaaagtcactggtatattggattaagttttttcctgttaatgcaattatagaaatacatcggagacacaacaaatgtggccattacaggtttcataaaattacactgacttggctgttacttgatcttaggaaacagcacagtttaagatattgtgaattctgacttatactttattaaatgctgtaaatctaaatagatcctgttggatgtgatgggtctagtccagtttatttaagttcatgtttcactgtttgcactttgcattgaacaatgggtttattcgctgatgtaaacggttcgagtgaagaattaatgcagtaagtatgacaacacatacacacttgcctctccccatctccagaagaggggagcagagtccgagcttatctaaatatgaatgtggccacaaagctgtggaaggtgacaaagcttaaacacctttgccctggctctgcattgtcacctagagagcaagaggtctatagaaacatcatgtcacatgaaacgattctctgctttttggttctgaacttgaagtccctaaactgcaaaatctaagagttgggtggttattaaaatgcttttaaagtcaactgtggcaccaattctaatgtaatccaacttgtgactgtttttttttgttttgttttgtttttgtgtgtgtgtgtgtggcactgggaaaagtggaaacaaacatgtattgaaatacatattggaaataaaaatggtttgagcgtcagtgatattctcccagaatgtacttatcttacctcggcatgtactgtagtcactcagtatttgtatatgttgctagaatttagattgtaaaatagtgaaattttaatgtgttcatttgtttttaatgtatatatgtcttgctcagattatttggtttaaataaaacaaccttgaggtttgtagcttttccttatactataaaatgccagattcttctattttaacctca

SEQ ID NO: 233547 - DNA, 3959 bp, Artificial Sequence
  derived and/or modified sequence
atggcgagccgggcggtggtgagagccaggcgctgcccgcagtgtccccaagtccgggccgcggccgccgcccccgcctgggccgcgctccccctctcccgctccctccctccctgctccaactcctcctccttctccatgcctctgttcctcctgctcttacttgtcctgctcctgctgctcgaggacgctggagcccagcaaggtgatggatgtggacacactgtactaggccctgagagtggaacccttacatccataaactacccacagacctatcccaacagcactgtttgtgaatgggagatccgtgtaaagatgggagagagagttcgcatcaaatttggtgactttgacattgaagattctgattcttgtcactttaattacttgagaatttataatggaattggagtcagcagaactgaaataggcaaatactgtggtctggggttgcaaatgaaccattcaattgaatcaaaaggcaatgaaatcacattgctgttcatgagtggaatccatgtttctggacgcggatttttggcctcatactctgttatagataaacaagatctaattacttgtttggacactgcatccaattttttggaacctgagttcagtaagtactgcccagctggttgtctgcttccttttgctgagatatctggaacaattcctcatggatatagagattcctcgccattgtgcatggctggtgtgcatgcaggagtagtgtcaaacacgttgggcggccaaatcagtgttgtaattagtaaaggtatcccctattatgaaagttctttggctaacaacgtcacatctgtggtgggacacttatctacaagtctttttacatttaagacaagtggatgttatggaacactggggatggagtctggtgtgatcgcggatcctcaaataacagcatcatctgtgctggagtggactgaccacacagggcaagagaacagttggaaacccaaaaaagccaggctgaaaaaacctggaccgccttgggctgcttttgccactgatgaataccagtggttacaaatagatttgaataaggaaaagaaaataacaggcattataaccactggatccaccatggtggagcacaattactatgtgtctgcctacagaatcctgtacagtgatgatgggcagaaatggactgtgtacagagagcctggtgtggagcaagataagatatttcaaggaaacaaagattatcaccaggatgtgcgtaataactttttgccaccaattattgcacgttttattagagtgaatcctacccaatggcagcagaaaattgccatgaaaatggagctgctcggatgtcagtttattcctaaaggtcgtcctccaaaacttactcaacctccacctcctcggaacagcaatgacctcaaaaacactacagcccctccaaaaatagccaaaggtcgtgccccaaaatttacgcaaccactacaacctcgcagtagcaatgaatttcctgcacagacagaacaaacaactgccagtcctgatatcagaaatactaccgtaactccaaatgtaaccaaagatgtagcgctggctgcagttcttgtccctgtgctggtcatggtcctcactactctcattctcatattagtgtgtgcttggcactggagaaacagaaagaaaaaaactgaaggcacctatgacttaccttactgggaccgggcaggtttttatttaatggtctctttggcttgccgtcacaatgaaggttggtggaaaggaatgaagcagtttcttcctgcaaaagcagtggaccatgaggaaaccccagttcgctatagcagcagcgaagttaatcacctgagtccaagagaagtcaccacagtgctgcaggctgactctgcagagtatgctcagccactggtaggaggaattgttggtacacttcatcaaagatctacctttaaaccagaagaaggaaaagaagcaggctatgcagacctagatccttacaactcaccagggcaggaagtttatcatgcctatgctgaaccactcccaattacggggcctgagtatgcaaccccaatcatcatggacatgtcagggcaccccacaacttcagttggtcagccctccacatccactttcaaggctacggggaaccaacctcccccactagtgggaacttacaatacacttctctccaggactgacagctgctcctcagcccaggcccagtatgataccccgaaagctgggaagccaggtctacctgccccagacgaattggtgtaccaggtgccacagagcacacaagaagtatcaggagcaggaagggatggggaatgtgatgtttttaaagaaatcctttgaagatgatgctgctttttacaaagcatcgttttaaagcacatggccttttttttttaattattagtggtagtaatatatagaatgtattacataactgtcactgaagtggttggggaaaatgtggtgactgaggtacaggaaactactaatcttgccatcttgctttaaggtgttatggtggcacagttactgctcgcctgttaaatttcaaatgtcctgtttgatactactgtagaacactatttttaatacagaaaaagctccctataatgcacttcagagaaattaaaaatcacagagtatttattaccaatgctgcaggtacattaatgaactcgagatggctctgtaagcctgactggcaataacgcacggtactgttcttgaaatacctaatggcttgaaattctagtctgtttgtgaaagatgggtactatcatgatttcctcttctattcctatattcttttctggattttttttaataattagtgatataagcattgtttttattgcagccatatccacttatccatcttaagatctgtagctgggattttctgacttgtaatgagcagggggattgctttttcactttgtgacactctttagagctttaatgcttcacagtatatggcctggtctcatccttgcgtgttccacttgaggccctttggtgtcttgccccattcttgtgtttataaaatgtttgagtatttctgatgagtgatgcttgccttagtctcatgaattcagatcccttcatgtcctttaagtatgctcctcaatgtgtaaacaggaacaactttatgatttgaaagctttaaaggagattcttctcccacccccaactttatttgcaatgggatttttcctaggagagttatgaaaagttgaaggcttctaagggaatactgtaaacatgacccacttatatttatcacagtgaaaggcaaaattattcactcagaagtaatataaattacctctttaaaaagtaaccagaatttgtcctttttggttttatacattcacaaacatatacatttttcttgagtctcaaggtattttatatttttagtcagaaaaaataatttttcatttcagttttccataaactgttacacaaaatataaacctaacgtgtatttttcaggactgcgtgatcgtgcactttgtgtggtaagaggtttgagtagtcctatatgtcacctagggaacagacattatagcttactagcaaatgaatattcatgccttgtttttgatacctcctggcagcttccatgtcaccacttgttcatacctgcccagagctagttttagacatggcaaaatagaaatcatctgtaatttattagctaacaatgtaaaaccatcttttaaagccttcagactgtcaagacgacatgagcagctcaccatatgataaaaatacataaatttgacattccctcttccataaacctttgtttgtagatttaatgttgaacagtacttttccataaagttctagtcacttctgttggcctgagccaccagattatgatgttgccagaattcactcaatttgaataaagatgaacagta

SEQ ID NO: 233548 - DNA, 6078 bp, Artificial Sequence
  derived and/or modified sequence
gcctgccagctagccggagccgcgggtgagcgcggcgagcggcgaccctggtgaggagcgcggcgcgggaggcacgttccttagctccgccgcggccgtcctccgcggctcgaggactccgcttccttccctcccctcccctgcgctccggcctggggtctcggcgcggggagcggagggaagggacgaaggaggagtaggtgaaagcggggtgaggggcggaagggtcccggcgcggggtgaggcgagggctgcctcttgttctcccgccgctgccgccgtctcctggtcgggtgccgcggccagaggcgcgcggggctgccgaggcacccgcactatgcaggcagactgccggccgccgcgatggcgagccgggcggtggtgagagccaggcgctgcccgcagtgtccccaagtccgggccgcggccgccgcccccgcctgggccgcgctccccctctcccgctccctccctccctgctccaactcctcctccttctccatgcctctgttcctcctgctcttacttgtcctgctcctgctgctcgaggacgctggagcccagcaaggtgatggatgtggacacactgtactaggccctgagagtggaacccttacatccataaactacccacagacctatcccaacagcactgtttgtgaatgggagatccgtgtaaagatgggagagagagttcgcatcaaatttggtgactttgacattgaagattctgattcttgtcactttaattacttgagaatttataatggaattggagtcagcagaactgaaataggcaaatactgtggtctggggttgcaaatgaaccattcaattgaatcaaaaggcaatgaaatcacattgctgttcatgagtggaatccatgtttctggacgcggatttttggcctcatactctgttatagataaacaaggatctaattacttgtttggacactgcatccaattttggaacctgagttcaggtaagtactgcccagctggttgtctgcttccttttgctgagatatctggaacaattcctcatggatatagagattcctcgccattgtgcatggctggtgtgcatgcaggagtagtgtcaaacacgttgggcggccaaatcagtgttgtaattagtaaaggtatcccctattatgaaagttctttggctaacaacgtcacatctgtggtgtcagtatcactgttaatggtgttcattcttttctttgtttcaggatgttatggaacactggggatggagtctggtgatcgcggatcctcaaataacagcatcgtgctggagtggactgaccacacagggcaagagaacagttggaaacccaaaaaacaggctgaaaaaacctggaccgccttgggctttgccactgatgaataccagtggttacaaatagatttgaataaggaaaagaaaataacaggcattataaccactggatccaccatggtgacaattactatgtgtctgcctacagaatcctgtacagtgatgatgggcagaaatggactgtgtacagagagcctggtggagcaagataagatatttcaaggaaacaaagattatcaccaggatgtgcgtaataactttttgccaccaattattgcacgttttattagagtgaatcctacccaatggcagcagaaaattgccatgaaaatggagctgctcggatgtcagtttattcctaaaggtcgtcctccaaaacttactcaacctccacctcctcggaacagcaatgacctcaaaaacactacagcccctccaaaaatagccaaaggtcgtgccccaaaatttacgcaaccactacaacctcgcagtagcaatgaatttcctgcacagacagaacaaacaactgccagtcctgatatcagaaatactaccgtaactccaaatgtaaccaaagatgtagcgctggctgcagttcttgtccctgtgctggtcatggtcctcactactctcattctcatattagtgtgtgcttggcactggagaaacagaaagaaaaaaactgaaggcacctatgacttaccttactgggaccgggcaggttggtggaaaggaatgaagcagtttcttcctgcaaaagcagtggaccatgaggaaaccccagttcgctatagcagcagcgaagttaatcacctgagtccaagagaagtcaccacagtgctgcaggctgactctgcagagtatgctcagccactggtaggaggaattgttggtacacttcatcaaagatctacctttaaaccagaagaaggaaaagaagcaggctatgcagacctagatccttacaactcaccagggcaggaagtttatcatgcctatgctgaaccactcccaattacggggcctgagtatgcaaccccaatcatcatggacatgtcagggcaccccacaacttcagttggtcagccctccacatccactttcaaggctacggggaaccaacctcccccactagtgggaacttacaatacacttctctccaggactgacagctgctcctcagcccaggcccagtatgataccccgaaagctgggaagccaggtctacctgccccagacgaattggtgtaccaggtgccacagagcacacaagaagtatcaggagcaggaagggatggggaatgtgatgtttttaaagaaatcctttgaagatgatgctgctttttacaaagcatcgttttaaagcacatggccttttttttttaattattagtggtagtaatatatagaatgtattacataactgtcactgaagtggttggggaaaatgtggtgactgaggtacaggaaactactaatcttgccatcttgctttaaggtgttatggtggcacagttactgctcgcctgttaaatttcaaatgtcctgtttgatactactgtagaacactatttttaatacagaaaaagctccctataatgcacttcagagaaattaaaaatcacagagtatttattaccaatgctgcaggtacattaatgaactcgagatggctctgtaagcctgactggcaataacgcacggtactgttcttgaaatacctaatggcttgaaattctagtctgtttgtgaaagatgggtactatcatgatttcctcttctattcctatattcttttctggattttttttaataattagtgatataagcattgtttttattgcagccatatccacttatccatcttaagatctgtagctgggattttctgacttgtaatgagcagggggattgctttttcactttgtgacactctttagagctttaatgcttcacagtatatggcctggtctcatccttgcgtgttccacttgaggccctttggtgtcttgccccattcttgtgtttataaaatgtttgagtatttctgatgagtgatgcttgccttagtctcatgaattcagatcccttcatgtcctttaagtatgctcctcaatgtgtaaacaggaacaactttatgatttgaaagctttaaaggagattcttctcccacccccaactttatttgcaatgggatttttcctaggagagttatgaaaagttgaaggcttctaagggaatactgtaaacatgacccacttatatttatcacagtgaaaggcaaaattattcactcagaagtaatataaattacctctttaaaaagtaaccagaatttgtcctttttggttttatacattcacaaacatatacatttttcttgagtctcaaggtattttatatttttagtcagaaaaaataatttttcatttcagttttccataaactgttacacaaaatataaacctaacgtgtatttttcaggactgcgtgatcgtgcactttgtgtggtaagaggtttgagtagtcctatatgtcacctagggaacagacattatagcttactagcaaatgaatattcatgccttgtttttgatacctcctggcagcttccatgtcaccacttgttcatacctgcccagagctagttttagacatggcaaaatagaaatcatctgtaatttattagctaacaatgtaaaaccatcttttaaagccttcagactgtcaagacgacatgagcagctcaccatatgataaaaatacataaatttgacattccctcttccataaacctttgtttgtagatttaatgttgaacagtacttttccataaagttctagtcacttctgttggcctgagccaccagattatgatgttgccagaattcactcaatttgaataaagatgaacagtatttgttttcttgtttccatgaattatatcagtattctaaaacatcgcttcagaaagagaactgtttatttctgcaggcttcctgtccttttgtggtatggttttttggccttattttcactggcttttccttctccaaactttgaggcgtgatttcattcattgaagaatcaatacatattttgtttcaaaatgtttgaaacaaaagacatagatggtagacttttattaaaacatatatggatgtggaaagcacatatattaatgcagtcatcccttttcaggtgggaagagagcaaaccagttgattttttaattcatccttagtacacagagaatatacttttcctcaagtaatatacctgtttgaagctttaagagagatgtttttggtaactatttcattttcccaaagaagtttgctattcttgtgttaattgtgtatacctgattgttttttcctggaggtttttgttgttgttgtttagttttgggtttttttttttttaagaggggcaagtgttttctgaaatgatgcatattttaagactcgattcatattgccactgtgctatccttgaactaccaataatttttataaaatatctagtttttactacttttatataaactttactttccagatgaagagctgagcctgattcaaatggtttttctgctttatacttctttttagttcattggtttttatagtagaggttttctattttttttttttttttttttactacatttatatgtctgatacatatacggctttggagacaatcaagtaacaactgaaaatgtgaaagtaaccatatctgacaaaattcccttgaatttttatcctttgcttgcaacatttaagactcaaagtcactggtatattggattaagttttttcctgttaatgcaattatagaaatacatcggagacacaacaaatgtggccattacaggtttcataaaattacactgacttggctgttacttgatcttaggaaacagcacagtttaagatattgtgaattctgacttatactttattaaatgctgtaaatctaaatagatcctgttggatgtgatgggtctagtccagtttatttaagttcatgtttcactgtttgcactttgcattgaacaatgggtttattcgctgatgtaaacggttcgagtgaagaattaatgcagtaagtatgacaacacatacacacttgcctctccccatctccagaagaggggagcagagtccgagcttatctaaatatgaatgtggccacaaagctgtggaaggtgacaaagcttaaacacctttgccctggctctgcattgtcacctagagagcaagaggtctatagaaacatcatgtcacatgaaacgattctctgctttttggttctgaacttgaagtccctaaactgcaaaatctaagagttgggtggttattaaaatgcttttaaagtcaactgtggcaccaattctaatgtaatccaacttgtgactgtttttttttgttttgttttgtttttgtgtgtgtgtgtgtggcactgggaaaagtggaaacaaacatgtattgaaatacatattggaaataaaaatggtttgagcgtcagtgatattctcccagaatgtacttatcttacctcggcatgtactgtagtcactcagtatttgtatatgttgctagaatttagattgtaaaatagtgaaattttaatgtgttcatttgtttttaatgtatatatgtcttgctcagattatttggtttaaataaaacaaccttgaggtttgtagcttttccttatactata

SEQ ID NO: 233549 - DNA, 2328 bp, Artificial Sequence
  derived and/or modified sequence
atggcgtcccgcgctgttgtcagagcccgaaggtgcccccagtgccctcaggtacgcgccgctgccgcagcccccgcatgggcggcactgcccttgtcacggagtctccccccgtgtagtaacagcagtagctttagtatgccccttttcctgcttctgctcttggttttgctcctactcctcgaagacgctggcgcgcagcagggagacggatgtgggcacacagtgctgggcccagagtcaggcactttaaccagtatcaactatccccagacgtatcccaatagtacagtctgtgagtgggaaatcagggtcaaaatgggggagagagttagaattaaatttggagactttgatatagaggatagcgattcttgccacttcaactatctgaggatctataatggtatcggagtgtcgaggacagagattggcaaatattgcgggctgggattgcagatgaaccacagcattgaatcaaagggcaacgagatcacacttctctttatgagcggtatccacgtgagcgggagaggctttctagccagttattctgtgatcgacaaacaggacctaatcacctgtctcgacaccgcttctaattttctggaaccagagttctcgaaatactgcccagctggatgcctgctgccatttgctgagatcagtggtacaatcccccacggatatagggattcatccccactgtgtatggccggcgtccatgcaggagtcgtgtccaataccctagggggacagatctccgttgtgataagcaaaggaatcccatattacgagtcatcgctggctaacaatgtaacctctgttgtcgggcacctgagtacctcactgtttacatttaagacatccggatgttatggaaccctcggcatggagtctggggtgattgcagatccgcagattaccgcatcatcagtactagaatggacagaccacaccgggcaggagaatagttggaagccgaaaaaggctagactgaagaaaccaggacccccttgggcggccttcgcaactgatgaataccagtggctgcagatcgatctgaacaaggaaaaaaagatcacaggaattatcacgacaggctcaaccatggtcgaacataattattacgtgtccgcttatcggattttgtactctgacgatggccagaaatggacagtgtaccgggagccaggggtggagcaggataagattttccagggcaataaggattatcaccaggacgtgaggaacaattttttgccacccatcatcgccaggttcatccgcgtgaaccctacccaatggcaacagaaaatagccatgaaaatggagttactggggtgccaatttatcccaaagggaaggccaccaaaactgacacaaccaccgccacccaggaacagcaatgacctgaagaacaccaccgctcctccgaaaattgctaagggtagagcccctaagtttacacagcctctccagcctagatcatcaaatgagtttcctgcccaaacggagcagacaacagccagcccagacatcaggaacacaacagtaaccccaaacgtgacaaaggacgtcgccctcgcggccgtgctggtgcccgtgctagtgatggtgctgactactctcatcctgatactggtgtgcgcctggcactggcgaaaccgaaaaaaaaagacggagggcacttatgatctgccctattgggatagggcaggctggtggaagggaatgaaacagttcctgccggcgaaagccgtagaccacgaagaaacaccagtaagatacagttcttccgaggtgaaccatctgtctccgagagaagtgaccaccgtcttgcaggccgatagtgctgagtatgcgcagccactggttggcggcatcgtaggcactcttcaccagaggtccacttttaagcctgaggaaggaaaagaagccggatacgccgacttggacccttacaatagtcctggtcaggaggtttaccacgcatatgccgagcctttgcccatcacagggcctgagtacgctacaccaataatcatggacatgtccgggcatccgaccactagtgtgggtcagccttctacgtcaaccttcaaagctacgggtaatcagcccccaccactagtgggcacgtacaatactctgcttagcaggactgattcctgcagctccgcacaagctcagtacgacacacccaaggctggaaagcccggactccctgccccggacgaattagtataccaagttcctcagtccactcaggaagtgagtggggccggccgagatggcgagtgtgatgtctttaaagagatcctctag

SEQ ID NO: 233550 - DNA, 2370 bp, Artificial Sequence
  derived and/or modified sequence
atggcctccagagctgtggtacgcgctcgcaggtgtccgcagtgtccacaagtgagggccgcagctgccgcgcctgcttgggcagccctgccgctgtcaaggtcactccccccttgttcaaattccagtagtttcagtatgcccctgttcctgctcctcctcctggttctgctcttattactggaagacgccggagctcagcagggcgatggctgtgggcacacagtgttgggtccggagtcaggtacactcacgtcaatcaattatccccaaacctaccccaattccacagtgtgcgagtgggagatccgcgtcaagatgggcgaaagggtgcggatcaagtttggggacttcgacatcgaggacagtgatagttgccattttaactacctccggatctataatgggatcggcgtgtctcggaccgagattggtaagtattgtgggttggggcttcagatgaatcatagtatagagtcgaagggcaatgaaattaccctgctctttatgagtggaatccacgtttccggcaggggcttccttgcatcctattccgtgatcgataagcaggatctgatcacctgcttagataccgctagcaatttccttgagccggaatttagcaaatactgtcccgccggctgtttgcttcccttcgcagaaattagtggcactattccccacggataccgggattcatccccactctgtatggccggcgtacacgcaggagtggtgtcaaataccctcggaggacagatttctgtcgtgatttctaaaggcattccgtattacgagagttccctggcaaataacgtgacatccgtcgtgggtcacctgagcacatctctcttcaccttcaaaacctccggctgctatgggacacttggaatggagtccggagtgatcgcggacccccagataaccgcttcgtcagtgctggaatggacagaccacaccggccaggaaaactcttggaagcctaagaaggcccgcctaaagaaacccggaccaccatgggccgctttcgccacagatgaataccaatggctgcagatcgatctgaataaagagaaaaagatcaccggcatcattaccacgggcagcacaatggttgagcacaattactacgtatctgcatatagaatcttatattctgatgatggccagaagtggaccgtctatcgggagccgggcgtggaacaggacaagatcttccagggcaacaaggactaccatcaggacgttagaaacaatttcctgccacctattattgcccggttcattcgggtgaatcctacacagtggcaacagaagatagctatgaagatggaacttctcggctgccaatttatccctaaggggcggcctcccaagctgactcagccgcctccccctcggaactccaatgaccttaagaatacgacagcgccacctaaaattgcaaaggggcgggccccaaaatttactcagcccctccagcccaggagctccaacgaatttcctgctcagactgagcagaccactgcatcgcctgacattagaaacaccacagtgacgccaaacgtgacaaaagacgtggctttagcagcagtgctcgttcctgtactggtgatggtgctcacgactctcatccttattctggtgtgtgcatggcattggcggaaccggaaaaaaaagaccgagggaacatatgacctcccttactgggacagagccggcttttaccttatggtaagcctggcttgccggcataatgaagggtggtggaagggcatgaaacagtttttacccgccaaagctgtggatcacgaggagacgccagtgaggtactcgtcttctgaagttaaccacctgtcccctagggaggttacaacggttctacaggcagacagcgccgaatacgcccagcccttggtggggggtatagtcgggaccctgcatcaaaggtctacatttaagcccgaggaaggtaaagaagctggctatgctgacctggacccctacaactccccgggccaggaggtctaccacgcctatgcagagcctcttccgataaccggacctgagtacgctacccctataattatggatatgtccggacatcccactactagtgtgggccagccctcgacttctacttttaaagccactggtaaccagccaccaccacttgtgggtacgtacaacactctcttatcccgcaccgattcatgttctagcgctcaggcacagtatgatacgccaaaggcagggaagccaggattgccagccccagacgagctggtgtatcaagtgccacagtcaacccaagaggtctcaggggccgggagggacggcgaatgtgacgtgttcaaggaaatcttatag

SEQ ID NO: 233551 - DNA, 1140 bp, Artificial Sequence
  derived and/or modified sequence
atgcccttatttcttctcctgctcctggtcctgttgttgctccttgaggacgccggggcacagcagggggatggatgtggccatacagtgcttggccctgagtcagggactctgaccagcattaactatccacagacatatcccaatagcaccgtatgcgagtgggagattagagttaaaatgggggagagggtgaggatcaagtttggcgactttgatatcgaagatagcgattcttgtcactttaattatctccgcatctacaatggaatcggagtctccaggaccgaaataggcaaatattgcggccttgggctgcaaatgaatcattcaatagaatccaagggcaacgagattactttactctttatgagcggcatacacgtctcagggagaggctttttggcctcatatagcgtcatcgacaagcagggatcgaactacctattcggacactgcatccagttttggaatttgagctcaggtaagtattgtccggcgggctgtcttctcccatttgccgaaatcagcggaactattccccacggttaccgggactcttccccattatgtatggcgggagtgcatgctggggtggtgtcaaacactctcggcggacagattagtgtggttatcagcaagggcatcccgtactatgagtcatcactcgcaaacaacgttaccagtgtagtgagcgtctccctgctgatggtttttattctgttttttgtgagcggatgctatggaacgttgggaatggagagtggcgacaggggcagcagtaataactctattgtcctggaatggaccgatcacactggccaggagaattcttggaaacccaaaaaacaggctgaaaaaacctggactgcactcgggtttgcgactgacgaataccaatggctgcaaatcgacttaaataaagaaaaaaagattaccggaattattacgactggtagcaccatggtgactattacaatgtgtcttcccacagaatcatgcactgtgatgatgggacgaaacggcctctgcacagagagcctcgtggagcaggataagatcttccaggggaataaggattaccaccaggatgtacgcaataatttcttgcccccaatcatagcacgctttatccgctag

SEQ ID NO: 233552 - DNA, 2328 bp, Artificial Sequence
  derived and/or modified sequence
atggccagcagagctgtggtgcgggcccggcgctgcccccagtgcccccaggtgcgggctgctgctgctgccccagcctgggccgccctgcccctgagccgcagcctgcccccctgcagcaacagcagcagcttctccatgcccctcttcctgctgctgctgctggtgctgctgctgctgctggaggatgctggggcccagcagggagatggctgcggccacacagtgctgggccctgagagcggcaccctgaccagcatcaactacccccagacctaccccaacagcacagtgtgtgagtgggagatccgggtgaagatgggagagcgggtgcgcatcaagtttggagactttgatattgaagattctgacagctgccacttcaactacctgcgcatctacaatggaattggagtgtccaggacagagatcggcaagtactgcggcctgggcctgcagatgaaccacagcattgagagcaaaggaaatgagatcaccctgctcttcatgagcggcatccacgtgtctggccggggcttcctggccagctacagcgtgattgacaagcaggacctgatcacctgcctggacacagccagcaacttcctggagcctgagttcagcaagtactgcccagctggctgcctgctgccctttgctgagatcagcggcaccatcccccacggctacagagacagcagccccctgtgcatggccggcgtgcatgctggggtggtgagcaacaccctgggcggccagatctctgtggtgatcagcaagggcatcccctactatgagagcagcctggccaacaacgtgacctctgtggtgggccacctgagcaccagcctcttcaccttcaagaccagcggctgctacggcaccctgggcatggagagcggcgtgattgctgacccccagatcacagccagctctgtgctggagtggacagaccacacaggccaggagaacagctggaagcccaagaaggcccggctgaagaagccaggccccccctgggccgcctttgccacagatgagtaccagtggctgcagattgacctgaacaaggagaagaagatcaccggcatcatcaccaccggcagcaccatggtggagcacaactactacgtgtctgcctaccgcatcctgtacagtgatgatggccagaagtggacagtgtaccgggagcccggggtggagcaggacaagatcttccagggcaacaaggactaccaccaggatgtgaggaacaacttcctgccccccatcatcgcccgcttcatccgggtgaaccccacccagtggcagcagaagatcgccatgaagatggagctgctgggctgccagttcatccccaagggccggccccccaagctgacccagcccccacctccaagaaacagcaatgacctgaagaacaccacagccccacccaagatcgccaagggccgggcccccaagttcacccagcccctgcagcccaggagcagcaatgagttccctgcccagacagagcagaccacagccagcccagacatccggaacaccaccgtgacccccaacgtgaccaaggatgtggccctggccgctgtgctggtgcctgtgctggtgatggtgctgaccaccctcatcctgatcctggtgtgtgcctggcactggaggaacaggaagaagaagacagagggcacctatgacctgccctactgggacagagctggctggtggaagggcatgaagcagttcctgcctgccaaggctgtggaccacgaggagacccctgtgcgctacagcagcagcgaggtgaaccacctgagcccccgggaggtgaccaccgtgctgcaggccgacagcgcagaatatgcccagcccctggtgggcggcatcgtgggcaccctgcaccagaggagcaccttcaagccagaggagggcaaggaggccggctacgccgacctggacccctacaacagccctggccaggaggtgtaccacgcctatgcagagcccctgcccatcactggaccagaatatgccacccccatcatcatggacatgagcggccaccccaccacctctgtgggccagcccagcaccagcaccttcaaggccaccggcaaccagcccccacccctggtgggcacctacaacaccctgctgagcaggacagacagctgcagcagcgcccaggcccagtatgacacccccaaggccggcaagccaggcctgcctgccccagatgagctggtgtaccaggtgccccagagcacccaggaggtgtctggggccggcagagatggagaatgtgatgtgttcaaggagatcctgtag

SEQ ID NO: 233553 - DNA, 2370 bp, Artificial Sequence
  derived and/or modified sequence
atggccagcagagctgtggtgcgggcccggcgctgcccccagtgcccccaggtgcgggctgctgctgctgccccagcctgggccgccctgcccctgagccgcagcctgcccccctgcagcaacagcagcagcttctccatgcccctcttcctgctgctgctgctggtgctgctgctgctgctggaggatgctggggcccagcagggagatggctgcggccacacagtgctgggccctgagagcggcaccctgaccagcatcaactacccccagacctaccccaacagcacagtgtgtgagtgggagatccgggtgaagatgggagagcgggtgcgcatcaagtttggagactttgatattgaagattctgacagctgccacttcaactacctgcgcatctacaatggaattggagtgtccaggacagagatcggcaagtactgcggcctgggcctgcagatgaaccacagcattgagagcaaaggaaatgagatcaccctgctcttcatgagcggcatccacgtgtctggccggggcttcctggccagctacagcgtgattgacaagcaggacctgatcacctgcctggacacagccagcaacttcctggagcctgagttcagcaagtactgcccagctggctgcctgctgccctttgctgagatcagcggcaccatcccccacggctacagagacagcagccccctgtgcatggccggcgtgcatgctggggtggtgagcaacaccctgggcggccagatctctgtggtgatcagcaagggcatcccctactatgagagcagcctggccaacaacgtgacctctgtggtgggccacctgagcaccagcctcttcaccttcaagaccagcggctgctacggcaccctgggcatggagagcggcgtgattgctgacccccagatcacagccagctctgtgctggagtggacagaccacacaggccaggagaacagctggaagcccaagaaggcccggctgaagaagccaggccccccctgggccgcctttgccacagatgagtaccagtggctgcagattgacctgaacaaggagaagaagatcaccggcatcatcaccaccggcagcaccatggtggagcacaactactacgtgtctgcctaccgcatcctgtacagtgatgatggccagaagtggacagtgtaccgggagcccggggtggagcaggacaagatcttccagggcaacaaggactaccaccaggatgtgaggaacaacttcctgccccccatcatcgcccgcttcatccgggtgaaccccacccagtggcagcagaagatcgccatgaagatggagctgctgggctgccagttcatccccaagggccggccccccaagctgacccagcccccacctccaagaaacagcaatgacctgaagaacaccacagccccacccaagatcgccaagggccgggcccccaagttcacccagcccctgcagcccaggagcagcaatgagttccctgcccagacagagcagaccacagccagcccagacatccggaacaccaccgtgacccccaacgtgaccaaggatgtggccctggccgctgtgctggtgcctgtgctggtgatggtgctgaccaccctcatcctgatcctggtgtgtgcctggcactggaggaacaggaagaagaagacagagggcacctatgacctgccctactgggacagagctggcttctacctgatggtgtccctggcctgccgccacaatgaaggctggtggaagggcatgaagcagttcctgcctgccaaggctgtggaccacgaggagacccctgtgcgctacagcagcagcgaggtgaaccacctgagcccccgggaggtgaccaccgtgctgcaggccgacagcgcagaatatgcccagcccctggtgggcggcatcgtgggcaccctgcaccagaggagcaccttcaagccagaggagggcaaggaggccggctacgccgacctggacccctacaacagccctggccaggaggtgtaccacgcctatgcagagcccctgcccatcactggaccagaatatgccacccccatcatcatggacatgagcggccaccccaccacctctgtgggccagcccagcaccagcaccttcaaggccaccggcaaccagcccccacccctggtgggcacctacaacaccctgctgagcaggacagacagctgcagcagcgcccaggcccagtatgacacccccaaggccggcaagccaggcctgcctgccccagatgagctggtgtaccaggtgccccagagcacccaggaggtgtctggggccggcagagatggagaatgtgatgtgttcaaggagatcctgtag

SEQ ID NO: 233554 - DNA, 1140 bp, Artificial Sequence
  derived and/or modified sequence
atgcccctcttcctgctgctgctgctggtgctgctgctgctgctggaggatgctggggcccagcagggagatggctgcggccacacagtgctgggccctgagagcggcaccctgaccagcatcaactacccccagacctaccccaacagcacagtgtgtgagtgggagatccgggtgaagatgggagagcgggtgcgcatcaagtttggagactttgatattgaagattctgacagctgccacttcaactacctgcgcatctacaatggaattggagtgtccaggacagagatcggcaagtactgcggcctgggcctgcagatgaaccacagcattgagagcaaaggaaatgagatcaccctgctcttcatgagcggcatccacgtgtctggccggggcttcctggccagctacagcgtgattgacaagcagggcagcaactacctgtttggccactgcatccagttctggaacctgagcagcggcaagtactgcccagctggctgcctgctgccctttgctgagatcagcggcaccatcccccacggctacagagacagcagccccctgtgcatggccggcgtgcatgctggggtggtgagcaacaccctgggcggccagatctctgtggtgatcagcaagggcatcccctactatgagagcagcctggccaacaacgtgacctctgtggtgtctgtgtccctgctgatggtgttcatcctcttctttgtgtctggctgctacggcaccctgggcatggagagcggggaccggggcagcagcaacaacagcatcgtgctggagtggacagaccacacaggccaggagaacagctggaagcccaagaagcaggccgagaagacctggacagccctgggctttgccacagatgagtaccagtggctgcagattgacctgaacaaggagaagaagatcaccggcatcatcaccaccggcagcaccatggtgaccatcaccatgtgcctgcccacagagagctgcaccgtgatgatgggcagaaatggcctgtgcacagagagcctggtggagcaggacaagatcttccagggcaacaaggactaccaccaggatgtgaggaacaacttcctgccccccatcatcgcccgcttcatcagatag

SEQ ID NO: 233555 - DNA, 2328 bp, Artificial Sequence
  derived and/or modified sequence
atggccagccgggccgtggtgcgggcccggcggtgcccccagtgcccccaggttcgcgctgctgctgcggcaccagcttgggccgctctgcctttgagtcgctcattaccaccttgctcgaactcctccagcttttctatgcccttgtttcttctgcttctcctcgtgctactgctgctgctggaggacgccggagctcaacaaggtgatggctgcggccatacggtgctgggccctgaatcaggcacactcacttctatcaactatcctcagacttaccctaactcaacggtctgtgaatgggagatccgcgtaaagatgggtgagcgggttcgaattaagttcggagatttcgatatcgaggatagcgactcctgtcacttcaattacttgagaatttacaacggaatcggcgtctctcggacagagattggaaagtattgtggtctgggcttgcaaatgaatcactcaattgaatctaaaggcaacgaaatcactctgctgttcatgtctgggattcatgtgagcgggcgggggtttctggcctcctactcagtcatcgataaacaggatctcattacctgcctcgatactgcatctaattttttggagcctgaattttctaaatactgcccagccggttgccttctgccctttgctgagatctctggaacaataccacacggctaccgggactcatctccactgtgtatggctggagttcatgcgggcgtcgtgtctaatacgctgggcgggcagatctcagtggtcatatcaaagggaatcccgtactacgaatcttctctggctaacaacgtgacctccgtagtggggcatctctctactagcctctttacttttaaaacatccgggtgttatggcactctgggcatggagagtggagtgattgccgacccccagatcacggcctccagtgtgctggaatggaccgatcacaccggtcaggagaattcctggaaaccaaaaaaagcacgcctgaaaaagcccgggcccccctgggccgcctttgcgactgacgagtaccagtggctgcagattgatctgaataaggaaaagaaaatcaccggtatcattactacaggttctaccatggttgaacacaactactatgttagcgcgtatcgcatcctttacagtgacgatggccagaagtggaccgtgtaccgtgaacccggagtggagcaggacaagatctttcaggggaataaggattatcaccaggatgtgcggaataacttccttcccccgatcattgcccgcttcatccgggttaaccccacccagtggcagcaaaagattgccatgaaaatggagttactggggtgccagttcattcctaagggcagaccccctaaactgacacaaccgcctccaccacggaatagcaacgacttaaagaatactaccgcaccacccaagattgcgaagggtcgggccccaaagtttacccagcctctgcagccaaggtccagcaacgagttcccggcccaaactgaacagacgaccgcgtctcccgatattagaaatacgacagtgacgcctaacgtgaccaaagacgttgctctggctgctgttctggtcccagtcttggtcatggtgctcaccacgctaatcctgatcctggtttgtgcttggcattggaggaatcgcaaaaagaaaaccgaaggcacctatgatctgccttattgggatcgggccgggtggtggaaaggcatgaagcagttcttgccggcaaaagctgtggaccatgaagaaactcctgtgagatacagttcgtccgaggtgaaccacttgtcacctcgggaggtgacgacagtactacaagcagacagcgccgagtatgcgcagcccctggtcgggggcatagtgggcacactacaccaacggtcaactttcaagcccgaggaggggaaagaagccgggtacgctgaccttgacccgtataattcaccaggacaagaggtttaccacgcttacgcagagccgctcccaattacgggacctgagtatgcgacacccatcataatggacatgtctggccaccctactactagcgtggggcagccgagcacttctaccttcaaagccacaggtaatcagcctccccctctggtcgggacatacaataccttgctcagcagaacagactcctgctcctccgctcaagctcagtacgacacacctaaggctggaaagccgggcctccctgccccggacgaactggtgtatcaggtgccacaatccacccaagaggtctccggtgctggaagagacggtgaatgcgatgtgtttaaggagatcctctag

SEQ ID NO: 233556 - DNA, 2370 bp, Artificial Sequence
  derived and/or modified sequence
atggccagccgggccgtggtgcgggcccggcggtgcccccagtgcccccaggttagggcagccgccgctgcccctgcctgggcggcactgcctctcagccgctccctgcccccttgttccaactcctcatccttctccatgcccttgttcctgctactgctattagtgctgctccttctgctggaagacgcaggagcacagcagggagacggctgtggccacacggttcttggccccgagagtggaaccctgacttcgatcaactacccccagacataccctaattctaccgtctgtgaatgggaaattcgtgttaagatgggcgagcgcgtgaggataaagtttggggactttgacattgaggattctgatagctgccacttcaattatctgagaatttataacgggatcggagtcagtcgaacagagataggaaagtattgcgggctgggtcttcagatgaatcatagtatcgagtcgaaggggaacgaaattacactactctttatgagcgggattcacgtctccggtagagggttcctggcaagctattccgtgatcgacaaacaggacttaatcacgtgtttagacaccgcatccaattttttagaacctgagtttagtaagtactgtccggccgggtgtttgctgcctttcgccgagatttctggaacaatccctcacgggtaccgagattcctccccattgtgcatggctggggtacacgccggcgtggtgtccaatactctgggaggccagatttctgtggtcatttctaaagggatcccatactacgagtcgtcactggcgaataatgttacttccgtggtaggtcacctttctacttctctgttcacgttcaagacaagcgggtgttatggcactctcgggatggagtctggcgtgatcgcagacccgcagattacagctagttctgtgctggagtggaccgaccataccggacaggaaaatagctggaaaccaaagaaggctagattgaaaaaacccgggccgccctgggctgcgtttgccaccgatgagtaccagtggcttcaaatcgacctgaacaaagagaaaaaaatcactggcattatcaccactggctctaccatggtggaacataattactacgtctccgcctacaggatcctgtactccgatgacggccagaaatggaccgtctacagagaacctggagtggaacaagataaaatctttcagggaaacaaggattaccaccaggatgtgaggaataatttcctgcccccaattatagctaggtttatccgagttaatcccacacaatggcaacagaaaattgccatgaaaatggagctgctggggtgtcagtttattcctaagggccgcccgccaaaacttacacagcctccacctccgagaaacagtaatgatctgaagaataccactgccccacccaagatcgcaaaggggcgggcccctaaatttacccagcccttacagcctcggtccagcaatgaattcccagcgcagacagagcagacaaccgcatctcccgacattcgaaacacaacagtcaccccaaatgtgacaaaagacgtcgcacttgccgcagtcctcgtgcctgtgttggtcatggtcctaacaactctcattttgattctggtgtgcgcctggcattggcggaatcggaaaaagaaaactgagggcacttacgatcttccctattgggaccgggccggcttttacctgatggtgagtctcgcgtgtcggcacaatgaaggatggtggaagggtatgaaacagttccttcctgccaaggctgttgaccacgaggaaactccagtccggtattcctctagcgaagtgaatcatctgtcgcctcgggaggtcactacagtgctgcaggctgattcagctgagtacgctcaacccctggtcgggggtattgtcggcacattacaccaaaggtccaccttcaagcctgaggaggggaaggaggcaggttatgcggatcttgatccatacaattcccctggacaggaagtgtatcatgcctacgccgagccactccctatcacaggccccgagtacgctacgcccattatcatggacatgagcgggcaccctacaacctcggttggtcaaccaagtacctcaactttcaaggctaccggaaaccagccccctcccctcgtcgggacctataatacactgctcagccggacagattcctgcagcagtgcccaggctcagtatgacacgcctaaagcaggtaaacctggactgccggcccctgacgaactcgtctaccaggtcccacaaagcacccaggaagtttcgggggctggaagggatggcgagtgcgacgtctttaaagagatcctctag

SEQ ID NO: 233557 - DNA, 1140 bp, Artificial Sequence
  derived and/or modified sequence
atgcccctgttcctgctgctgctgctggtgctgctgctgctgctggaggatgccggagctcagcaaggagacgggtgcgggcacacggtcctcggtccagagtcaggcactctgacgtccatcaactatccacaaacctacccaaacagcaccgtttgcgagtgggaaattagggtgaaaatgggcgaacgggtaagaatcaaatttggggacttcgatatcgaggatagcgactcctgtcatttcaattacctgaggatttacaatggcattggagtgagcagaacggagattggaaagtactgcggtctcgggctgcagatgaaccattcaattgagagtaagggaaatgagatcacattgctctttatgtcagggattcacgtatcaggcagaggctttttggcctcctactctgtcatcgataagcaaggaagcaactatctgtttggtcactgcattcagttctggaacctctcctcaggcaaatattgccctgccgggtgcctgctgccattcgccgaaatatccggtaccattcctcacggctatcgggattcatctcctctgtgtatggcgggagtccacgccggtgtggtgtccaatacactcgggggccagatttcggtcgttatctctaaggggatcccctactacgaatccagcctcgctaataatgttacctcggtggtgagcgtgtctctgctcatggtctttatcctcttcttcgtctccggttgctacgggaccctgggcatggagagtggagaccgaggatcatctaacaactcaatagtgctcgagtggactgaccacacagggcaagaaaactcttggaaacctaagaagcaagccgaaaagacctggaccgcactgggctttgcgaccgacgagtatcaatggctgcagatagatttaaataaggagaaaaaaataaccggcattatcaccacaggaagtaccatggtgaccatcaccatgtgtctgcccacggagtcctgtacagtcatgatgggacggaatgggctctgcactgaatccctggttgagcaggataagatctttcaaggcaacaaggattaccaccaggatgtgcggaataacttcctgcctcccataatcgccaggtttataaggtag

SEQ ID NO: 233558 - DNA, 2328 bp, Artificial Sequence
  derived and/or modified sequence
atggctagtagagcagtggtgcgagccagaagatgtcctcagtgtcctcaagtgcgggcagcggctgcagccccagcatgggcagctcttccgctgtccagatccttgcccccatgttcgaattctagtagttttagtatgccactctttctgctgctgttactcgtcctcctgcttctattggaggatgcaggggctcagcagggggatggctgtggacatacagttcttggccctgagagcgggaccctgacttcaattaactacccacagacctaccccaacagtactgtgtgtgagtgggagatacgcgtcaagatgggcgagagagtccgaataaaattcggggacttcgacatcgaggactctgatagctgccactttaactatctacgcatctacaatggaataggagtctcgcgcaccgagattggtaagtattgcggcctggggctccaaatgaatcacagcatcgagtcaaagggaaacgaaatcacgctcctctttatgagcggaattcatgtgtcaggtcgcggtttcctggcctcatactcagtcatagataaacaggatctgataacctgtctggatacggcttcaaactttctggagcccgagttttctaaatactgtccagcagggtgcctcttgccctttgctgagatctccggaacgatcccacatgggtatcgcgactcgagcccactgtgcatggcgggtgtgcacgctggcgtggtcagcaacacactgggaggccagatcagtgtggtgatttccaaggggattccctattacgagtcatcattagccaacaatgtgacctcggtcgtgggccacctctccacttctctcttcacctttaagacctcaggctgctatggtaccctggggatggaaagcggagtcatcgctgacccccagataacagcttcatcagttctcgagtggaccgatcacaccggacaagagaactcctggaagccaaaaaaagcacggctgaagaagccaggtcctccatgggccgctttcgctaccgatgagtatcagtggttgcagattgacctgaataaggaaaagaagatcacagggattatcacaactggatcgaccatggttgagcacaattattacgtatcagcatatcgtatcctgtactccgacgacggccagaaatggacagtctaccgagagccgggagttgaacaagacaagatcttccagggaaataaagattatcaccaagacgtgaggaataattttttgccgccaatcattgccaggttcatccgggtgaatcctacccaatggcagcagaagattgccatgaagatggaacttctcggctgtcagttcatcccaaagggccgacccccaaagctcacccagccacctcccccacggaacagcaatgacctcaagaacactactgcgccacctaagatcgcgaagggcagggctcctaaattcacacaacctctgcaaccaagatcatcaaacgaatttccggcacagacagagcaaacaactgccagccccgacatacgcaacactactgtgactcccaacgtcaccaaagatgtcgcgctggccgcagttttagtacccgtcctcgtgatggtgctgacaacattgatcttaattctggtatgcgcttggcactggaggaatcggaaaaagaagacagagggcacatatgacctgccctattgggatcgagcaggctggtggaaaggaatgaagcagtttctgcccgcaaaggctgtggaccatgaagagacaccggtgcgttattcttcatcagaggtaaatcatcttagccctagagaagtcactacggtcttgcaggctgactccgcagaatacgcacagcccctagtgggaggaatagtgggtactctgcaccaacgatcgacctttaaaccagaggagggaaaagaagcaggatatgcggatttggatccatataattcccccggtcaagaggtgtatcatgcctacgcggaacctcttccgattaccggtcccgagtacgcaacccccatcatcatggatatgtctgggcaccccactaccagcgtgggtcaaccttccacctcaaccttcaaggccaccggaaaccagcccccaccactagtgggtacatataatacccttctgtctaggactgattcgtgttcttcggctcaggcgcaatatgatacccccaaggccggaaaacctgggttacccgcacccgatgaattagtttatcaagtcccccagagcactcaggaggtgtccggcgcaggacgggacggggagtgcgatgtgtttaaggagatcttgtag

SEQ ID NO: 233559 - DNA, 2370 bp, Artificial Sequence
  derived and/or modified sequence
atggcctctcgagccgttgtaagggctaggaggtgcccacagtgcccgcaagtacgggcagctgccgcagctccagcatgggctgccctgccattatctagaagccttcctccttgctccaacagttcgtccttctctatgcctctcttcctgctccttctgctagtccttttgctgcttctcgaggacgcaggggcacagcagggagacgggtgcggccatacggtactaggtcccgaatctgggaccctcacttctattaactacccacagacatatcctaactcaacggtgtgtgaatgggaaatccgagtgaagatgggtgaacgtgttagaattaagttcggtgacttcgatatcgaagattcggactcatgtcatttcaactatctgcgtatctacaatggaattggcgtgtcacgtactgagatcgggaagtactgtggcctgggattgcaaatgaatcacagcatcgagtccaaaggcaacgagatcaccctgctgttcatgtctggcatacacgtgtctggtagggggtttttggcatcctattccgtcattgataaacaggacttaattacctgcctcgacaccgccagcaacttcctcgagcccgaattcagcaaatactgccccgctgggtgtctgctaccttttgccgagattagcggcacgattccacatggctatagagacagtagccccctctgcatggccggagtccacgccggagtggtgtccaacaccttgggtggccaaattagtgtggtgatctctaaaggaatcccgtactacgagtctagcctcgccaacaatgtgacttccgttgtcggacacttgagcacttccttgttcactttcaagactagtggatgctatggtacacttgggatggagtccggggtgatcgccgacccgcagattaccgcaagctcagtcttagaatggacggatcataccggtcaggagaactcttggaaaccgaaaaaggcgcgtctgaagaaacctggacccccatgggctgcgtttgccacagacgagtaccagtggctgcagatcgacctgaacaaggagaagaaaattacaggcatcatcactaccggctccacaatggtggagcacaattactacgtttccgcctatcgaatcttgtactctgacgacgggcagaagtggacagtgtacagagaacccggagtcgaacaggacaaaatctttcaggggaataaagactatcatcaggatgtgcggaataattttctgccgccaatcatcgcccgttttatcagagtgaacccaacccagtggcaacaaaagattgctatgaaaatggagcttctgggctgtcagttcatacctaaagggaggcccccaaagctgacacaaccacccccacccaggaattctaatgatctgaagaataccacagctccgcctaagattgcaaaaggccgtgcaccaaaatttactcagcctttacagccccgttccagcaacgagtttccagcacagactgagcagacaacagcctctccggatattcgtaatacaacagtcacacccaatgtcacgaaggatgtggccttggctgccgtcctggttccagtgttggtgatggtcctcaccacactcatcttgatactggtgtgtgcttggcactggagaaatcgtaagaaaaaaacagaaggtacttacgacctcccatattgggacagggcaggcttttacctcatggtgtcattggcgtgccggcataatgagggttggtggaaaggcatgaagcagtttctacctgccaaagccgtggatcacgaggagactcccgtcaggtacagctcttccgaggtgaaccacctctcaccgcgagaggttaccacagtgttacaggctgattccgcggagtatgcccaacccctggtaggcggaatagttggcactcttcaccagcgttcaacctttaagcccgaggagggcaaggaggctgggtatgctgacttggacccatacaactccccgggacaggaagtctatcatgcctacgccgagcctctccccattacagggccagagtatgccacgccgatcattatggatatgtccggccatccaacaacctccgtgggtcagccttctactagcaccttcaaagctacaggcaaccagcctcctccactagtgggcacttacaacaccctcctgtcccggactgactcgtgcagctccgctcaggcacagtacgacacaccgaaagccggtaaacccggactgcctgcacctgatgagcttgtttatcaggtaccccagagcacccaggaagtgtctggggcagggagagacggagagtgcgacgtgttcaaagaaattttatag

SEQ ID NO: 233560 - DNA, 1140 bp, Artificial Sequence
  derived and/or modified sequence
atgccgctgtttttactgttgttgttggtgctactgctgttgctcgaagatgcgggagcccagcagggggatggatgcgggcatactgtacttggacccgagtctggcacactgacctccattaactatccacagacctaccccaactctacagtatgcgaatgggaaattagggtgaagatgggtgagagggtgagaataaagttcggagactttgacattgaggacagcgactcttgtcactttaactatttgcgcatatacaacggcattggggtgagtcggacagagattggaaagtactgcggcttggggttgcagatgaaccactctatcgagagcaaggggaatgagatcaccttattgttcatgtctggcattcacgtatcagggagaggcttcctcgcgagttatagcgtgatcgataagcagggaagcaattacttatttggacactgcatacagttttggaaccttagtagcggcaaatactgtcccgcagggtgcctcttgccttttgcggaaatcagcgggactattccccatggctatcgggactcgagcccactgtgcatggctggcgtacacgccggtgtagtgtccaacaccctgggaggacagattagtgtcgtgatcagcaagggtatcccgtattatgagtcctcattggccaacaacgtgacttctgtagtgtcagtatcgctgctcatggtgtttatcctgtttttcgtgtctgggtgctacggcaccctgggtatggaaagcggcgatcgcggatcttctaataattcaatagtgttggaatggacagatcacactggtcaagagaattcttggaagcctaagaaacaggcggaaaaaacctggactgccctgggatttgcaactgatgagtatcagtggctgcaaatcgatctgaacaaggaaaagaaaatcacgggaattattacaacaggaagtactatggttactatcacgatgtgcctgccaaccgaatcatgcacagtgatgatgggaagaaatgggctgtgcacagaatctttggttgaacaggacaaaatatttcaaggaaataaggattatcaccaggatgtgagaaataatttcctacctccaatcatcgcacggtttattaggtag

SEQ ID NO: 233561 - protein, 584 aa, Artificial Sequence
  derived and/or modified sequence
MHTGGETSACKPSSVRLAPSFSFHAAGLQMAGQMPHSHQYSDRRQPNISDQQVSALSYSDQIQQPLTNQVMPDIVMLQRRMPQTFRDPATAPLRKLSVDLIKTYKHINEVYYAKKKRRHQQGQGDDSSHKKERKVYNDGYDDDNYDYIVKNGEKWMDRYEIDSLIGKGSFGQVVKAYDRVEQEWVAIKIIKNKKAFLNQAQIEVRLLELMNKHDTEMKYYIVHLKRHFMFRNHLCLVFEMLSYNLYDLLRNTNFRGVSLNLTRKFAQQMCTALLFLATPELSIIHCDLKPENILLCNPKRSAIKIVDFGSSCQLGQRIYQYIQSRFYRSPEVLLGMPYDLAIDMWSLGCILVEMHTGEPLFSGANEVDQMNKIVEVLGIPPAHILDQAPKARKFFEKLPDGTWNLKKTKDGKREYKPPGTRKLHNILGVETGGPGGRRAGESGHTVADYLKFKDLILRMLDYDPKTRIQPYYALQHSFFKKTADEGTNTSNSVSTSPAMEQSQSSGTTSSTSSSSGGSSGTSNSGRARSDPTHQHRHSGGHFTAAVQAMDCETHSPQVSSHVVHLLVSPAILRWSSTGCQVPLE

SEQ ID NO: 233562 - DNA, 1626 bp, Artificial Sequence
  derived and/or modified sequence
atgcatactgggggcgaaacgagcgcttgcaagcccagtagcgtccgtttggcaccaagtttttctttccatgctgccggacttcagatggccgggcagatgccccatagtcaccagtacagcgacagaaggcagccaaatatcagcgaccaacaggtgagtgctctgagctatagtgatcagatacagcagccattaaccaaccaagtgatgcctgatatcgtgatgctgcagcgaaggatgccacaaacatttcgggacccggctacggctccgctccgcaagctttccgttgacctgataaagacttataaacatataaatgaagtttattatgccaagaaaaagcgtcggcatcagcaggggcagggcgatgattcctctcataaaaaggaacggaaagtctacaatgacggatatgatgatgataactatgattacatcgtgaaaaacggggaaaagtggatggatcgctacgaaattgactcactcattgggaaggggtctttcggacaagttgttaaggcttacgacagggtcgagcaggaatgggtggctataaaaatcattaaaaacaagaaagcttttctcaatcaggcacagatcgaggtgcggctgctcgagctgatgaacaaacacgacaccgaaatgaagtactatatagtccatttgaagagacacttcatgtttcgtaatcatctctgtcttgtgtttgagatgttatcatacaatctgtacgaccttctgaggaacactaacttccgaggagtatcactgaacctgacacggaagttcgcccagcaaatgtgtaccgctctgttattcctggccacgccagaactatcgattatacactgcgacttgaaacctgagaacatactgctgtgtaaccccaagcgcagcgctatcaagatcgtcgatttcggatcaagctgtcaactgggacagagaatctatcaatacatccagtcacgcttctatcgttcacctgaggtgttgcttggaatgccatacgacctggccattgatatgtggtctcttggatgcatattagtggagatgcatacgggcgagcccctcttcagtggggccaacgaagtggaccagatgaacaagatcgtcgaggttctcggaattccgccagcgcatatacttgatcaggcacctaaagcccgcaagtttttcgagaaactgcccgacgggacctggaatctaaagaaaacaaaggatggaaagcgggagtacaagcccccagggactagaaagttgcataatatactgggggtggagaccggagggcccggaggccggcgtgcaggcgagtccggacatacagtcgcggattacctcaaatttaaggatctgatcctccggatgctggattacgatcctaagacacgcatacagccctattatgctctccagcatagtttttttaagaagactgccgatgaagggaccaatacaagcaactcagtgagtacatcgccagctatggaacagtcacagtcgtcagggactacctcatccacatcttcttcttccgtggtggagcagcactggatgccgggcgcattccgaatgacagtctcctttaccctcgaggtgcacgacgtgcccgtgtag

SEQ ID NO: 233563 - DNA, 1755 bp, Artificial Sequence
  derived and/or modified sequence
atgcacactggcggggagacatccgcctgcaaaccaagctctgtcagacttgctccctcattctctttccatgctgccggactacagatggccgggcaaatgcctcattcgcaccaatattctgatcgccgacagccgaatatcagcgatcagcaggtgagcgcactgagttacagcgatcagatccagcagcccctgacgaatcaggtgatgcccgacatagtcatgctgcagagaagaatgccacagactttcagggacccagctactgcacccctcagaaagctcagcgtggacctcattaaaacttacaaacatatcaacgaggtctattatgccaagaaaaagcggagacatcagcagggacagggggacgactcatctcacaaaaaagaaagaaaagtttacaacgatggatacgacgatgacaactatgattacattgtgaagaacggggagaaatggatggaccgatacgagatcgacagtcttattggcaaaggttcttttggacaggtcgtgaaagcctatgatagggttgagcaagaatgggttgccattaaaatcatcaaaaataagaaggctttcctaaatcaggcccaaatcgaggtccgtcttctagaacttatgaataagcacgatacagaaatgaagtactatattgttcacctcaaacgacatttcatgtttaggaaccacctctgtctggtgtttgagatgttgagctacaatctgtatgacttattaagaaatactaattttagaggcgtgtcactgaacctgacgcgcaaattcgcccagcagatgtgtaccgcgctgctcttcctggcaactcctgagctttccatcatccactgcgacctcaagcctgagaatatcctcctgtgtaatccaaagaggagtgcgatcaaaattgttgactttggctccagctgtcagttgggccaacggatctaccagtacatccagtcacggttttaccgttctccagaagtgctgcttggtatgccctatgatctcgctatcgatatgtggagtctgggctgcattttagtcgagatgcacactggagagcctttgttttctggtgcaaacgaggtcgaccagatgaacaaaatcgtcgaagtattaggcattccaccagctcacattctcgatcaggcacctaaagccaggaaattctttgaaaaactgccagacggcacatggaatctgaaaaagaccaaagatggaaagagggaatataagcccccgggaaccagaaagctccataatatcttaggcgtcgagacaggcggacctggcggtcgaagggccggcgaatccggacacaccgtagcggactacctcaagttcaaggacctgatattgagaatgcttgactacgaccccaaaacccgtatccagccatactatgccttacagcactccttttttaaaaaaacagctgatgagggcaccaacacaagcaacagtgtctcgacatcaccagctatggagcagagccagtccagcggtaccaccagtagcacaagcagttcctcaggtgggagctctgggactagtaatagcggacgagcacggtctgaccccacacatcagcaccggcattctggcggccactttacggccgccgtacaggccatggactgcgaaacgcactccccacaggtgtcctctcacgtcgtgcacctgttagtaagccctgccattctcagatggtcgagtaccgggtgccaggtcccactagaatag

SEQ ID NO: 233564 - DNA, 1755 bp, Artificial Sequence
  derived and/or modified sequence
atgcacaccggcggcgagacctccgcatgtaaacctagctccgttcggctcgctcccagcttctcttttcacgccgcgggactgcagatggcgggccagatgccacattcccatcaatatagcgaccgccggcaaccaaacattagcgaccagcaggtgtctgcattgagctattcagaccagatccagcagccgcttactaatcaggtgatgccagacatcgttatgctgcaacggagaatgcctcaaactttcagggaccctgccacagccccactgcgtaagctgagtgtggacttgatcaagacttacaagcatattaatgaggtatattacgccaaaaagaaacgccggcaccaacaaggtcagggggacgacagctcccacaagaaagaacgaaaagtgtacaatgacgggtacgatgacgataactacgattacattgtgaagaacggggaaaagtggatggacagatatgaaatcgattccctcattgggaaaggatcttttggccaggtggtgaaagcctatgacagagtggagcaggagtgggtcgccattaagatcatcaaaaataaaaaagctttcttgaatcaggctcagatcgaggtgcgactcctagaactgatgaataaacacgatacagagatgaagtactacattgtgcacttgaagagacattttatgttccgcaaccatctctgcttggtcttcgaaatgctatcatataatttgtatgacctgctacggaatacgaatttccgaggcgtgagcctcaatctcacgcgcaaatttgcacagcagatgtgcaccgccctgctctttttagccactccagagctgtctatcatccattgtgacctgaagccagaaaatatactgctctgcaaccccaagagatcagccattaaaattgtcgacttcggttcgtcctgccagttgggccagcggatctatcaatacattcaatctagattttatcgaagccccgaggtgctactagggatgccctacgatctggcaatagatatgtggagtctcggatgcatcctcgtggaaatgcacacaggtgaaccccttttcagtggcgctaacgaggtcgatcagatgaataaaatagtggaagtcctgggcattccccccgcccacatcctcgaccaggcccccaaggcccggaaattttttgagaagctccctgatggcacttggaatctgaagaagacaaaggatggcaaacgagaatacaagcctccgggtacgcgcaaactccataatattctgggagtggagacgggggggcctggaggtcggcgcgctggcgagtccgggcatacggtggccgactacctgaaattcaaagacctcatcttgcgtatgctcgattatgaccccaagactcgcattcaaccctactatgccctgcagcacagctttttcaagaaaacagctgatgagggaactaatacgagcaattctgtgtctacttctccggctatggaacagtctcaatcctctggcaccaccagctctacatcatccagctcaggaggaagttccgggacaagtaattcggggcgggcccgctctgatccgacgcaccagcacaggcattccggcggccacttcactgctgcagtccaagccatggattgtgagactcactctccacaggtgtctagtcatgtcgtgcacttacttgtgagccccgcaattctgcggtggtcatctacaggctgtcaagtcccgttggaatag

SEQ ID NO: 233565 - DNA, 1626 bp, Artificial Sequence
  derived and/or modified sequence
atgcacactggaggagagaccagcgcctgcaagcccagctctgtgcggctggcccccagcttctccttccacgccgccggcctgcagatggccggccagatgccccacagccaccagtacagcgaccggcggcagcccaacatcagtgaccagcaggtgtctgccctgagctacagcgaccagatccagcagcccctgaccaaccaggtgatgccagacatcgtgatgctgcagaggaggatgccccagaccttccgggaccctgccacagcccccctgaggaagctgtctgtggacctgatcaagacctacaagcacatcaatgaggtgtactatgccaagaagaagagaagacaccagcagggccagggagatgacagcagccacaagaaggagaggaaggtgtacaatgatggctatgatgatgacaactatgactacatcgtgaagaatggagagaagtggatggacagatatgaaattgacagcctgattggcaagggcagctttggccaggtggtgaaggcctatgacagagtggagcaggagtgggtggccatcaagatcatcaagaacaagaaggccttcctgaaccaggcccagatcgaggtgcggctgctggagctgatgaacaagcatgacacagagatgaagtactacatcgtgcacctgaagaggcacttcatgttcaggaaccacctgtgcctggtgtttgagatgctgagctacaacctgtatgacctgctgaggaacaccaacttccggggcgtgtccctgaacctgaccaggaagtttgcccagcagatgtgcacagccctgctcttcctggccaccccagagctgagcatcatccactgtgacctgaagccagagaacatcctgctgtgcaaccccaagaggtctgccatcaagatcgtggactttggcagcagctgccagctgggccagaggatctaccagtacatccagagccgcttctaccgcagccctgaggtgctgctgggcatgccctatgacctggccatcgacatgtggagcctgggctgcatcctggtggagatgcacactggagagcccctcttcagcggggccaatgaggtggaccagatgaacaagatcgtggaggtgctgggcatccccccagcccacatcctggaccaggcccccaaggccaggaagttctttgagaagctgcctgatggcacctggaacctgaagaagaccaaggatggcaagcgggagtacaagcccccaggcaccaggaagctgcacaacatcctgggcgtggagactggaggccctgggggcagaagagctggggagagcggccacacagtggccgactacctgaagttcaaggacctgatcctgaggatgctggactatgaccccaagacccgcatccagccctactatgccctgcagcacagcttcttcaagaagacagcagatgagggcaccaacaccagcaacagcgtgtccaccagccctgccatggagcagagccagagcagcggcaccaccagcagcaccagcagcagctctgtggtggagcagcactggatgcctggggccttcaggatgacagtgtccttcaccctggaggtgcatgatgtgcctgtgtag

SEQ ID NO: 233566 - DNA, 1755 bp, Artificial Sequence
  derived and/or modified sequence
atgcacactggaggagagaccagcgcctgcaagcccagctctgtgcggctggcccccagcttctccttccacgccgccggcctgcagatggccggccagatgccccacagccaccagtacagcgaccggcggcagcccaacatcagtgaccagcaggtgtctgccctgagctacagcgaccagatccagcagcccctgaccaaccaggtgatgccagacatcgtgatgctgcagaggaggatgccccagaccttccgggaccctgccacagcccccctgaggaagctgtctgtggacctgatcaagacctacaagcacatcaatgaggtgtactatgccaagaagaagagaagacaccagcagggccagggagatgacagcagccacaagaaggagaggaaggtgtacaatgatggctatgatgatgacaactatgactacatcgtgaagaatggagagaagtggatggacagatatgaaattgacagcctgattggcaagggcagctttggccaggtggtgaaggcctatgacagagtggagcaggagtgggtggccatcaagatcatcaagaacaagaaggccttcctgaaccaggcccagatcgaggtgcggctgctggagctgatgaacaagcatgacacagagatgaagtactacatcgtgcacctgaagaggcacttcatgttcaggaaccacctgtgcctggtgtttgagatgctgagctacaacctgtatgacctgctgaggaacaccaacttccggggcgtgtccctgaacctgaccaggaagtttgcccagcagatgtgcacagccctgctcttcctggccaccccagagctgagcatcatccactgtgacctgaagccagagaacatcctgctgtgcaaccccaagaggtctgccatcaagatcgtggactttggcagcagctgccagctgggccagaggatctaccagtacatccagagccgcttctaccgcagccctgaggtgctgctgggcatgccctatgacctggccatcgacatgtggagcctgggctgcatcctggtggagatgcacactggagagcccctcttcagcggggccaatgaggtggaccagatgaacaagatcgtggaggtgctgggcatccccccagcccacatcctggaccaggcccccaaggccaggaagttctttgagaagctgcctgatggcacctggaacctgaagaagaccaaggatggcaagcgggagtacaagcccccaggcaccaggaagctgcacaacatcctgggcgtggagactggaggccctgggggcagaagagctggggagagcggccacacagtggccgactacctgaagttcaaggacctgatcctgaggatgctggactatgaccccaagacccgcatccagccctactatgccctgcagcacagcttcttcaagaagacagcagatgagggcaccaacaccagcaacagcgtgtccaccagccctgccatggagcagagccagagcagcggcaccaccagcagcaccagcagcagcagcggcggcagcagcggcaccagcaacagcggccgggcccggagtgaccccacccaccagcaccgccacagcggcggccacttcaccgctgctgtgcaggccatggactgtgagacccacagcccccaggtgagcagccacgtggtgcacctgctggtgtccccagccatcctgcgctggagcagcacaggctgccaggtgcccctggagtag

SEQ ID NO: 233567 - DNA, 1626 bp, Artificial Sequence
  derived and/or modified sequence
atgcacaccggcggcgagaccagcgcctgcaagcccagcagcgtgcggcttgcacctagctttagttttcatgccgctggtctgcagatggctggacagatgcctcacagccatcaatatagcgatcggagacagccgaatattagtgaccagcaggtgagcgccctgtcttattccgaccagattcagcaacctctgactaatcaggtgatgcctgatatcgttatgctgcagcgtcggatgccacagacattccgggatccagccaccgcgcccctgcggaaactgagcgtcgatctcatcaagacctataagcacatcaacgaggtctattacgccaagaaaaaaaggcggcaccagcagggccaaggtgacgattcgagtcataagaaggagaggaaagtctacaacgacggttacgacgacgataactacgattacatcgttaaaaacggggagaagtggatggatcgctacgaaattgatagccttattggcaagggatcttttggccaggtggtgaaggcttacgatcgcgtggagcaagagtgggttgccattaagattattaaaaacaagaaagctttcctgaatcaggctcagattgaagtccgcctactcgagttaatgaataaacacgacacagaaatgaagtattacattgttcacttgaaacggcattttatgtttagaaaccacctgtgtcttgtgtttgaaatgctgtcgtataacctctatgacctgttgcgcaacactaatttcaggggtgtgagcctgaatctgacgcgcaaattcgcacagcaaatgtgtactgcgctcctgttcctggcgacccccgaactgagtatcatacactgcgatttaaagcctgagaacatcctgttgtgtaatcctaaacgtagtgctatcaaaatcgtagattttggcagcagctgtcaactcggacagagaatttaccagtacatccaaagcaggttttaccggagccccgaggtcctccttgggatgccttacgacctggcgatcgacatgtggtctctgggatgcatcctggtggagatgcacacaggcgaacctctcttctccggggcgaatgaggtggaccagatgaataaaatcgtcgaggtgcttggcataccacccgcacatattctagaccaggcccctaaggcaaggaagttcttcgaaaagctgcctgacggaacctggaacctaaaaaaaacaaaagatggcaaacgtgagtataaaccaccagggacccgaaagttgcacaatatacttggggtggaaactggaggccctggaggaagaagggctggagaatccggacacactgtggccgactacctgaagttcaaagacttgattctgcgcatgctggactatgacccaaaaactcggattcagccttactatgccctgcagcactcattttttaagaagaccgctgacgagggaacaaatacatcgaattcagtgtctacttccccagctatggaacaaagtcagagctccggcaccacaagcagcactagcagctcctcagttgtagagcagcactggatgccaggagcgtttcgaatgaccgtgtcctttaccctggaggttcatgatgtgcctgtctag

SEQ ID NO: 233568 - DNA, 1755 bp, Artificial Sequence
  derived and/or modified sequence
atgcacaccggcggcgagaccagcgcctgcaagcccagcagcgtgcgcttggcaccctctttcagcttccatgccgccgggttacagatggccgggcagatgcctcactcacaccagtactccgataggagacagccaaacataagcgaccaacaggtgtccgccctaagttattctgatcagattcagcagcctcttacaaaccaggttatgccagatatcgtgatgctccagcgcagaatgccgcagacatttcgggaccctgctactgcaccactccggaaactgtccgttgacctcattaaaacatacaagcacattaacgaggtgtactatgcgaaaaaaaagagaagacatcagcaggggcagggcgacgattccagccacaagaaagagcggaaagtatacaatgacggatacgatgatgataattacgattacatcgtcaagaatggagagaagtggatggacagatatgagattgacagcttgataggcaagggctcattcggccaggtggtaaaggcttatgaccgggtcgaacaggagtgggttgccattaaaattattaagaataagaaagccttccttaaccaagcccaaatcgaggtgaggttgcttgaactgatgaacaaacacgataccgagatgaagtattatatcgtgcatttaaagaggcacttcatgtttcggaatcatttgtgtctcgtgttcgagatgttgtcttataacttatacgatcttctaagaaacaccaattttagaggcgtgtccctcaacttaacacgcaagttcgctcaacagatgtgcaccgcacttcttttcctcgcaacgcctgagctctcaatcatacattgtgacttgaaacctgaaaacattctgctttgcaatccaaagaggagtgcaatcaaaatcgtagatttcgggagctcgtgccagctaggccagagaatctatcagtacattcaaagccggttctatagatcaccggaggttctgctggggatgccctacgatctggcaatcgatatgtggagcctggggtgcattcttgtggaaatgcacactggtgagcctctgttctccggggccaacgaggtcgatcagatgaacaaaatagtagaggttctcggcattcccccggcacacatcctcgatcaggctccaaaggcccgcaagttctttgagaagctcccagatggcacatggaacttaaaaaagaccaaggacggcaagcgggagtataaaccacctggcacgcgcaagttacacaacatcttgggtgtcgagaccggaggacctggcggcaggagagctggagagtccggacacactgttgccgactaccttaaatttaaggaccttatcttgcgtatgcttgactacgatccaaaaacccgaatccagccttattacgcactccagcacagcttttttaagaagaccgccgacgagggcactaatacatcaaattcggtttcgacatctcctgccatggagcagtcccagagctctggtaccacttccagcacctcatctagtagcggcggctcctcagggacgtcaaattctggtcgggcgcgcagtgaccccacccaccagcaccgacactctggcgggcactttactgccgccgttcaggccatggattgcgagacacactctccacaggtttcttcccacgtagtgcacctgcttgtgagtcccgctatcctgagatggtcttccacaggatgccaggtgcccctggagtag

SEQ ID NO: 233569 - DNA, 1755 bp, Artificial Sequence
  derived and/or modified sequence
atgcacaccggcggcgagaccagcgcctgcaagcccagcagcgtgagactcgctccttctttctcattccatgctgccggcttgcaaatggcaggacagatgccccatagtcatcagtactcagaccgccgccaaccgaacattagtgaccaacaggtctccgcactgagttattctgatcaaattcagcagccactcacgaaccaggtaatgcccgatattgtcatgctgcagaggcgaatgccacagacatttcgagaccccgctactgcacccctgcgtaagttaagcgttgatctgataaaaacttataagcacatcaatgaggtctattacgccaaaaaaaagaggcgtcaccaacagggtcagggggacgattcaagccataaaaaagagcgaaaagtctataatgacgggtatgatgatgataactacgactatatcgtaaagaacggggagaaatggatggaccgctacgagatagatagtttgatcggcaagggatctttcggacaggtggtaaaggcatatgaccgggtcgagcaggaatgggtcgccatcaagatcataaaaaacaagaaagcatttctcaaccaagcacagattgaggtgagacttttagagctgatgaacaagcacgacaccgagatgaaatattatatagtacacttaaagcgccactttatgttcagaaatcacttatgtttggtgtttgagatgctatcctacaacctttacgatctgctgcgaaatacaaattttcgcggggtgtcgctgaatctgaccaggaaattcgcccagcagatgtgcacagccctgctttttttggctacgcccgaactgtcaattattcactgcgacttgaaacctgaaaatatcctgctgtgtaatcctaaacgcagcgcaataaagatcgtggatttcggctcatcatgtcagctgggccagcgtatttaccagtacatccagagtaggttctatcggtctcctgaggtcctgctgggtatgccatacgacctggcaattgacatgtggagccttggttgtatcctagtagagatgcatactggggagccgttattcagcggggccaacgaagtggaccagatgaacaagattgtggaagtcctgggtataccacctgctcatatattggaccaggctcccaaggcccgtaaattctttgaaaagctacccgacgggacctggaatttgaaaaagacaaaagatggcaaacgcgagtacaagcccccaggtacccgcaaattgcataacattctcggcgtggagaccggaggacccggtgggaggcgagcgggcgagtcaggccatactgtcgcagactatcttaagtttaaagatctaatcctgcgaatgctggattacgatccaaagacccggatccagccctattacgccctgcaacactcgtttttcaaaaaaacggccgatgaggggaccaacacttctaattccgtctctacctcaccagctatggaacagtcacagtccagcggcaccaccagcagcacgtcaagctctagcggaggaagttctggcacctccaactccggacgggcccgcagcgatcccacgcaccagcacaggcacagtgggggacacttcaccgccgcggtgcaagcaatggactgcgaaacccactcgccccaggtgagcagtcatgtggtccacttgttagttagtccagctatactgcggtggtcaagcacgggctgtcaggtgcctctggaatag

SEQ ID NO: 233570 - DNA, 1626 bp, Artificial Sequence
  derived and/or modified sequence
atgcacactgggggtgagacctccgcctgcaaaccaagttctgtcagactggccccttcattctccttccacgctgccggactgcagatggccggtcagatgcctcactcccatcagtactccgaccggaggcagcctaacatcagtgaccaacaggtgagcgctctcagttattcagaccagatccagcagccattaactaaccaagtgatgcctgacatcgtgatgctgcagcggcgaatgccacagaccttccgagatccagctaccgcccctttgcggaagctgtcggttgacctcattaaaacgtataagcacatcaacgaagtctattacgcaaaaaagaagcgccgacaccagcaggggcagggcgatgatagcagtcataagaaggaacggaaggtctataacgatggatacgacgatgataactatgattatatcgtgaagaacggcgaaaagtggatggatcgctatgaaatagactctctgatcggaaaggggtcctttggtcaggtcgtgaaggcttacgaccgcgttgagcaggagtgggtggccatcaagatcattaagaacaagaaagctttcctgaatcaggctcaaattgaggtgcgactcctggagcttatgaataagcacgataccgagatgaagtattacatcgtccacctcaagcgccactttatgtttcgaaatcacctatgtctggtcttcgagatgctctcctacaacctgtatgaccttcttcgtaatactaacttccggggtgtgtccttaaacttaaccaggaagtttgcgcagcagatgtgtactgctctcctttttctggccactcctgaactctccatcatccactgtgacctgaagcccgagaatattctgctgtgtaaccctaagagatccgccatcaagattgtcgactttggatcttcttgtcagctgggccagaggatttatcagtacatccagtcacgcttctatcgctcacccgaggtactcctgggcatgccctatgaccttgctatagacatgtggagcctgggatgcattttagtggagatgcacaccggcgaacctctgttttcaggggctaatgaggtcgatcagatgaataagatcgtggaggtcctaggaatccctccagcacacatcttagaccaggccccaaaagctcggaagtttttcgaaaagttacccgacgggacctggaacctaaagaagacaaaagacgggaaacgcgaatataagcctcctgggacacgcaaattacacaatatactgggagtggaaactggcggtcctggtggtaggcgcgcaggcgagtcaggtcacacagtagccgactatcttaagttcaaggatctgattctccgtatgctggactatgacccaaaaacccgaattcaaccttattatgctttgcagcactccttttttaaaaagacagcagacgagggcacaaacacgagcaattctgttagcacaagcccggcaatggagcagagtcagtcgtccggcacgacctcctcgactagcagctcaagtgttgtggaacagcattggatgcctggcgcttttcgaatgacggtcagtttcacactagaggtgcacgacgtgccagtgtag

SEQ ID NO: 233571 - DNA, 1755 bp, Artificial Sequence
  derived and/or modified sequence
atgcacactgggggtgagacgagtgcttgtaagccttcaagcgtacggcttgccccttctttcagttttcatgctgcagggcttcagatggccggacagatgccccattcccaccagtacagcgacagaaggcaacctaacatctctgatcagcaggtgtctgccctgtcttactctgaccaaatccagcaaccattgacgaatcaagtgatgccagacattgtcatgttgcaacgccgaatgccacagacgttccgggacccagctaccgcccctttgaggaagctatccgtggatctaatcaagacctacaagcacattaatgaggtttactacgcgaaaaagaaacgacgccatcaacaggggcagggtgatgactcttcacacaaaaaagaacgaaaggtttataatgatggttatgatgacgacaattatgactatattgtcaaaaacggcgaaaagtggatggaccgctacgagatcgactcgctgattgggaaagggtcatttggtcaggtggtcaaggcatatgatcgggtcgaacaggagtgggtggctattaagataataaaaaacaagaaggcttttctgaaccaggcgcagatcgaggtgcggttgttggagttgatgaataagcacgatactgagatgaagtattacattgtgcaccttaagcgacatttcatgttcagaaaccacctctgcctcgtgtttgaaatgctttcctacaatctttacgacctcttgaggaacactaacttcaggggagttagtttgaatttaacgaggaaatttgcccagcagatgtgtacagcattgctcttcctggcaactcctgagcttagcatcatccactgcgacttgaagcctgaaaatattctcctgtgtaatcccaagcgatctgccattaagatcgtggacttcggatcttcctgccagttaggccaacggatttatcagtatatccagtcccggttttatcgtagtcctgaagttctgctgggaatgccttacgacctggcaatcgacatgtggtccttgggctgcatcctggtggagatgcacactggggagcccttgtttagcggggcaaatgaagtggaccagatgaataaaatagtcgaggttttgggaatcccgccagctcatatattggaccaagccccaaaggcgcgaaagtttttcgaaaagctaccagatggtacatggaaccttaaaaaaacgaaagatggcaagagagagtacaagcccccaggtacacgtaaactccacaacattctgggggtcgaaaccggtggtccagggggaagaagagccggagaaagcggccacacggtagccgactacctcaaattcaaagatcttatcctgcggatgttagactatgaccctaaaacccggatccagccttattacgctcttcaacatagcttttttaagaagactgcagatgagggcaccaacactagtaactctgtatccacgtcacctgcgatggagcagagccagtcatctggcaccaccagcagcacatcttcctcttcaggagggtcttccgggacctctaatagtggcagagcccgtagcgatcccacccaccagcacagacactctggcggacactttactgccgctgtacaggccatggactgtgagacccactccccgcaggtgtcttctcatgtcgtccacctgctcgtgtctccggcaattctccgatggtctagcacgggctgtcaggttcccctcgaatag

SEQ ID NO: 233572 - DNA, 1755 bp, Artificial Sequence
  derived and/or modified sequence
atgcatacaggaggcgagacgtccgcctgcaagccgtcttccgtgagactggcacccagtttctcgttccatgccgctggcctccaaatggctgggcagatgccacactcacaccagtactctgataggcgccagcccaatatcagcgatcagcaagtctctgcccttagctacagcgaccagatacaacaaccactgacaaatcaggtgatgccagatatagttatgctgcagcggagaatgcctcaaactttccgagatcctgctactgctccactacggaagctatcagtggacctgattaaaacttataaacacattaatgaggtctattacgccaagaaaaagcgacgtcaccaacagggtcagggggacgatagctcacacaaaaaggagaggaaggtatacaacgacggctacgatgacgataactacgactacattgttaagaatggggagaaatggatggatcgctatgagattgattctctgatcggcaagggatctttcggtcaggtcgtcaaagcgtatgatcgggtggagcaagaatgggtagccataaaaataatcaaaaacaagaaggccttcctcaatcaggcccagatagaagtccgcctgttggaactaatgaacaagcacgacactgagatgaagtactatattgtgcacctaaaacgtcatttcatgtttcggaatcacctctgccttgtattcgaaatgctgagctacaatctgtacgatctgcttcgcaacactaactttagaggagtgtctctaaatctcacccgcaaattcgcgcaacagatgtgcactgctctgctgttcctcgcaacccccgagttgagcataattcattgcgacctgaaaccagagaatatcttgctgtgcaatcccaagaggtccgctataaaaatagtggactttggctccagttgccagcttggtcagaggatctatcagtatatacagagcagattttatcggtcacctgaagtattgctggggatgccttacgaccttgccatcgatatgtggtctctgggctgcattttagtggagatgcatacgggagaacctcttttttccggggctaatgaggttgaccaaatgaacaagatcgtagaggtcttgggaatcccacccgctcacatcctggaccaagccccaaaggcccgaaagttctttgagaaactgcctgacggcacgtggaatctgaagaagaccaaggacggcaagagggagtacaagccaccaggaacacgtaagcttcacaacatcctcggggtggaaacgggcggacctggaggccgtcgagccggtgagtctggacacaccgtcgccgactacctcaagttcaaggacctcattctgcggatgttggactacgatcccaagaccaggatacagccctactacgcactccagcattccttttttaaaaaaactgctgatgaggggactaatacctcgaactccgtctccacgtcacctgcgatggagcagtctcagagtagcggcacgacctcctccacatccagcagctccggcggatcctctgggactagcaacagcgggagggcaaggagcgaccccactcaccagcacagacacagcggtggacactttacggcggcagtgcaggcgatggactgcgagacgcactcaccccaggtctctagccatgtggtgcacttattggtgtcccctgcgatcctgcgttggtcttctaccggttgccaggtgcccctggaatag

SEQ ID NO: 233573 - DNA, 1626 bp, Artificial Sequence
  derived and/or modified sequence
atgcacaccggcggcgagaccagcgcctgcaagcccagcagcgtgagactggcccccagcttcagcttccacgccgccggcctgcagatggccggccagatgccccacagccaccagtacagcgacagaagacagcccaacatcagcgaccagcaggtgagcgccctgagctacagcgaccagatccagcagcccctgaccaaccaggtgatgcccgacatcgtgatgctgcagagaagaatgccccagaccttcagagaccccgccaccgcccccctgagaaagctgagcgtggacctgatcaagacctacaagcacatcaacgaggtgtactacgccaagaagaagagaagacaccagcagggccagggcgacgacagcagccacaagaaggagagaaaggtgtacaacgacggctacgacgacgacaactacgactacatcgtgaagaacggcgagaagtggatggacagatacgagatcgacagcctgatcggcaagggcagcttcggccaggtggtgaaggcctacgacagagtggagcaggagtgggtggccatcaagatcatcaagaacaagaaggccttcctgaaccaggcccagatcgaggtgagactgctggagctgatgaacaagcacgacaccgagatgaagtactacatcgtgcacctgaagagacacttcatgttcagaaaccacctgtgcctggtgttcgagatgctgagctacaacctgtacgacctgctgagaaacaccaacttcagaggcgtgagcctgaacctgaccagaaagttcgcccagcagatgtgcaccgccctgctgttcctggccacccccgagctgagcatcatccactgcgacctgaagcccgagaacatcctgctgtgcaaccccaagagaagcgccatcaagatcgtggacttcggcagcagctgccagctgggccagagaatctaccagtacatccagagcagattctacagaagccccgaggtgctgctgggcatgccctacgacctggccatcgacatgtggagcctgggctgcatcctggtggagatgcacaccggcgagcccctgttcagcggcgccaacgaggtggaccagatgaacaagatcgtggaggtgctgggcatcccccccgcccacatcctggaccaggcccccaaggccagaaagttcttcgagaagctgcccgacggcacctggaacctgaagaagaccaaggacggcaagagagagtacaagccccccggcaccagaaagctgcacaacatcctgggcgtggagaccggcggccccggcggcagaagagccggcgagagcggccacaccgtggccgactacctgaagttcaaggacctgatcctgagaatgctggactacgaccccaagaccagaatccagccctactacgccctgcagcacagcttcttcaagaagaccgccgacgagggcaccaacaccagcaacagcgtgagcaccagccccgccatggagcagagccagagcagcggcaccaccagcagcaccagcagcagcagcgtggtggagcagcactggatgcccggcgccttcagaatgaccgtgagcttcaccctggaggtgcacgacgtgcccgtgtag

SEQ ID NO: 233574 - DNA, 1755 bp, Artificial Sequence
  derived and/or modified sequence
atgcacaccggcggcgagaccagcgcctgcaagcccagcagcgtgagactggcccccagcttcagcttccacgccgccggcctgcagatggccggccagatgccccacagccaccagtacagcgacagaagacagcccaacatcagcgaccagcaggtgagcgccctgagctacagcgaccagatccagcagcccctgaccaaccaggtgatgcccgacatcgtgatgctgcagagaagaatgccccagaccttcagagaccccgccaccgcccccctgagaaagctgagcgtggacctgatcaagacctacaagcacatcaacgaggtgtactacgccaagaagaagagaagacaccagcagggccagggcgacgacagcagccacaagaaggagagaaaggtgtacaacgacggctacgacgacgacaactacgactacatcgtgaagaacggcgagaagtggatggacagatacgagatcgacagcctgatcggcaagggcagcttcggccaggtggtgaaggcctacgacagagtggagcaggagtgggtggccatcaagatcatcaagaacaagaaggccttcctgaaccaggcccagatcgaggtgagactgctggagctgatgaacaagcacgacaccgagatgaagtactacatcgtgcacctgaagagacacttcatgttcagaaaccacctgtgcctggtgttcgagatgctgagctacaacctgtacgacctgctgagaaacaccaacttcagaggcgtgagcctgaacctgaccagaaagttcgcccagcagatgtgcaccgccctgctgttcctggccacccccgagctgagcatcatccactgcgacctgaagcccgagaacatcctgctgtgcaaccccaagagaagcgccatcaagatcgtggacttcggcagcagctgccagctgggccagagaatctaccagtacatccagagcagattctacagaagccccgaggtgctgctgggcatgccctacgacctggccatcgacatgtggagcctgggctgcatcctggtggagatgcacaccggcgagcccctgttcagcggcgccaacgaggtggaccagatgaacaagatcgtggaggtgctgggcatcccccccgcccacatcctggaccaggcccccaaggccagaaagttcttcgagaagctgcccgacggcacctggaacctgaagaagaccaaggacggcaagagagagtacaagccccccggcaccagaaagctgcacaacatcctgggcgtggagaccggcggccccggcggcagaagagccggcgagagcggccacaccgtggccgactacctgaagttcaaggacctgatcctgagaatgctggactacgaccccaagaccagaatccagccctactacgccctgcagcacagcttcttcaagaagaccgccgacgagggcaccaacaccagcaacagcgtgagcaccagccccgccatggagcagagccagagcagcggcaccaccagcagcaccagcagcagcagcggcggcagcagcggcaccagcaacagcggcagagccagaagcgaccccacccaccagcacagacacagcggcggccacttcaccgccgccgtgcaggccatggactgcgagacccacagcccccaggtgagcagccacgtggtgcacctgctggtgagccccgccatcctgagatggagcagcaccggctgccaggtgcccctggagtag

SEQ ID NO: 233575 - DNA, 3096 bp, Artificial Sequence
  derived and/or modified sequence
aaaaataactcatattgtctctgaggttcttttccagtgaagtgtttagtattgctgctatttggagtacaaagttggagcttttaaagaacctgggagttcaaaagtataaggagaaataaatgaaaagcagaaatattttgaggcaataagtatagactcaaatctatattatgacccacttgtagcaccacttggaattctaccaataagagatttatttgggcaaactataatggttgttggaaattgcaaatcttagtgtgaattattttagtccagttggtttctttctttctcttacctgaaatgaactatactgaggcaataggagctttgtatagtaatttaggagtgtaaaacaacttagggaaaaggattattaagcaggatgattgggatgacatcatgtgaaatttaggaattggaggcattgggaattgagagggtgctaacaaaggaaaacagcttattttagaatttgtctggaggatgtagaattgaagaagttttggtatttcttctgcagcggccccagtgcccttgaccaggaacatctcttggagtcagtagttttcatgaggctgacctaggaacttggccaacatatgcaacattgttctatttaaaatattccttgaattaaattcgatagtatcaatttaaaacataaagttttcactcaactcctttagaagttagattttagcttgtacttgtctttacctcttctgctgattatcagttgacaacactgagattactttcattttcctgtaagtcattatgaatttttctggtcaaccatgagttatcagtggaagcaataagtaggaagtactgtaaaagaattacaataaaataagagaaaccacttggagagcaagagggcttgtggacttgggggagcggttgtgagaaatgtctcagaacttaatttacaaataacattggtagattgacatgttgtctttcctataaagtaactttacctctgtcttaatagtaaactactatgaaagtgaattcgtgttcctcttgatttgtgaactgatgaaaattacaaaatgtggagttttttccccagataaagtaaatggtggaatattcaggtttatttgatacctagaaaatacctgaaattttccgtggtaataggcacattttgaaactgttttttttttctctgacaattgaatatattttatatatagttgattttgattattgaagactaaggaaaatttaagtttgaatgttagaaaatgaattttgcaaatttgaagtaattttattctttatgttttgggattgtagttatgttagatattcctcagttggggtaattgtcttgcatcattatctcttatcataatctgtttttcttcacacagtgttatagttttgccgctggactcttccctcccttcccccaccccatcaggatgatatgagacttgaaagaagacgatgcatacaggaggagagacttcagcatgcaaaccttcatctgttcggcttgcaccgtcattttcattccatgctgctggccttcagatggctggacagatgccccattcacatcagtacagtgaccgtcgccagccaaacataagtgaccaacaggtttctgccttatcatattctgaccagattcagcaacctctaactaaccaggtgatgcctgatattgtcatgttacagaggcggatgccccaaaccttccgtgacccagcaactgctcccctgagaaaactttctgttgacttgatcaaaacatacaagcatattaatgaggtttactatgcaaaaaagaagcgaagacaccaacagggccagggagacgattctagtcataagaaggaacggaaggtttacaatgatggttatgatgatgataactatgattatattgtaaaaaacggagaaaagtggatggatcgttacgaaattgactccttgataggcaaaggttcctttggacaggttgtaaaggcatatgatcgtgtggagcaagaatgggttgccattaaaataataaagaacaagaaggcttttctgaatcaagcacagatagaagtgcgacttcttgagctcatgaacaaacatgacactgaaatgaaatactacatagtgcatttgaaacgccactttatgtttcgaaaccatctctgtttagtttttgaaatgctgtcctacaacctctatgacttgctgagaaacaccaatttccgaggggtctctttgaacctaacacgaaagtttgcgcaacagatgtgcactgcactgcttttccttgcgactccagaacttagtatcattcactgtgatctaaaacctgaaaatatccttctttgtaaccccaaacgcagtgcaatcaagatagttgactttggcagttcttgtcagttggggcagaggatataccagtatattcagagtcgcttttatcggtctccagaggtgctactgggaatgccttatgaccttgccattgatatgtggtccctcgggtgtattttggttgaaatgcacactggagaacctctgttcagtggtgccaatgaggtagatcagatgaataaaatagtggaagttctgggtattccacctgctcatattcttgaccaagcaccaaaagcaagaaagttctttgagaagttgccagatggcacttggaacttaaagaagaccaaagatggaaaacgggagtacaaaccaccaggaacccgtaaacttcataacattcttggagtggaaacaggaggacctggtgggcgacgtgctggggagtcaggtcatacggtcgctgactacttgaagttcaaagacctcattttaaggatgcttgattatgaccccaaaactcgaattcaaccttattatgctctgcagcacagtttcttcaagaaaacagctgatgaaggtacaaatacaagtaatagtgtatctacaagccccgccatggagcagtctcagtcttcgggcaccacctccagtacatcgtcaagctcagtggtggagcagcactggatgccaggtgcctttagaatgaccgtatcatttaccctagaggttcatgacgttcctgtctaa

SEQ ID NO: 233576 - DNA, 5498 bp, Artificial Sequence
  derived and/or modified sequence
cgaggctgagactcaccggaggaagcggcgcgagcgccccgccatcgtcccggctgaagtgcagtggcacgatcataggtggtcactacagtctcagattcctgggcttaagcagtcttcccacctcagcctccccagtagctgggattacagtgttatagttttgccgctggactcttccctcccttcccccaccccatcaggatgatatgagacttgaaagaagacgatgcatacaggaggagagacttcagcatgcaaaccttcatctgttcggcttgcaccgtcattttcattccatgctgctggccttcagatggctggacagatgccccattcacatcagtacagtgaccgtcgccagccaaacataagtgaccaacaggtttctgccttatcatattctgaccagattcagcaacctctaactaaccaggtgatgcctgatattgtcatgttacagaggcggatgccccaaaccttccgtgacccagcaactgctcccctgagaaaactttctgttgacttgatcaaaacatacaagcatattaatgaggtttactatgcaaaaaagaagcgaagacaccaacagggccagggagacgattctagtcataagaaggaacggaaggtttacaatgatggttatgatgatgataactatgattatattgtaaaaaacggagaaaagtggatggatcgttacgaaattgactccttgataggcaaaggttcctttggacaggttgtaaaggcatatgatcgtgtggagcaagaatgggttgccattaaaataataaagaacaagaaggcttttctgaatcaagcacagatagaagtgcgacttcttgagctcatgaacaaacatgacactgaaatgaaatactacatagtgcatttgaaacgccactttatgtttcgaaaccatctctgtttagtttttgaaatgctgtcctacaacctctatgacttgctgagaaacaccaatttccgaggggtctctttgaacctaacacgaaagtttgcgcaacagatgtgcactgcactgcttttccttgcgactccagaacttagtatcattcactgtgatctaaaacctgaaaatatccttctttgtaaccccaaacgcagtgcaatcaagatagttgactttggcagttcttgtcagttggggcagaggatataccagtatattcagagtcgcttttatcggtctccagaggtgctactgggaatgccttatgaccttgccattgatatgtggtccctcgggtgtattttggttgaaatgcacactggagaacctctgttcagtggtgccaatgaggtagatcagatgaataaaatagtggaagttctgggtattccacctgctcatattcttgaccaagcaccaaaagcaagaaagttctttgagaagttgccagatggcacttggaacttaaagaagaccaaagatggaaaacgggagtacaaaccaccaggaacccgtaaacttcataacattcttggagtggaaacaggaggacctggtgggcgacgtgctggggagtcaggtcatacggtcgctgactacttgaagttcaaagacctcattttaaggatgcttgattatgaccccaaaactcgaattcaaccttattatgctctgcagcacagtttcttcaagaaaacagctgatgaaggtacaaatacaagtaatagtgtatctacaagccccgccatggagcagtctcagtcttcgggcaccacctccagtacatcgtcaagctcaggtggctcatcggggacaagcaacagtgggagagcccggtcggatccgacgcaccagcatcggcacagtggtgggcacttcacagctgccgtgcaggccatggactgcgagacacacagtccccaggtgagctcgcacgtggttcatttgcttgtgtcacctgccattctcaggtggagcagcactggatgccaggtgcctttagaatgaccgtatcatttaccctagaggttcatgacgttcctgtctaaggaaatgtgcgtcagcaatttcctgctcctcttggttggtcaggcactgaagctcctacacaggtcactgttgaaactcatcctgttcaagaaacaacctttcatgtagcccctcaacagaatgcattgcatcatcaccatggtaacagttcccatcaccatcaccaccaccaccaccatcaccaccaccatggacaacaagccttgggtaaccggaccaggccaagggtctacaattctccaacgaatagctcctctacccaagattctatggaggttggccacagtcaccactccatgacatccctgtcttcctcaacgacttcttcctcgacatcttcctcctctactggtaaccaaggcaatcaggcctaccagaatcgcccagtggctgctaataccttggactttggacagaatggagctatggacgttaatttgaccgtctactccaatccccgccaagagactggcatagctggacatccaacataccaattttctgctaatacaggtcctgcacattacatgactgaaggacatctgacaatgaggcaaggggctgatagagaagagtcccccatgacaggagtttgtgtgcaacagagtcctgtagctagctcgtgactacattgaaacttgagtttgtttcttgtgtgtttttatagaagtggtgttttttttccaaaaacaaagtgcaaagctgcttgaatcaggaggagattaacacactgaaccgctacaagagggcaaagctgattttttttttaacttgaaaagattgcaaagggacattgaagtgtttaaaagagccatgtccaaacccatcttcatggatagctcagaggtatcctctttttgctcccccattttaacttgccacatcccagtcacagtggggtttttttgtctttctattcagcaaaagttaatattcagatgttggtcttggtcatttgccaactaattttaaagtaaaaggcactgcacataatttgcataaagggccccatgagggtgttttttttttttctttttgtcccccccatccccctttttttttgttttgttctgttttgttttgggtgggagggtgggaaatttgggtttttaagtcctctaaacacacttgggcacggaaatgcagtactgtaaggaagagggacctccagcttccacaaacaccatcttcagctgtatgaaagggacggttgtggtgaagtttgtcaggcacagtaagcatgctgagtggcggggatcagaactctcctatctgaacctactgaggagcaaagcagcaattacatgggatcctgtggctctcccgttgcagaggccacaggaagataggatggaacgtgactggtctcctaaccaaggtgcactgagaagcaatcaacgggtcggtcgtggccagtcctggggaggtctgagtggtggtctttgggataacctttggccttatggatttggactcgaaattagaagagcctaccatttcagatgcaatcacttttggacatgcttttgcagacagtccttaatgctgaaaacacagagaatgggtaattcaagaggcctttcttttaaaatagacttttgtgacccactaattgtaaggtattgcaaggtcactttgcgtgtgtcataaagttgacttccttattggttgaaggtcacagaagtagtggtttgctttgatggaaatagctacagctgtgtcccttcctgctttttactttttcttttgctttttctcggcacgtggtatctccaccatttcttctgcacaaagatgtcttctgttcatcctgaacatttttaaaaaatgcagaattttatgtgactgcttttttgcctcacaattatgctgtgaattttacaaaaatttattttcttttttgataatttattgtaccaaagctgtttttatagcacatagatgtctgtaaccaataatgtagcagttctgcactttgacacaaggtgtaactagaccatttttaaatgtcagttgaaaattatggctgtactattgcttaaacaaaactggaactgttgttgaatccatagccaatacatttacagcaatctgtgtactgaacatagtagattgacatctaattcaagattacaacatctgttacattctaagtgtgttcaggcttctgaaggtaaagggacactggatccagaagctatggaaccagcagttgattcttgtattcctgattaacctacttgtaaacttgaaagcaagaccttgattgcaccaacaggtccagagtatgagtgcaagcaaagcagaactctcatgcgtgacctgagcagacaggctggtatttaacaggtgcctcgtgttgagattacgctgccttaatgtaacacagtctggcagttgctaaatttgtgttcccattttaaattgaccaattttggggtgtgacacttttgagcggttgaattgggagaatgaagataagtaatttacctgtccaggatcaaaagaagcctagaaaagaagcagtaatctacctctgccgataacctgtttaagatgactcagcagaacaccgcgtttcattctattggtcaattccatgtggctgactaggtcaattttttttctgaacaaaagcaggtttttatatgtaaacagtgagaaaagaaaggctaaacactatgtaaatgtgaatggaaacttggaaatactcgtttttataaactacaaaaactttttgttgtttatcaggaaatccatatttattttgtaattaactgtcaagcctgtggatgatttttttgaacttggtagttcataaaggtttacagtgaataaaaggatatcatcttgagtatagcaatatcaaaaggaattcagtagttactgctgtttaggaatataaggttaagatatcatatgggtcaggtcattttttttttctgtgctggttgccacatcttagcaagcaccaaaaaactaaagcagtttttaaaccgatatttacgtaaagaaaatcataaaatccaatgcttctgcatactgtgttatgttacagtccagttttgtgtgctttactacacagtttggttacaggacttctgtgcattgtaaacataaacagcatggaaaaggttaaatacctgtgttcagattgtaagatctagtccggacttgctgtgtatattgtaacgttaaatgaaaaaagaacccccctttgtattatagtcatgcggtcttatgtatgataaacagttgaataatttgtcctcagactctttactatgcttttttaaaaattaatttaagaaaaatgtaaacatagtaaaaatcttcctatgcaattaaactggtccaggtctggtaggtatagtatcaaagttgagttaaatgtgtaaaaaggaaactatttgagatacattgacataggcatcagcaatctctgaaagtaaaaattggaggtttaacagat

SEQ ID NO: 233577 - DNA, 3225 bp, Artificial Sequence
  derived and/or modified sequence
aaaaataactcatattgtctctgaggttcttttccagtgaagtgtttagtattgctgctatttggagtacaaagttggagcttttaaagaacctgggagttcaaaagtataaggagaaataaatgaaaagcagaaatattttgaggcaataagtatagactcaaatctatattatgacccacttgtagcaccacttggaattctaccaataagagatttatttgggcaaactataatggttgttggaaattgcaaatcttagtgtgaattattttagtccagttggtttctttctttctcttacctgaaatgaactatactgaggcaataggagctttgtatagtaatttaggagtgtaaaacaacttagggaaaaggattattaagcaggatgattgggatgacatcatgtgaaatttaggaattggaggcattgggaattgagagggtgctaacaaaggaaaacagcttattttagaatttgtctggaggatgtagaattgaagaagttttggtatttcttctgcagcggccccagtgcccttgaccaggaacatctcttggagtcagtagttttcatgaggctgacctaggaacttggccaacatatgcaacattgttctatttaaaatattccttgaattaaattcgatagtatcaatttaaaacataaagttttcactcaactcctttagaagttagattttagcttgtacttgtctttacctcttctgctgattatcagttgacaacactgagattactttcattttcctgtaagtcattatgaatttttctggtcaaccatgagttatcagtggaagcaataagtaggaagtactgtaaaagaattacaataaaataagagaaaccacttggagagcaagagggcttgtggacttgggggagcggttgtgagaaatgtctcagaacttaatttacaaataacattggtagattgacatgttgtctttcctataaagtaactttacctctgtcttaatagtaaactactatgaaagtgaattcgtgttcctcttgatttgtgaactgatgaaaattacaaaatgtggagttttttccccagataaagtaaatggtggaatattcaggtttatttgatacctagaaaatacctgaaattttccgtggtaataggcacattttgaaactgttttttttttctctgacaattgaatatattttatatatagttgattttgattattgaagactaaggaaaatttaagtttgaatgttagaaaatgaattttgcaaatttgaagtaattttattctttatgttttgggattgtagttatgttagatattcctcagttggggtaattgtcttgcatcattatctcttatcataatctgtttttcttcacacagtgttatagttttgccgctggactcttccctcccttcccccaccccatcaggatgatatgagacttgaaagaagacgatgcatacaggaggagagacttcagcatgcaaaccttcatctgttcggcttgcaccgtcattttcattccatgctgctggccttcagatggctggacagatgccccattcacatcagtacagtgaccgtcgccagccaaacataagtgaccaacaggtttctgccttatcatattctgaccagattcagcaacctctaactaaccaggtgatgcctgatattgtcatgttacagaggcggatgccccaaaccttccgtgacccagcaactgctcccctgagaaaactttctgttgacttgatcaaaacatacaagcatattaatgaggtttactatgcaaaaaagaagcgaagacaccaacagggccagggagacgattctagtcataagaaggaacggaaggtttacaatgatggttatgatgatgataactatgattatattgtaaaaaacggagaaaagtggatggatcgttacgaaattgactccttgataggcaaaggttcctttggacaggttgtaaaggcatatgatcgtgtggagcaagaatgggttgccattaaaataataaagaacaagaaggcttttctgaatcaagcacagatagaagtgcgacttcttgagctcatgaacaaacatgacactgaaatgaaatactacatagtgcatttgaaacgccactttatgtttcgaaaccatctctgtttagtttttgaaatgctgtcctacaacctctatgacttgctgagaaacaccaatttccgaggggtctctttgaacctaacacgaaagtttgcgcaacagatgtgcactgcactgcttttccttgcgactccagaacttagtatcattcactgtgatctaaaacctgaaaatatccttctttgtaaccccaaacgcagtgcaatcaagatagttgactttggcagttcttgtcagttggggcagaggatataccagtatattcagagtcgcttttatcggtctccagaggtgctactgggaatgccttatgaccttgccattgatatgtggtccctcgggtgtattttggttgaaatgcacactggagaacctctgttcagtggtgccaatgaggtagatcagatgaataaaatagtggaagttctgggtattccacctgctcatattcttgaccaagcaccaaaagcaagaaagttctttgagaagttgccagatggcacttggaacttaaagaagaccaaagatggaaaacgggagtacaaaccaccaggaacccgtaaacttcataacattcttggagtggaaacaggaggacctggtgggcgacgtgctggggagtcaggtcatacggtcgctgactacttgaagttcaaagacctcattttaaggatgcttgattatgaccccaaaactcgaattcaaccttattatgctctgcagcacagtttcttcaagaaaacagctgatgaaggtacaaatacaagtaatagtgtatctacaagccccgccatggagcagtctcagtcttcgggcaccacctccagtacatcgtcaagctcaggtggctcatcggggacaagcaacagtgggagagcccggtcggatccgacgcaccagcatcggcacagtggtgggcacttcacagctgccgtgcaggccatggactgcgagacacacagtccccaggtgagctcgcacgtggttcatttgcttgtgtcacctgccattctcaggtggagcagcactggatgccaggtgcctttagaatga

SEQ ID NO: 233578 - protein, 791 aa, Artificial Sequence
  derived and/or modified sequence
MAGTSAPGSKRRSEPPAPRPGPPPGTGHPPSKRARGFSAAAAPDPDDPFGAHGDFTADDLEELDTLASQALSQCPAAARDVSSDHKVHRLLDGMSKNPSGKNRETVPIKDNFELEVLQAQYKELKEKMKVMEEEVLIKNGEIKILRDSLHQTESVLEEQRRSHFLLEQEKTQALSDKEKEFSKKLQSLQSELQFKDAEMNELRTKLQTSERANKLAAPSVSHVSPRKNPSVVIKPEACSPQFGKTSFPTKESFSANMSLPHPCQTESGYKPLVGREDSKPHSLRGDSIKQEEAQKSFVDSWRQRSNTQGSILINLLLKQPLIPGSSLSLCHLLSSSSESPAGTPLQPPGFGSTLAGMSGLRTTGSYDGSFSLSALREAQNLAFTGLNLVARNECSRDGDPAEGGRRAFPLCQLPGAVHFLPLVQFFIGLHCQALQDLAAAKRSGAPGDSPTHSSCVSSGVETNPEDSVCILEGFSVTALSILQHLVCHSGAVVSLLLSGVGADSAAGEGNRSLVHRLSDGDMTSALRGVADDQGQHPLLKMLLHLLAFSSAATGHLQASVLTQCLKVLVKLAENTSCDFLPRFQCVFQVLPKCLSPETPLPSVLLAVELLSLLADHDQLAPQLCSHSEGCLLLLLYMYITSRPDRVALETQWLQLEQEVVWLLAKLGVQSPLPPVTGSNCQCNVEVVRALTVMLHRQWLTVRRAGGPPRTDQQRRTVRCLRDTVLLLHGLSQKDKLFMMHCVEVLHQFDQVMPGVSMLIRGLPDVTDCEEAALDDLCAAETDVEDPEVECG

SEQ ID NO: 233579 - protein, 46 aa, Artificial Sequence
  derived and/or modified sequence
MSKNPSGKNRETVPIKDNFELEVLQAQYKELKEKLCKKADTSYHHL

SEQ ID NO: 233580 - DNA, 2376 bp, Artificial Sequence
  derived and/or modified sequence
atggccggtactagtgccccgggctccaagcggcggagcgagcctcctgcacccaggcctggccccccccctggcacgggacacccgcccagcaaaagagcccggggattctccgcagctgcagctcccgatccagacgaccccttcggagctcacggcgactttactgctgacgatctagaagagctggacacgctggcatcacaggctctctcccagtgtcccgctgccgcgcgcgacgtctcttcagaccataaagttcaccgcctgctggacggaatgagtaagaatccaagcggcaagaaccgggaaaccgtcccaattaaagacaatttcgaactcgaagtgttgcaggctcagtataaagagctgaaagaaaagatgaaggttatggaagaggaggtgttaattaagaacggagagattaagattctgcgagattccctgcatcagacggagtcagttctcgaagaacagcgccgctcccattttctactagagcaggagaagacgcaggccctcagcgacaaggaaaaagagtttagcaagaagcttcagagcctccagtctgaactccagttcaaagatgcagagatgaacgagcttcggacaaagcttcagacttcggaacgtgccaataagctggccgcgccctcggttagccatgtgtctccccgaaagaacccatcagtggtgattaagccagaggcgtgttccccccaattcggtaagaccagcttccctaccaaggagagtttcagtgccaacatgtctctgccacacccttgtcagactgagagcggatacaagcctttagtgggccgtgaagactcaaagcctcattcccttagaggagattctatcaagcaagaggaggcccaaaagagcttcgtagacagttggcgacaaagatctaacacacagggttcaatcctaatcaatttactcctgaaacaaccgctcataccaggaagttcactaagcctgtgccatctgctgtcctcatcctccgaatctccagccgggaccccacttcaaccacccggattcggttccacactggcaggtatgtctggtctgcgcacaactggttcttacgacggctctttttcactctcagcactgcgggaagcacagaacctggccttcactggcttaaatttagtcgctagaaacgagtgtagccgggacggagatcctgcagagggcggccggcgcgctttccccctttgtcagcttccaggcgctgtccacttcctgcccttggtgcagttttttatcggcctgcactgtcaggccctccaagatctagcagcagcaaaaaggagtggtgcccctggagattctccgacccattcctcgtgtgtctcatctggggtggaaaccaatccagaggactccgtgtgtatccttgaaggattttcagtcacagcactcagtatccttcagcatctggtatgtcacagtggcgccgtggtgtctctcctgctaagcggtgtgggggccgatagcgccgctggggaagggaataggagcctagtgcaccgacttagcgatggcgacatgactagcgccctccgcggtgtagctgacgaccaggggcagcacccacttcttaaaatgcttttgcatctgctcgcattctcttccgccgctaccggtcacctgcaagcctctgtgctaacccaatgtctgaaggttcttgtgaagcttgctgagaacacatcttgcgattttctgcccagattccagtgtgttttccaggtgttacctaagtgcctttccccggagacccccttgccatccgtgctgcttgcagtggaactgctatccttactggctgatcacgatcaactcgcccctcagctttgttctcacagcgagggttgccttctgctgttgctgtatatgtacatcacctcacgcccagaccgggtggctttagagacacagtggctgcaactcgaacaggaggtcgtgtggttgcttgccaagttgggagtgcaaagccccctcccacctgttacaggatccaattgtcagtgtaacgtagaagtggtgagggcactgactgtcatgctccatcgccaatggctgacggtacggagagccgggggtcctccgaggaccgaccagcagcgtcgaacagtgaggtgcctgagagacaccgtgctgcttctccacggactttcgcaaaaggataagctcttcatgatgcattgcgttgaggtactgcatcagtttgatcaggtgatgcccggcgttagtatgctgattagagggctgcccgacgttacagattgcgaggaagccgcccttgatgacctatgtgccgccgagaccgatgtggaagacccagaggtagaatgcggttag

SEQ ID NO: 233581 - DNA, 1995 bp, Artificial Sequence
  derived and/or modified sequence
atgaaggtcatggaagaggaagtgctaattaagaatggagagatcaaaattttgcgtgacagcctgcatcagactgaatccgtacttgaagagcagcggcgcagccactttctgctcgagcaggagaaaacccaggcactaagcgataaagaaaaggagttcagcaagaagctgcagagtctgcaaagtgaactacagtttaaagatgccgagatgaacgagctccgcactaaactgcagaccagtgagagagcaaataaacttgccgcgccctccgttagccatgtctcaccaagaaaaaacccatcagtcgtgataaaacccgaagcctgtagcccccagttcggaaagacatctttcccaaccaaggaatcttttagtgctaacatgagcttaccccacccctgccaaaccgagagcgggtataaacccctcgtcgggagggaagatagtaagccacacagtcttaggggcgattccatcaagcaggaagaagcccagaagagttttgtggactcttggcgccagcgtagcaatacccagggcagtatacttatcaacttgctactcaaacagccactcattccaggatcttccctgagtctttgtcatctgttatcttctagcagcgagtcccctgccggaacgccacttcagcctcctggatttgggtcgacgctggccggtatgtccgggctacgaacaacaggctcatacgacggttccttctctctgtccgccctcagggaggcgcagaacctggctttcaccggtttgaacttggtggcacgtaacgagtgtagtcgagatggtgatccagctgagggcggtcggagagcctttccgctttgccagttgcctggggccgttcacttcttaccgctggtgcaattctttatcgggctccattgtcaggccctacaggacctagccgcggccaagcgcagtggcgccccaggcgacagcccaactcacagctcttgcgtttcttccggtgtggaaacaaaccctgaggattctgtgtgcatcctggaagggttctcggtaactgctctatctatactgcaacatctggtttgccacagcggcgccgtggtgtccctgctgctttcaggcgtcggagccgattccgctgccggcgagggaaaccgctctctcgtccatcgcctgtcagacggcgatatgacttctgctcttcggggagttgcggacgaccaggggcagcacccattgcttaaaatgctcctgcatttgctggccttctcctctgccgccactgggcacctgcaagcatccgtcttaacacagtgtttgaaggtgctcgtcaaactagcggagaatacttcttgcgatttcctgcctcggtttcagtgcgtgtttcaggttctgccgaagtgccttagtccagagacaccactcccttctgtactgctggcagtcgagctcctgagcctgctggctgatcacgatcagctcgcaccacaactgtgcagtcacagtgagggatgcctgctcctgctcctctatatgtacattacctctcggcccgatcgagtggcactggagacccagtggctccagctggagcaagaggtggtttggctattggccaaactgggtgtgcagtctccattgccccccgtgacaggctccaactgtcagtgtaatgtcgaggttgtgcgggcactcacagttatgctgcaccgccagtggctcactgtccgaagagccggaggccctcctagaacggaccaacaaaggagaaccgtacgttgcctaagggacacagtcctcttgttgcacggcttatcacagaaagataagctgtttatgatgcactgcgttgaggttctccatcagtttgaccaggtgatgcccggggtcagtatgctcattagggggcttccggacgtgacagattgcgaagaggctgcactagacgatttatgcgcagccgagaccgacgtggaggaccctgaggttgagtgcggctag

SEQ ID NO: 233582 - DNA, 2097 bp, Artificial Sequence
  derived and/or modified sequence
atgtctaaaaacccctcgggaaaaaatcgcgagaccgttccgattaaggacaactttgagctggaagtgctccaggcgcagtacaaggagctcaaggagaagatgaaggtaatggaggaggaagttctgataaagaatggagagatcaaaatcttgagggacagcctacaccagaccgagagcgtgctcgaggagcagagaaggagccacttcttactggagcaggagaaaactcaggccttgagcgacaaagagaaggagtttagtaagaagttacagagtctccaatctgagctgcagttcaaggatgccgaaatgaacgaattaagaacgaagctccagactagtgagcgagcgaataaactggcagccccaagtgtgagccacgtgtcaccgagaaaaaacccttcggtcgtcattaaacctgaggcctgctctccccagtttggaaagacgagctttcctacaaaggagagctttagcgccaacatgagtctcccgcacccatgccaaaccgaaagtgggtacaagccactggtcggaagagaagactcaaagccccactcactccggggtgactctatcaaacaggaggaagcccagaagagctttgtcgactcctggaggcagcggtctaacacccaaggttctatcctgataaacctgcttctcaagcagccccttatccctggctcctctctgagcctgtgccacctgctgagttcttcgagcgagagcccggcggggacacctctccagccccctggcttcgggtccactcttgccgggatgtccggattgcggaccacaggttcctatgatggtagtttttctctcagcgcattgcgcgaggctcagaacttggctttcacagggcttaacctggtcgccaggaatgaatgctcacgagacggggacccagctgagggggggcgacgtgcctttccactatgtcaacttcctggcgccgtccactttctgccgttggttcagtttttcattggcctccactgccaggcacttcaggatttggccgcagcaaagaggtccggcgcacccggcgactccccaacacacagttcatgcgtgtccagtggcgtggagacgaaccctgaggactccgtgtgcatcctggaggggttttcagtcaccgcattgtcaattttgcagcatctggtttgccacagcggagccgtggtgtccctgctgctgtccggcgtgggcgccgattccgcagccggtgaagggaataggtccctggttcatcgattgtcagatggagatatgacctcggctctaaggggcgtagcggacgatcagggccagcaccctctccttaagatgctgctgcatctgcttgctttctccagcgctgcaacaggccatcttcaggcatctgtccttactcagtgtctgaaggtgctggtgaagcttgccgagaataccagctgcgattttttacctcgcttccagtgcgtttttcaggttttgccaaagtgcttatccccggagaccccattgccttcagtcctcctcgctgttgagctgttgtcgctgctcgccgatcacgaccagctggctcctcaactctgtagtcactctgagggttgcttgctgctgctactttacatgtatattacaagtaggccagatagagtggcattagagactcagtggttgcagctggaacaagaggttgtgtggttgcttgcaaaattaggtgtccagtcaccactgccgcctgtgacaggaagcaactgtcagtgcaatgttgaggtcgtgagggctcttaccgtgatgctccatagacagtggctgacagttagacgcgctggcggcccccctaggacagatcagcaacgccgaacagttcgttgtcttcgagacaccgtgctgctactgcacggcctgagccaaaaggataagctcttcatgatgcattgtgttgaggtgctgcaccagttcgatcaagtcatgccaggtgtttctatgctgatccggggcctgcctgacgtaacagactgtgaggaggctgcgctggatgacctgtgcgctgctgagacagacgtggaagatccagaagtcgagtgcggatag

SEQ ID NO: 233583 - DNA, 141 bp, Artificial Sequence
  derived and/or modified sequence
atgtcaaagaacccctctggcaagaatagagagaccgtgcccatcaaggacaattttgagctggaggtcctccaagctcagtataaggaactgaaggagaagctatgtaagaaagctgatactagttaccaccacctgtag

SEQ ID NO: 233584 - DNA, 2376 bp, Artificial Sequence
  derived and/or modified sequence
atggccggcaccagcgcccctggcagcaagagaagaagtgagcccccagccccccggcccggccccccacctggcaccggccacccccccagcaagagggcccggggcttctctgctgctgctgccccagaccctgatgacccctttggagcccacggggacttcaccgcagatgacctggaggagctggacaccctggccagccaggccctgagccagtgcccagctgctgccagagatgtgtccagtgaccacaaggtgcaccggctgctggatggcatgagcaagaaccccagcggcaagaaccgggagaccgtgcccatcaaggacaactttgagctggaggtgctgcaggcccagtacaaggagctgaaggagaagatgaaggtgatggaggaggaggtgctgatcaagaatggagagatcaagatcctgcgggacagcctgcaccagacagagagcgtgctggaggagcagaggaggagccacttcctgctggagcaggagaagacccaggccctgagtgacaaggagaaggagttcagcaagaagctgcagagcctgcagagcgagctgcagttcaaggatgctgagatgaatgagctgcggaccaagctgcagaccagcgagcgggccaacaagctggccgcccccagcgtgagccacgtgagccccaggaagaaccccagcgtggtgatcaagccagaggcctgcagcccccagtttgggaagaccagcttccccaccaaggagagcttcagcgccaacatgagcctgccccacccctgccagacagaaagtggctacaagcccctggtgggccgggaggacagcaagccccacagcctgcggggggacagcatcaagcaggaggaggcccagaagagctttgtggacagctggaggcagaggagcaacacccagggcagcatcctgatcaacctgctgctgaagcagcccctcatccctggcagcagcctgagcctgtgccacctgctgagcagcagcagcgagagccctgctggcacccccctgcagcccccaggcttcggcagcaccctggccggcatgagcggcctgcggaccaccggcagctatgatggcagcttcagcctgagcgccctgcgggaggcccagaacctggccttcaccggcctgaacctggtggccagaaatgaatgttccagagatggagaccctgctgagggcggcagaagagccttccccctgtgccagctgcccggggctgtgcacttcctgcccctggtgcagttcttcatcggcctgcactgccaggccctgcaggacctggccgccgccaagaggtctggggcccctggggacagccccacccacagcagctgtgtgagcagcggcgtggagaccaacccagaagattctgtgtgcatcctggagggcttctctgtgacagccctgagcatcctgcagcacctggtgtgccacagcggggctgtggtgtccctgctgctgagcggcgtgggcgctgacagcgctgctggggagggcaacagaagcctggtgcaccggctgagtgatggagacatgaccagcgccctgcggggcgtggctgatgaccagggccagcaccccctgctgaagatgctgctgcacctgctggccttcagcagcgctgccaccggccacctgcaggcctctgtgctgacccagtgcctgaaggtgctggtgaagctggccgagaacaccagctgtgacttcctgccccgcttccagtgtgtgttccaggtgctgcccaagtgcctgagccctgagacccccctgcccagcgtgctgctggccgtggagctgctgagcctgctggccgaccatgaccagctggccccccagctgtgcagccacagcgagggctgcctgctgctgctgctgtacatgtacatcaccagcaggccagacagagtggccctggagacccagtggctgcagctggagcaggaggtggtgtggctgctggccaagctgggcgtgcagagccccctgccccctgtgacaggcagcaactgccagtgcaatgtggaggtggtgcgggccctgactgtgatgctgcaccggcagtggctgactgtgcggcgggccggcggcccccccaggacagaccagcagaggagaacagtgcgctgcctgcgggacacagtgctgctgctgcacggcctgagccagaaggacaagctgttcatgatgcactgtgtggaggtgctgcaccagtttgaccaggtgatgcctggggtgtccatgctgatccggggcctgcctgatgtgacagactgtgaggaggccgccctggatgacctgtgtgccgctgagacagatgtggaggaccctgaggtggagtgtggctag

SEQ ID NO: 233585 - DNA, 1995 bp, Artificial Sequence
  derived and/or modified sequence
atgaaggtgatggaggaggaggtgctgatcaagaatggagagatcaagatcctgcgggacagcctgcaccagacagaatctgtgctggaggagcagaggaggagccacttcctgctggagcaggagaagacccaggccctgagtgacaaggagaaggagttcagcaagaagctgcagagcctgcagagcgagctgcagttcaaggatgctgagatgaatgagctgcggaccaagctgcagaccagcgagcgggccaacaagctggccgcccccagcgtgagccacgtgagccccaggaagaaccccagcgtggtgatcaagccagaggcctgcagcccccagtttgggaagaccagcttccccaccaaggagagcttcagcgccaacatgagcctgccccacccctgccagacagagagcggctacaagcccctggtgggccgggaggacagcaagccccacagcctgcggggggacagcatcaagcaggaggaggcccagaagagctttgtggacagctggaggcagaggagcaacacccagggcagcatcctgatcaacctgctgctgaagcagcccctcatccctggcagcagcctgagcctgtgccacctgctgagcagcagcagcgagagccctgctggcacccccctgcagcccccaggcttcggcagcaccctggccggcatgagcggcctgcggaccaccggcagctatgatggcagcttcagcctgagcgccctgcgggaggcccagaacctggccttcaccggcctgaacctggtggccagaaatgaatgttccagagatggagaccctgctgagggcggccggcgggccttccccctgtgccagctgcctggagctgtgcacttcctgcccctggtgcagttcttcatcggcctgcactgccaggccctgcaggacctggccgccgccaagaggtctggggcccctggggacagccccacccacagcagctgtgtgtcctctggagtggagaccaaccctgaggacagcgtgtgcatcctggagggcttctctgtgacagccctgagcatcctgcagcacctggtgtgccacagcggggctgtggtgtccctgctgctgtctggagtgggcgctgacagcgctgctggggagggcaacagaagcctggtgcaccggctgagtgatggagacatgaccagcgccctgcggggcgtggctgatgaccagggccagcaccccctgctgaagatgctgctgcacctgctggccttcagcagcgctgccaccggccacctgcaggcctctgtgctgacccagtgcctgaaggtgctggtgaagctggccgagaacaccagctgtgacttcctgccccgcttccagtgtgtgttccaggtgctgcccaagtgcctgagccctgagacccccctgcccagcgtgctgctggccgtggagctgctgagcctgctggccgaccatgaccagctggccccccagctgtgcagccacagcgagggctgcctgctgctgctgctgtacatgtacatcaccagcaggccagacagagtggccctggagacccagtggctgcagctggagcaggaggtggtgtggctgctggccaagctgggcgtgcagagccccctgccccctgtgacaggcagcaactgccagtgcaatgtggaggtggtgcgggccctgactgtgatgctgcaccggcagtggctgactgtgagaagagctgggggcccccccaggacagaccagcagaggagaacagtgcgctgcctgcgggacacagtgctgctgctgcacggcctgagccagaaggacaagctgttcatgatgcactgtgtggaggtgctgcaccagtttgaccaggtgatgcctggggtgtccatgctgatccggggcctgcctgatgtgacagactgtgaggaggccgccctggatgacctgtgtgccgctgagacagatgtggaggaccctgaggtggagtgtggctag

SEQ ID NO: 233586 - DNA, 2097 bp, Artificial Sequence
  derived and/or modified sequence
atgagcaagaaccccagcggcaagaaccgggagaccgtgcccatcaaggacaactttgagctggaggtgctgcaggcccagtacaaggagctgaaggagaagatgaaggtgatggaggaggaggtgctgatcaagaatggagagatcaagatcctgcgggacagcctgcaccagacagaatctgtgctggaggagcagaggaggagccacttcctgctggagcaggagaagacccaggccctgagtgacaaggagaaggagttcagcaagaagctgcagagcctgcagagcgagctgcagttcaaggatgctgagatgaatgagctgcggaccaagctgcagaccagcgagcgggccaacaagctggccgcccccagcgtgagccacgtgagccccaggaagaaccccagcgtggtgatcaagccagaggcctgcagcccccagtttgggaagaccagcttccccaccaaggagagcttcagcgccaacatgagcctgccccacccctgccagacagagagcggctacaagcccctggtgggccgggaggacagcaagccccacagcctgcggggggacagcatcaagcaggaggaggcccagaagagctttgtggacagctggaggcagaggagcaacacccagggcagcatcctgatcaacctgctgctgaagcagcccctcatccctggcagcagcctgagcctgtgccacctgctgagcagcagcagcgagagccctgctggcacccccctgcagcccccaggcttcggcagcaccctggccggcatgagcggcctgcggaccaccggcagctatgatggcagcttcagcctgagcgccctgcgggaggcccagaacctggccttcaccggcctgaacctggtggccagaaatgaatgttccagagatggagaccctgctgagggcggccggcgggccttccccctgtgccagctgcctggagctgtgcacttcctgcccctggtgcagttcttcatcggcctgcactgccaggccctgcaggacctggccgccgccaagaggtctggggcccctggggacagccccacccacagcagctgtgtgtcctctggagtggagaccaaccctgaggacagcgtgtgcatcctggagggcttctctgtgacagccctgagcatcctgcagcacctggtgtgccacagcggggctgtggtgtccctgctgctgtctggagtgggcgctgacagcgctgctggggagggcaacagaagcctggtgcaccggctgagtgatggagacatgaccagcgccctgcggggcgtggctgatgaccagggccagcaccccctgctgaagatgctgctgcacctgctggccttcagcagcgctgccaccggccacctgcaggcctctgtgctgacccagtgcctgaaggtgctggtgaagctggccgagaacaccagctgtgacttcctgccccgcttccagtgtgtgttccaggtgctgcccaagtgcctgagccctgagacccccctgcccagcgtgctgctggccgtggagctgctgagcctgctggccgaccatgaccagctggccccccagctgtgcagccacagcgagggctgcctgctgctgctgctgtacatgtacatcaccagcaggccagacagagtggccctggagacccagtggctgcagctggagcaggaggtggtgtggctgctggccaagctgggcgtgcagagccccctgccccctgtgacaggcagcaactgccagtgcaatgtggaggtggtgcgggccctgactgtgatgctgcaccggcagtggctgactgtgagaagagctgggggcccccccaggacagaccagcagaggagaacagtgcgctgcctgcgggacacagtgctgctgctgcacggcctgagccagaaggacaagctgttcatgatgcactgtgtggaggtgctgcaccagtttgaccaggtgatgcctggggtgtccatgctgatccggggcctgcctgatgtgacagactgtgaggaggccgccctggatgacctgtgtgccgctgagacagatgtggaggaccctgaggtggagtgtggctag

SEQ ID NO: 233587 - DNA, 141 bp, Artificial Sequence
  derived and/or modified sequence
atgagcaagaaccccagcggcaagaaccgggagaccgtgcccatcaaggacaactttgagctggaggtgctgcaggcccagtacaaggagctgaaggagaagctgtgcaagaaggctgacaccagctaccaccacctgtag

SEQ ID NO: 233588 - DNA, 2376 bp, Artificial Sequence
  derived and/or modified sequence
atggccggcaccagcgcccccggcagcaagcggcggagcgagccccccgcgccacgcccaggccctccccctggaacaggccatccccctagcaaacgggcacgcggtttttcggcggctgccgccccggatcccgacgacccattcggcgctcatggagattttacagcagacgatctggaagagctggacacgcttgcctcccaggctctgtcccagtgcccggctgccgcccgggacgtgagttctgatcataaggtccatcgactgctggatggtatgagcaaaaatcctagcggaaaaaatcgggagactgtgccaattaaagacaattttgagttggaggttctccaggcacagtataaagaattaaaggagaaaatgaaagttatggaagaggaggttctcatcaaaaatggcgagatcaagatactaagggatagtctccatcagacagagtcagtgctggaagagcagagaaggagccactttctactcgaacaggaaaaaacccaggccttgagcgacaaagagaaagaattctctaagaaattgcagtctctgcagtccgagttgcagttcaaagacgctgagatgaacgaactccgcaccaagctgcagacaagtgagcgggctaacaagctggcagctccctccgtcagtcacgtcagcccccgtaagaatccgtccgtggtgatcaagcccgaggcctgttccccccagttcggcaagacatcctttcccaccaaagagtccttttccgccaacatgtctctgccccatccctgtcagacagagagtggctataagcctctggttggtcgggaagattccaagcctcactcgctcaggggagattcaataaaacaggaagaggcacaaaagtcctttgtggactcatggcgccaacgctccaacacacagggctccatcctcatcaacctgcttctgaaacagccgttgatccctggttccagcctgagcctctgtcatctcctgtcgtcatcgtctgaatcccccgcaggcacacctctacagccaccaggctttggatctaccttggccgggatgagtggactgcggacgacgggatcatacgacggcagcttcagtcttagtgctctacgcgaggctcagaatctggcattcacagggttgaatttggttgccaggaatgaatgcagtcgcgacggcgaccctgctgaaggcggccgccgagcttttccattgtgtcagctccccggggctgtgcactttctcccactggtccagttcttcatcggcctccactgtcaggctttacaagacctggctgccgctaaacgcagcggcgctcccggagacagtcccactcatagctcttgcgtgtcatcaggtgtcgaaactaatcccgaagactctgtgtgtatattggagggattcagtgtgacagctctgtcaatcctccaacacctcgtatgtcactctggcgctgtggtcagcctgctgctgagcggggtgggcgctgattcggcagccggagagggaaacaggtcacttgtacaccgactctcggacggggacatgacgagtgccctccggggtgtagccgacgatcaggggcagcacccactgctcaaaatgcttctccaccttctggcgttctcatccgctgcgactgggcacttgcaggcttcagtgctcacgcaatgtttaaaggtactggtcaagttggccgaaaacacatcctgcgattttctgcctaggttccagtgcgtatttcaagtgttgccaaagtgtctgtcaccagagacaccactcccctcagttcttttagccgtagagctcttgagtttgctggcagaccatgatcagctcgctcctcagctttgttctcacagtgaggggtgcctccttctattactgtatatgtacatcacaagcagacccgacagggtggctctagaaacccagtggcttcagttggagcaggaagtggtctggctcctggcaaagctgggggtgcagtccccattgccccccgtgactggctcaaattgccaatgcaacgtcgaagtggtccgagctctgaccgtaatgctgcaccgacagtggttgaccgtgcggagagcaggaggaccccctcgtacggaccagcaacgtcggactgtccggtgtctccgggacactgtcttactcctccatggattgtctcagaaagacaaactgttcatgatgcattgcgtggaggtgctacatcaattcgaccaggtgatgcctggggtgtccatgctgatcaggggcctgccagacgtcactgattgtgaagaagctgcactggatgatctctgtgcggccgagacagacgttgaggaccccgaggtagaatgcggttag

SEQ ID NO: 233589 - DNA, 1995 bp, Artificial Sequence
  derived and/or modified sequence
atgaaggtgatggaggaggaggtgctgatcaagaacggcgagatcaaaattctgcgagatagtctccaccaaacagagtctgttctggaagagcaacgacgaagccacttcctgctggagcaggaaaagacccaggcactctccgataaggagaaggaattcagcaagaagctgcagtctctgcagtccgaactccagttcaaggacgctgagatgaatgagctccgaacaaagctgcagaccagcgagagagcaaacaagctggcggccccttctgttagccatgtatcccctaggaaaaacccctccgttgtcatcaagcccgaagcatgctccccacagttcgggaagacatcgttccctaccaaggagagtttcagtgctaacatgagcttgccccacccttgtcagaccgaaagcggatataaacccctcgttggtagggaagatagtaagccccactcactacgcggcgatagtataaagcaagaggaagctcagaagagctttgtggactcatggagacagcggtctaatactcaaggttctatcttgatcaatctacttctgaagcagcccttgatccctgggagttcactcagcctgtgccacttgttatcgtctagtagcgagagtcccgcagggacccctttgcagccccctggcttcggatcgacgttggctggcatgtcagggctgcggaccacaggatcatatgatggctctttttcattgagcgccctccgcgaagcccagaatttggcattcaccgggctcaacctcgtcgccagaaacgaatgctcccgagacggcgaccccgccgagggggggcgcagggctttccccctgtgtcagttaccaggggcagtacactttctccctctggtccaatttttcatcggcctccattgccaggccctgcaggatttggccgctgcaaagagatctggtgccccaggagactctccgacgcattccagctgcgtgtcatccggggtggagacaaatcccgaagacagcgtatgcatacttgaaggtttctcagtgaccgccctgagcatcttgcaacatttggtgtgccactccggggcagttgtgtccctcctgcttagcggagtcggtgctgactctgccgccggagaagggaatcggagtctggtccataggctgtctgatggtgatatgacttcggccctgcgaggcgtagcagatgaccaaggacagcaccccctccttaagatgctgcttcacctcctggctttttcctccgccgcgacgggtcacttgcaggctagtgtgctgactcaatgtctaaaggttctggtcaagttggcagagaacacttcatgcgactttctgcctcggttccaatgtgtctttcaagtgttacccaagtgtctgagtccggaaacgccattgccatctgttctgctggccgttgagttgctatcacttctggctgaccatgaccagctcgccccgcagctttgctctcactcagaaggttgtctgcttctgctgttatatatgtatatcaccagcagaccggaccgggtagctctcgaaacccagtggctgcagctcgagcaggaggtggtgtggttgttggctaaacttggcgtccagtctccactaccccctgtgactggaagcaactgccaatgcaatgtggaagtggtgcgcgcgttgactgtgatgctccaccgccagtggttaaccgtgcggagagccgggggcccaccaaggacagaccagcaacggagaacagttcggtgtcttcgggacactgtgctgctcttacatggactgagccagaaggacaaactctttatgatgcactgcgtggaggtgctgcatcaattcgaccaagtaatgccaggagtgtctatgctaatccgggggcttcctgatgtaactgattgcgaggaggcggcgctcgacgatctctgcgccgccgagaccgatgttgaggaccccgaagtggagtgtggatag

SEQ ID NO: 233590 - DNA, 2097 bp, Artificial Sequence
  derived and/or modified sequence
atgagcaagaaccccagcggcaagaaccgggagaccgtgcccatcaaagacaactttgagctggaggttcttcaggcgcagtacaaggaacttaaagaaaaaatgaaagtaatggaggaggaggtgctaattaagaatggagagattaaaatactgagagatagcttgcatcagacagagagcgtgctggaggagcaacgccgtagccactttctgctggaacaggaaaagacgcaggctctttccgacaaggaaaaggagttttctaaaaagctgcagtcactgcagtctgagctgcagttcaaggacgccgaaatgaacgaactgcgcacaaagcttcagaccagcgaaagggccaataagttggcggcgccttctgtttctcacgttagtcctcgcaaaaacccttcggtagtcatcaaaccagaagcatgtagcccacagtttggcaaaacctcattccccaccaaggagagcttctcagcaaatatgagcctgccgcatccgtgccaaaccgagagcgggtacaagcccctggtgggcagggaggactcaaagccccactcactacgcggggatagcataaaacaggaggaagctcaaaaatcttttgttgattcttggcgacaacggtcaaacacacagggctcaattctgatcaatctgctcctgaaacagcccttaattccaggtagcagtctctccctgtgccatcttctgtcctcatcatccgagtctcccgctggaacgccactacaacctccaggcttcggctcaaccttagcaggaatgtcgggactgcgaacgactggctcgtacgatggcagctttagcctaagtgcattacgcgaagcacaaaacctggcatttacgggattgaacctagtcgcccgaaatgaatgttcgagggacggagatcccgcggagggcggccgtcgggctttccctctttgtcagctccctggggccgttcacttcctgcccctggtgcaattcttcatcggcctgcactgtcaggcactgcaggatcttgcagcagcgaaacgcagcggggccccaggcgacagcccaacccactccagctgcgtgtcctccggcgtggaaaccaatcccgaggacagcgtctgtatcctcgagggatttagtgttacagccctatctattctgcaacaccttgtgtgccatagcggcgccgtggtaagtcttctgctctccggtgtgggcgcagatagcgccgccggggaggggaatcggagtcttgtccacaggctgtcggatggagacatgactagcgccctgaggggcgttgccgacgaccagggccaacaccctctcctcaaaatgctgttacatttgctggctttctcttcagctgcaaccgggcatctgcaagcctccgttctgactcagtgccttaaagttctggtgaagctggccgagaatactagttgcgactttttgccacgctttcagtgtgtgttccaagtgctccctaaatgtttgtctcccgagacgcctttgccgagcgttttactagctgtggagctgttatctttactggcagatcacgaccagcttgcgccacagctgtgtagccactccgaggggtgtctcctgctcctgctctacatgtacatcacatcaaggccagatagggtagccttggagacgcaatggctacagctggaacaggaggtcgtttggctgcttgcgaaacttggggtccagtctcctctgccacctgtgactggtagcaactgccagtgcaatgtagaggtggtacgggccttgactgtaatgctgcatcggcaatggctaacagtgcggagagctggcgggccaccaagaacagatcagcaacgaaggacagtccgctgtctcagggacactgtcctgctgctccatggcctctctcagaaggataagctttttatgatgcattgtgtcgaagtcctccaccaattcgaccaggtgatgcccggggtctctatgctcatccgtgggctgcccgacgtgacagactgtgaggaggccgcgcttgatgatctgtgcgcggccgagactgacgtggaagatcctgaagtggagtgcggctag

SEQ ID NO: 233591 - DNA, 141 bp, Artificial Sequence
  derived and/or modified sequence
atgagcaagaaccccagcggcaagaaccgggagaccgtgcccatcaaggacaattttgaactggaggtgcttcaggcgcaatacaaggagctgaaggagaaactctgcaagaaggctgatacgagctatcatcacctgtag

SEQ ID NO: 233592 - DNA, 2376 bp, Artificial Sequence
  derived and/or modified sequence
atggcgggtacctctgccccaggcagcaagagaagatcggaaccaccagcgcctagacctgggcctcccccaggtactggccatcctccttctaagcgagctcgaggctttagtgccgctgctgcccctgaccccgacgatccatttggtgctcatggagacttcacagccgacgacctggaagaattagacacccttgcatcacaagctctgtcccaatgcccagcagccgctagggacgtgagctcagatcataaggttcacagactcctcgacggtatgtcgaaaaatccctcaggtaaaaaccgggagactgtgccgattaaggacaactttgaacttgaggtgcttcaagctcagtataaggagttgaaggagaaaatgaaggtaatggaagaggaagtgctgattaagaacggggagatcaaaatccttcgggactctcttcaccagacagaatccgtactggaggagcagaggagaagtcacttcctcttagagcaggagaagacccaagccctgtcggataaggagaaggagttttctaagaaacttcaatctctgcagtccgagctccagtttaaggatgcagaaatgaacgaactgagaacgaaactccagactagcgagcgagcgaataagctcgctgctcccagtgtctctcatgtgtcgcccaggaagaaccccagcgtggtgatcaaaccagaagcttgctcgccccagttcggaaaaacttccttccccactaaagagtctttttcagccaatatgtccctgccgcacccatgccagacggagagtggatataaaccactagtcgggagagaagatagcaagccgcacagcctccggggtgatagcataaagcaagaagaggcccagaagtctttcgtggattcctggcgtcagagatcaaatacccagggctccatcctgattaacctgttgctgaaacagcctctgattcctggctcctccttgtctctctgtcacctgcttagctcatcttctgagagccccgctggcacccctttgcaaccaccgggatttggatctaccctcgccggtatgagcggtttgcgcaccactggatcatatgacgggtccttttccctctccgctctcagggaagcacaaaacctcgccttcactggtctgaatttagtggcgcgtaatgagtgctctcgggacggggaccccgctgagggaggccgaagagccttcccactttgtcaactcccaggggctgtacattttctgccgctggttcagttcttcatcggtctgcactgtcaagcactccaggatctggcagccgctaaacgcagcggtgcaccgggagattctcccacccattcatcttgtgtcagcagcggcgtggagactaatccagaggattctgtttgcatacttgaggggttttctgtgacggctctgtcgattctccagcacctggtgtgccacagcggagctgttgtaagcctgctattgagcggcgtgggcgctgatagtgccgctggtgaaggcaacaggagcttggtgcacaggctttcagatggagacatgacttcagccctcagaggtgtggcggatgaccagggccaacatcctctgttaaaaatgttacttcacctgctggcgttcagctccgctgccaccggccacctgcaggccagcgtgctgacacagtgtcttaaggtcctggtcaagcttgccgagaacactagctgcgacttccttcctaggttccaatgcgtgttccaggtgctgcccaagtgtctcagtcccgagaccccccttccctcagttctgctcgccgttgaactccttagcttactggccgatcatgatcagctggcccctcaactgtgctcacactcagagggctgtctccttttactcctctatatgtacatcaccagcagacctgaccgggtggctttggaaacccagtggctgcaactggagcaggaagtggtctggctgctggccaagcttggtgtgcagagtcctttgccgccagtcaccgggagtaactgccaatgcaacgtggaagtggttcgcgcattgaccgtaatgctacaccggcaatggctaaccgtccggagggcaggtggtcctcctcggactgatcaacaaagacgtacggtccgctgcctccgagataccgtcttactcctgcatggcctgtctcagaaggataaattattcatgatgcattgcgtggaggttctacaccaattcgaccaggtcatgcctggcgttagtatgctaattagaggactgcccgacgtgacagactgcgaggaggctgctcttgatgatctctgtgcagcagaaaccgatgtggaggaccccgaggtcgaatgtggctag

SEQ ID NO: 233593 - DNA, 1995 bp, Artificial Sequence
  derived and/or modified sequence
atgaaagtcatggaagaggaagttttgatcaagaatggggaaatcaagattttgcgggacagtctgcaccagactgaaagcgttttggaggagcagcgtagatcccatttcctgttggagcaggagaagacccaggccctgtcagataaagagaaagaattttcgaagaagctacagtctctccagtctgagctacagttcaaggatgcagagatgaatgaactccggaccaagttgcagacctcagaaagggctaataagctggccgcaccaagtgtgtcgcacgtctcaccacgaaagaaccccagcgttgtcattaagccagaagcctgtagcccacagttcggcaaaacgtcgtttcccactaaagaaagctttagcgccaacatgtctttgccacacccttgtcagacagaatcaggatataagcctctcgtgggacgagaagatagcaagccccattccttacgaggcgattcgataaagcaggaggaggcacagaagtccttcgtggattcttggcggcagcgatctaacacccagggatccatcctgatcaacctgctacttaagcagccgctgatccccggatcgagtttgtcgttgtgtcatctgctgagctcgtccagtgagagccccgctggtactcctctgcagcccccaggatttggaagcactcttgctggcatgtccggcctgaggacaaccggatcctatgatggctcattcagcctttctgccctccgcgaggcacaaaacctggcgtttactggcctaaacctagtggccaggaatgagtgttctcgcgacggagatccagcagagggcggacgacgtgcctttcctctgtgtcagctgcccggagctgtgcacttcctcccactcgtgcaattcttcattggactccactgccaggccctgcaagacctggctgccgctaagcgcagtggggcacctggggatagcccaactcactcgagttgtgtgtctagcggcgtcgagacaaatccggaagatagtgtttgtattctcgagggcttcagtgtgaccgcactgtcgatcctgcagcacctggtatgccatagcggcgctgtggtgtctctgcttctgtcaggggtaggcgctgattccgccgctggagagggaaacaggtccctcgtccacagattgtctgacggggatatgacaagtgcacttcgcggagtcgccgacgaccagggacagcaccctctgctcaagatgctcctgcacctgctggcctttagtagcgccgctacaggccatttacaggccagtgtcctgacccagtgtctgaaggtgctggttaagctggccgagaatacttcatgtgattttttacctaggtttcagtgcgtgttccaagtgttacctaaatgtctgtctccagaaaccccacttcctagcgtactgctggccgtagagctcttaagcctccttgccgatcatgaccagttggcccctcagctgtgctctcacagcgagggctgtctgttgctgttgctttatatgtatatcacgagtcgccctgatagagtggcgctagagactcaatggctgcagctcgagcaggaagtggtctggttgttggctaagttgggtgtgcagagccctctccctccagtgaccggcagtaactgccagtgcaatgtcgaggtcgttcgggcactcacggttatgctccataggcaatggctgacagttaggagagcgggtgggcctccaaggacagatcagcagagacggacagttaggtgcttaagagacacagtgctgctgcttcatgggctgagccaaaaggacaagttatttatgatgcactgcgtggaggtgttgcatcagttcgaccaggttatgccaggtgtgtctatgttaatccgagggttgcccgacgtcacagactgtgaggaagccgcattggacgatctgtgcgctgcggaaactgatgttgaggatccagaagtagaatgtggttag

SEQ ID NO: 233594 - DNA, 2097 bp, Artificial Sequence
  derived and/or modified sequence
atgagtaagaatccctctgggaaaaatcgggagaccgttccgatcaaagacaactttgagctggaagtgttgcaggcccagtataaagagctcaaagagaagatgaaggtaatggaggaggaggtgcttatcaaaaacggagagatcaagattttaagagactctttgcaccaaaccgaaagcgtgcttgaagagcagcggagatcacacttcctcctggagcaagagaagactcaagcactatcagataaagaaaaagagttctctaaaaaactccaatcgcttcagagtgaactgcagtttaaggacgccgaaatgaacgagctccgtaccaagttgcaaaccagcgagagggcaaataagcttgctgcaccttccgtgtcacatgtgtcacctagaaagaacccgtccgtagtcatcaagcccgaggcctgcagccctcaatttggcaaaaccagctttcctactaaagaatccttttccgcaaacatgtccctgcctcacccttgccaaactgaatcgggctataaacctctcgtggggcgagaggattcaaaaccccacagtctgcgcggagacagcatcaaacaagaagaagcccagaaaagctttgtggacagctggcgacagagatccaacactcagggctctattctgattaatctcctgctcaagcagccactgatccctgggagcagcctgtcgctgtgtcaccttctgtcttcaagttctgaatccccagcagggaccccgttgcagcctccgggtttcgggtctacgttggccggtatgtctggactgcgtaccactggatcctatgatggttctttctccctgtccgccctgcgtgaagcccagaacctagcattcacaggcctcaatttggtggccaggaacgaatgtagcagggatggcgatcctgccgaagggggtagacgtgccttcccgctgtgccaactgccgggagccgttcactttctcccgctggtccagttcttcatcgggttacactgtcaggccttgcaagacttggcggcagcaaaacggagtggggctcccggagatagtcccacacattcaagttgcgtgagttccggcgtggagactaaccccgaggacagtgtgtgcatcttagaggggtttagcgtcaccgcccttagcatcttgcagcatctcgtctgccacagtggtgcagtcgtgtctcttttgctttccggtgtgggggcagattccgccgcaggtgaaggcaacaggagtctggtgcaccgactgtctgatggtgatatgacctcggctctgcgcggtgtggccgatgatcaagggcagcaccctctgctgaaaatgctactgcacctgttagcctttagcagcgctgctaccggccatctgcaggcttcagttctcacccaatgtttaaaagtgctagttaagctcgcagagaacacttcttgtgactttctgccacggttccagtgcgtcttccaagtgttacccaaatgcctctcccccgagacgccacttccgtcggtcctgttggccgtagaattgctgtcgcttctcgccgatcacgaccagctggctcctcagctgtgttctcacagtgagggctgcctgctgttgttactatacatgtacattaccagccgacctgatcgcgtggccttagagacacagtggctgcagctagagcaagaagtggtctggctcctcgcgaaactgggagtgcagtcccctctgcctcctgtgacgggtagtaactgccaatgcaatgtggaggtcgtgcgagccttgaccgtcatgctgcatagacagtggctcaccgtacgccgagctggcggacctcctcgcaccgaccagcagcgtagaacggttcggtgtctaagggatactgtgctgctgctgcacggtctcagccaaaaggataaattgttcatgatgcattgtgtagaagtcctgcaccagttcgaccaggtgatgcccggagtttccatgttgataagggggctgcctgatgttacagattgtgaggaggccgcacttgacgatctgtgtgcagctgagaccgatgtcgaggaccctgaggtggagtgcggctag

SEQ ID NO: 233595 - DNA, 141 bp, Artificial Sequence
  derived and/or modified sequence
atgagcaagaatccctccggcaagaatcgcgaaacagtaccgataaaggataacttcgagcttgaggtcctgcaggcccagtacaaggagctgaaagagaaactctgcaagaaggctgatacctcctaccatcacctgtag

SEQ ID NO: 233596 - DNA, 2590 bp, Artificial Sequence
  derived and/or modified sequence
gggcactcgcggcggaggcaagcggcggcgcgcggacggttggtccagttctccggcctggcggcaggcaagtctagctcggcgctgtcggatacttggggtgagcggaaagcatggcggggacctccgcgccaggcagcaagaggcggagcgagcccccggcgcctcgccccggcccgccgccgggcaccgggcaccccccgagcaagcgggcccggggcttctccgcagccgctgccccggaccctgacgacccgttcggcgcgcatggggacttcactgccgacgacctggaggagcttgacaccctcgcgtcacaggccctgagccaatgtccggccgcggctcgggacgtgtccagtgatcataaggtccacagattattagatggcatgtcaaaaaatccttcagggaaaaacagagaaactgttccaattaaagataatttcgaattagaggtacttcaggcacaatacaaagaacttaaagaaaagatgaaagtaatggaagaagaagttctcattaagaatggagaaattaaaattttgcgagactcactacatcagacggaatccgttctagaggaacagagaagatcacattttcttcttgagcaagagaaaacccaagcactcagtgacaaggaaaaggaattctccaaaaagctccaatcattgcagtctgaactccagtttaaagatgcagagatgaatgaattaaggacaaagctccagaccagtgaacgagcaaataaactggctgctccctctgtttcccatgtcagtcctaggaaaaacccttctgtggttataaagccagaagcatgttctccacaatttggaaaaacatcttttcctacaaaggagtcttttagtgctaacatgtcccttccccacccctgccagacggagtcaggatacaagcctctggtgggcagagaggatagtaagccccacagtctgagaggtgactccataaaacaagaagaggcccagaaaagctttgttgacagctggagacagagatcaaacactcaaggttccattttgataaacctgctcctgaagcagcctttgatcccagggtcatccctaagcctttgccacctcctgagtagtagttctgagtctcctgctggcacccccctgcagccaccagggtttggcagtaccttggctggaatgtcaggcctcaggaccacaggttcttatgatgggtcattttccctctcagccctgagagaagcacagaacctggcattcactggactgaatctggttgcccggaatgagtgctcacgtgatggagacccagcagagggaggcagaagggccttcccactctgccagcttcctggagccgtgcatttcctcccccttgtacagttcttcatcggcttacactgccaggccctgcaggacttggcagctgctaagagaagcggagcacctggggactcaccgacacattcctcctgcgtgagctctggggtagagaccaaccctgaggactcagtgtgcatcctggaaggcttctctgtgactgcacttagcattcttcagcacctggtgtgccacagcggagcagtcgtctccctattactgtcaggagtgggggcagattctgctgctggggaaggaaacaggagcctggttcacaggcttagtgatggagatatgacctcagccctaaggggggttgctgatgaccaaggacagcacccactgttgaagatgcttcttcacctgttggctttctcttctgcagcaacaggtcaccttcaagccagtgtcctgacccagtgccttaaggttttggtgaaattagccgaaaacacttcctgtgatttcttgcccaggttccagtgtgtgttccaagtgctgccaaagtgcctcagcccagagacacccctgcctagcgtgctgctggctgttgagctcctctccctgctggcggaccacgaccagctggcacctcagctctgttcccactcagaaggctgcctcctgctgctgctgtacatgtacatcacatcacggcctgacagagtggccttggagacacaatggctccagctggaacaagaggtggtgtggctcctggctaagcttggtgtgcagagccccttgcccccagtcactggctccaactgccagtgtaatgtggaggtggtcagagcgctcacggtgatgttgcacagacagtggctgacagtgcggagggcagggggacccccaaggaccgaccagcagaggcggacagtgcgctgtctgcgggacacggtgctgctgctgcacggcctatcgcagaaggacaagctcttcatgatgcactgcgtggaggtcctgcatcagtttgaccaggtgatgccgggggtcagcatgctcatccgagggcttcctgatgtgacggactgtgaagaggcagccctggatgacctctgtgccgcggaaaccgatgtggaagaccccgaggtggagtgtggctgaggccctgagtgtccagccacatggtggcaccagcaccactcctttccttaccacatcaactgattaaagcagtgaccagcaggaactgcccagagaactgg

SEQ ID NO: 233597 - DNA, 2376 bp, Artificial Sequence
  derived and/or modified sequence
actcgcggcggaggcaagcggcggcgcgcggacggttggtccagttctccggcctggcggcaggtgatcataaggtccacagattattagatggcatgtcaaaaaatccttcagggaaaaacagagaaactgttccaattaaagataatttcgaattagaggtacttcaggcacaatacaaagaacttaaagaaaagctttgcaagaaagcagacacttcatatcaccatctgtaggtccctaagaaaaccaggaatatgtggaattttagttgtgcaagatgaaagtaatggaagaagaagttctcattaagaatggagaaattaaaattttgcgagactcactacatcagacggaatccgttctagaggaacagagaagatcacattttcttcttgagcaagagaaaacccaagcactcagtgacaaggaaaaggaattctccaaaaagctccaatcattgcagtctgaactccagtttaaagatgcagagatgaatgaattaaggacaaagctccagaccagtgaacgagcaaataaactggctgctccctctgtttcccatgtcagtcctaggaaaaacccttctgtggttataaagccagaagcatgttctccacaatttggaaaaacatcttttcctacaaaggagtcttttagtgctaacatgtcccttccccacccctgccagacggagtcaggatacaagcctctggtgggcagagaggatagtaagccccacagtctgagaggtgactccataaaacaagaagaggcccagaaaagctttgttgacagctggagacagagatcaaacactcaaggttccattttgataaacctgctcctgaagcagcctttgatcccagggtcatccctaagcctttgccacctcctgagtagtagttctgagtctcctgctggcacccccctgcagccaccagggtttggcagtaccttggctggaatgtcaggcctcaggaccacaggttcttatgatgggtcattttccctctcagccctgagagaagcacagaacctggcattcactggactgaatctggttgcccggaatgagtgctcacgtgatggagacccagcagagggaggcagaagggccttcccactctgccagcttcctggagccgtgcatttcctcccccttgtacagttcttcatcggcttacactgccaggccctgcaggacttggcagctgctaagagaagcggagcacctggggactcaccgacacattcctcctgcgtgagctctggggtagagaccaaccctgaggactcagtgtgcatcctggaaggcttctctgtgactgcacttagcattcttcagcacctggtgtgccacagcggagcagtcgtctccctattactgtcaggagtgggggcagattctgctgctggggaaggaaacaggagcctggttcacaggcttagtgatggagatatgacctcagccctaaggggggttgctgatgaccaaggacagcacccactgttgaagatgcttcttcacctgttggctttctcttctgcagcaacaggtcaccttcaagccagtgtcctgacccagtgccttaaggttttggtgaaattagccgaaaacacttcctgtgatttcttgcccaggttccagtgtgtgttccaagtgctgccaaagtgcctcagcccagagacacccctgcctagcgtgctgctggctgttgagctcctctccctgctggcggaccacgaccagctggcacctcagctctgttcccactcagaaggctgcctcctgctgctgctgtacatgtacatcacatcacggcctgacagagtggccttggagacacaatggctccagctggaacaagaggtggtgtggctcctggctaagcttggtgtgcagagccccttgcccccagtcactggctccaactgccagtgtaatgtggaggtggtcagagcgctcacggtgatgttgcacagacagtggctgacagtgcggagggcagggggacccccaaggaccgaccagcagaggcggacagtgcgctgtctgcgggacacggtgctgctgctgcacggcctatcgcagaaggacaagctcttcatgatgcactgcgtggaggtcctgcatcagtttgaccaggtgatgccgggggtcagcatgctcatccgagggcttcctgatgtgacggactgtgaagaggcagccctggatgacctctgtgccgcggaaaccgatgtggaagaccccgaggtggagtgtggctgaggccctgagtgtccagccacatggtggcaccagcaccactcctttccttaccacatcaactgattaaagcagtgaccagcaggaactgcccagagaactgg

SEQ ID NO: 233598 - DNA, 2721 bp, Artificial Sequence
  derived and/or modified sequence
gtgagtgctcctcgcggccttttgctcggagggagttgtcaaccgcgccagatccccttgatggctgtggcttcggaacctcgcggccagcactgccttttcgcctttttaaaatatgggaacaccctgatttaagcagcggttgtcttccagaaggtcctttgattttagggggaaatgcattagccaggtcaaacagccgatttgaaacacagaaggctaagttgacattttacgttattttctaaagtttaggccacttggttcttggttctaagcagagatccttggaacacacctaccaccaccatcagaaccatcactacccatgcatggggacccattcttgtgacaagtttgagcggctttagatcttatgaagcccactgtctcccttgggcagtgtgagcatgggaggagccagacacaggtgatcataaggtccacagattattagatggcatgtcaaaaaatccttcagggaaaaacagagaaactgttccaattaaagataatttcgaattagaggtacttcaggcacaatacaaagaacttaaagaaaagatgaaagtaatggaagaagaagttctcattaagaatggagaaattaaaattttgcgagactcactacatcagacggaatccgttctagaggaacagagaagatcacattttcttcttgagcaagagaaaacccaagcactcagtgacaaggaaaaggaattctccaaaaagctccaatcattgcagtctgaactccagtttaaagatgcagagatgaatgaattaaggacaaagctccagaccagtgaacgagcaaataaactggctgctccctctgtttcccatgtcagtcctaggaaaaacccttctgtggttataaagccagaagcatgttctccacaatttggaaaaacatcttttcctacaaaggagtcttttagtgctaacatgtcccttccccacccctgccagacggagtcaggatacaagcctctggtgggcagagaggatagtaagccccacagtctgagaggtgactccataaaacaagaagaggcccagaaaagctttgttgacagctggagacagagatcaaacactcaaggttccattttgataaacctgctcctgaagcagcctttgatcccagggtcatccctaagcctttgccacctcctgagtagtagttctgagtctcctgctggcacccccctgcagccaccagggtttggcagtaccttggctggaatgtcaggcctcaggaccacaggttcttatgatgggtcattttccctctcagccctgagagaagcacagaacctggcattcactggactgaatctggttgcccggaatgagtgctcacgtgatggagacccagcagagggaggcagaagggccttcccactctgccagcttcctggagccgtgcatttcctcccccttgtacagttcttcatcggcttacactgccaggccctgcaggacttggcagctgctaagagaagcggagcacctggggactcaccgacacattcctcctgcgtgagctctggggtagagaccaaccctgaggactcagtgtgcatcctggaaggcttctctgtgactgcacttagcattcttcagcacctggtgtgccacagcggagcagtcgtctccctattactgtcaggagtgggggcagattctgctgctggggaaggaaacaggagcctggttcacaggcttagtgatggagatatgacctcagccctaaggggggttgctgatgaccaaggacagcacccactgttgaagatgcttcttcacctgttggctttctcttctgcagcaacaggtcaccttcaagccagtgtcctgacccagtgccttaaggttttggtgaaattagccgaaaacacttcctgtgatttcttgcccaggttccagtgtgtgttccaagtgctgccaaagtgcctcagcccagagacacccctgcctagcgtgctgctggctgttgagctcctctccctgctggcggaccacgaccagctggcacctcagctctgttcccactcagaaggctgcctcctgctgctgctgtacatgtacatcacatcacggcctgacagagtggccttggagacacaatggctccagctggaacaagaggtggtgtggctcctggctaagcttggtgtgcagagccccttgcccccagtcactggctccaactgccagtgtaatgtggaggtggtcagagcgctcacggtgatgttgcacagacagtggctgacagtgcggagggcagggggacccccaaggaccgaccagcagaggcggacagtgcgctgtctgcgggacacggtgctgctgctgcacggcctatcgcagaaggacaagctcttcatgatgcactgcgtggaggtcctgcatcagtttgaccaggtgatgccgggggtcagcatgctcatccgagggcttcctgatgtgacggactgtgaagaggcagccctggatgacctctgtgccgcggaaaccgatgtggaagaccccgaggtggagtgtggctgaggccctgagtgtccagccacatggtggcaccagcaccactcctttccttaccacatcaactgattaaagcagtgaccagcaggaactgcccagagaactggctggccttgtttcctgagtctgatctgtttggcggagtgggaggggtggagcaggacccgg

SEQ ID NO: 233599 - DNA, 2376 bp, Artificial Sequence
  derived and/or modified sequence
atggccggcaccagcgcccccggcagcaagagaagaagcgagccccccgcccccagacccggccccccccccggcaccggccacccccccagcaagagagccagaggcttcagcgccgccgccgcccccgaccccgacgaccccttcggcgcccacggcgacttcaccgccgacgacctggaggagctggacaccctggccagccaggccctgagccagtgccccgccgccgccagagacgtgagcagcgaccacaaggtgcacagactgctggacggcatgagcaagaaccccagcggcaagaacagagagaccgtgcccatcaaggacaacttcgagctggaggtgctgcaggcccagtacaaggagctgaaggagaagatgaaggtgatggaggaggaggtgctgatcaagaacggcgagatcaagatcctgagagacagcctgcaccagaccgagagcgtgctggaggagcagagaagaagccacttcctgctggagcaggagaagacccaggccctgagcgacaaggagaaggagttcagcaagaagctgcagagcctgcagagcgagctgcagttcaaggacgccgagatgaacgagctgagaaccaagctgcagaccagcgagagagccaacaagctggccgcccccagcgtgagccacgtgagccccagaaagaaccccagcgtggtgatcaagcccgaggcctgcagcccccagttcggcaagaccagcttccccaccaaggagagcttcagcgccaacatgagcctgccccacccctgccagaccgagagcggctacaagcccctggtgggcagagaggacagcaagccccacagcctgagaggcgacagcatcaagcaggaggaggcccagaagagcttcgtggacagctggagacagagaagcaacacccagggcagcatcctgatcaacctgctgctgaagcagcccctgatccccggcagcagcctgagcctgtgccacctgctgagcagcagcagcgagagccccgccggcacccccctgcagccccccggcttcggcagcaccctggccggcatgagcggcctgagaaccaccggcagctacgacggcagcttcagcctgagcgccctgagagaggcccagaacctggccttcaccggcctgaacctggtggccagaaacgagtgcagcagagacggcgaccccgccgagggcggcagaagagccttccccctgtgccagctgcccggcgccgtgcacttcctgcccctggtgcagttcttcatcggcctgcactgccaggccctgcaggacctggccgccgccaagagaagcggcgcccccggcgacagccccacccacagcagctgcgtgagcagcggcgtggagaccaaccccgaggacagcgtgtgcatcctggagggcttcagcgtgaccgccctgagcatcctgcagcacctggtgtgccacagcggcgccgtggtgagcctgctgctgagcggcgtgggcgccgacagcgccgccggcgagggcaacagaagcctggtgcacagactgagcgacggcgacatgaccagcgccctgagaggcgtggccgacgaccagggccagcaccccctgctgaagatgctgctgcacctgctggccttcagcagcgccgccaccggccacctgcaggccagcgtgctgacccagtgcctgaaggtgctggtgaagctggccgagaacaccagctgcgacttcctgcccagattccagtgcgtgttccaggtgctgcccaagtgcctgagccccgagacccccctgcccagcgtgctgctggccgtggagctgctgagcctgctggccgaccacgaccagctggccccccagctgtgcagccacagcgagggctgcctgctgctgctgctgtacatgtacatcaccagcagacccgacagagtggccctggagacccagtggctgcagctggagcaggaggtggtgtggctgctggccaagctgggcgtgcagagccccctgccccccgtgaccggcagcaactgccagtgcaacgtggaggtggtgagagccctgaccgtgatgctgcacagacagtggctgaccgtgagaagagccggcggcccccccagaaccgaccagcagagaagaaccgtgagatgcctgagagacaccgtgctgctgctgcacggcctgagccagaaggacaagctgttcatgatgcactgcgtggaggtgctgcaccagttcgaccaggtgatgcccggcgtgagcatgctgatcagaggcctgcccgacgtgaccgactgcgaggaggccgccctggacgacctgtgcgccgccgagaccgacgtggaggaccccgaggtggagtgcggctag

SEQ ID NO: 233600 - DNA, 1995 bp, Artificial Sequence
  derived and/or modified sequence
atgaaggtgatggaggaggaggtgctgatcaagaacggcgagatcaagatcctgagagacagcctgcaccagaccgagagcgtgctggaggagcagagaagaagccacttcctgctggagcaggagaagacccaggccctgagcgacaaggagaaggagttcagcaagaagctgcagagcctgcagagcgagctgcagttcaaggacgccgagatgaacgagctgagaaccaagctgcagaccagcgagagagccaacaagctggccgcccccagcgtgagccacgtgagccccagaaagaaccccagcgtggtgatcaagcccgaggcctgcagcccccagttcggcaagaccagcttccccaccaaggagagcttcagcgccaacatgagcctgccccacccctgccagaccgagagcggctacaagcccctggtgggcagagaggacagcaagccccacagcctgagaggcgacagcatcaagcaggaggaggcccagaagagcttcgtggacagctggagacagagaagcaacacccagggcagcatcctgatcaacctgctgctgaagcagcccctgatccccggcagcagcctgagcctgtgccacctgctgagcagcagcagcgagagccccgccggcacccccctgcagccccccggcttcggcagcaccctggccggcatgagcggcctgagaaccaccggcagctacgacggcagcttcagcctgagcgccctgagagaggcccagaacctggccttcaccggcctgaacctggtggccagaaacgagtgcagcagagacggcgaccccgccgagggcggcagaagagccttccccctgtgccagctgcccggcgccgtgcacttcctgcccctggtgcagttcttcatcggcctgcactgccaggccctgcaggacctggccgccgccaagagaagcggcgcccccggcgacagccccacccacagcagctgcgtgagcagcggcgtggagaccaaccccgaggacagcgtgtgcatcctggagggcttcagcgtgaccgccctgagcatcctgcagcacctggtgtgccacagcggcgccgtggtgagcctgctgctgagcggcgtgggcgccgacagcgccgccggcgagggcaacagaagcctggtgcacagactgagcgacggcgacatgaccagcgccctgagaggcgtggccgacgaccagggccagcaccccctgctgaagatgctgctgcacctgctggccttcagcagcgccgccaccggccacctgcaggccagcgtgctgacccagtgcctgaaggtgctggtgaagctggccgagaacaccagctgcgacttcctgcccagattccagtgcgtgttccaggtgctgcccaagtgcctgagccccgagacccccctgcccagcgtgctgctggccgtggagctgctgagcctgctggccgaccacgaccagctggccccccagctgtgcagccacagcgagggctgcctgctgctgctgctgtacatgtacatcaccagcagacccgacagagtggccctggagacccagtggctgcagctggagcaggaggtggtgtggctgctggccaagctgggcgtgcagagccccctgccccccgtgaccggcagcaactgccagtgcaacgtggaggtggtgagagccctgaccgtgatgctgcacagacagtggctgaccgtgagaagagccggcggcccccccagaaccgaccagcagagaagaaccgtgagatgcctgagagacaccgtgctgctgctgcacggcctgagccagaaggacaagctgttcatgatgcactgcgtggaggtgctgcaccagttcgaccaggtgatgcccggcgtgagcatgctgatcagaggcctgcccgacgtgaccgactgcgaggaggccgccctggacgacctgtgcgccgccgagaccgacgtggaggaccccgaggtggagtgcggctag

SEQ ID NO: 233601 - DNA, 2097 bp, Artificial Sequence
  derived and/or modified sequence
atgagcaagaaccccagcggcaagaacagagagaccgtgcccatcaaggacaacttcgagctggaggtgctgcaggcccagtacaaggagctgaaggagaagatgaaggtgatggaggaggaggtgctgatcaagaacggcgagatcaagatcctgagagacagcctgcaccagaccgagagcgtgctggaggagcagagaagaagccacttcctgctggagcaggagaagacccaggccctgagcgacaaggagaaggagttcagcaagaagctgcagagcctgcagagcgagctgcagttcaaggacgccgagatgaacgagctgagaaccaagctgcagaccagcgagagagccaacaagctggccgcccccagcgtgagccacgtgagccccagaaagaaccccagcgtggtgatcaagcccgaggcctgcagcccccagttcggcaagaccagcttccccaccaaggagagcttcagcgccaacatgagcctgccccacccctgccagaccgagagcggctacaagcccctggtgggcagagaggacagcaagccccacagcctgagaggcgacagcatcaagcaggaggaggcccagaagagcttcgtggacagctggagacagagaagcaacacccagggcagcatcctgatcaacctgctgctgaagcagcccctgatccccggcagcagcctgagcctgtgccacctgctgagcagcagcagcgagagccccgccggcacccccctgcagccccccggcttcggcagcaccctggccggcatgagcggcctgagaaccaccggcagctacgacggcagcttcagcctgagcgccctgagagaggcccagaacctggccttcaccggcctgaacctggtggccagaaacgagtgcagcagagacggcgaccccgccgagggcggcagaagagccttccccctgtgccagctgcccggcgccgtgcacttcctgcccctggtgcagttcttcatcggcctgcactgccaggccctgcaggacctggccgccgccaagagaagcggcgcccccggcgacagccccacccacagcagctgcgtgagcagcggcgtggagaccaaccccgaggacagcgtgtgcatcctggagggcttcagcgtgaccgccctgagcatcctgcagcacctggtgtgccacagcggcgccgtggtgagcctgctgctgagcggcgtgggcgccgacagcgccgccggcgagggcaacagaagcctggtgcacagactgagcgacggcgacatgaccagcgccctgagaggcgtggccgacgaccagggccagcaccccctgctgaagatgctgctgcacctgctggccttcagcagcgccgccaccggccacctgcaggccagcgtgctgacccagtgcctgaaggtgctggtgaagctggccgagaacaccagctgcgacttcctgcccagattccagtgcgtgttccaggtgctgcccaagtgcctgagccccgagacccccctgcccagcgtgctgctggccgtggagctgctgagcctgctggccgaccacgaccagctggccccccagctgtgcagccacagcgagggctgcctgctgctgctgctgtacatgtacatcaccagcagacccgacagagtggccctggagacccagtggctgcagctggagcaggaggtggtgtggctgctggccaagctgggcgtgcagagccccctgccccccgtgaccggcagcaactgccagtgcaacgtggaggtggtgagagccctgaccgtgatgctgcacagacagtggctgaccgtgagaagagccggcggcccccccagaaccgaccagcagagaagaaccgtgagatgcctgagagacaccgtgctgctgctgcacggcctgagccagaaggacaagctgttcatgatgcactgcgtggaggtgctgcaccagttcgaccaggtgatgcccggcgtgagcatgctgatcagaggcctgcccgacgtgaccgactgcgaggaggccgccctggacgacctgtgcgccgccgagaccgacgtggaggaccccgaggtggagtgcggctag

SEQ ID NO: 233602 - DNA, 141 bp, Artificial Sequence
  derived and/or modified sequence
atgagcaagaaccccagcggcaagaacagagagaccgtgcccatcaaggacaacttcgagctggaggtgctgcaggcccagtacaaggagctgaaggagaagctgtgcaagaaggccgacaccagctaccaccacctgtag

SEQ ID NO: 233603 - protein, 903 aa, Artificial Sequence
  derived and/or modified sequence
MGMDLTCPFGISPACGAQASWSIFGADAAEVPGTRGHSQQEAAMPHIPEDEEPPGEPQAAQSPAGQGPPAAGVSCSPTPTIVLTGDATSPEGETDKNLANRVHSPHKRLSHRHLKVSTASLTSVDPAGHIIDLVNDQLPDISISEEDKKKNLALLEEAKLVSERFLTRRGRKSRSSPGDSPSAVSPNLSPSASPTSSRSNSLTVPTPPGLDVCSGPPSPLPGAPPQKGDEADVSSPHPGEPNVPKGLADRKQNDQRKVSQGRLAPRPPPVEKSKEIAIEQKENFDPLQYPETTPKGLAPVTNSSGKMALNSPQPGPVESELGKQLLKTGWEGSPLPRSPTQDAAGVGPPASQGRGPAGEPMGPEAGSKAELPPTVSRPPLLRGLSWDSGPEEPGPRLQKVLAKLPLAEEEKRFAGKAGGKLAKAPGLKDFQIQVQPVRMQKLTKLREEHILMRNQNLVGLKLPDLSEAAEQEKGLPSELSPAIEEEESKSGLDVMPNISDVLLRKLRVHRSLPGSAPPLTEKEVENVFVQLSLAFRNDSYTLESRINQAERERNLTEENTEKELENFKASITSSASLWHHCEHRETYQKLLEDIAVLHRLAARLSSRAEVVGAVRQEKRMSKATEVMMQYVENLKRTYEKDHAELMEFKKLANQNSSRSCGPSEDGVPRTARSMSLTLGKNMPRRRVSVAVVPKFNALNLPGQTPSSSSIPSLPALSESPNGKGSLPVTSALPALLENGKTNGDPDCEASAPALTLSCLEELSQETKARMEEEAYSKGFQEGLKKTKELQDLKEEEEEQKSESPEEPEEVEETEEEEKGPRSSKLEELVHFLQVMYPKLCQHWQVIWMMAAVMLVLTVVLGLYNSYNSCAEQADGPLGRSTCSAAQRDSWWSSGLQHEQPTEQ

SEQ ID NO: 233604 - protein, 821 aa, Artificial Sequence
  derived and/or modified sequence
LTGDATSPEGETDKNLANRVHSPHKRLSHRHLKVSTASLTSVDPAGHIIDLVNDQLPDISISEEDKKKNLALLEEAKLVSERFLTRRGRKSRSSPGDSPSAVSPNLSPSASPTSSRSNSLTVPTPPGLDVCSGPPSPLPGAPPQKGDEADVSSPHPGEPNVPKGLADRKQNDQRKVSQGRLAPRPPPVEKSKEIAIEQKENFDPLQYPETTPKGLAPVTNSSGKMALNSPQPGPVESELGKQLLKTGWEGSPLPRSPTQDAAGVGPPASQGRGPAGEPMGPEAGSKAELPPTVSRPPLLRGLSWDSGPEEPGPRLQKVLAKLPLAEEEKRFAGKAGGKLAKAPGLKDFQIQVQPVRMQKLTKLREEHILMRNQNLVGLKLPDLSEAAEQEKGLPSELSPAIEEEESKSGLDVMPNISDVLLRKLRVHRSLPGSAPPLTEKEVENVFVQLSLAFRNDSYTLESRINQAERERNLTEENTEKELENFKASITSSASLWHHCEHRETYQKLLEDIAVLHRLAARLSSRAEVVGAVRQEKRMSKATEVMMQYVENLKRTYEKDHAELMEFKKLANQNSSRSCGPSEDGVPRTARSMSLTLGKNMPRRRVSVAVVPKFNALNLPGQTPSSSSIPSLPALSESPNGKGSLPVTSALPALLENGKTNGDPDCEASAPALTLSCLEELSQETKARMEEEAYSKGFQEGLKKTKELQDLKEEEEEQKSESPEEPEEVEETEEEEKGPRSSKLEELVHFLQVMYPKLCQHWQVIWMMAAVMLVLTVVLGLYNSYNSCAEQADGPLGRSTCSAAQRDSWWSSGLQHEQPTEQ

SEQ ID NO: 233605 - protein, 912 aa, Artificial Sequence
  derived and/or modified sequence
MVKAPQSEERLARGGKENNSVLACGAQASWSIFGADAAEVPGTRGHSQQEAAMPHIPEDEEPPGEPQAAQSPAGQGPPAAGVSCSPTPTIVLTGDATSPEGETDKNLANRVHSPHKRLSHRHLKVSTASLTSVDPAGHIIDLVNDQLPDISISEEDKKKNLALLEEAKLVSERFLTRRGRKSRSSPGDSPSAVSPNLSPSASPTSSRSNSLTVPTPPGLDVCSGPPSPLPGAPPQKGDEADVSSPHPGEPNVPKGLADRKQNDQRKVSQGRLAPRPPPVEKSKEIAIEQKENFDPLQYPETTPKGLAPVTNSSGKMALNSPQPGPVESELGKQLLKTGWEGSPLPRSPTQDAAGVGPPASQGRGPAGEPMGPEAGSKAELPPTVSRPPLLRGLSWDSGPEEPGPRLQKVLAKLPLAEEEKRFAGKAGGKLAKAPGLKDFQIQVQPVRMQKLTKLREEHILMRNQNLVGLKLPDLSEAAEQEKGLPSELSPAIEEEESKSGLDVMPNISDVLLRKLRVHRSLPGSAPPLTEKEVENVFVQLSLAFRNDSYTLESRINQAERERNLTEENTEKELENFKASITSSASLWHHCEHRETYQKLLEDIAVLHRLAARLSSRAEVVGAVRQEKRMSKATEVMMQYVENLKRTYEKDHAELMEFKKLANQNSSRSCGPSEDGVPRTARSMSLTLGKNMPRRRVSVAVVPKFNALNLPGQTPSSSSIPSLPALSESPNGKGSLPVTSALPALLENGKTNGDPDCEASAPALTLSCLEELSQETKARMEEEAYSKGFQEGLKKTKELQDLKEEEEEQKSESPEEPEEVEETEEEEKGPRSSKLEELVHFLQVMYPKLCQHWQVIWMMAAVMLVLTVVLGLYNSYNSCAEQADGPLGRSTCSAAQRDSWWSSGLQHEQPTEQ

SEQ ID NO: 233606 - DNA, 2466 bp, Artificial Sequence
  derived and/or modified sequence
ctgaccggcgacgccaccagccccgagggcgagaccgacaagaacctggccaacagagtgcacagcccccacaagagactgagccacagacacctgaaggtgagcaccgccagcctgaccagcgtggaccccgccggccacatcatcgacctggtgaacgaccagctgcccgacatcagcatcagcgaggaggacaagaagaagaacctggccctgctggaggaggccaagctggtgagcgagagattcctgaccagaagaggcagaaagagcagaagcagccccggcgacagccccagcgccgtgagccccaacctgagccccagcgccagccccaccagcagcagaagcaacagcctgaccgtgcccaccccccccggcctggacgtgtgcagcggcccccccagccccctgcccggcgcccccccccagaagggcgacgaggccgacgtgagcagcccccaccccggcgagcccaacgtgcccaagggcctggccgacagaaagcagaacgaccagagaaaggtgagccagggcagactggcccccagacccccccccgtggagaagagcaaggagatcgccatcgagcagaaggagaacttcgaccccctgcagtaccccgagaccacccccaagggcctggcccccgtgaccaacagcagcggcaagatggccctgaacagcccccagcccggccccgtggagagcgagctgggcaagcagctgctgaagaccggctgggagggcagccccctgcccagaagccccacccaggacgccgccggcgtgggcccccccgccagccagggcagaggccccgccggcgagcccatgggccccgaggccggcagcaaggccgagctgccccccaccgtgagcagaccccccctgctgagaggcctgagctgggacagcggccccgaggagcccggccccagactgcagaaggtgctggccaagctgcccctggccgaggaggagaagagattcgccggcaaggccggcggcaagctggccaaggcccccggcctgaaggacttccagatccaggtgcagcccgtgagaatgcagaagctgaccaagctgagagaggagcacatcctgatgagaaaccagaacctggtgggcctgaagctgcccgacctgagcgaggccgccgagcaggagaagggcctgcccagcgagctgagccccgccatcgaggaggaggagagcaagagcggcctggacgtgatgcccaacatcagcgacgtgctgctgagaaagctgagagtgcacagaagcctgcccggcagcgccccccccctgaccgagaaggaggtggagaacgtgttcgtgcagctgagcctggccttcagaaacgacagctacaccctggagagcagaatcaaccaggccgagagagagagaaacctgaccgaggagaacaccgagaaggagctggagaacttcaaggccagcatcaccagcagcgccagcctgtggcaccactgcgagcacagagagacctaccagaagctgctggaggacatcgccgtgctgcacagactggccgccagactgagcagcagagccgaggtggtgggcgccgtgagacaggagaagagaatgagcaaggccaccgaggtgatgatgcagtacgtggagaacctgaagagaacctacgagaaggaccacgccgagctgatggagttcaagaagctggccaaccagaacagcagcagaagctgcggccccagcgaggacggcgtgcccagaaccgccagaagcatgagcctgaccctgggcaagaacatgcccagaagaagagtgagcgtggccgtggtgcccaagttcaacgccctgaacctgcccggccagacccccagcagcagcagcatccccagcctgcccgccctgagcgagagccccaacggcaagggcagcctgcccgtgaccagcgccctgcccgccctgctggagaacggcaagaccaacggcgaccccgactgcgaggccagcgcccccgccctgaccctgagctgcctggaggagctgagccaggagaccaaggccagaatggaggaggaggcctacagcaagggcttccaggagggcctgaagaagaccaaggagctgcaggacctgaaggaggaggaggaggagcagaagagcgagagccccgaggagcccgaggaggtggaggagaccgaggaggaggagaagggccccagaagcagcaagctggaggagctggtgcacttcctgcaggtgatgtaccccaagctgtgccagcactggcaggtgatctggatgatggccgccgtgatgctggtgctgaccgtggtgctgggcctgtacaacagctacaacagctgcgccgagcaggccgacggccccctgggcagaagcacctgcagcgccgcccagagagacagctggtggagcagcggcctgcagcacgagcagcccaccgagcagtag

SEQ ID NO: 233607 - DNA, 2739 bp, Artificial Sequence
  derived and/or modified sequence
atggtgaaggccccccagagcgaggagagactggccagaggcggcaaggagaacaacagcgtgctggcctgcggcgcccaggccagctggagcatcttcggcgccgacgccgccgaggtgcccggcaccagaggccacagccagcaggaggccgccatgccccacatccccgaggacgaggagccccccggcgagccccaggccgcccagagccccgccggccagggcccccccgccgccggcgtgagctgcagccccacccccaccatcgtgctgaccggcgacgccaccagccccgagggcgagaccgacaagaacctggccaacagagtgcacagcccccacaagagactgagccacagacacctgaaggtgagcaccgccagcctgaccagcgtggaccccgccggccacatcatcgacctggtgaacgaccagctgcccgacatcagcatcagcgaggaggacaagaagaagaacctggccctgctggaggaggccaagctggtgagcgagagattcctgaccagaagaggcagaaagagcagaagcagccccggcgacagccccagcgccgtgagccccaacctgagccccagcgccagccccaccagcagcagaagcaacagcctgaccgtgcccaccccccccggcctggacgtgtgcagcggcccccccagccccctgcccggcgcccccccccagaagggcgacgaggccgacgtgagcagcccccaccccggcgagcccaacgtgcccaagggcctggccgacagaaagcagaacgaccagagaaaggtgagccagggcagactggcccccagacccccccccgtggagaagagcaaggagatcgccatcgagcagaaggagaacttcgaccccctgcagtaccccgagaccacccccaagggcctggcccccgtgaccaacagcagcggcaagatggccctgaacagcccccagcccggccccgtggagagcgagctgggcaagcagctgctgaagaccggctgggagggcagccccctgcccagaagccccacccaggacgccgccggcgtgggcccccccgccagccagggcagaggccccgccggcgagcccatgggccccgaggccggcagcaaggccgagctgccccccaccgtgagcagaccccccctgctgagaggcctgagctgggacagcggccccgaggagcccggccccagactgcagaaggtgctggccaagctgcccctggccgaggaggagaagagattcgccggcaaggccggcggcaagctggccaaggcccccggcctgaaggacttccagatccaggtgcagcccgtgagaatgcagaagctgaccaagctgagagaggagcacatcctgatgagaaaccagaacctggtgggcctgaagctgcccgacctgagcgaggccgccgagcaggagaagggcctgcccagcgagctgagccccgccatcgaggaggaggagagcaagagcggcctggacgtgatgcccaacatcagcgacgtgctgctgagaaagctgagagtgcacagaagcctgcccggcagcgccccccccctgaccgagaaggaggtggagaacgtgttcgtgcagctgagcctggccttcagaaacgacagctacaccctggagagcagaatcaaccaggccgagagagagagaaacctgaccgaggagaacaccgagaaggagctggagaacttcaaggccagcatcaccagcagcgccagcctgtggcaccactgcgagcacagagagacctaccagaagctgctggaggacatcgccgtgctgcacagactggccgccagactgagcagcagagccgaggtggtgggcgccgtgagacaggagaagagaatgagcaaggccaccgaggtgatgatgcagtacgtggagaacctgaagagaacctacgagaaggaccacgccgagctgatggagttcaagaagctggccaaccagaacagcagcagaagctgcggccccagcgaggacggcgtgcccagaaccgccagaagcatgagcctgaccctgggcaagaacatgcccagaagaagagtgagcgtggccgtggtgcccaagttcaacgccctgaacctgcccggccagacccccagcagcagcagcatccccagcctgcccgccctgagcgagagccccaacggcaagggcagcctgcccgtgaccagcgccctgcccgccctgctggagaacggcaagaccaacggcgaccccgactgcgaggccagcgcccccgccctgaccctgagctgcctggaggagctgagccaggagaccaaggccagaatggaggaggaggcctacagcaagggcttccaggagggcctgaagaagaccaaggagctgcaggacctgaaggaggaggaggaggagcagaagagcgagagccccgaggagcccgaggaggtggaggagaccgaggaggaggagaagggccccagaagcagcaagctggaggagctggtgcacttcctgcaggtgatgtaccccaagctgtgccagcactggcaggtgatctggatgatggccgccgtgatgctggtgctgaccgtggtgctgggcctgtacaacagctacaacagctgcgccgagcaggccgacggccccctgggcagaagcacctgcagcgccgcccagagagacagctggtggagcagcggcctgcagcacgagcagcccaccgagcagtag

SEQ ID NO: 233608 - DNA, 2466 bp, Artificial Sequence
  derived and/or modified sequence
ctaacaggagatgctaccagccccgagggcgaaaccgataagaatctcgcaaatcgtgtgcactccccgcacaaacggctcagccaccggcacctgaaggtgagcacagctagcctaacctcagtggatcccgccgggcatatcatcgatctcgttaacgatcagctcccagacattagcattagcgaggaggacaaaaaaaagaacctcgccttgctggaggaggccaagctcgtgtctgaaagattcctaaccaggagaggccgaaagtctcgtagttcaccaggggactctccaagcgctgtgtctcctaatctgtctcccagtgcctccccaactagttcccgttcaaattctctcacagtgcctactcccccaggcctggatgtctgcagcggcccaccgtccccattgccgggagctccaccccagaaaggggatgaagcagacgtgagctctccgcaccccggggaacccaatgttcctaagggtctcgctgaccgtaaacagaacgatcagaggaaggtgagtcagggacggctcgcccctagacctcccccagttgagaagtccaaagagatcgcgatagaacagaaggagaacttcgatcctctacagtacccagaaacaacgcccaagggtcttgcccccgtgacgaacagtagtggaaagatggcactaaattcaccacagcctgggcctgttgagagcgagctgggaaaacaattgcttaagactgggtgggaaggatctccccttcccaggagtccaacacaagacgcagctggcgttggccctcccgcctcccagggtagggggcctgcaggtgaacctatggggccagaagccgggtcaaaagctgagcttccgcccacggtgtcacgcccaccactgctcagaggcctcagctgggattctgggcccgaggaaccaggacctcgactgcagaaggtgctggccaagcttcccctggcagaggaggaaaagagattcgccggaaaagccgggggaaagctggctaaggcacctggacttaaggatttccagattcaggtgcagccagtgcggatgcagaagcttaccaaattgagggaagagcacatacttatgcgaaaccagaacttggtgggcctcaagcttcccgatttatctgaggccgccgaacaggagaaaggtcttccatccgaactttcacccgccatagaggaggaagagtctaagtccggtctggacgtgatgcctaacattagtgacgtgctcctcaggaaattacgcgtgcaccggtcattacctggctctgcaccgcccctaaccgaaaaggaagtagagaatgtgttcgtacagctgtccctggcgttcaggaatgatagctacacacttgagtctcggatcaaccaggccgagagggagagaaacctgaccgaggagaatacagaaaaagaactggaaaatttcaaagctagcattaccagcagcgccagtctttggcaccattgtgaacaccgggagacgtaccaaaagcttctggaagacatcgccgtgctgcatagactcgccgcccgattgtcttctcgcgccgaggttgtgggcgctgttcggcaggagaaacgtatgagtaaggccaccgaagtgatgatgcagtatgtggagaacctgaagcggacatatgaaaaggatcatgcagagttgatggagttcaaaaaacttgcaaaccagaacagcagtcgcagctgtgggccaagtgaagacggggtgccccgaactgcccgctccatgtcactgacgctgggtaaaaatatgccccgacgaagagtgtcggtcgcagtcgtgcctaaatttaatgcactgaatttgcccggccagaccccgtcatctagttcgattccctctctgcccgcgttaagcgaaagccccaacggtaagggatccttacccgtcacctctgcccttccagcacttctggaaaatggaaaaaccaacggtgacccggactgtgaagcctcggctccggccctaaccctgagctgcctcgaagagttatcacaggaaaccaaagccagaatggaagaggaggcttactccaagggattccaagagggcctgaagaaaaccaaagagctgcaggaccttaaggaggaagaagaagagcagaaatcggagtcacccgaagaaccggaggaggttgaagagactgaggaggaagaaaagggcccgcggagctctaaactggaggaactggtccacttcctccaggtgatgtatcctaaactatgccaacattggcaagtcatttggatgatggctgctgttatgttggtgctgaccgtggtacttgggctgtacaacagttacaattcctgcgccgagcaggctgacggcccactgggtcggtccacttgtagtgcggcacaacgtgactcatggtggagctcaggcctacaacacgagcagccgaccgagcaatag

SEQ ID NO: 233609 - DNA, 2466 bp, Artificial Sequence
  derived and/or modified sequence
cttacgggggatgccactagcccagagggcgaaacggataaaaatctagcaaacagggtgcattcgcctcacaagaggttgtcacaccggcacctgaaggtttctactgccagtcttacctctgtagatcccgcgggacacatcatcgaccttgtgaacgaccaactgcctgatatcagcataagtgaggaagacaaaaaaaagaatctcgccctgcttgaggaggccaagctggtgagcgagcgatttttaactcggagggggaggaagtctcgttcaagcccgggcgatagcccatctgccgtgtctcctaatctctccccatccgcgtctcccacgtcctcgcggagcaactcgctcacggtaccaaccccgccaggcctggacgtgtgttccgggccccccagtccacttcccggcgctccgccccagaagggggacgaagccgatgtgtctagccctcaccctggtgagcctaatgttcctaagggactggctgacagaaaacagaatgatcagcgaaaagtgagtcagggcaggcttgccccacggcctcctcccgtggagaaatccaaggagattgctattgagcagaaagaaaactttgaccccctccagtaccctgagaccacccctaaaggtcttgcaccagtgactaatagttccggtaaaatggccctaaattctccccagccaggtccagtggaatccgagctgggaaagcaactgcttaagactgggtgggagggctcaccacttccgagatcccccactcaggacgcagctggcgttggaccaccggcctcccaaggtagggggccagctggcgagcctatgggcccagaagccggctcaaaggcagaactcccgccaacggtgtcgcggccccccttgcttagaggcctctcttgggatagtggaccagaggaacctggccctaggctccagaaggtccttgccaaactgcccctggcagaggaagagaaacgttttgctggtaaagccggaggcaaacttgcaaaggcccccggcctgaaggattttcagatccaggttcaacctgttcgcatgcagaagcttaccaagctacgggaggaacacatactcatgcggaaccagaatttagtcggactgaagctgcccgatctttcggaggccgccgaacaggaaaaggggctcccctcagaactcagtcctgcgattgaagaggaggagagcaagtcgggcctggacgtgatgcccaatatctccgacgtgctgctcaggaagcttagggtgcataggtctctgcctggctctgcaccccccctgaccgaaaaagaagttgagaacgtctttgtacagctctcgttagcattccggaacgactcatacactcttgaaagcaggattaatcaggcagagcgcgagaggaatctgaccgaagaaaacaccgagaaggaactggaaaattttaaagcctctattacttcctccgcatctctctggcatcactgtgagcatagagagacataccagaaactactggaggacatcgcggtcctgcatcgacttgccgcaagactgtcctccagagccgaagtagttggagctgtgaggcaagaaaagcgtatgtccaaggccaccgaagtgatgatgcagtacgtcgagaatctcaaacgcacatacgaaaaggatcacgctgaactgatggagtttaagaagctagccaaccagaactctagccggtcttgcggtccttcagaagatggcgtgcccaggactgcgagatctatgagcctgacactgggcaagaacatgccgcgcaggagagtttcagtggctgttgtccccaagttcaatgcgctgaacctgccaggccaaactccttcctcgtccagtattccttctctcccagcgctgagcgaatcaccaaatgggaagggctcgctgcccgtgacttcagccctgcccgcattgctggagaacgggaaaacaaacggcgacccagattgtgaagcctccgcgccagcgttaaccctttcgtgtctggaggaactcagtcaggagacaaaggcccgcatggaagaagaggcttattcaaaaggctttcaggaagggctaaagaaaaccaaagaactgcaggatctcaaggaagaagaagaagaacagaagtccgagtctccagaggaacccgaagaagttgaagaaacagaagaggaggaaaagggcccccggtcgagcaagctcgaggagctcgtgcatttcttgcaagttatgtatccaaagttgtgtcagcactggcaagtaatttggatgatggccgccgtcatgctggtcctgaccgttgtcttgggcctctataactcttataactcctgcgctgaacaggcggatggtcctttaggtcgttctacctgctcggccgcccagagagactcttggtggagttctggtttgcagcacgagcagcctaccgagcagtag

SEQ ID NO: 233610 - DNA, 2739 bp, Artificial Sequence
  derived and/or modified sequence
atggtgaaggcacctcaatctgaagaacggctggcccggggagggaaagagaacaattccgtgcttgcgtgtggggctcaagcttcttggagtatcttcggcgcagacgccgccgaagtgcctgggactcggggtcattcacagcaggaagcagctatgccccacattcccgaagatgaagagcccccaggcgagccgcaggccgcccagtctcctgcaggccagggccctccagctgctggagtgtcctgttcaccaacacccacaattgtgctgaccggagacgctacgtcgcctgagggagagacagacaaaaacttggccaaccgggtccattcaccccacaaacgcctaagtcaccggcacttaaaggtatcaacagcctcactaaccagcgttgaccctgcaggccacattatagacctggtcaatgatcagctcccagacatctctataagtgaagaggacaaaaaaaagaacctggctctgttagaggaggccaagctcgtgtccgaaaggtttttaacacgtcgcgggcgcaagtcccggtctagtcccggcgacagcccttccgccgtgtcacctaacctctctcccagcgccagcccaacatcctcgagatctaactcacttaccgtgcccaccccccccgggcttgatgtctgttccgggcccccatctcctttaccaggcgcgcccccccagaaaggcgacgaagcggatgtgagctctccacacccaggggaacctaatgtgccaaaagggctcgcggatcgaaagcagaacgaccaacgaaaagtttctcaaggacgactggctcccaggccgccaccagtcgaaaagtccaaagaaatcgctatagagcagaaagagaattttgacccgctgcaatatcccgaaactaccccaaaggggttggctccagtcaccaatagcagtggcaagatggcgctcaattcacctcagccagggcccgtggagagcgaattgggaaaacaactgctgaagaccgggtgggagggctcacctctcccgcggtctccaacacaggatgcagcgggcgttgggccgccagccagtcagggccgagggcccgccggcgaacctatgggaccggaggccgggagcaaagccgagctgccaccaactgtatcacgaccccccctcctacgcggcctaagttgggactcaggtccagaagagcctggtcctcggctgcagaaagttctggccaagctgcctctggcagaagaggaaaagcgcttcgctgggaaggccggcggaaagctggcaaaggcgccggggctcaaggattttcagattcaggtgcaacccgtgagaatgcagaagctgaccaagctgagagaagagcacatcctgatgagaaatcagaatctagtcggccttaaactgcctgacttatctgaggcagctgaacaagagaagggcttaccctctgagctgtccccagctattgaagaggaggaatccaagtcagggctagacgtgatgcccaatatatcagatgtgctcttacgcaagttaagagtacatcggtctctaccaggatcagcgcctccattgacggaaaaagaagtggagaatgtattcgtccagctgagcttggcattcagaaatgattcttacacccttgaatcaaggataaaccaggctgagcgcgagcggaacctgaccgaggagaacacagagaaggaactcgagaactttaaggcctcaatcacttccagcgcctcactgtggcaccactgtgagcacagagaaacctatcaaaagcttctggaggatatagcggtgcttcaccgtttggccgctcgcctgtctagtcgagcagaggttgtcggcgccgtgagacaggagaagaggatgtcaaaagctaccgaggtcatgatgcagtatgtagagaatttgaaaaggacttatgaaaaggaccacgcagaactaatggagtttaagaaactggccaaccagaattcctcccgttcgtgcggaccgtccgaggacggagttcccaggactgcccggagcatgagtctgacgctggggaaaaatatgcctcgcaggcgggtatccgtcgctgtagtaccaaaattcaacgctctcaacctgccaggtcagacaccgtcaagctctagtatcccttccttgcccgccctctccgaatctccaaacggtaagggcagcctacccgtgacctcagcgcttccggcactgctggagaatggaaaaaccaatggggatccagactgcgaggccagtgccccagctttgaccctctcctgcctagaggagctctcacaagagactaaagcgcgaatggaagaggaagcctattccaagggctttcaagaagggttgaaaaaaacaaaggaattgcaggatttgaaagaagaggaagaggaacagaagtctgagtcaccagaggagcctgaggaggttgaagaaactgaggaggaagagaaggggcctcggtcatctaaacttgaggagctggtacatttcctgcaggtgatgtatcccaaactgtgccaacactggcaggtgatttggatgatggcggcagtaatgctcgttctcactgtagtgcttggactctacaactcctacaactcctgcgccgagcaagcagatggacccctcggtagatctacatgcagcgccgctcagagagacagttggtggtcctcgggactgcaacatgagcagcccaccgagcagtag

SEQ ID NO: 233611 - DNA, 2466 bp, Artificial Sequence
  derived and/or modified sequence
ctgactggagatgccaccagccctgagggggagacagacaagaacctggccaacagagtgcacagcccccacaagaggctgagccaccgccacctgaaggtgtccacagccagcctgacctctgtggaccctgctggccacatcatcgacctggtgaatgaccagctgcctgacatcagcatcagcgaggaggacaagaagaagaacctggccctgctggaggaggccaagctggtgtctgagcgcttcctgacccggcggggcaggaagagccgcagcagccctggggacagccccagcgctgtgagccccaacctgagccccagcgccagccccaccagcagccgcagcaacagcctgactgtgcccaccccacctggcctggatgtgtgcagcggcccccccagccccctgcccggggccccaccccagaagggagatgaagcagatgtgagcagcccccaccctggagagcccaacgtgcccaagggcctggccgacaggaagcagaatgaccagaggaaggtgtcccagggccgcctggcccccaggcctcctcctgtggagaagagcaaggagatcgccatcgagcagaaggagaactttgaccccctgcagtacccagagaccacccccaagggcctggcccctgtgaccaacagcagcggcaagatggccctgaacagcccccagcccggccctgtggagagcgagctgggcaagcagctgctgaagacaggctgggagggcagccccctgcccaggagccccacccaggatgctgctggggtgggccccccagccagccagggccggggccctgctggggagcccatgggccctgaggccggcagcaaggccgagctgccccccaccgtgtcccggccccccctgctgcggggcctgtcctgggacagcggccctgaggagcccggcccccggctgcagaaggtgctggccaagctgcccctggccgaggaggagaagagatttgctgggaaggccggcggcaagctggccaaggcccctggcctgaaggacttccagatccaggtgcagcctgtgaggatgcagaagctgaccaagctgcgggaggagcacatcctgatgaggaaccagaacctggtgggcctgaagctgcctgacctgtctgaggccgctgagcaggagaagggcctgcccagcgagctgagccctgccatcgaggaggaggagagcaagagcggcctggatgtgatgcccaacatcagtgatgtgctgctgaggaagctgcgggtgcacaggagcctgcccggcagcgccccacccctgacagagaaggaggtggagaatgtgtttgtgcagctgagcctggccttcagaaatgacagctacaccctggagagccgcatcaaccaggccgagcgggagaggaacctgacagaggagaacacagagaaggagctggagaacttcaaggccagcatcaccagcagcgccagcctgtggcaccactgtgagcaccgggagacctaccagaagctgctggaggacattgctgtgctgcaccggctggccgcccggctgagcagcagagctgaggtggtgggcgctgtgcggcaggagaagaggatgagcaaggccacagaggtgatgatgcagtatgtggagaacctgaagaggacctatgagaaggaccatgctgagctgatggagttcaagaagctggccaaccagaacagcagccgcagctgtggccccagtgaagatggagtgcccaggacagcccgctccatgagcctgaccctgggcaagaacatgcccaggagaagagtgtctgtggccgtggtgcccaagttcaatgccctgaacctgcccggccagacccccagcagcagcagcatccccagcctgcctgccctgtctgagagccccaacgggaagggcagcctgcctgtgaccagcgccctgcctgccctgctggagaatggcaagaccaacggggaccctgactgtgaggccagcgccccagccctgaccctgagctgcctggaggagctgagccaggagaccaaggccaggatggaggaggaggcctacagcaagggcttccaggagggcctgaagaagaccaaggagctgcaggacctgaaggaggaggaggaggagcagaagtctgagagccctgaggagcctgaggaggtggaggagacagaggaggaggagaagggccccaggagcagcaagctggaggagctggtgcacttcctgcaggtgatgtaccccaagctgtgccagcactggcaggtgatctggatgatggctgctgtgatgctggtgctgactgtggtgctgggcctgtacaacagctacaacagctgtgccgagcaggctgatggccccctgggccgcagcacctgcagcgctgcccagagggacagctggtggagcagcggcctgcagcacgagcagcccacagagcagtag

SEQ ID NO: 233612 - DNA, 2739 bp, Artificial Sequence
  derived and/or modified sequence
atggtgaaggccccccagagcgaggagcggctggcccggggcggcaaggagaacaacagcgtgctggcctgtggggcccaggcctcctggagcatctttggagcagatgctgctgaggtgcccggcacccggggccacagccagcaggaggccgccatgccccacatcccagaagatgaggagcccccaggagagccccaggccgcccagagccctgctggccagggccccccagctgctggggtgtcctgcagccccacccccaccatcgtgctgactggagatgccaccagccctgagggggagacagacaagaacctggccaacagagtgcacagcccccacaagaggctgagccaccgccacctgaaggtgtccacagccagcctgacctctgtggaccctgctggccacatcatcgacctggtgaatgaccagctgcctgacatcagcatcagcgaggaggacaagaagaagaacctggccctgctggaggaggccaagctggtgtctgagcgcttcctgacccggcggggcaggaagagccgcagcagccctggggacagccccagcgctgtgagccccaacctgagccccagcgccagccccaccagcagccgcagcaacagcctgactgtgcccaccccacctggcctggatgtgtgcagcggcccccccagccccctgcccggggccccaccccagaagggagatgaagcagatgtgagcagcccccaccctggagagcccaacgtgcccaagggcctggccgacaggaagcagaatgaccagaggaaggtgtcccagggccgcctggccccccggcccccacctgtggagaagagcaaggagatcgccatcgagcagaaggaaaattttgaccccctgcagtacccagagaccacccccaagggcctggcccctgtgaccaacagcagcggcaagatggccctgaacagcccccagcccggccctgtggagagcgagctgggcaagcagctgctgaagacaggctgggagggcagccccctgcccaggagccccacccaggatgctgctggggtgggccccccagccagccagggccggggccctgctggggagcccatgggccctgaggccggcagcaaggccgagctgcccccaacagtgtccaggcctcccctgctgcggggcctgtcctgggacagcggccctgaggagcccggcccccggctgcagaaggtgctggccaagctgcccctggccgaggaggagaagagatttgctgggaaggccggcggcaagctggccaaggcccctggcctgaaggacttccagatccaggtgcagcctgtgaggatgcagaagctgaccaagctgcgggaggagcacatcctgatgaggaaccagaacctggtgggcctgaagctgcctgacctgtctgaggccgctgagcaggagaagggcctgcccagcgagctgagccctgccatcgaggaggaggagagcaagagcggcctggatgtgatgcccaacatcagtgatgtgctgctgaggaagctgcgggtgcacaggagcctgcccggcagcgccccacccctgacagagaaggaggtggagaatgtgtttgtgcagctgagcctggccttcagaaatgacagctacaccctggagagccgcatcaaccaggccgagcgggagaggaacctgacagaagaaaatacagagaaggagctggagaacttcaaggccagcatcaccagcagcgccagcctgtggcaccactgtgagcaccgggagacctaccagaagctgctggaggacattgctgtgctgcaccggctggccgcccggctgagcagcagagctgaggtggtgggcgctgtgcggcaggagaagaggatgagcaaggccacagaggtgatgatgcagtatgtggagaacctgaagaggacctatgagaaggaccacgccgagctgatggagttcaagaagctggccaaccagaacagcagccgcagctgtggccccagtgaagatggagtgcccaggacagcccgctccatgagcctgaccctgggcaagaacatgccccggcggcgggtgtctgtggccgtggtgcccaagttcaatgccctgaacctgcccggccagacccccagcagcagcagcatccccagcctgcctgccctgtctgagagccccaacgggaagggcagcctgcctgtgaccagcgccctgcctgccctgctggagaatggcaagaccaatggagaccctgactgtgaggccagcgccccagccctgaccctgagctgcctggaggagctgagccaggagaccaaggccaggatggaggaggaggcctacagcaagggcttccaggagggcctgaagaagaccaaggagctgcaggacctgaaggaggaggaggaggagcagaagtctgagagccctgaggagcctgaggaggtggaggagacagaggaggaggagaagggccccaggagcagcaagctggaggagctggtgcacttcctgcaggtgatgtaccccaagctgtgccagcactggcaggtgatctggatgatggctgctgtgatgctggtgctgactgtggtgctgggcctgtacaacagctacaacagctgtgccgagcaggctgatggccccctgggccgcagcacctgcagcgctgcccagagggacagctggtggagcagcggcctgcagcacgagcagcccacagagcagtag

SEQ ID NO: 233613 - DNA, 5812 bp, Artificial Sequence
  derived and/or modified sequence
cagcctgtggagcccaggcctcttggagcatctttggggctgacgcagcggaggttccgggcacacgtggccactcccagcaggaggctgccatgccccacattcccgaggacgaggagccccccggagagccacaggcagcccagagccctgccggccaaagttcacagtccccacaagaggctttctcaccgacacttgaaggtgtccactgcctccctgacatctgtggaccccgcggggcacatcattgacctggtgaatgaccagctgccagacatcagcatctcagaggaggacaagaagaaaaacctggcgctgctggaagaagccaagttggtgagtgagcgattcctgacccgccgtgggaggaagtccaggagcagccccggagactccccatcagctgtttccccgaacctcagccccagcgcttctcctacatcctctcggagcaactcacttacagtccccaccccgccaggtttggatgtgtgcagtggcccgccatcccctctgcctggagcaccaccacagaagggggatgaggccgacgtctcttcacctcaccctggcgagcctaacgtccccaaagggctagctgacaggaagcagaatgaccagaggaaagtgtctcagggcaggctggctcctcgtcctcctccagttgagaagtccaaagagattgcaatagaacaaaaggaaaacttcgatcccctccagtaccccgagaccacacccaaaggcctagctcctgttacaaacagcagtgggaaaatggccctgaacagccctcagcctggccccgtggagagcgagctggggaagcagctcttgaaaacgggctgggagggcagccctctgccgagaagtccaacccaggatgcggcaggagtgggtcccccagcctcccaggggagaggcccagctggagagccgatggggcccgaggctggctccaaagctgagcttccacccactgtgtcccggcccccgctgctgcgagggctctcctgggacagtggccctgaagaacctggcccccggctgcagaaagtgcttgccaagctgccactggcagaggaagaaaagcgttttgcaggcaaggccggcggcaagctggccaaggcccctggtctcaaagactttcagatacaagtgcagcccgtgcggatgcagaaactgaccaagctccgagaggagcacatcctgatgagaaatcagaacttagtggggctcaagcttccagaccttagtgaagcagctgagcaggaaaaagggcttccttctgaactctccccagctattgaggaagaagagtcaaagagtggcttagatgtcatgcctaatatttctgatgtgctgctgcgcaaactgcgggtccacaggagtctccctggaagtgcccctccactcactgaaaaggaagttgagaacgtgtttgtgcaactgtccttggcctttagaaatgacagctacactctggaatctagaattaaccaggctgaaagggaacgcaacctgacagaggagaacactgagaaagaactggaaaacttcaaagcttccattacgtcctcagcttcactctggcaccactgtgagcaccgggaaacctaccagaagttgctggaggacatcgctgtcctgcaccgcctggctgcccgcctctccagccgagctgaggtggtaggcgccgtccgccaggaaaagcgcatgtcgaaagcaacggaagtgatgatgcagtatgtggagaatctaaagaggacgtatgagaaggaccatgcggagctcatggagtttaaaaagcttgcaaatcagaattcaagccgcagctgtggcccctctgaagatggggtccctcgcacggcacggtccatgtccctcacgctgggaaagaatatgcctcgccggagggtcagcgttgctgtggttcctaagtttaatgccctgaatctgcctggccaaactcccagctcatcatccattccctccttaccagccttgtcggaatcacccaatgggaaaggcagcctacctgtcacttcagcactgcctgcacttttggaaaatggaaagacaaatggggacccagattgtgaagcctctgctcctgcgctgaccctgagctgcctggaggagcttagtcaggagaccaaggccaggatggaggaagaagcctacagcaagggattccaagaaggtctaaagaagaccaaagaacttcaagacctgaaggaggaggaggaagaacagaagagtgagagtcctgaggaacctgaagaggtagaagaaactgaggaagaggaaaagggcccaagaagcagcaaacttgaagaattggtccatttcttacaagtcatgtatcccaaactgtgtcagcactggcaagtgatctggatgatggctgcagtgatgctggtcttgactgttgtgctggggctctacaattcctataactcttgtgcagagcaggctgatgggccccttggaagatccacttgctcggcagcccagagggactcctggtggagctcaggactccagcatgagcagcctacagagcagtaggaaacctcacacctagccagtgccctgctctgagacactcagactaccaccctttccccaagtataacgtcaggcccaagtgtggacacactgccgcccatcccatcaggtcatgaggaagggttcttttaacactcggcacttctgtgggagctattcatacacagtgacttgatgttcttggaggatcaacaaaactgccctgggaaagcatccagtggatgaagaagtcaccttcaccaaggaactctattggaagggaaggtctcctgcccctagctcaggtggctggggagaactaaaacaccttcactggtggttgggggtaaggagcggggcacgggggaggaggaggtagggggcagtaaaaaacttactctcttttttcctctctgtaattggttatcaggaagaatttgcttaatgactaacaccctaagcatcagacctggaatttggagttgcaaagtgactatcttcccatttcccatctcattttcaataacttcagcctcccattctttcctttggaatgagagtttctttttacagaagtaggaaaggcttctcagaaaaaaaaaaaaaagtataggctgaatttagctcagtgcttgaaatgggaagatatgaattattatatacgcatctgtccacacatacacacatactgttgtgtacacacacacaacatgcctgtgcacagagccaacaacccttcaaaagtgtgctctgggtgtgtacctctggataaataagatgcatgccaagccaacccacagattttcaccagtgtggggcagtcaccaggcacctgttcaatgagctgtccacatggattgaagatgttttaaaaacacagaaaactcatggcttcaatggcagacttactagtctccatttcaaatgccaactctgagctgctgtacagcacaatctattccctattctctctttgaaaacagttaacccacctcacaggtgaatgaggagagaagatgtgctttctgcttcagtctcttactctgtgtgtgaccacatgcaagagtaaacttgcacctcagtgcttcagttcaaatggggtttccaaccccagtataattaggggtgtttcagagcatccccagttatttagcacaacactgaaggagcacatcccctctccattttgacttctctccccacttttacagccactgccttcatcagttttgtagaggtttgatttccatgtgggttttgttgtcattgttttgcatttttgttttgttattgatattgtttgctttcattgctaaaactcatatacgacttactatgagccaagcactgttctcagtattacataggtatgaattcatttaagtcctgaagaaaaagaaaaaaaaatacgaagtggatattacccttcccattttcaaataaggaaactgaagcacaaaaagaacaagtaacttgacaaggacaccccggtagtaaatcatggggctggagctcaaccccagggtaggctggctccagagctgtgctctccttgactcttctgatggtctcctagctggaagcctcacatttcagtctcattcccccaagtggcccatcagctactccatctctggctccccaactaaacagtttctctcatagtgctggacctccactcactagttttttttccagctgttcttctcttttcttcaggtcactcttctcgaccgagtgcaaaaattatcccctccataccagctttgatgaccttccttccatactcctcaccagacacaacataataggtcacacactcctctgtgctttctggcacgttttaaacattattattattgacctttacctatagtataccatggcctatttatgtatccatctcccctagcatttttcctcaaagacaagaaccatgtcttacccatctcttgggtaagtgcctagcatggtggctgacgcttgggagggtgtcattaaatgttgctcaaaagaacaagcaaacatttaaggtggtggagagcagcctggggacagctgacatgctgcatgcttctcagtaccagcaccatcacaatgcaaaaagcaacatctttcttaacctcagcttattctgtttttcagtctactctgtgagagagcaggaatgagaccagactagcaacaccattgccaagctcaaggactgggctcaatgcagtcactccttcagagagaccccccaccccaagcatgccccactttaaaatagcatgtttattgaagggggcatcctttacagtagctagaaaatgactgaggcccaagccagggttgatcaaggatgtgccattaaggtaaagagttacagagcagggcagagggactctgggggcagaagtggatgatttgcccggcctcttccagggggtctggatacaactgaaggagctttagctacatgaggccctcagagccaaagacaggatgcaaatagagttctagagagtggccgtggaagcagaactccaggtggggaatgttcaatctctgcctcccttaaagcagggccaggctcagctggccccattgttcacttggtcacaagtttcctacctttgtttctggatgagtcaaaggccaggaaggcagttatggagagctcctgcacctccagctgccccacagaaaagcctgcaagagtacttccaggcacaggccctctcccaccctattccatttgtaagcaagggaggtcgaggaaaaggacatctccaaaagggagcataagaatagccatatatacaggggctgaaaaagtgctcatgagtccatcttttctggaaagcaaagaccagcctgaagcagtgggagctgctgcccaagcggtagtgaactggagagaaacaggccctggattttcagtgaggatgtggatctgaagagtcccccaaatgcctctgaagtctgacatctctgcttagccctaggagtctggttccctgccttcagttgcagagtgatgtgtttgtgtcattgttgatgtcacctcctaaaaagaccttcactttctggctgccacaaagccatatgtgttgctccccatatacagcctgacagagtaaatggagaggaagtgctggatttgtgtatcactggctatcagttcctcatgttgttaagcctcacacaggtgtgctagcattgaactgtagagtgtcacatacctgagtttgaaaataaaagcacatttccaaacctc

SEQ ID NO: 233614 - DNA, 2686 bp, Artificial Sequence
  derived and/or modified sequence
gaggctggccagaggaggaaaggagaataactcagttttagacagggtctcgcactgtcacccaggctggagtgcagtggtgcaaccccacctcccgggttcaagcaattctcatgcctcagcctcccaagtagctgggattacagggtcctcctgccgcaggagtatcttgcagtccaactcccacgattgtcctgactggggatgccacttcaccagaaggagaaaccgacaaaaacctggccaacagagttcacagtccccacaagaggctttctcaccgacacttgaaggtgtccactgcctccctgacatctgtggaccccgcggggcacatcattgacctggtgaatgaccagctgccagacatcagcatctcagaggaggacaagaagaaaaacctggcgctgctggaagaagccaagttggtgagtgagcgattcctgacccgccgtgggaggaagtccaggagcagccccggagactccccatcagctgtttccccgaacctcagccccagcgcttctcctacatcctctcggagcaactcacttacagtccccaccccgccaggtttggatgtgtgcagtggcccgccatcccctctgcctggagcaccaccacagaagggggatgaggccgacgtctcttcacctcaccctggcgagcctaacgtccccaaagggctagctgacaggaagcagaatgaccagaggaaagtgtctcagggcaggctggctcctcgtcctcctccagttgagaagtccaaagagattgcaatagaacaaaaggaaaacttcgatcccctccagtaccccgagaccacacccaaaggcctagctcctgttacaaacagcagtgggaaaatggccctgaacagccctcagcctggccccgtggagagcgagctggggaagcagctcttgaaaacgggctgggagggcagccctctgccgagaagtccaacccaggatgcggcaggagtgggtcccccagcctcccaggggagaggcccagctggagagccgatggggcccgaggctggctccaaagctgagcttccacccactgtgtcccggcccccgctgctgcgagggctctcctgggacagtggccctgaagaacctggcccccggctgcagaaagtgcttgccaagctgccactggcagaggaagaaaagcgttttgcaggcaaggccggcggcaagctggccaaggcccctggtctcaaagactttcagatacaagtgcagcccgtgcggatgcagaaactgaccaagctccgagaggagcacatcctgatgagaaatcagaacttagtggggctcaagcttccagaccttagtgaagcagctgagcaggaaaaagggcttccttctgaactctccccagctattgaggaagaagagtcaaagagtggcttagatgtcatgcctaatatttctgatgtgctgctgcgcaaactgcgggtccacaggagtctccctggaagtgcccctccactcactgaaaaggaagttgagaacgtgtttgtgcaactgtccttggcctttagaaatgacagctacactctggaatctagaattaaccaggctgaaagggaacgcaacctgacagaggagaacactgagaaagaactggaaaacttcaaagcttccattacgtcctcagcttcactctggcaccactgtgagcaccgggaaacctaccagaagttgctggaggacatcgctgtcctgcaccgcctggctgcccgcctctccagccgagctgaggtggtaggcgccgtccgccaggaaaagcgcatgtcgaaagcaacggaagtgatgatgcagtatgtggagaatctaaagaggacgtatgagaaggaccatgcggagctcatggagtttaaaaagcttgcaaatcagaattcaagccgcagctgtggcccctctgaagatggggtccctcgcacggcacggtccatgtccctcacgctgggaaagaatatgcctcgccggagggtcagcgttgctgtggttcctaagtttaatgccctgaatctgcctggccaaactcccagctcatcatccattccctccttaccagccttgtcggaatcacccaatgggaaaggcagcctacctgtcacttcagcactgcctgcacttttggaaaatggaaagacaaatggggacccagattgtgaagcctctgctcctgcgctgaccctgagctgcctggaggagcttagtcaggagaccaaggccaggatggaggaagaagcctacagcaagggattccaagaaggtctaaagaagaccaaagaacttcaagacctgaaggaggaggaggaagaacagaagagtgagagtcctgaggaacctgaagaggtagaagaaactgaggaagaggaaaagggcccaagaagcagcaaacttgaagaattggtccatttcttacaagtcatgtatcccaaactgtgtcagcactggcaagtgatctggatgatggctgcagtgatgctggtcttgactgttgtgctggggctctacaattcctataactcttgtgcagagcaggctgatgggccccttggaagatccacttgctcggcagcccagagggactcctggtggagctcaggactccagcatgagcagcctacagagcagtaggaaacctcacacctagccagtgccct

SEQ ID NO: 233615 - DNA, 6208 bp, Artificial Sequence
  derived and/or modified sequence
ggcgctggcccagggtcttctccaggctcacatgcttgctggaggctccaggcgggtggggagatctgcagggtccctttgttcccgtccggccaggacagtgtccagtggcacgagttgccatggggactgccatctgctgtgtggatacccatcggaggggcccagggtgagcgactgccccaaaggcccagcctgccctgagccctgaggccagctggtcggctttccctgccattatcccccgagccaggccggagtggggctcccagaggagctctcggctctaagtcccagcccctctcagaggaggcgtgcggccgaggttctgcagccagaggcttctcggctctgagctccggagccagatgtaacattgaccttaaatggtaaaagctccccagagtgaagagaggctggccagaggaggaaaggagaataactcagttttagggtcctcctgccgcaggagtatcttgcagtccaactcccacgattgtcctgactggggatgccacttcaccagaaggagaaaccgacaaaaacctggccaacagagttcacagtccccacaagaggctttctcaccgacacttgaaggtgtccactgcctccctgacatctgtggaccccgcggggcacatcattgacctggtgaatgaccagctgccagacatcagcatctcagaggaggacaagaagaaaaacctggcgctgctggaagaagccaagttggtgagtgagcgattcctgacccgccgtgggaggaagtccaggagcagccccggagactccccatcagctgtttccccgaacctcagccccagcgcttctcctacatcctctcggagcaactcacttacagtccccaccccgccaggtttggatgtgtgcagtggcccgccatcccctctgcctggagcaccaccacagaagggggatgaggccgacgtctcttcacctcaccctggcgagcctaacgtccccaaagggctagctgacaggaagcagaatgaccagaggaaagtgtctcagggcaggctggctcctcgtcctcctccagttgagaagtccaaagagattgcaatagaacaaaaggaaaacttcgatcccctccagtaccccgagaccacacccaaaggcctagctcctgttacaaacagcagtgggaaaatggccctgaacagccctcagcctggccccgtggagagcgagctggggaagcagctcttgaaaacgggctgggagggcagccctctgccgagaagtccaacccaggatgcggcaggagtgggtcccccagcctcccaggggagaggcccagctggagagccgatggggcccgaggctggctccaaagctgagcttccacccactgtgtcccggcccccgctgctgcgagggctctcctgggacagtggccctgaagaacctggcccccggctgcagaaagtgcttgccaagctgccactggcagaggaagaaaagcgttttgcaggcaaggccggcggcaagctggccaaggcccctggtctcaaagactttcagatacaagtgcagcccgtgcggatgcagaaactgaccaagctccgagaggagcacatcctgatgagaaatcagaacttagtggggctcaagcttccagaccttagtgaagcagctgagcaggaaaaagggcttccttctgaactctccccagctattgaggaagaagagtcaaagagtggcttagatgtcatgcctaatatttctgatgtgctgctgcgcaaactgcgggtccacaggagtctccctggaagtgcccctccactcactgaaaaggaagttgagaacgtgtttgtgcaactgtccttggcctttagaaatgacagctacactctggaatctagaattaaccaggctgaaagggaacgcaacctgacagaggagaacactgagaaagaactggaaaacttcaaagcttccattacgtcctcagcttcactctggcaccactgtgagcaccgggaaacctaccagaagttgctggaggacatcgctgtcctgcaccgcctggctgcccgcctctccagccgagctgaggtggtaggcgccgtccgccaggaaaagcgcatgtcgaaagcaacggaagtgatgatgcagtatgtggagaatctaaagaggacgtatgagaaggaccatgcggagctcatggagtttaaaaagcttgcaaatcagaattcaagccgcagctgtggcccctctgaagatggggtccctcgcacggcacggtccatgtccctcacgctgggaaagaatatgcctcgccggagggtcagcgttgctgtggttcctaagtttaatgccctgaatctgcctggccaaactcccagctcatcatccattccctccttaccagccttgtcggaatcacccaatgggaaaggcagcctacctgtcacttcagcactgcctgcacttttggaaaatggaaagacaaatggggacccagattgtgaagcctctgctcctgcgctgaccctgagctgcctggaggagcttagtcaggagaccaaggccaggatggaggaagaagcctacagcaagggattccaagaaggtctaaagaagaccaaagaacttcaagacctgaaggaggaggaggaagaacagaagagtgagagtcctgaggaacctgaagaggtagaagaaactgaggaagaggaaaagggcccaagaagcagcaaacttgaagaattggtccatttcttacaagtcatgtatcccaaactgtgtcagcactggcaagtgatctggatgatggctgcagtgatgctggtcttgactgttgtgctggggctctacaattcctataactcttgtgcagagcaggctgatgggccccttggaagatccacttgctcggcagcccagagggactcctggtggagctcaggactccagcatgagcagcctacagagcagtaggaaacctcacacctagccagtgccctgctctgagacactcagactaccaccctttccccaagtataacgtcaggcccaagtgtggacacactgccgcccatcccatcaggtcatgaggaagggttcttttaacactcggcacttctgtgggagctattcatacacagtgacttgatgttcttggaggatcaacaaaactgccctgggaaagcatccagtggatgaagaagtcaccttcaccaaggaactctattggaagggaaggtctcctgcccctagctcaggtggctggggagaactaaaacaccttcactggtggttgggggtaaggagcggggcacgggggaggaggaggtagggggcagtaaaaaacttactctcttttttcctctctgtaattggttatcaggaagaatttgcttaatgactaacaccctaagcatcagacctggaatttggagttgcaaagtgactatcttcccatttcccatctcattttcaataacttcagcctcccattctttcctttggaatgagagtttctttttacagaagtaggaaaggcttctcagaaaaaaaaaaaaaagtataggctgaatttagctcagtgcttgaaatgggaagatatgaattattatatacgcatctgtccacacatacacacatactgttgtgtacacacacacaacatgcctgtgcacagagccaacaacccttcaaaagtgtgctctgggtgtgtacctctggataaataagatgcatgccaagccaacccacagattttcaccagtgtggggcagtcaccaggcacctgttcaatgagctgtccacatggattgaagatgttttaaaaacacagaaaactcatggcttcaatggcagacttactagtctccatttcaaatgccaactctgagctgctgtacagcacaatctattccctattctctctttgaaaacagttaacccacctcacaggtgaatgaggagagaagatgtgctttctgcttcagtctcttactctgtgtgtgaccacatgcaagagtaaacttgcacctcagtgcttcagttcaaatggggtttccaaccccagtataattaggggtgtttcagagcatccccagttatttagcacaacactgaaggagcacatcccctctccattttgacttctctccccacttttacagccactgccttcatcagttttgtagaggtttgatttccatgtgggttttgttgtcattgttttgcatttttgttttgttattgatattgtttgctttcattgctaaaactcatatacgacttactatgagccaagcactgttctcagtattacataggtatgaattcatttaagtcctgaagaaaaagaaaaaaaaatacgaagtggatattacccttcccattttcaaataaggaaactgaagcacaaaaagaacaagtaacttgacaaggacaccccggtagtaaatcatggggctggagctcaaccccagggtaggctggctccagagctgtgctctccttgactcttctgatggtctcctagctggaagcctcacatttcagtctcattcccccaagtggcccatcagctactccatctctggctccccaactaaacagtttctctcatagtgctggacctccactcactagttttttttccagctgttcttctcttttcttcaggtcactcttctcgaccgagtgcaaaaattatcccctccataccagctttgatgaccttccttccatactcctcaccagacacaacataataggtcacacactcctctgtgctttctggcacgttttaaacattattattattgacctttacctatagtataccatggcctatttatgtatccatctcccctagcatttttcctcaaagacaagaaccatgtcttacccatctcttgggtaagtgcctagcatggtggctgacgcttgggagggtgtcattaaatgttgctcaaaagaacaagcaaacatttaaggtggtggagagcagcctggggacagctgacatgctgcatgcttctcagtaccagcaccatcacaatgcaaaaagcaacatctttcttaacctcagcttattctgtttttcagtctactctgtgagagagcaggaatgagaccagactagcaacaccattgccaagctcaaggactgggctcaatgcagtcactccttcagagagaccccccaccccaagcatgccccactttaaaatagcatgtttattgaagggggcatcctttacagtagctagaaaatgactgaggcccaagccagggttgatcaaggatgtgccattaaggtaaagagttacagagcagggcagagggactctgggggcagaagtggatgatttgcccggcctcttccagggggtctggatacaactgaaggagctttagctacatgaggccctcagagccaaagacaggatgcaaatagagttctagagagtggccgtggaagcagaactccaggtggggaatgttcaatctctgcctcccttaaagcagggccaggctcagctggccccattgttcacttggtcacaagtttcctacctttgtttctggatgagtcaaaggccaggaaggcagttatggagagctcctgcacctccagctgccccacagaaaagcctgcaagagtacttccaggcacaggccctctcccaccctattccatttgtaagcaagggaggtcgaggaaaaggacatctccaaaagggagcataagaatagccatatatacaggggctgaaaaagtgctcatgagtccatcttttctggaaagcaaagaccagcctgaagcagtgggagctgctgcccaagcggtagtgaactggagagaaacaggccctggattttcagtgaggatgtggatctgaagagtcccccaaatgcctctgaagtctgacatctctgcttagccctaggagtctggttccctgccttcagttgcagagtgatgtgtttgtgtcattgttgatgtcacctcctaaaaagaccttcactttctggctgccacaaagccatatgtgttgctccccatatacagcctgacagagtaaatggagaggaagtgctggatttgtgtatcactggctatcagttcctcatgttgttaagcctcacacaggtgtgctagcattgaactgtagagtgtcacatacctgagtttgaaaataaaagcacatttccaaacctc

SEQ ID NO: 233616 - DNA, 6126 bp, Artificial Sequence
  derived and/or modified sequence
attatcccccgagccaggccggagtggggctcccagaggagctctcggctctaagtcccagcccctctcagaggaggcgtgcggccgaggttctgcagccagaggcttctcggctctgagctccggagccagatgtaacattgaccttaaatggtaaaagctccccagagtgaagagaggctggccagaggaggaaaggagaataactcagttttagcctgtggagcccaggcctcttggagcatctttggggctgacgcagcggaggttccgggcacacgtggccactcccagcaggaggctgccatgccccacattcccgaggacgaggagccccccggagagccacaggcagcccagagccctgccggccaaggtcctcctgccgcaggagtatcttgcagtccaactcccacgattgtcctgactggggatgccacttcaccagaaggagaaaccgacaaaaacctggccaacagagttcacagtccccacaagaggctttctcaccgacacttgaaggtgtccactgcctccctgacatctgtggaccccgcggggcacatcattgacctggtgaatgaccagctgccagacatcagcatctcagaggaggacaagaagaaaaacctggcgctgctggaagaagccaagttggtgagtgagcgattcctgacccgccgtgggaggaagtccaggagcagccccggagactccccatcagctgtttccccgaacctcagccccagcgcttctcctacatcctctcggagcaactcacttacagtccccaccccgccaggtttggatgtgtgcagtggcccgccatcccctctgcctggagcaccaccacagaagggggatgaggccgacgtctcttcacctcaccctggcgagcctaacgtccccaaagggctagctgacaggaagcagaatgaccagaggaaagtgtctcagggcaggctggctcctcgtcctcctccagttgagaagtccaaagagattgcaatagaacaaaaggaaaacttcgatcccctccagtaccccgagaccacacccaaaggcctagctcctgttacaaacagcagtgggaaaatggccctgaacagccctcagcctggccccgtggagagcgagctggggaagcagctcttgaaaacgggctgggagggcagccctctgccgagaagtccaacccaggatgcggcaggagtgggtcccccagcctcccaggggagaggcccagctggagagccgatggggcccgaggctggctccaaagctgagcttccacccactgtgtcccggcccccgctgctgcgagggctctcctgggacagtggccctgaagaacctggcccccggctgcagaaagtgcttgccaagctgccactggcagaggaagaaaagcgttttgcaggcaaggccggcggcaagctggccaaggcccctggtctcaaagactttcagatacaagtgcagcccgtgcggatgcagaaactgaccaagctccgagaggagcacatcctgatgagaaatcagaacttagtggggctcaagcttccagaccttagtgaagcagctgagcaggaaaaagggcttccttctgaactctccccagctattgaggaagaagagtcaaagagtggcttagatgtcatgcctaatatttctgatgtgctgctgcgcaaactgcgggtccacaggagtctccctggaagtgcccctccactcactgaaaaggaagttgagaacgtgtttgtgcaactgtccttggcctttagaaatgacagctacactctggaatctagaattaaccaggctgaaagggaacgcaacctgacagaggagaacactgagaaagaactggaaaacttcaaagcttccattacgtcctcagcttcactctggcaccactgtgagcaccgggaaacctaccagaagttgctggaggacatcgctgtcctgcaccgcctggctgcccgcctctccagccgagctgaggtggtaggcgccgtccgccaggaaaagcgcatgtcgaaagcaacggaagtgatgatgcagtatgtggagaatctaaagaggacgtatgagaaggaccatgcggagctcatggagtttaaaaagcttgcaaatcagaattcaagccgcagctgtggcccctctgaagatggggtccctcgcacggcacggtccatgtccctcacgctgggaaagaatatgcctcgccggagggtcagcgttgctgtggttcctaagtttaatgccctgaatctgcctggccaaactcccagctcatcatccattccctccttaccagccttgtcggaatcacccaatgggaaaggcagcctacctgtcacttcagcactgcctgcacttttggaaaatggaaagacaaatggggacccagattgtgaagcctctgctcctgcgctgaccctgagctgcctggaggagcttagtcaggagaccaaggccaggatggaggaagaagcctacagcaagggattccaagaaggtctaaagaagaccaaagaacttcaagacctgaaggaggaggaggaagaacagaagagtgagagtcctgaggaacctgaagaggtagaagaaactgaggaagaggaaaagggcccaagaagcagcaaacttgaagaattggtccatttcttacaagtcatgtatcccaaactgtgtcagcactggcaagtgatctggatgatggctgcagtgatgctggtcttgactgttgtgctggggctctacaattcctataactcttgtgcagagcaggctgatgggccccttggaagatccacttgctcggcagcccagagggactcctggtggagctcaggactccagcatgagcagcctacagagcagtaggaaacctcacacctagccagtgccctgctctgagacactcagactaccaccctttccccaagtataacgtcaggcccaagtgtggacacactgccgcccatcccatcaggtcatgaggaagggttcttttaacactcggcacttctgtgggagctattcatacacagtgacttgatgttcttggaggatcaacaaaactgccctgggaaagcatccagtggatgaagaagtcaccttcaccaaggaactctattggaagggaaggtctcctgcccctagctcaggtggctggggagaactaaaacaccttcactggtggttgggggtaaggagcggggcacgggggaggaggaggtagggggcagtaaaaaacttactctcttttttcctctctgtaattggttatcaggaagaatttgcttaatgactaacaccctaagcatcagacctggaatttggagttgcaaagtgactatcttcccatttcccatctcattttcaataacttcagcctcccattctttcctttggaatgagagtttctttttacagaagtaggaaaggcttctcagaaaaaaaaaaaaaagtataggctgaatttagctcagtgcttgaaatgggaagatatgaattattatatacgcatctgtccacacatacacacatactgttgtgtacacacacacaacatgcctgtgcacagagccaacaacccttcaaaagtgtgctctgggtgtgtacctctggataaataagatgcatgccaagccaacccacagattttcaccagtgtggggcagtcaccaggcacctgttcaatgagctgtccacatggattgaagatgttttaaaaacacagaaaactcatggcttcaatggcagacttactagtctccatttcaaatgccaactctgagctgctgtacagcacaatctattccctattctctctttgaaaacagttaacccacctcacaggtgaatgaggagagaagatgtgctttctgcttcagtctcttactctgtgtgtgaccacatgcaagagtaaacttgcacctcagtgcttcagttcaaatggggtttccaaccccagtataattaggggtgtttcagagcatccccagttatttagcacaacactgaaggagcacatcccctctccattttgacttctctccccacttttacagccactgccttcatcagttttgtagaggtttgatttccatgtgggttttgttgtcattgttttgcatttttgttttgttattgatattgtttgctttcattgctaaaactcatatacgacttactatgagccaagcactgttctcagtattacataggtatgaattcatttaagtcctgaagaaaaagaaaaaaaaatacgaagtggatattacccttcccattttcaaataaggaaactgaagcacaaaaagaacaagtaacttgacaaggacaccccggtagtaaatcatggggctggagctcaaccccagggtaggctggctccagagctgtgctctccttgactcttctgatggtctcctagctggaagcctcacatttcagtctcattcccccaagtggcccatcagctactccatctctggctccccaactaaacagtttctctcatagtgctggacctccactcactagttttttttccagctgttcttctcttttcttcaggtcactcttctcgaccgagtgcaaaaattatcccctccataccagctttgatgaccttccttccatactcctcaccagacacaacataataggtcacacactcctctgtgctttctggcacgttttaaacattattattattgacctttacctatagtataccatggcctatttatgtatccatctcccctagcatttttcctcaaagacaagaaccatgtcttacccatctcttgggtaagtgcctagcatggtggctgacgcttgggagggtgtcattaaatgttgctcaaaagaacaagcaaacatttaaggtggtggagagcagcctggggacagctgacatgctgcatgcttctcagtaccagcaccatcacaatgcaaaaagcaacatctttcttaacctcagcttattctgtttttcagtctactctgtgagagagcaggaatgagaccagactagcaacaccattgccaagctcaaggactgggctcaatgcagtcactccttcagagagaccccccaccccaagcatgccccactttaaaatagcatgtttattgaagggggcatcctttacagtagctagaaaatgactgaggcccaagccagggttgatcaaggatgtgccattaaggtaaagagttacagagcagggcagagggactctgggggcagaagtggatgatttgcccggcctcttccagggggtctggatacaactgaaggagctttagctacatgaggccctcagagccaaagacaggatgcaaatagagttctagagagtggccgtggaagcagaactccaggtggggaatgttcaatctctgcctcccttaaagcagggccaggctcagctggccccattgttcacttggtcacaagtttcctacctttgtttctggatgagtcaaaggccaggaaggcagttatggagagctcctgcacctccagctgccccacagaaaagcctgcaagagtacttccaggcacaggccctctcccaccctattccatttgtaagcaagggaggtcgaggaaaaggacatctccaaaagggagcataagaatagccatatatacaggggctgaaaaagtgctcatgagtccatcttttctggaaagcaaagaccagcctgaagcagtgggagctgctgcccaagcggtagtgaactggagagaaacaggccctggattttcagtgaggatgtggatctgaagagtcccccaaatgcctctgaagtctgacatctctgcttagccctaggagtctggttccctgccttcagttgcagagtgatgtgtttgtgtcattgttgatgtcacctcctaaaaagaccttcactttctggctgccacaaagccatatgtgttgctccccatatacagcctgacagagtaaatggagaggaagtgctggatttgtgtatcactggctatcagttcctcatgttgttaagcctcacacaggtgtgctagcattgaactgtagagtgtcacatacctgagtttgaaaataaaagcacatttccaaa

SEQ ID NO: 233617 - DNA, 2466 bp, Artificial Sequence
  derived and/or modified sequence
ctgaccggcgacgccaccagccccgagggcgagaccgacaagaacttggcaaaccgcgtgcatagcccccacaagcgcctgagtcaccgccacttaaaggtttctaccgcttcactaacctccgtcgatcctgccggccacatcatcgatttagtgaacgatcagctcccagatattagtatcagtgaagaagacaagaaaaagaatctcgccctactggaagaggctaagcttgtcagtgagaggttcctgaccaggagagggcggaagtctcgcagttcccctggagatagcccaagtgccgtgtctcccaatttgtctccatcagcatctccaacaagttcacggtcaaattctctcactgtgcctacaccacctggtctagacgtttgtagtgggcccccttcgccactgccaggcgccccacctcaaaaaggcgacgaggccgatgtctcatccccccatccaggagagcctaacgtccccaaaggcttagctgacaggaaacagaacgatcagcgcaaggtcagccagggcagactcgcccctcggccccccccagttgagaaaagcaaagagattgcaatcgagcagaaggaaaattttgaccctttgcagtaccctgagactacccctaaaggcctggcacctgtcactaatagttctggcaaaatggccctgaattccccccagccagggcccgtcgaaagtgaattaggtaaacaactgctaaaaactggctgggagggatctccgcttcccaggagtcctacacaagatgctgcgggtgtcgggcctcctgcatcgcaggggcggggcccagcgggagaaccgatgggccccgaggcaggaagtaaggccgaattgccccctacagtatcgcggcccccccttctgaggggcctgtcctgggattctggccccgaggaaccagggccaagactgcagaaagtgttggctaagctacccctcgccgaagaagaaaagcgctttgcgggcaaagccggcggaaaactggcgaaggcacctggactgaaggactttcagatacaggtgcagccggtcaggatgcaaaagcttaccaaactaagagaagagcatattctgatgagaaatcagaacctggtaggtctgaagctgcccgatctgtctgaggctgccgaacaggagaagggcttacctagtgaactgtcacccgctatcgaggaagaggaatctaaaagcgggctggatgtgatgcctaatattagcgacgtgctgctcagaaagctccgagtgcacagatctttacccggatctgctcctcccctaaccgaaaaggaggtcgaaaatgtcttcgtgcagcttagtttagccttcaggaacgattcctatacactcgagtcccggattaaccaggccgagagagagcggaacctgacagaagagaatacagagaaggaactggagaattttaaggcctcaataacatcttcagcctcgttgtggcaccattgcgaacaccgggagacttatcagaaactgttagaggacatagcagttcttcacaggcttgccgcaaggctatcctctagagctgaagtggtcggtgctgtgaggcaggagaagcggatgagcaaggccaccgaggtgatgatgcaatatgtagaaaacctgaagcgcacttacgagaaggaccatgctgagctcatggagttcaaaaagctggccaaccagaatagctcacggagctgtggcccgtcagaagatggtgtcccgaggaccgccagatctatgtccctgaccttggggaagaacatgcctcggcggcgagtctccgtggcagtggtgccgaagtttaatgccctgaacctcccgggtcagacccctagcagctcctcgataccatcattacccgccctgtcggagtcgcccaatggtaaggggtctctgccagtcacttccgctttgcccgctctgcttgagaatggaaagaccaacggcgacccggactgtgaggcctctgcgccagccttaaccctgtcatgtctggaagagctcagccaggaaacaaaggcgcgtatggaggaggaggcctatagtaagggctttcaggagggcctcaagaagacgaaagaacttcaggacctgaaagaagaagaggaggaacagaaatccgaatcccctgaggaacctgaagaagtggaagaaacagaggaagaggagaagggccccagatcgagcaagctggaggaactcgtgcacttcttgcaggtaatgtacccaaagctgtgtcaacactggcaggtcatttggatgatggcagcagtgatgcttgtcctgacagtcgtgctcgggctatacaattcctacaactcttgcgctgagcaggctgatggaccccttgggcggtccacttgttccgcggcccagcgggattcctggtggtctagcggcctgcagcatgagcaaccaactgaacaatag

SEQ ID NO: 233618 - DNA, 2466 bp, Artificial Sequence
  derived and/or modified sequence
ctgaccggcgacgccaccagccccgagggcgagaccgacaagaacttggctaatcgcgtgcattcaccgcacaagaggctcagccacaggcacttaaaggtaagcacggcttcactcacatccgttgatcctgccggccacatcatcgacctagttaacgaccaattgcccgacatctcgatcagcgaagaagacaagaagaaaaacctggctcttttggaagaggccaagttagtgagtgaacggttcctaaccaggagaggccgaaagagccgctcaagcccaggtgatagtccatcagccgtatcaccgaatctgtcaccttctgcaagcccaacatccagtcggtctaatagcctcactgttcctacccctcctggcctcgatgtatgctcagggccccccagtccactgccaggggctcctccacagaaaggcgacgaggcagacgttagttccccacatccaggcgaaccaaatgttcctaagggcctggccgatcgaaagcaaaatgaccagcgaaaggtatctcagggtagactagctccccgcccacctcccgtggagaagtccaaagagatcgccatcgagcagaaagaaaactttgaccccctgcagtaccccgagactactcccaaggggctggcacctgtgacgaactcgagcgggaaaatggccttgaattctcctcagcctggccccgtcgagtcggagctgggcaagcagctcctcaaaacaggctgggagggcagtccccttccccggtcccctactcaggacgccgctggagtgggtcccccggcatctcaaggacgaggccccgccggcgagcctatggggcccgaggccggatccaaggctgaacttcctcccaccgtgtctagacctcctctgctacggggtctgtcctgggattctggccccgaagagcctggtcctcggctgcagaaggtccttgccaaactacccctggcagaggaggagaagcgatttgctggaaaggccggaggaaaactcgctaaggctcccgggttgaaggacttccagatccaggtacaacccgtgaggatgcaaaagttaaccaagttgagagaggaacacattctgatgaggaatcaaaatttggttggcctaaagctgccagacttgtccgaagctgcagaacaggaaaaaggtcttcctagcgagctgagccctgccattgaggaagaagaatccaaatccgggcttgatgtgatgcctaacatctcagacgtgctcctgaggaagctgagggttcatagatctcttccaggatcagcgccgccccttaccgagaaagaggtcgaaaatgtctttgtgcagctgagcctcgccttccgcaacgattcctacaccttggagtctcgaatcaaccaggccgagcgtgaacgcaacttaactgaggagaataccgaaaaggaactggagaacttcaaggcctccatcactagcagtgcatcactgtggcaccactgtgaacacagggagacctatcagaaactcctggaggacattgccgtgctccatagattggccgcgcggctgtcgagccgggccgaagtagtgggagcagttcggcaagaaaaacgtatgtctaaagccaccgaagtcatgatgcaatacgtggagaacctcaagagaacgtacgagaaagaccacgcagaacttatggagttcaaaaagctcgccaatcagaactcttcacggagctgcgggccaagcgaggatggcgtcccacgaactgcccgcagcatgtccctcactctgggtaaaaacatgcctaggcgtcgtgtctccgtggccgtagtgccaaagttcaatgcactgaacctgccaggacaaacacccagcagctcatccattccgtcactcccagctttgtcggaatctcccaatggtaaggggagcctaccggtgacctctgcccttcctgccttgttggagaacggcaaaaccaacggcgatcctgattgtgaagctagcgcccccgcactcaccctgagttgcctggaggagttatctcaggaaaccaaggctcgtatggaagaagaagcgtacagcaagggctttcaggaggggttgaaaaagaccaaggagttgcaagatctcaaagaagaagaggaggagcagaaaagcgagtccccagaagaaccagaggaagtggaagaaaccgaagaggaggagaagggaccccggtccagcaaactggaggagctcgtccactttctgcaagtcatgtaccccaagctctgtcagcactggcaagtgatttggatgatggcagcagtgatgttagtcctgaccgttgttctgggcctgtataattcctacaattcctgtgctgagcaggctgatggccccctgggcaggagcacttgtagcgctgcccagcgggattcttggtggagttctggtcttcagcacgaacagcctaccgagcaatag

SEQ ID NO: 233619 - DNA, 2739 bp, Artificial Sequence
  derived and/or modified sequence
atggtgaaggccccccagagcgaggagcggctggcccggggcggcaaagagaataactcggtattagcttgcggagcgcaggccagctggagtatctttggagcagatgccgctgaggtgcccggaactcgggggcactcacagcaggaagcagccatgcctcacataccagaggacgaagagccgcctggcgaaccacaggcagctcagtcccccgcagggcagggccctcctgcagcaggtgtaagctgctccccaacgccgacaatcgtcctaactggcgacgccaccagccccgagggagagaccgataagaaccttgctaaccgtgtgcatagccctcacaagaggcttagtcaccggcacctaaaagtgtccactgcaagcctgactagcgtggatccagccggtcatatcatcgatctagtgaacgaccagctgcccgatatcagcatttccgaagaggataagaaaaagaacttggccctgctggaggaagccaagctggtcagtgagaggtttctgacccgacgcggccgcaaaagcagatccagccctggcgattcgccatctgctgtcagcccaaaccttagccccagcgcctcccccacttcctcccgttcaaacagcctgacagtaccaactccacccggcttggacgtttgcagcgggcctcccagccccctgcctggagctccgccacagaaaggcgacgaagcagacgttagttccccgcacccaggagaacccaatgttcccaaggggcttgccgatcggaagcagaatgatcaacggaaagtcagccaggggaggctggcccctagacctccacctgtggaaaagagcaaggaaatcgctattgagcagaaagaaaactttgaccctctgcagtaccccgagacaacccctaaaggcctagctcccgtcaccaactcatctggcaaaatggccctgaactctccccagcccggtccagttgaaagcgaattgggtaaacagctgttgaagacaggctgggagggatcccctctgccgcggagcccgacccaggacgcggccggagtgggacccccagcatctcagggccggggtccagcaggagagcctatggggccagaagctggaagcaaagcggagctgccaccaacagtctcccgtcctcctctcttacgcgggttatcatgggactctgggcccgaggagcctggcccaagactccagaaagttctagcaaagctccccctggccgaagaggaaaaaagattcgcgggcaaagctggcggaaagctagctaaggcaccaggactgaaggacttccagattcaggttcagccagtcagaatgcagaagcttaccaagcttagggaggaacacatcctgatgcgcaaccagaatctggtgggtttgaaacttcccgatctttcagaggcagccgaacaagagaaaggactgccttctgagttgagtccagccatcgaggaggaggagtctaaatctggcttggatgtgatgccaaacatttctgatgtcctcttgcggaaattgagggtgcataggtctctgccgggcagtgccccccctctgacagagaaggaagttgagaacgtattcgttcaactctctttggcatttcggaacgattcctacactctggagtctaggatcaaccaggcagaacgggagcgcaacctgacagaggaaaataccgaaaaggagctggagaatttcaaagcatccatcactagttccgctagtctctggcaccactgcgagcatagggaaacataccagaaactgttggaagacattgcggttcttcaccggctcgccgcccggctatcatcgcgcgccgaagttgtcggagcagtaagacaagaaaaacgcatgtccaaagctaccgaagtgatgatgcaatacgtggaaaatctgaagaggacatatgagaaagaccatgccgagctcatggagtttaagaaacttgccaatcagaacagctcccgaagctgtggaccttcagaagatggggtgccccgaacagctcgatcaatgtcacttactctggggaagaacatgccacggcggcgggtgtccgtggcagtggtgccaaagttcaacgcacttaatctcccagggcagacgcctagcagctcgagcattccctccttacccgccctgtctgaaagcccgaacgggaaaggatccctccctgtgaccagtgccctaccggcactcctggagaatggcaaaactaatggtgatccggattgtgaggccagcgcccccgcactgacactgagctgtctggaagagctgtcacaggaaaccaaggccaggatggaggaagaggcttactccaagggcttccaggaggggctgaaaaaaacgaaggagctgcaggatttgaaggaggaggaagaggagcagaagtcggagagtccggaggagcccgaagaagtcgaagaaaccgaggaggaggaaaaaggacctcggtcttctaagttagaggagctcgttcacttcctccaggtgatgtaccccaaattatgtcagcactggcaggtcatctggatgatggcagctgtgatgctggttctgaccgtagtcttaggtctgtacaatagctataacagttgtgctgaacaggccgacggcccccttgggaggagtacatgcagcgctgcccagcgggacagctggtggtcctccggcctgcaacatgaacagcccactgagcagtag

SEQ ID NO: 233620 - DNA, 2466 bp, Artificial Sequence
  derived and/or modified sequence
ctcaccggtgacgccacaagtcctgaaggcgaaacagacaaaaatcttgccaacagagtacactcaccacacaagaggctgagccaccgtcacctcaaagtttccacagcttccctcaccagtgttgaccctgctggacacataatcgacctggtgaacgatcaattgcctgacatctccatcagtgaagaagataagaagaagaaccttgcattgttagaggaagctaaactggtatctgagcggtttcttactcgcaggggacggaagagccggagttcgccaggcgactcaccatctgctgtgtctccaaacttgtcaccatcggcctctcccacctctagtcgctcaaattctctgacagtaccaacacctccaggccttgacgtatgctcagggcctccttcaccactgcctggcgcaccccctcaaaaaggcgatgaagcggatgtgagcagcccccacccaggagagccgaatgtacccaagggcctagctgaccgcaagcagaatgatcagcggaaggtcagccaaggacgactggccccaaggccacctcccgttgaaaaaagtaaggaaatagcaatcgaacagaaggagaattttgatccattgcagtaccctgagaccacacctaaaggattggctcctgtgaccaacagcagtggcaagatggctctgaatagcccccaaccaggaccagttgagtctgagttggggaagcagctcttgaaaactgggtgggaaggctcaccactcccacgctcccctacccaggatgcagccggtgtgggacctcccgctagtcagggcagagggcctgctggcgagcccatgggaccagaggctggctccaaggccgagctacctcccactgtctccaggccgcctttactgaggggactgtcttgggattcaggtcccgaggagcctggacctaggcttcagaaagtcctcgcaaagcttcccctcgccgaggaggagaagcgcttcgctgggaaggccggtggcaaactggccaaagcccctggcctgaaggactttcaaatacaggtgcaacccgtaagaatgcagaaactgacaaaactgcgggaggagcacatcctaatgagaaatcaaaacttggtgggccttaagctcccggacttgtccgaggcagccgagcaggaaaaaggcctcccttccgaactcagccctgctatcgaggaggaagaaagcaaaagtggcctcgatgtgatgcctaacatctccgatgtgctcctccggaagctgagggtgcacaggtctcttcctgggagcgcccctccattgacggagaaggaggtggagaatgttttcgtacagctatcacttgcctttagaaatgattcctacacattggagtccaggataaatcaggccgagcgagagagaaatctgaccgaagagaacacagaaaaggaactggaaaacttcaaagccagcattacatcctccgctagtctgtggcatcactgcgaacaccgggaaacctatcagaagctgttggaagacatcgccgttctccataggttagccgcacgactctctagtagggcagaggtggttggagcagtgaggcaagaaaaaaggatgagcaaagccacggaggtgatgatgcagtacgtggagaatcttaagcggacctacgaaaaggaccatgctgagttaatggaattcaaaaagctcgctaatcagaacagctctcgcagttgtgggcctagcgaagatggtgtccccagaacagccaggtcaatgagtttaacactcggcaagaatatgcccaggagaagggtgagtgtcgcggttgttccaaagtttaatgcccttaatctccctggccaaaccccctcaagttccagtatccctagcttgccagccctgtcagagtcacccaacggtaaaggctcgctccctgtgacttctgcactgccagcactgcttgagaacgggaaaaccaatggggaccctgattgcgaggccagtgcgccagccctcacactaagctgtcttgaggagttatctcaggagactaaagcgcgaatggaagaggaagcttattccaagggatttcaggaaggcctgaaaaagacaaaggagttgcaggacctcaaggaagaagaggaggaacaaaaatctgaaagtcccgaggagcctgaagaggtggaggagacagaagaggaagaaaagggtcctcggagttccaagcttgaagaactcgtccacttcctgcaggtgatgtatccaaaactgtgtcagcactggcaggtcatttggatgatggccgcagtgatgctggtactgaccgttgtcttagggctgtataacagctataactcctgcgcagaacaggccgacggcccattaggcagatccacttgtagcgccgcacagagggactcatggtggagtagtggcctccagcatgagcagcctactgaacaatag

SEQ ID NO: 233621 - DNA, 2466 bp, Artificial Sequence
  derived and/or modified sequence
ctcacgggcgacgccactagtcctgagggagagaccgacaaaaaccttgccaaccgcgtgcatagcccgcacaaaagactcagtcacagacacctaaaagtctccactgctagccttacctccgtggatccagccggacatatcatcgatctagtgaacgaccaactgccagatatttctattagtgaagaggacaagaagaaaaatctcgctttactggaggaagcgaaactggttagcgaacgattcctgactcggcgagggagaaagagtcgcagttccccaggagacagcccttctgctgtctcccctaatttatccccgtccgccagccctacttcctcgcgatctaactctctgaccgtgccaacacctcccggactggatgtgtgctcaggtcctcccagccccttgcctggcgcacctcctcaaaagggcgacgaggctgatgtcagctctccccatcctggagaaccgaacgtgccaaaaggcctcgctgaccgcaagcaaaacgaccaaagaaaggtgtcccaaggacggctcgccccacgcccacctccagtggagaagagcaaagaaattgccatagaacagaaagagaacttcgatccgttgcagtaccccgagactactcctaagggccttgcccctgtgactaactccagcggcaaaatggcactaaactcaccgcaacctggacctgtcgagtctgaattaggcaagcagctgctcaagacaggttgggagggttcacccctacctagaagcccaacacaggatgcagcaggggtggggccacctgcatctcagggacgaggacccgcaggcgagccaatggggccagaggctggctctaaagctgaattgcctccaaccgtgtctcggcctcccctcctacggggactgtcgtgggattcggggcctgaggagcccggacctaggctgcaaaaagtcttggctaagctgcccctggccgaagaggagaagagattcgcaggtaaagccggaggtaaattagctaaagcgcctggactgaaggattttcagatccaggtacagcccgtgcgaatgcaaaaactgaccaagctgagggaggagcacatcctgatgcgtaaccagaacctcgtaggcctgaaattgccagacctgagcgaggccgctgaacaggagaaggggttgccttctgagctgtctcctgctatcgaggaagaggaaagtaaatctggtttggacgtcatgcccaatatcagcgacgttctcctgaggaaactcagagtacatagaagtctcccagggagcgcaccccctctgacagagaaagaggtcgagaacgtgttcgtgcaattgagcttggcatttcgaaacgattcctatactttagaaagtaggattaatcaggcagagagggagcgaaacttgacagaggaaaatacggaaaaggaactggaaaactttaaagccagtatcacctcctcggccagtctttggcaccactgcgagcatagagaaacataccagaaactgctggaggacattgccgtgctacaccgattagctgcgagactgtcctccagagccgaggtggtcggggcagttaggcaagaaaaaagaatgtccaaggccactgaagtgatgatgcagtacgtggaaaacctgaaacgcacatatgagaaagatcatgccgaacttatggagtttaagaaattggccaaccagaattcctctcgcagttgcgggcctagcgaagatggagttccacggaccgcacgcagcatgtccctgactttgggaaaaaatatgcctaggcgcagggtctcagtcgcagtcgtcccaaagtttaatgcccttaacttaccaggacaaacaccgtcatcctcaagcatcccgagcctaccggcactgagcgaatcaccaaacggtaagggctcgctgccagtgacttctgctcttccagccctgcttgaaaacggcaaaaccaacggagatcctgactgtgaggccagtgctcccgcactaaccctttcttgtctcgaagagctgagccaggaaactaaagcacgcatggaagaggaggcctatagcaagggctttcaggaaggactgaagaagaccaaggaactccaggacctcaaggaagaggaagaagagcaaaaaagcgaaagtcccgaagaaccagaggaggtggaggagactgaagaggaggagaagggaccccgatctagcaaacttgaggaactggtccattttctgcaagtcatgtaccctaaactctgccaacactggcaggttatttggatgatggccgctgtaatgcttgtgttgactgtcgtactgggcctgtataatagctataattcttgcgccgagcaggccgatggccctctagggagaagtacatgctcagccgctcagagagactcttggtggagctccggcctgcagcacgagcaacccacagagcagtag

SEQ ID NO: 233622 - DNA, 2739 bp, Artificial Sequence
  derived and/or modified sequence
atggtcaaggcaccacaatccgaggagcgcctggcacgcggtggtaaagagaataactctgtcttggcttgtggagcccaggcctcctggtcaattttcggagccgatgctgctgaagtgcccggaacccgcggacattcccagcaagaagcagcaatgccacacatcccagaggatgaggaacctcctggcgaacctcaggccgctcagtctcccgctggtcagggcccacctgccgcaggggtgtcttgcagtccaactccaacgatcgtgctgacaggtgacgcaacatcacccgagggagagaccgacaaaaacctcgccaacagagttcatagccctcacaagcgcctatcccacagacacctcaaagtcagtaccgccagcctgacttcagtggatccagctggacacattatcgacttggtcaatgaccagctgcctgatatatctatcagtgaagaggacaaaaagaagaatttggctcttcttgaagaggctaaactcgtctcggaacggtttctgacccgaaggggcagaaaaagccgcagtagcccaggagattcgcctagcgctgtctctcccaacctttccccctccgcatcaccaacaagttcccgcagtaacagcctcacagtgccaacacccccaggattggatgtatgcagtggccctccatcgcccctacccggtgccccaccacagaagggagatgaagcagatgttagcagtccacatccaggggaaccaaatgtccccaagggattagctgatagaaagcagaatgatcagcggaaggtctcacagggtcgcttggccccacggccacctcctgtcgagaaaagcaaagagatcgctatcgaacagaaagaaaatttcgatcctctgcaatatcctgagacgacacccaaagggctggctcccgtgacgaactctagcgggaagatggctctaaattcaccacagcccggacctgtcgaaagtgagctggggaaacagctattgaagaccggctgggaagggtccccattacctcgctccccaacgcaggacgctgctggcgttggaccacccgcatcccagggccgtggccctgctggcgaacctatgggcccagaggctggcagtaaagctgagttacccccaacagtgtctcgaccccctctgctcaggggactgtcttgggacagtggccctgaagaacccggtccgagactgcagaaggtgctggctaaattgcctttagccgaagaggaaaagagatttgccggaaaggcaggcggaaagctggccaaagctcccggactcaaggactttcagatacaggtccagccagttcggatgcaaaagctgacgaaattgcgcgaggagcacatcctgatgcggaaccagaacctcgtgggactcaagctgcccgatctcagcgaagccgcagagcaggagaaaggattgccgagcgagttgtctcctgcaattgaagaggaggaatccaaatctggcctggatgtgatgcctaacattagtgacgtcctgcttcgaaaactcagggtccaccggtccttgccaggcagcgcgccaccactaacagagaaagaggtggaaaatgtttttgtacaactcagtctcgccttccgcaatgatagttatactttagaatccaggatcaatcaggctgagagggagcgtaacctcactgaagagaataccgaaaaggagttagagaattttaaggccagcattacgagttcggcgagcctatggcaccactgcgaacacagagagacataccaaaaactgcttgaggacatcgcagttttgcacagactggctgcacggctgtcctcacgcgcagaggttgtcggcgctgtcagacaagagaagaggatgtctaaagcaactgaggtgatgatgcaatacgtggagaacctcaaaaggacttacgagaaagaccacgccgaattaatggaatttaagaaactggcaaatcaaaacagtagtagaagttgcggcccttcagaggacggggtccctaggacagcaaggtctatgagcctcacactgggcaaaaatatgcctaggagacgagtttccgtggcagtcgtccctaaattcaatgcactcaatctccctggccagaccccgtcaagtagctctataccttccctgccggcactgagtgaaagcccgaacgggaaaggttcgctcccagtaacatcagccctccctgccctgctagaaaacggaaaaacaaatggagatcccgactgcgaagcttccgcccctgcacttaccttgtcctgcctggaggaactgtcacaagagacaaaggctcgaatggaggaggaggcctacagcaagggcttccaggaggggctgaagaaaaccaaggaactacaggacctcaaagaagaggaagaagaacagaagtccgaatcccctgaggagcccgaagaggtagaagaaacagaggaagaagagaagggccctcgttcttccaaactagaggaattagttcatttcctgcaggtgatgtaccctaaattatgtcagcattggcaggtaatctggatgatggctgctgttatgctggtcctgacagtggtgttgggtctctacaactcatataattcttgtgccgagcaggcagacgggcctctgggacggtcgacatgctctgccgctcagcgcgattcatggtggtcctccggcctgcaacatgagcaacctaccgagcaatag

SEQ ID NO: 233623 - protein, 742 aa, Artificial Sequence
  derived and/or modified sequence
MKDDFAEEEEVQSFGYKRFGIQEGTQCTKCKNNWALKFSIILLYILCALLTITVAILGYKVVEKMDNVTGGMETSRQTYDDKLTAVESDLKKLGDQTGKKAISTNSELSTFRSDILDLRQQLREITEKTSKNKDTLEKLQASGDALVDRQSQLKETLENNSFLITTVNKTLQAYNGYVTNLQQDTSVLQGNLQNQMYSHNVVIMNLNNLNLTQVQQRNLITNLQRSVDDTSQAIQRIKNDFQNLQQVFLQAKKDTDWLKEKVQSLQTLAANNSALAKANNDTLEDMNSQLNSFTGQMENITTISQANEQNLKDLQDLHKDAENRTAIKFNQLEERFQLFETDIVNIISNISYTAHHLRTLTSNLNEVRTTCTDTLTKHTDDLTSLNNTLANIRLDSVSLRMQQDLMRSRLDTEVANLSVIMEEMKLVDSKHGQLIKNFTILQGPPGPRGPRGDRGSQGPPGPTGNKGQKGEKGEPGPPGPAGERGPIGPAGPPGERGGKGSKGSQGPKGSRGSPGKPGPQGSSGDPGPPGPPGKEGLPGPQGPPGFQGLQGTVGEPGVPGPRGLPGLPGVPGMPGPKGPPGPPGPSGAVVPLALQNEPTPAPEDNGCPPHWKNFTDKCYYFSVEKEIFEDAKLFCEDKSSHLVFINTREEQQWIKKQMVGRESHWIGLTDSERENEWKWLDGTSPDYKNWKAGQPDNWGHGHGPGEDCAGLIYAGQWNDFQCEDVNNFICEKDRETVLSSAL

SEQ ID NO: 233624 - DNA, 2229 bp, Artificial Sequence
  derived and/or modified sequence
atgaaggacgactttgcagaagaagaggaggttcagagctttggatataagagatttggtattcaggaaggcactcaatgtacaaagtgtaagaacaattgggctcttaagttttccattattctcttatatattttgtgcgcattgctcacaattaccgtcgctatcctgggttataaagtggtggagaagatggacaatgtgaccggcgggatggagacttcaagacagacatacgatgataaattgacggcagtcgagtccgatttaaaaaagctcggtgaccagaccggcaaaaaggctatcagtacaaatagcgagctgtctacatttcgcagcgatatcctcgatttgcggcagcagctgcgtgaaattaccgagaagaccagcaaaaataaagacactctagaaaaactccaggcctcgggtgacgccctggtggatcggcaaagccagctgaaggagacattagaaaataactcattcctgatcaccaccgtgaataagacccttcaggcgtacaatggttatgtgactaacctccagcaagatacttccgtattacagggcaacttgcaaaaccagatgtattcacataatgtcgtgatcatgaacctgaataacctgaaccttactcaggttcaacaacggaatttaatcacgaaccttcagcgatccgtggacgacacgtcccaggcaattcagagaatcaaaaacgattttcagaatttgcagcaagtgtttctgcaggcgaagaaggacacggactggctaaaagagaaggttcagtcattgcagactcttgccgctaacaacagcgccctggcaaaagcaaataacgacactctcgaagacatgaactcacagctgaactcattcaccgggcaaatggagaatataacgacaattagccaggccaacgaacagaacctcaaggacctccaggacctccacaaggacgccgagaaccgcaccgccatcaaattcaatcagctcgaggaacgttttcagctattcgagaccgatatcgtgaatatcatttctaacatcagctacaccgcccaccatctgagaaccctaacctctaatctgaatgaagtgcgcactacatgtacagacacactgaccaagcatacagatgatctcacatccctgaataatacactcgccaacatccgtcttgattctgtttcactaaggatgcagcaggaccttatgcgcagccggctggacaccgaggtggctaacctctccgtgatcatggaggagatgaagttggtggacagcaaacatgggcagttgattaagaatttcacaattttacaaggccctcctggaccaagaggcccaaggggggacaggggatcccagggccctccaggcccgacaggcaataagggacagaaaggggaaaagggcgagcctggtccgccaggtcccgccggggagaggggaccgattgggccagctggccctcccggggagagaggggggaagggatccaaggggtcgcagggtcccaagggatctcgcggctcaccgggtaagcccggcccgcagggcagttcaggtgaccccggccctccaggaccaccaggaaaggaagggctgcctggccctcagggacctcctgggtttcagggtctccagggcactgtcggggagcctggtgtccccggacctcgcggtctgcccggcctccccggcgtgcctgggatgccaggcccgaagggccccccaggacccccaggaccttctggagccgtggttcccctggccctgcaaaatgaacccactccggcccccgaagataatgggtgtcccccacattggaaaaatttcacagacaaatgttactacttctccgtggagaaggagattttcgaagacgctaagctgttttgtgaggataaatcctctcacctggtgttcatcaatacccgcgaagagcagcagtggatcaagaaacagatggtaggaagagagagtcactggatcgggctgactgactcagagagggaaaacgaatggaagtggcttgacggcacatctccagactataagaattggaaggccggacaaccagataactggggccatgggcacggacctggtgaggactgtgcggggctgatctatgcgggacagtggaatgatttccagtgtgaggacgttaacaattttatttgcgagaaggacagagaaaccgttctctccagcgctctttag

SEQ ID NO: 233625 - DNA, 2229 bp, Artificial Sequence
  derived and/or modified sequence
atgaaggatgactttgctgaggaggaggaggtgcagagctttggctacaagagatttggcatccaggagggcacccagtgcaccaagtgcaagaacaactgggccctgaagttcagcatcatcctgctgtacatcctgtgtgccctgctgaccatcaccgtggccatcctgggctacaaggtggtggagaagatggacaacgtgactggaggcatggagaccagccggcagacctatgatgacaagctgacagctgtggagagtgacctgaagaagctgggggaccagacaggcaagaaggccatcagcaccaacagcgagctgagcaccttcagaagtgacatcctggacctgcggcagcagctgcgggagatcacagagaagaccagcaagaacaaggacaccctggagaagctgcaggccagcggagatgccctggtggaccggcagagccagctgaaggagaccctggagaacaacagcttcctgatcaccaccgtgaacaagaccctgcaggcctacaacggctacgtgaccaacctgcagcaggacacctctgtgctgcagggcaacctgcagaaccagatgtacagccacaacgtggtgatcatgaacctgaacaacctgaacctgacccaggtgcagcagaggaacctgatcaccaacctgcagaggtctgtggatgacaccagccaggccatccagaggatcaagaatgacttccagaacctgcagcaggtgttcctgcaggccaagaaggacacagactggctgaaggagaaggtgcagagcctgcagaccctggccgccaacaacagcgccctggccaaggccaacaatgacaccctggaggacatgaacagccagctgaacagcttcaccggccagatggagaacatcaccaccatcagccaggccaatgagcagaacctgaaggacctgcaggacctgcacaaggatgctgagaacagaacagccatcaagttcaaccagctggaggagcgcttccagctgtttgaaacagacatcgtgaacatcatcagcaacatctcctacacagcccaccacctgcggaccctgaccagcaacctgaatgaggtgaggaccacctgcacagacaccctgaccaagcacacagatgacctgaccagcctgaacaacaccctggccaacatccggctggacagcgtgtccctgaggatgcagcaggacctgatgaggagccggctggacacagaggtggccaacctgagcgtcatcatggaggagatgaagctggtggacagcaagcacggccagctgatcaagaacttcaccatcctgcagggccccccaggcccccggggccccaggggggaccggggcagccagggccccccaggccccactggaaacaagggccagaagggggagaagggggagcccggccccccaggccctgctggggagcggggccccatcggccctgctggccccccaggagagcggggcggcaagggcagcaagggcagccagggccccaagggcagccggggcagccctgggaagccaggcccccagggcagcagcggggaccccggccccccaggccccccaggcaaggagggcctgcccggcccccagggccccccaggcttccagggcctgcagggcaccgtgggggagcccggggtgcccggcccccggggcctgcccggcctgcccggggtgcccggcatgcctggccccaagggccccccaggccccccaggccccagcggggctgtggtgcccctggccctgcagaatgagcccaccccagccccagaagataatggctgccccccccactggaagaacttcacagacaagtgctactacttctctgtggagaaggagatctttgaagatgccaagctgttctgtgaggacaagagcagccacctggtgttcatcaacacccgggaggagcagcagtggatcaagaagcagatggtgggccgggagagccactggattggcctgacagattctgagcgggagaatgagtggaagtggctggatggcaccagcccagactacaagaactggaaggccggccagcctgacaactggggccacggccacggccctggagaggactgtgccggcctcatctatgccggccagtggaatgacttccagtgtgaagatgtgaacaacttcatctgtgagaaggaccgggagaccgtgctgagcagcgccctgtag

SEQ ID NO: 233626 - DNA, 2229 bp, Artificial Sequence
  derived and/or modified sequence
atgaaggacgacttcgccgaggaggaggaggtgcagagcttcggctacaagcgattcggtatccaggagggaactcagtgcaccaaatgtaaaaataactgggcgctgaagttttctatcattctgctgtacatcctgtgcgctctgctgaccatcactgtagcgatcctgggatataaggttgtcgagaagatggacaacgtgaccgggggaatggaaacctccagacagacatatgacgacaaattaacagccgttgagtccgatctcaaaaagctgggcgatcagacgggaaagaaagcaatctccactaactccgaactcagcaccttcagaagcgacattctcgacttaagacagcagctccgcgagataacagagaagacttcaaaaaataaggacactcttgagaaattacaggcatccggcgacgctctggttgaccggcagagtcagctgaaggagacattggagaacaatagcttcctgatcactactgtcaataagaccttgcaggcctataatggatatgttactaatttgcagcaagatacaagtgtgctgcaaggtaacctgcagaaccaaatgtattctcacaatgtagtgattatgaacctgaacaatctaaacctgacccaggtccagcagcgcaatctaatcacaaacttgcaacggtcagtggatgacactagtcaggctatacagcggatcaagaacgatttccagaacctccagcaagtatttttgcaggctaagaaagataccgattggcttaaggagaaggtgcagagccttcaaaccttagcagcgaataacagcgccctcgccaaggcaaataacgatactctcgaggacatgaatagccagctgaactctttcacggggcagatggagaacataaccacgattagccaggccaatgagcagaacctcaaggatctgcaggatctgcataaggatgccgagaaccggactgcaataaagtttaatcaactggaggagagatttcagctttttgagacagacatcgtcaacatcatttctaacattagctataccgcgcatcacctgcgcacactgacgtccaacctcaatgaagtccgcactacatgcacagatactctaaccaagcataccgacgacctgacatcactcaataacacactggccaacatcagactggactctgtgtccctccgaatgcagcaagaccttatgaggtcacgcctggatacagaggtggctaacctcagtgtgatcatggaggagatgaagctcgtggactcaaaacatggtcaactaatcaagaattttactatcctgcaaggccctccaggtccgcggggaccccgaggggacaggggctcacaagggccccccgggcctactgggaataaaggacagaaaggggagaaaggagaaccaggcccccctgggccagctggagagaggggcccgattggacccgccggcccgcctggcgaacgcggaggcaaagggtctaaggggtctcaaggcccaaagggatccaggggcagccctggtaaaccaggtcctcaggggtccagtggagaccccggccctcctgggcctccagggaaggaagggcttcctggaccacaggggcctcccggcttccaggggctgcagggaaccgtcggtgaacccggcgtgcccggaccaaggggtttaccaggcctccccggagttcctggaatgcccggccccaagggtcccccgggtccgccaggcccttctggagccgtggtccctttagccctgcagaacgagcctacccccgctccagaggataatgggtgtccaccgcattggaaaaacttcacagataaatgctattacttttcggtggagaaggaaatatttgaggacgcgaagctgttttgcgaagataagtcctcccaccttgtgttcatcaatacaagagaggagcagcagtggatcaaaaagcaaatggtgggcagagagtcacattggatcgggctcacggactccgaaagagagaacgaatggaagtggctagacggaacttcacccgattataagaattggaaggccgggcagccagacaactgggggcatggacatggccctggggaagactgcgcgggtttaatatacgcgggacaatggaacgattttcagtgcgaggatgtcaacaattttatctgcgagaaggatagggagactgttctctcctcagcactgtag

SEQ ID NO: 233627 - DNA, 2229 bp, Artificial Sequence
  derived and/or modified sequence
atgaaggacgacttcgctgaggaagaggaggtccaatctttcgggtataaacgctttggcattcaagagggtacacaatgtaccaagtgcaagaacaactgggcgctgaaattctctatcatcctactgtacatactgtgtgctctgctgacaatcactgtggcaatactggggtacaaggtggttgagaaaatggacaacgttaccggaggcatggaaacatccagacagacgtacgatgataagttaaccgctgtagagagcgatctgaaaaagttaggtgatcaaacgggcaagaaagctatctcaacgaactcagagctgtccacttttcggtccgacatcttagatctcaggcagcagttgcgagagatcaccgaaaagacctctaaaaataaggacaccctggagaaactgcaggccagtggtgacgcgctggtcgacagacaatcccagctcaaagagaccctggaaaacaatagtttcctgatcacgaccgtaaataaaaccctacaggcctacaatgggtatgttacaaacctgcaacaggacacatctgttcttcaggggaatcttcagaaccagatgtattctcacaatgtcgtgataatgaaccttaataatctcaatctgacccaggttcagcagcgaaatctcatcactaacctccagaggtccgtcgatgacacctcacaggccatccagagaatcaaaaatgactttcagaacctccagcaggtcttcctgcaggctaagaaagacactgactggctcaaagagaaggttcaaagcctccagaccttagcagcaaataattccgctctcgccaaagctaacaacgataccctcgaagatatgaattctcagctcaatagcttcaccggacagatggaaaatataaccaccatttcacaggccaatgagcagaacctgaaagacctccaggacctgcacaaagatgcggagaatagaaccgccataaagttcaaccagttggaagagaggttccagctgtttgaaactgacatcgtgaatattatttccaacatcagctatactgcccaccaccttaggacattgactagcaatttaaatgaggttcgaacaacatgcacagatacactgaccaaacacaccgacgatctcacgtccctaaataatacattggcaaatatacgcctcgattccgtctctctgcgtatgcagcaggatctgatgcgctctagactggacactgaggtggccaatctctccgttatcatggaggagatgaagctcgtagactcgaagcatgggcagcttatcaagaactttacaattctccagggccctccgggtccccgaggacctcggggagacagaggctcccaaggccctcccggtcctactgggaataagggtcagaaaggagaaaaaggggagcccggacctccaggtcccgcaggcgagaggggccctatcgggccagccggaccaccaggcgaacggggaggaaaaggctccaagggctcccaaggacctaaagggtctcggggatcacctggcaagcccggaccccagggatcttctggagatcctgggccacctggacctcccggaaaagagggcctgccgggtccgcagggaccacctggcttccagggattgcaaggcaccgtaggcgaacctggggtaccaggccctaggggactgcccggtcttcctggagtcccagggatgcctggacccaagggacctccaggaccgcctgggcctagtggggctgtagtccctctggccctccagaacgagcctacgcccgctcctgaggataacggatgcccaccccactggaagaactttaccgacaaatgttactatttctcggtcgaaaaagagatctttgaggacgcaaagctcttctgtgaggacaagtcatcgcatctggttttcatcaacactcgcgaggaacagcagtggatcaaaaaacagatggttggaagagagtcccattggattggccttacagattccgagcgggagaacgagtggaagtggttggacggtacctccccggattataagaactggaaggccggacaacctgacaactggggccacggccacggcccaggagaagactgtgccggactgatctatgccggacaatggaacgacttccagtgcgaggacgttaacaatttcatttgcgagaaagaccgcgagacggtgctatcctcggccttatag

SEQ ID NO: 233628 - DNA, 3134 bp, Artificial Sequence
  derived and/or modified sequence
agagcggcgcgcgcggcagccccgaggcagcagagcgcggagccgggagcgcggggagcgcgggccggcggcggcgagggaggacgggggcgcagacggccggcgcgcggcgcggctaccatgggcgtgcggtgagcagccgctcgggacgacttcctcggctgcgcggcgctcgcgcggagctccccggccggcggtgcgtccccacggtcaccatgaaagacgacttcgcagaggaggaggaggtgcaatccttcggttacaagcggtttggtattcaggaaggaacacaatgtaccaaatgtaaaaataactgggcactgaagttttctatcatattattatacattttgtgtgccttgctaacaatcacagtagccattttgggatataaagttgtagagaaaatggacaatgtcacaggtggcatggaaacatctcgccaaacctatgatgacaagctcacagcagtggaaagtgacctgaaaaaattaggtgaccaaactgggaagaaagctatcagcaccaactcagaactctccaccttcagatcagacattctagatctccgtcagcaacttcgtgagattacagaaaaaaccagcaagaacaaggatacgctggagaagttacaggcgagcggggatgctctggtggacaggcagagtcaattgaaagaaactttggagaataactctttcctcatcaccactgtaaacaaaaccctccaggcgtataatggctatgtcacgaatctgcagcaagataccagcgtgctccagggcaatctgcagaaccaaatgtattctcataatgtggtcatcatgaacctcaacaacctgaacctgacccaggtgcagcagaggaacctcatcacgaatctgcagcggtctgtggatgacacaagccaggctatccagcgaatcaagaacgactttcaaaatctgcagcaggtttttcttcaagccaagaaggacacggattggctgaaggagaaagtgcagagcttgcagacgctggctgccaacaactctgcgttggccaaagccaacaacgacaccctggaggatatgaacagccagctcaactcattcacaggtcagatggagaacatcaccactatctctcaagccaacgagcagaacctgaaagacctgcaggacttacacaaagatgcagagaatagaacagccatcaagttcaaccaactggaggaacgcttccagctctttgagacggatattgtgaacatcattagcaatatcagttacacagcccaccacctgcggacgctgaccagcaatctaaatgaagtcaggaccacttgcacagatacccttaccaaacacacagatgatctgacctccttgaataataccctggccaacatccgtttggattctgtttctctcaggatgcaacaagatttgatgaggtcgaggttagacactgaagtagccaacttatcagtgattatggaagaaatgaagctagtagactccaagcatggtcagctcatcaagaattttacaatactacaaggtccaccgggccccaggggtccaagaggtgacagaggatcccagggaccccctggcccaactggcaacaagggacagaaaggagagaagggggagcctggaccacctggccctgcgggtgagagaggcccaattggaccagctggtccccccggagagcgtggcggcaaaggatctaaaggctcccagggccccaaaggctcccgtggttcccctgggaagcccggccctcagggctccagtggggacccaggccccccgggcccaccaggcaaagagggactccccggccctcagggccctcctggcttccagggacttcagggcaccgttggggagcctggggtgcctggacctcggggactgccaggcttgcctggggtaccaggcatgccaggccccaagggcccccccggccctcctggcccatcaggagcggtggtgcccctggccctgcagaatgagccaaccccagcaccggaggacaatggctgcccgcctcactggaagaacttcacagacaaatgctactatttttcagttgagaaagaaatttttgaggatgcaaagcttttctgtgaagacaagtcttcacatcttgttttcataaacactagagaggaacagcaatggataaaaaaacagatggtagggagagagagccactggatcggcctcacagactcagagcgtgaaaatgaatggaagtggctggatgggacatctccagactacaaaaattggaaagctggacagccggataactggggtcatggccatgggccaggagaagactgtgctgggttgatttatgctgggcagtggaacgatttccaatgtgaagacgtcaataacttcatttgcgaaaaagacagggagacagtactgtcatctgcattataacggactgtgatgggatcacatgagcaaattttcagctctcaaaggcaaaggacactcctttctaattgcatcaccttctcatcagattgaaaaaaaaaaagcactgaaaaccaattactgaaaaaaaattgacagctagtgttttttaccatccgtcattacccaaagacttgggaactaaaatgttccccagggtgatatgctgattttcattgtgcacatggactgaatcacatagattctcctccgtcagtaaccgtgcgattatacaaattatgtcttccaaagtatggaacactccaatcagaaaaaggttatcattggtcgttgagttatgggaagaacttaagcatatactgtgtaaacagtgccatacatttctaaaatcccaagtgtaggaaaaatatgcagacatacagatatataggccaactattagtaataatatgaaatatacttaaagagcttttaaaactttgtatttttgtacaaaatatttgtcttttacaatttttttcctttttttttttttgtcattttaccgacataatacatggagccaaagaaaacaataatggtactaataaaaactcctagggtttcctgtcagatttaattctacccagtggcaaagaattttttcaattgtggctttaaaaaaataattaaatatacatgtgtatatatata

SEQ ID NO: 233629 - DNA, 2229 bp, Artificial Sequence
  derived and/or modified sequence
atgaaggacgacttcgccgaggaggaggaggtgcagagcttcggctacaagagattcggcatccaggagggcacccagtgcaccaagtgcaagaacaactgggccctgaagttcagcatcatcctgctgtacatcctgtgcgccctgctgaccatcaccgtggccatcctgggctacaaggtggtggagaagatggacaacgtgaccggcggcatggagaccagcagacagacctacgacgacaagctgaccgccgtggagagcgacctgaagaagctgggcgaccagaccggcaagaaggccatcagcaccaacagcgagctgagcaccttcagaagcgacatcctggacctgagacagcagctgagagagatcaccgagaagaccagcaagaacaaggacaccctggagaagctgcaggccagcggcgacgccctggtggacagacagagccagctgaaggagaccctggagaacaacagcttcctgatcaccaccgtgaacaagaccctgcaggcctacaacggctacgtgaccaacctgcagcaggacaccagcgtgctgcagggcaacctgcagaaccagatgtacagccacaacgtggtgatcatgaacctgaacaacctgaacctgacccaggtgcagcagagaaacctgatcaccaacctgcagagaagcgtggacgacaccagccaggccatccagagaatcaagaacgacttccagaacctgcagcaggtgttcctgcaggccaagaaggacaccgactggctgaaggagaaggtgcagagcctgcagaccctggccgccaacaacagcgccctggccaaggccaacaacgacaccctggaggacatgaacagccagctgaacagcttcaccggccagatggagaacatcaccaccatcagccaggccaacgagcagaacctgaaggacctgcaggacctgcacaaggacgccgagaacagaaccgccatcaagttcaaccagctggaggagagattccagctgttcgagaccgacatcgtgaacatcatcagcaacatcagctacaccgcccaccacctgagaaccctgaccagcaacctgaacgaggtgagaaccacctgcaccgacaccctgaccaagcacaccgacgacctgaccagcctgaacaacaccctggccaacatcagactggacagcgtgagcctgagaatgcagcaggacctgatgagaagcagactggacaccgaggtggccaacctgagcgtgatcatggaggagatgaagctggtggacagcaagcacggccagctgatcaagaacttcaccatcctgcagggcccccccggccccagaggccccagaggcgacagaggcagccagggcccccccggccccaccggcaacaagggccagaagggcgagaagggcgagcccggcccccccggccccgccggcgagagaggccccatcggccccgccggcccccccggcgagagaggcggcaagggcagcaagggcagccagggccccaagggcagcagaggcagccccggcaagcccggcccccagggcagcagcggcgaccccggcccccccggcccccccggcaaggagggcctgcccggcccccagggcccccccggcttccagggcctgcagggcaccgtgggcgagcccggcgtgcccggccccagaggcctgcccggcctgcccggcgtgcccggcatgcccggccccaagggcccccccggcccccccggccccagcggcgccgtggtgcccctggccctgcagaacgagcccacccccgcccccgaggacaacggctgccccccccactggaagaacttcaccgacaagtgctactacttcagcgtggagaaggagatcttcgaggacgccaagctgttctgcgaggacaagagcagccacctggtgttcatcaacaccagagaggagcagcagtggatcaagaagcagatggtgggcagagagagccactggatcggcctgaccgacagcgagagagagaacgagtggaagtggctggacggcaccagccccgactacaagaactggaaggccggccagcccgacaactggggccacggccacggccccggcgaggactgcgccggcctgatctacgccggccagtggaacgacttccagtgcgaggacgtgaacaacttcatctgcgagaaggacagagagaccgtgctgagcagcgccctgtag

SEQ ID NO: 233630 - protein, 1505 aa, Artificial Sequence
  derived and/or modified sequence
MVHVARLLLLLLTFFLRTDAETPPRFTRTPVDQTGVSGGVASFICQATGDPRPKIVWNKKGKKVSNQRFEVIEFDDGSGSVLRIQPLRTPRDEAIYECVASNNVGEISVSTRLTVLREDQIPRGFPTIDMGPQLKVVERTRTATMLCAASGNPDPEITWFKDFLPVDTSNNNGRIKQLRSESIGGTPIRGALQIEQSEESDQGKYECVATNSAGTRYSAPANLYVRELREVRRVPPRFSIPPTNHEIMPGGSVNITCVAVGSPMPYVKWMLGAEDLTPEDDMPIGRNVLELNDVRQSANYTCVAMSTLGVIEAIAQITVKALPKPPGTPVVTESTATSITLTWDSGNPEPVSYYIIQHKPKNSEELYKEIDGVATTRYSVAGLSPYSDYEFRVVAVNNIGRGPPSEPVLTQTSEQAPSSAPRDVQARMLSSTTILVQWKEPEEPNGQIQGYRVYYTMDPTQHVNNWMKHNVADSQITTIGNLVPQKTYSVKVLAFTSIGDGPLSSDIQVITQTGVPGQPLNFKAEPESETSILLSWTPPRSDTIANYELVYKDGEHGEEQRITIEPGTSYRLQGLKPNSLYYFRLAARSPQGLGASTAEISARTMQSMFAKNFHVKAVMKTSVLLSWEIPENYNSAMPFKILYDDGKMVEEVDGRATQKLIVNLKPEKSYSFVLTNRGNSAGGLQHRVTAKTAPDVLRTKPAFIGKTNLDGMITVQLPEVPANENIKGYYIIIVPLKKSRGKFIKPWESPDEMELDELLKEISRKRRSIRYGREVELKPYIAAHFDVLPTEFTLGDDKHYGGFTNKQLQSGQEYVFFVLAVMEHAESKMYATSPYSDPVVSMDLDPQPITDEEEGLIWVVGPVLAVVFIICIVIAILLYKSKPDRKRAESDSRKSSIPNNKEIPSHHPTDPVELRRLNFQTPGMASHPPIPILELADHIERLKANDNLKFSQEYESIDPGQQFTWEHSNLEVNKPKNRYANVIAYDHSRVLLSAIEGIPGSDYVNANYIDGYRKQNAYIATQGSLPETFGDFWRMIWEQRSATVVMMTKLEERSRVKCDQYWPSRGTETHGLVQVTLLDTVELATYCVRTFALYKNGSSEKREVRQFQFTAWPDHGVPEHPTPFLAFLRRVKTCNPPDAGPMVVHCSAGVGRTGCFIVIDAMLERIKHEKTVDIYGHVTLMRAQRNYMVQTEDQYIFIHDALLEAVTCGNTEVPARNLYAYIQKLTQIETGENVTGMELEFKRLASSKAHTSRFISANLPCNKFKNRLVNIMPYESTRVCLQPIRGVEGSDYINASFIDGYRQQKAYIATQGPLAETTEDFWRMLWEHNSTIVVMLTKLREMGREKCHQYWPAERSARYQYFVVDPMAEYNMPQYILREFKVTDARDGQSRTVRQFQFTDWPEQGVPKSGEGFIDFIGQVHKTKEQFGQDGPISVHCSAGVGRTGVFITLSIVLERMRYEGVVDIFQTVKMLRTQRPAMVQTEDQYQFSYRAALEYLGSFDHYAT

SEQ ID NO: 233631 - DNA, 4518 bp, Artificial Sequence
  derived and/or modified sequence
atggttcatgttgcacggctactgctgcttcttctgaccttcttccttaggactgatgccgaaacccctccgaggttcaccaggactcctgtggatcaaaccggagtctccgggggtgtcgcctccttcatttgccaggcaaccggcgatccacgcccaaagattgtatggaacaaaaagggcaaaaaagtgtcaaatcagagattcgaggtaattgagttcgatgatggttccgggagtgttctcagaattcagccgctgagaacaccacgagatgaggcgatatatgaatgcgtcgctagtaacaacgttggcgagatcagcgtcagcacacgactgaccgtgctgagggaagatcagattccacgcggctttcccacgattgacatgggaccacagttgaaagtggtggagcgaacacgtacggccacgatgttgtgtgccgcgtccggcaatccggaccccgagataacctggtttaaggatttcctgcctgttgacacatccaataataatggccggatcaaacagctgcgaagcgagtcaatcggggggacccctattcgtggcgcattacagatcgaacagtcagaggagtcggaccagggtaagtacgaatgcgtggccaccaattctgcaggcacccgttatagcgccccagcgaacctgtatgtccgcgaactcagagaggtgaggcgcgttcctccccgtttttcaattcctcccacgaaccacgaaatcatgcctgggggaagcgtgaatatcacctgcgtcgccgttggcagtcccatgccatatgtgaaatggatgctgggtgctgaagatttaacacctgaggatgatatgcctattgggaggaacgttctggaactcaacgatgtccggcagagcgctaattatacctgtgtagccatgtctaccctcggcgtgatcgaggccatagcccagatcacagtgaaagccctccccaaaccaccagggacccccgtggttactgaatctacagccacgagtatcactctgacatgggacagcggcaatcctgagccagtgagctattatattattcagcacaaacccaagaattcagaggaactgtacaaggaaatcgatggcgtggccacaaccaggtatagtgttgcaggactctccccgtattcagactacgaatttcgggtggtggcagtaaataatatcggcagaggtcccccctcagagcctgtgctgacacagacctccgagcaggcgccttccagtgctccacgcgatgtgcaggctcgaatgctgtcttcaacgacaattttagtgcagtggaaggaacctgaggaaccaaatggccagatccagggctatcgtgtctattatacgatggaccctacccagcacgtgaataactggatgaagcacaacgtcgccgatagtcaaatcactacaatcggaaatctcgtcccccaaaagacctatagcgtcaaagtgttggcatttacctctatcggcgacgggcccttgtctagtgacatccaagtgattacccaaaccggggtacccgggcaaccgctgaatttcaaggccgaacctgagtcagaaactagcattctgctcagttggactccacctagatcagataccatcgcaaattacgaactggtctataaagatggcgagcatggcgaagagcagaggattacaattgagcccgggacatcgtatcgcctccagggactgaaaccaaacagcctgtattacttccgtctggctgcgcggagtccccagggcctgggggctagcacggccgagatttccgctagaaccatgcagagcatgtttgcaaaaaatttccacgtgaaggcagtgatgaagacctccgtgcttttgagctgggaaattccggagaactataactctgctatgccgttcaagattctgtacgatgatgggaagatggtagaggaagtggatggtagagcaacccagaaactaattgtcaacctcaagcctgagaaaagctacagtttcgtccttaccaacagaggcaacagcgctgggggcctccagcaccgtgtcacggcgaagacagctccggatgtgctccggacgaaaccggccttcatcgggaagactaatctggatggcatgataaccgtgcagctgcctgaggttcctgccaatgagaatattaaaggctattacatcataatcgttccactgaagaaatctcgcggcaaattcataaagccctgggagagtccagacgaaatggagcttgacgaactgctgaaggagatttcacgaaaacggaggtcaatcaggtatggaagggaagtagagttaaagccttatattgcagcccattttgatgtgctccccaccgaattcacactaggcgacgacaaacattacgggggattcacgaataagcagctccaatccggccaggagtacgtcttcttcgtcctggcggtcatggaacatgccgaatccaagatgtacgctacttctccctacagcgacccagttgtcagcatggatctggacccccagcccatcaccgacgaagaagaaggcctgatctgggtggtcgggccggtgttagcagtcgtgtttataatttgtatcgtaattgcgattctgctgtacaagagtaagcccgaccggaagagggctgagtcagatagccgcaagagttctattccgaacaataaagagatcccttcgcaccaccctaccgaccctgtagagctcaggcggctgaatttccagacccctggaatggcaagccaccctccaatccccatactcgaattggccgaccacatcgaacgtctcaaggctaatgataatctcaagttctcacaggaatatgaaagcattgatcctggtcaacagttcacatgggaacattcaaacctagaggtgaacaaacccaaaaaccggtatgcaaacgtgatcgcgtacgatcatagcagggttctcctgtccgcgattgaaggcattcccggatctgactacgtaaacgccaactatattgacggctacagaaagcaaaacgcatacattgcgacacagggctctttgcccgagacatttggtgatttctggagaatgatctgggaacagcgctccgctacagtggtcatgatgacgaagctcgaggaacgcagtagagtgaaatgcgaccagtactggccaagcagaggaactgaaacccacggacttgtgcaggtgaccctgctggatacagttgaactagccacctactgtgttagaaccttcgcactctataaaaacggttcctccgagaaaagagaggttaggcagtttcagttcaccgcttggcctgatcatggcgtgcctgagcaccccactcccttccttgcatttctccgccgagtgaagacgtgtaatcctcctgacgcgggtcccatggtggtccattgttctgccggcgtggggcgcactggatgcttcattgtcatcgatgcaatgttggaaaggatcaaacacgaaaagacagtggatatttacggccacgttacccttatgagggcccagcgcaattacatggtgcagactgaggaccagtatatttttattcacgacgctctgctcgaagccgtgacctgcggaaataccgaagtccctgcacgaaatctgtacgcatatatccagaaactcactcagatcgaaactggcgaaaacgtcactggaatggaactcgagtttaaaaggctggcttcaagcaaagcacacacatctcgcttcatttcagcaaacctgccatgtaataaatttaaaaaccgcctagtgaatattatgccatacgaatccactagggtgtgccttcagccgatcaggggtgtggaaggtagtgactacattaacgcgtcgttcattgatggctatcggcagcagaaggcttatattgcaactcaggggcctctcgccgaaacaactgaggatttctggaggatgctgtgggagcacaattcaacgattgtggtgatgttgactaaactccgcgaaatgggccgagagaagtgtcatcagtactggcccgccgagcggtccgctcgctatcagtactttgtcgtagatccgatggcggagtacaacatgccccagtatatcttgagagagttcaaagtgacggatgcgagagacggtcaatctcgaacagtccgccaatttcagttcacagattggcccgagcaaggcgtgccaaagtctggcgagggatttattgatttcattggccaggtccataagaccaaagaacagtttggccaggatggccccatcagtgtccactgctctgccggcgtagggagaacgggcgtctttattacactaagcatcgtccttgagcggatgaggtacgagggcgtggtagacatctttcagaccgtcaagatgctgcgcacacagcggccggccatggtgcagaccgaagaccaataccagttctcataccgggccgcgcttgaatacctgggaagcttcgatcactatgccacctag

SEQ ID NO: 233632 - DNA, 4518 bp, Artificial Sequence
  derived and/or modified sequence
atggtgcacgtggcccggctgctgctgctgctgctgaccttcttcctgaggacagatgctgagaccccaccccgcttcaccaggacccctgtggaccagacaggagtgtctggaggagtggccagcttcatctgccaggccaccggggacccccggcccaagatcgtgtggaacaagaagggcaagaaggtgagcaaccagagatttgaagtcatcgagtttgatgatggcagcggctctgtgctgcgcatccagcccctgcggaccccaagagatgaggccatctatgaatgtgtggccagcaacaacgtgggggagatctctgtgtccacccggctgactgtgctgcgggaggaccagatcccccggggcttccccaccatcgacatgggcccccagctgaaggtggtggagaggaccaggacagccaccatgctgtgtgccgccagcggcaacccagaccctgagatcacctggttcaaggacttcctgcctgtggacaccagcaacaacaacggccgcatcaagcagctgcggtctgagagcattggaggcacccccatccggggggccctgcagatcgagcagagcgaggagagtgaccagggcaagtatgaatgtgtggccaccaacagcgctggcacccgctacagcgccccagccaacctgtatgtgcgggagctgcgggaggtgcggcgggtgcccccacgcttcagcatcccccccaccaaccacgagatcatgcctgggggctctgtgaacatcacctgtgtggccgtgggcagccccatgccctacgtgaagtggatgctgggcgctgaggacctgaccccagaagatgacatgcccatcggcagaaatgtgctggagctgaatgatgtgcggcagagcgccaactacacctgtgtggccatgagcaccctgggcgtgattgaggccatcgcccagatcaccgtgaaggccctgcccaagcccccaggcacccctgtggtgacagagagcacagccaccagcatcaccctgacctgggacagcggcaaccctgagcctgtgtcctactacatcatccagcacaagcccaagaacagcgaggagctgtacaaggagattgatggagtggccaccacccgctacagcgtggccggcctgagcccctacagcgactatgagttccgggtggtggccgtgaacaacatcggccggggccccccatctgagcctgtgctgacccagaccagcgagcaggcccccagcagcgcccccagagatgtgcaggccaggatgctgagcagcaccaccatcctggtgcagtggaaggagcctgaggagcccaacggccagatccagggctacagagtgtactacaccatggaccccacccagcacgtgaacaactggatgaagcacaacgtggccgacagccagatcaccaccatcggcaacctggtgccccagaagacctacagcgtgaaggtgctggccttcaccagcattggagatggccccctgagcagtgacatccaggtgatcacccagacaggagtgcccggccagcccctgaacttcaaggccgagcctgagagcgagaccagcatcctgctgtcctggaccccacccaggagtgacaccatcgccaactatgagctggtgtacaaggatggagagcacggggaggagcagaggatcaccatcgagcccggcaccagctaccgcctgcagggcctgaagcccaacagcctgtactacttccggctggccgcccggagcccccagggcctgggcgccagcacagctgagatcagcgcccggaccatgcagagcatgtttgccaagaacttccacgtgaaggctgtgatgaagacctctgtgctgctgtcctgggagatccctgagaactacaacagcgccatgcccttcaagatcctgtatgatgatggcaagatggtggaggaggtggatggccgggccacccagaagctgattgtgaacctgaagccagagaagagctacagctttgtgctgaccaacagaggcaacagcgctgggggcctgcagcaccgggtgacagccaagacagccccagatgtgctgcggaccaagccagccttcatcggcaagaccaacctggatggcatgatcaccgtgcagctgcctgaggtgcctgccaatgaaaacatcaagggctactacatcatcatcgtgcccctgaagaagagccggggcaagttcatcaagccctgggagagcccagatgagatggagctggatgagctgctgaaggagatcagcaggaagaggaggagcatccgctatggccgggaggtggagctgaagccctacatcgccgcccactttgatgtgctgcccacagagttcaccctgggagatgacaagcactacggcggcttcaccaacaagcagctgcagagcggccaggagtatgtgttctttgtgctggccgtgatggagcacgccgagagcaagatgtatgccaccagcccctacagcgaccctgtggtgtccatggacctggacccccagcccatcacagatgaggaggagggcctcatctgggtggtgggccctgtgctggccgtggtgttcatcatctgcatcgtcatcgccatcctgctgtacaagagcaagccagacaggaagagagctgagagtgacagcaggaagagcagcatccccaacaacaaggagatccccagccaccaccccacagatcctgtggagctgcggcggctgaacttccagaccccaggcatggccagccacccccccatccccatcctggagctggccgaccacatcgagcggctgaaggccaatgacaacctgaagttcagccaggagtatgagagcattgatcctggccagcagttcacctgggagcacagcaacctggaggtgaacaagcccaagaacagatatgccaacgtgattgcctatgaccacagccgggtgctgctgagcgccatcgagggcatccctggcagtgactatgtgaatgccaactacattgatggctacaggaagcagaatgcctacatcgccacccagggcagcctgcctgagacctttggagacttctggaggatgatctgggagcagaggtctgccaccgtggtgatgatgaccaagctggaggagaggagccgggtgaagtgtgaccagtactggcccagccggggcacagagacccacggcctggtgcaggtgaccctgctggacacagtggagctggccacctactgtgtgaggacctttgccctgtacaagaatggcagcagcgagaagcgggaggtgcggcagttccagttcaccgcctggccagaccatggagtgcctgagcaccccacccccttcctggccttcctgcggcgggtgaagacctgcaaccccccagatgctggccccatggtggtgcactgcagcgctggggtgggccgcacaggctgcttcatcgtgattgatgccatgctggagcgcatcaagcatgagaagacagtggacatctacggccacgtgaccctgatgagggcccagaggaactacatggtgcagacagaggaccagtacatcttcatccatgatgccctgctggaggccgtgacctgtggcaacacagaggtgcctgccaggaacctgtatgcctacatccagaagctgacccagatcgagaccggggagaatgtgacaggcatggagctggagttcaagaggctggccagcagcaaggcccacaccagccgcttcatcagcgccaacctgccctgcaacaagttcaagaaccggctggtgaacatcatgccctatgagagcaccagggtgtgcctgcagcccatccggggcgtggagggcagtgactacatcaatgccagcttcattgatggctaccggcagcagaaggcctacatcgccacccagggccccctggccgagaccacagaggacttctggaggatgctgtgggagcacaacagcaccatcgtggtgatgctgaccaagctgcgggagatgggccgggagaagtgccaccagtactggccagctgagaggtctgcccgctaccagtactttgtggtggaccccatggccgagtacaacatgccccagtacatcctgcgggagttcaaggtgacagatgccagagatggccagagcaggacagtgcggcagttccagttcacagactggccagagcagggcgtgcccaagtctggagagggcttcatcgacttcatcggccaggtgcacaagaccaaggagcagtttggccaggacggccccatctctgtgcactgcagcgctggggtgggccgcactggagtcttcatcaccctgagcatcgtgctggagaggatgagatatgaaggagtggtggacatcttccagacagtgaagatgctgcggacccagaggcctgccatggtgcagacagaggaccagtaccagttctcctaccgggccgccctggagtacctgggcagctttgaccactacgccacctag

SEQ ID NO: 233633 - DNA, 4518 bp, Artificial Sequence
  derived and/or modified sequence
atggtgcacgtggcccggctgctgctgctgctgctgaccttcttccttaggacagacgctgagacacccccccgattcacaagaacccccgtagaccagacaggagtcagtgggggagtggctagtttcatatgtcaggctaccggggatcccagaccgaagatcgtctggaacaagaagggaaaaaaagtgagtaaccagcgcttcgaggtgatcgagttcgacgatggctccggatctgttctgagaattcagcccctccgcacccctcgggatgaagccatctacgaatgcgtcgctagtaataatgtcggagagattagcgtctccactcgcctaaccgtgctgcgcgaggaccagatccctcggggatttcccactattgatatgggccctcagttaaaggttgtcgaacggacacgcacagctactatgctatgcgccgcatccggaaatcctgaccctgaaattacctggttcaaggactttctgccggtggatacttctaataacaacgggaggataaaacagctccggtctgaaagcatcggaggcacacccattcggggcgcccttcagatcgagcaatcagaagaatcagatcaagggaaatacgagtgtgtcgcgactaatagcgcaggaactcggtatagtgcccctgctaatttgtacgtgcgagaactgagggaggtgcggagagtccctccccgctttagcattccccctactaaccacgagattatgcccgggggatccgtcaacatcacgtgcgtggccgttggatcgccaatgccttacgtgaaatggatgctgggggctgaagacctgactccagaggacgatatgcccatcggacgtaatgtgcttgaattgaatgacgtccgccaaagcgctaattacacctgcgtggctatgagtaccctgggagtgatcgaggcaatcgcgcaaattaccgtaaaagccctgcctaagccccctgggacccctgtggtgactgaaagtacagctacaagcattaccctgacatgggatagcggtaatcccgaaccggtgagttattacattatccagcataagccaaagaacagcgaggagctctataaagaaattgacggtgtagcgactaccagatactccgttgcaggattatcaccatacagtgactacgagttccgggtggtggccgttaataacatcggacgaggaccgccctccgagcccgtcctgacccaaacctctgagcaggctccatcttctgcccccagggacgtccaggcgcgcatgctgtctagcacaactatccttgtacaatggaaggagcccgaggaacccaatggacagattcaaggatatagagtgtattatacaatggacccaacccagcatgtgaataactggatgaagcataatgtggccgattcacagatcaccactatcggtaatctcgtgccccagaaaacatattctgtgaaggtgctggccttcacttccattggcgacgggccattgagcagcgacattcaggttattacccagacgggagtaccaggccagcctttgaacttcaaggccgaacctgagtccgagactagcatcttgctgagttggacccctccacgtagtgacaccatagccaactacgagcttgtatacaaggacggcgaacacggggaagaacagcggataaccatcgaacccgggacaagttatcggctacaaggcctgaagccaaactctttgtactatttccgattggcggcgaggtcaccacaagggctcggagctagcacggctgagatttcagcacggaccatgcagagtatgttcgccaagaattttcacgtaaaggctgtcatgaagacctcggtgctgctgtcctgggaaatccctgagaactataatagcgccatgcccttcaagattttgtacgacgacggcaagatggttgaggaggtcgatggaagggccacacagaagctgattgtgaacttaaaaccagagaagtcatactcgtttgtcctgaccaacagaggcaactcagctggtggcctccagcatcgggtgaccgccaagaccgctcctgatgttcttaggacaaaacccgcttttatcggcaaaacgaatcttgatggaatgatcaccgtgcagttacccgaggtgccagccaacgaaaacattaagggatactatatcattatcgtgcccctgaaaaaaagtagaggcaaatttattaagccctgggagtcccctgatgagatggagctcgatgaattgctgaaagaaataagtaggaaacggagatctatcagatacggcagggaggtggaattaaaaccgtatatcgctgcccacttcgatgtgctccccacagaatttactctcggagacgacaagcactacggtggcttcactaacaagcagctgcagagcggccaagagtacgtgttctttgtattggccgtcatggaacatgcagaatcaaagatgtatgctactagcccttacagtgaccccgtcgtctcaatggatcttgaccctcaaccgatcaccgatgaagaagaggggctgatctgggtcgtcgggcctgttctggcagttgtgttcatcatctgtatcgttatcgccatcctgctgtacaagagcaaacccgataggaaaagagctgaatctgattcacgcaaaagtagcattcctaataataaggagatcccatcccaccaccctaccgacccggtggaacttcgtcgtctcaattttcagacccccggcatggcttcacacccaccaatccctatcctggaactcgccgatcacatcgagcggctgaaggcaaacgataacttaaaatttagtcaggagtacgagtcgattgaccccggacaacaatttacttgggaacattccaacttggaggtcaataagccgaagaatcgctatgctaacgtgattgcatatgaccactcccgcgtcttgctatctgctatcgaggggatcccgggctccgactatgtgaatgctaattatatcgacggctaccgaaaacaaaacgcctacattgccactcaggggtctttgcccgagaccttcggggatttctggagaatgatctgggaacagaggagtgccaccgtggttatgatgactaaactggaagagagatctagggtgaagtgcgaccaatactggccaagccggggtaccgagacacacgggctagtccaagtgaccctgcttgacaccgtggagctcgcaacttactgcgtgcgcacctttgctctttacaagaacggatcttcggagaaaagggaggttaggcaattccaatttacagcttggcccgatcacggagtgccggagcatcccacaccgtttcttgcttttctgcggagagtcaaaacgtgcaacccaccagatgcaggaccaatggttgtgcactgctcggcaggtgtaggacgtaccggctgtttcatcgttatcgatgccatgttagagagaattaagcatgaaaagacggtggacatatatggacatgttaccctgatgcgcgcacagagaaactacatggtgcagactgaagatcagtatatatttatccatgacgccttactcgaagctgtcacatgcggaaatacagaggtaccggcaaggaacctgtatgcctacatccagaagctcactcaaatcgagactggtgagaacgtgacagggatggaattggagtttaaaagactggcctcaagtaaggcccacacttcccgcttcattagcgccaacctgccatgcaacaagttcaagaatagattggtaaacattatgccctatgagtccactcgcgtgtgcctgcaacctatccgaggtgtcgagggctccgactacattaacgccagttttattgatggttatagacagcagaaagcctatatcgccacacagggccctctcgccgagactacagaagatttttggagaatgctatgggagcataactccaccatcgtggtgatgctgaccaagttaagagagatgggaagggaaaaatgtcatcagtattggcccgccgagaggagcgctcgctatcaatattttgtggttgacccaatggctgaatacaatatgcctcagtacatcctccgcgagttcaaggttacagacgcgcgagatggacagtctaggacagtgcgccagttccaatttacagattggcccgagcagggtgtgccaaagtccggggaggggttcatcgacttcatcgggcaagtgcacaagacaaaagagcagttcgggcaggatggcccaatctctgtccactgctctgctggggtggggcgaaccggcgtttttattaccctgagtatagtgctcgagagaatgcggtacgaaggagtagtggacatcttccagacggtcaaaatgctgcggacacaacgacctgcaatggtgcagacggaagatcagtaccaattcagctatagagccgcactggaatatctgggcagtttcgatcattacgcaacatag

SEQ ID NO: 233634 - DNA, 4518 bp, Artificial Sequence
  derived and/or modified sequence
atggtccatgttgcaagacttctcctgttgcttctcactttcttcttaagaactgatgcagaaacgccgccacgattcacaaggacccccgtagaccagactggcgtttccgggggagtagcctcctttatctgccaagccacaggcgatccacgccctaaaatcgtgtggaacaagaagggcaaaaaggtctccaaccaacgatttgaagtaattgaatttgatgacgggtctggaagcgttctgagaatccaaccactccgaacccctagagacgaggccatttacgaatgcgttgcctctaataatgttggagaaatctctgtcagcacaaggctaacagtgcttcgcgaggaccaaattccgcgagggtttccaaccatagacatggggcctcagctgaaagtggtggaaagaacccgcaccgctaccatgctatgcgctgcaagcggtaaccccgatcctgaaatcacgtggttcaaagattttctaccagttgacacttccaataacaatgggagaatcaagcagttgcgcagcgaaagcattggaggaacacccatacgcggtgcgctgcagatagagcagtccgaggagtcagatcaaggcaagtatgagtgtgtcgccacaaactccgccggtactcggtactcagcaccagccaatctttacgtaagagaactcagagaagtcagacgggtgcctccgaggtttagtattccgccaactaaccacgagataatgccaggcggttccgtcaacattacgtgcgtcgccgttggaagcccgatgccatacgtaaaatggatgctgggggctgaagatctcacgcccgaagacgatatgccaatcggacggaatgtcttggagctgaacgacgtaagacagtcagctaactacacctgcgtagcaatgtctaccctgggagtgattgaagctatcgcccaaattacagtgaaagccctgcccaaaccccctggaacccctgttgtgaccgaatctacggcgacttccatcactttgacgtgggacagcggaaatcccgaaccagtctcctactatattatacagcacaagcccaaaaattccgaagagttgtacaaggagattgacggggtcgccacaactcggtatagcgtggccggtctctccccttactcagattacgagttccgcgtcgtggccgtgaataacattggcagagggcctccttccgagccagttctgacccagacctccgagcaggctccctcctcagccccaagggacgtacaagcgcgtatgctgagttctacgaccattctagtgcaatggaaagagcccgaggaaccgaacggccagattcaaggatatcgggtctattacactatggatcctacgcagcatgtgaataactggatgaagcacaacgttgccgacagccagataaccactattggcaatctcgtcccgcagaaaacctactcagttaaggtcctcgcatttacctcgataggtgacggacctttatcctcggacattcaggtcattacccagacgggcgtccctggacagccccttaactttaaggccgaaccagagtctgaaactagcattctgctgtcatggacaccacccagatctgataccatcgctaattatgaactggtctataaggatggcgaacacggggaggaacagcgcataacaatcgaacctggcacctcataccgtttacaggggctgaaaccgaatagtctctactactttcggctggcagccaggagtcctcagggactgggcgcaagcaccgccgaaattagcgccagaaccatgcagtcaatgtttgctaaaaacttccacgtaaaagcagtgatgaagacctcggtgctgctcagttgggagatcccagagaattataattcggcaatgccatttaaaattctgtatgacgacgggaagatggtcgaggaagtagacggacgagccacccagaagttgattgtgaacctgaagccagagaagtcatactcatttgtcctcactaacaggggtaactctgccggtggactgcaacaccgggtgaccgccaagactgcacccgacgtcttgcgtaccaagcctgcgttcatcggtaagaccaaccttgatggtatgatcaccgtgcaactgccagaagtacctgccaatgagaacataaagggttactacatcataatcgtccctctcaagaaaagcagggggaagttcataaagccatgggagtcccctgatgagatggaactcgatgaactcctcaaagaaattagccggaaacggcgttcgatccggtacgggagggaagtggagctgaaaccatacattgccgcacatttcgacgtgcttccaactgaatttacgctgggtgacgataaacattacggtggtttcaccaacaaacaactccagtcaggtcaggaatacgtgttcttcgttctggcggtcatggaacacgcggaatcaaaaatgtatgccacatctccatactctgatcctgtagtcagtatggatcttgatccccagccgatcaccgatgaagaggaggggttgatttgggtggtcgggccagtactggcggtggtattcataatttgtatcgtgatcgcaatcctcctgtacaagagcaagccagatcggaagcgggctgagtctgattcaagaaaatcgagcatcccaaacaacaaagagattccttctcaccacccaactgacccggtggaattgcgaagactgaacttccagactcctgggatggcctcccaccctcctattccgatccttgagctggcagaccacatcgagcgcctgaaggccaacgataatctgaaattttcccaagagtacgagagtatagacccaggacagcaattcacatgggagcattcaaacctcgaggtgaacaaacccaagaataggtacgccaacgtcattgcctacgatcattcacgggtccttctctccgctattgagggtattcccggatccgattatgtcaacgcaaactacatcgatggctatcggaagcagaatgcatatatagcaacccagggaagcctgccagaaactttcggtgacttctggcgcatgatttgggagcagaggtctgcaactgtggtgatgatgaccaaacttgaggaacgtagccgagtgaaatgtgaccaatattggccttcgcggggaactgaaacgcatggcctagttcaggtgaccctcttggatactgtggaattagcaacgtactgtgtccgtacatttgctctgtacaagaatgggagcagtgaaaagcgagaggtaaggcagtttcagttcacagcctggcccgatcacggtgttcccgagcatccaacaccattcctagccttcctccgcagggttaagacatgtaaccctcccgacgccggacctatggtcgtgcattgcagtgctggcgttgggaggactggttgtttcatcgtaatcgacgcaatgctggaacgcatcaagcatgagaagacagtcgacatctatggccatgttaccctgatgagagcccagcgtaattacatggttcagaccgaagatcagtacatttttatccacgatgccctgcttgaagcagtgacctgtggaaacacagaggtgccggcaaggaacttatacgcctacatccagaagttgacacaaattgagacaggcgagaatgtgaccgggatggagttggaattcaagaggctggcctcctccaaagctcatacttccagatttatcagcgccaacctgccctgcaacaaattcaagaatagattagtgaatatcatgccatacgagtccactagagtctgtcttcagcctatccggggagttgaaggctccgactacatcaatgccagcttcatcgatggttatagacagcagaaagcctatattgcgacccaggggccacttgctgaaacaaccgaggatttttggagaatgttatgggagcacaatagcacaatcgtggtaatgctgaccaaactgcgggaaatgggtagggagaaatgccaccagtactggcccgcagaaagaagtgcacgataccagtactttgtggtggaccccatggccgagtataacatgccccagtacatcctgcgcgaattcaaagttaccgatgcgagggacggacagagtaggactgtgagacagttccagttcaccgattggcctgagcaaggggtcccaaagagcggcgagggatttatcgattttatcggacaggtccataagaccaaggagcagttcggacaggatggccctatctcagtccattgtagcgccggagtgggcaggacaggcgtttttattaccctgagcattgtacttgagagaatgagatacgagggagtggtggatatctttcagacagtcaagatgcttcgaacccagaggcctgctatggtacagacagaagaccaatatcagttctcatatcgcgctgctctggaatacctgggaagctttgaccattacgcaacttag

SEQ ID NO: 233635 - DNA, 5039 bp, Artificial Sequence
  derived and/or modified sequence
ccggaggcagtgattccaagctgctcgcgcacgctgctgccaagctgcaggatggtgcacgtagccaggctgctgctgctgctcctcactttcttcctccgcacggatgctgagacacctccaaggtttacacgaacacccgttgatcagacaggggtctctggcggagttgcctctttcatctgccaagctacgggagacccaagacctaaaattgtctggaacaaaaaaggaaagaaagtcagcaatcagagatttgaggtaatagagtttgacgatgggtctggatcagttctcagaatacaacccttacggactccgagggatgaggccatttatgaatgtgtggcctcaaataatgtgggagaaataagtgtatccaccagactcacagttttgcgggaagatcaaattcccaggggcttccctaccattgacatgggcccacagttgaaggtggttgagcgtactcgcacggccaccatgctttgtgcagccagtggtaatccggatccagaaatcacttggtttaaagatttcttacctgtggacacaagcaacaacaatggtcgtattaagcagttacgatcagaatctattggtggtacaccaataagaggagcccttcagattgagcagagtgaagagtctgaccaaggaaaatatgagtgtgttgccaccaacagcgcgggcactcgctattccgctcctgccaatttatatgtcagagagctgcgagaagttcgccgtgtcccaccaagattctctatcccacccactaatcatgaaatcatgccaggcggaagcgttaatatcacctgtgtggccgtggggtcaccaatgccttatgtaaagtggatgttgggggcagaagatctgacacctgaagatgatatgccaataggaagaaatgtgctagaactgaatgatgtaagacagtcagcaaattacacctgtgttgctatgtcaacactgggtgtcattgaagcaatagcacagatcactgtcaaagccttacccaaacctccaggaactcctgtagtgaccgagagcacagctacaagcatcacactgacgtgggactctgggaaccctgagcctgtttcttattacataattcagcataaacctaaaaactctgaggaactttacaaagaaattgatggggtggcgaccacacgctacagtgtcgctggactaagtccctactcggattatgaattcagggttgttgctgtcaataacattgggcgggggcctcccagcgaacctgtgctaacacaaacctcagagcaagcaccatccagtgccccgagggatgtccaggcacgaatgttgagttcgaccaccattttggtacagtggaaggaacctgaagagccaaatggacagatccaaggatatagagtttattatacaatggatcccactcaacatgtcaacaactggatgaaacacaatgtagctgacagccaaatcactactattggcaacttagtgccccagaaaacatattctgtcaaagtcctggcttttacctcaattggagatggtcccctttcaagtgacatacaagtcatcactcagacaggagtaccagggcagccactaaacttcaaagcagaacctgagtctgaaacaagtattttgctctcttggacacctccacgttcagataccattgccaactatgaactggtctacaaagatggggagcatggagaggagcaacgaattaccattgagccagggacatcatataggctgcaaggactgaaaccaaacagcttatactatttccgtctggctgcacgctcccctcaaggcctgggtgcttctactgcagaaatatcagctagaaccatgcagtcaatgtttgcaaaaaattttcatgtcaaagcagtaatgaagacttccgtgttgctgtcttgggagattccagagaattataactccgccatgcctttcaaaattctttatgatgatgggaaaatggtagaagaagtggatggccgagccacacagaagttaattgtcaacctgaagcctgagaaatcatattcatttgtgctgacaaatcgtggaaacagtgctggtgggctgcagcacagggtcacggcaaagactgcaccagatgtattacgtaccaagcctgccttcattgggaagaccaacttggatggcatgattactgtgcaactgcctgaagtacctgcaaatgagaatataaaaggttactacataataattgtgcctttgaagaaatctcgcgggaaatttatcaagccatgggagagtccagatgaaatggaattagatgagctgcttaaggagatatctaggaagcgcagaagcatccgttatgggagagaagttgaattaaagccatatattgccgctcactttgatgtccttcccactgagttcaccctgggggatgacaagcattatggtggatttacaaacaagcaactccaaagtggtcaagaatatgtcttctttgtgttagcagtaatggaacatgcagagtctaagatgtatgcaaccagcccttactccgaccccgtggtgtcaatggatctggatccgcagccaatcacggatgaagaagaaggcttgatctgggttgtaggtcctgtccttgcagtggtctttatcatctgcattgtcattgctattcttctttataaaagtaaacccgacaggaagagggcagagtccgactctagaaaaagcagcataccgaacaataaggagatcccttcacaccacccaacagaccctgtagaactgaggcgccttaactttcaaacaccgggtatggctagccatcctccaatacccatcttggaacttgcagaccacattgaaagattgaaagcaaatgacaacttgaagttttcccaggaatatgagtcaattgaccctggccagcagttcacttgggaacattcaaacttggaagtaaacaaaccaaagaatagatacgcgaatgtaatcgcatatgatcattcccgggttctcctatcagctatagaagggatcccaggaagtgactatgtgaatgccaactacatagatgggtataggaagcaaaatgcctatattgcaacacagggatctctccccgaaacatttggggacttttggagaatgatatgggaacaacggagtgccacagttgtcatgatgacaaaactagaagaaagatcaagggtgaagtgtgaccagtattggcctagcagaggcacagaaacccacggactcgttcaagtaacgctgcttgatactgtggagctggccacatattgtgttcgaacatttgcactttacaagaatggttcaagtgagaagagagaagtgagacaattccagttcaccgcctggcctgatcatggtgttccagaacaccctacaccttttctagctttcttacgtagagtcaaaacctgtaaccctcccgatgctggtccgatggttgtgcactgcagtgcgggagttggccggactggttgcttcatcgtcatagatgccatgttagaaagaataaagcatgaaaaaactgtagatatttatggccatgtaactttaatgagagcccagaggaactatatggttcaaacagaagaccaatacatctttatccatgatgcactgttagaagcagtgacttgtggaaataccgaagtgccagctagaaacttgtatgcctacattcagaagctgacacaaatagaaacgggagagaatgtcacaggaatggagctcgaatttaagcgtctagccagctcaaaagctcacacctcaaggtttatcagtgccaatcttccatgtaataaattcaaaaatcgccttgttaatattatgccatatgaatccacaagggtatgcctgcagcctatccgtggagtagaaggatctgattacatcaatgccagttttattgatggatacagacaacagaaagcctacatcgctacccaggggcccttggcagagaccactgaagacttctggcggatgctctgggaacacaattccaccatagttgtgatgctcaccaagctgcgtgaaatgggcagagagaaatgtcaccaatactggccagcagaacggtctgcaagataccagtactttgttgtagatcccatggctgagtacaacatgccacagtatatcctaagggaattcaaggtcacagatgccagggacggccagtcccgaacagtaaggcagttccagttcactgactggccagagcaaggagtgccaaagtccggagaaggatttattgacttcatcggccaagtccataaaacaaaagaacagtttggccaagatggacccatttcagtccattgcagcgcgggcgttggaagaactggagtcttcataacgctaagcattgttttggaaagaatgagatatgaaggagttgtagatatcttccagactgtcaaaatgttaagaacacaacgaccagctatggtacagacagaggatcaatatcagttttcctatcgtgccgcactagagtacctgggcagctttgaccactatgcaacgtagaaacccctgacccattctggatttttactacaggcccttcaatatccatggagtctcttctgagccatacagggcacttgagaagtccttcttaacttctagctaacaactacttagtgggactattacacacaaaacaaattaaaaacaaattattccaggtggaccaagaattcacagtttaataatctaacctgaaaaataatgaagagaatcctgactgatgaggcatctgaaggattttatttacagatacctcaaggattcaaaatcaagggaagaagaaatcacagcaaagaaccaccatcttattcaggattgcttgaaaggtgcaaggagaaattgccagaatgctgcagttcagcacaagatatgtgctggtgtggcttctcacaatgaaacggactctgctttgacatcgccccttcccaccatactgctcataataacattttagggggaaaggggag

SEQ ID NO: 233636 - DNA, 4518 bp, Artificial Sequence
  derived and/or modified sequence
atggtgcacgtggccagactgctgctgctgctgctgaccttcttcctgagaaccgacgccgagaccccccccagattcaccagaacccccgtggaccagaccggcgtgagcggcggcgtggccagcttcatctgccaggccaccggcgaccccagacccaagatcgtgtggaacaagaagggcaagaaggtgagcaaccagagattcgaggtgatcgagttcgacgacggcagcggcagcgtgctgagaatccagcccctgagaacccccagagacgaggccatctacgagtgcgtggccagcaacaacgtgggcgagatcagcgtgagcaccagactgaccgtgctgagagaggaccagatccccagaggcttccccaccatcgacatgggcccccagctgaaggtggtggagagaaccagaaccgccaccatgctgtgcgccgccagcggcaaccccgaccccgagatcacctggttcaaggacttcctgcccgtggacaccagcaacaacaacggcagaatcaagcagctgagaagcgagagcatcggcggcacccccatcagaggcgccctgcagatcgagcagagcgaggagagcgaccagggcaagtacgagtgcgtggccaccaacagcgccggcaccagatacagcgcccccgccaacctgtacgtgagagagctgagagaggtgagaagagtgccccccagattcagcatcccccccaccaaccacgagatcatgcccggcggcagcgtgaacatcacctgcgtggccgtgggcagccccatgccctacgtgaagtggatgctgggcgccgaggacctgacccccgaggacgacatgcccatcggcagaaacgtgctggagctgaacgacgtgagacagagcgccaactacacctgcgtggccatgagcaccctgggcgtgatcgaggccatcgcccagatcaccgtgaaggccctgcccaagccccccggcacccccgtggtgaccgagagcaccgccaccagcatcaccctgacctgggacagcggcaaccccgagcccgtgagctactacatcatccagcacaagcccaagaacagcgaggagctgtacaaggagatcgacggcgtggccaccaccagatacagcgtggccggcctgagcccctacagcgactacgagttcagagtggtggccgtgaacaacatcggcagaggcccccccagcgagcccgtgctgacccagaccagcgagcaggcccccagcagcgcccccagagacgtgcaggccagaatgctgagcagcaccaccatcctggtgcagtggaaggagcccgaggagcccaacggccagatccagggctacagagtgtactacaccatggaccccacccagcacgtgaacaactggatgaagcacaacgtggccgacagccagatcaccaccatcggcaacctggtgccccagaagacctacagcgtgaaggtgctggccttcaccagcatcggcgacggccccctgagcagcgacatccaggtgatcacccagaccggcgtgcccggccagcccctgaacttcaaggccgagcccgagagcgagaccagcatcctgctgagctggaccccccccagaagcgacaccatcgccaactacgagctggtgtacaaggacggcgagcacggcgaggagcagagaatcaccatcgagcccggcaccagctacagactgcagggcctgaagcccaacagcctgtactacttcagactggccgccagaagcccccagggcctgggcgccagcaccgccgagatcagcgccagaaccatgcagagcatgttcgccaagaacttccacgtgaaggccgtgatgaagaccagcgtgctgctgagctgggagatccccgagaactacaacagcgccatgcccttcaagatcctgtacgacgacggcaagatggtggaggaggtggacggcagagccacccagaagctgatcgtgaacctgaagcccgagaagagctacagcttcgtgctgaccaacagaggcaacagcgccggcggcctgcagcacagagtgaccgccaagaccgcccccgacgtgctgagaaccaagcccgccttcatcggcaagaccaacctggacggcatgatcaccgtgcagctgcccgaggtgcccgccaacgagaacatcaagggctactacatcatcatcgtgcccctgaagaagagcagaggcaagttcatcaagccctgggagagccccgacgagatggagctggacgagctgctgaaggagatcagcagaaagagaagaagcatcagatacggcagagaggtggagctgaagccctacatcgccgcccacttcgacgtgctgcccaccgagttcaccctgggcgacgacaagcactacggcggcttcaccaacaagcagctgcagagcggccaggagtacgtgttcttcgtgctggccgtgatggagcacgccgagagcaagatgtacgccaccagcccctacagcgaccccgtggtgagcatggacctggacccccagcccatcaccgacgaggaggagggcctgatctgggtggtgggccccgtgctggccgtggtgttcatcatctgcatcgtgatcgccatcctgctgtacaagagcaagcccgacagaaagagagccgagagcgacagcagaaagagcagcatccccaacaacaaggagatccccagccaccaccccaccgaccccgtggagctgagaagactgaacttccagacccccggcatggccagccacccccccatccccatcctggagctggccgaccacatcgagagactgaaggccaacgacaacctgaagttcagccaggagtacgagagcatcgaccccggccagcagttcacctgggagcacagcaacctggaggtgaacaagcccaagaacagatacgccaacgtgatcgcctacgaccacagcagagtgctgctgagcgccatcgagggcatccccggcagcgactacgtgaacgccaactacatcgacggctacagaaagcagaacgcctacatcgccacccagggcagcctgcccgagaccttcggcgacttctggagaatgatctgggagcagagaagcgccaccgtggtgatgatgaccaagctggaggagagaagcagagtgaagtgcgaccagtactggcccagcagaggcaccgagacccacggcctggtgcaggtgaccctgctggacaccgtggagctggccacctactgcgtgagaaccttcgccctgtacaagaacggcagcagcgagaagagagaggtgagacagttccagttcaccgcctggcccgaccacggcgtgcccgagcaccccacccccttcctggccttcctgagaagagtgaagacctgcaacccccccgacgccggccccatggtggtgcactgcagcgccggcgtgggcagaaccggctgcttcatcgtgatcgacgccatgctggagagaatcaagcacgagaagaccgtggacatctacggccacgtgaccctgatgagagcccagagaaactacatggtgcagaccgaggaccagtacatcttcatccacgacgccctgctggaggccgtgacctgcggcaacaccgaggtgcccgccagaaacctgtacgcctacatccagaagctgacccagatcgagaccggcgagaacgtgaccggcatggagctggagttcaagagactggccagcagcaaggcccacaccagcagattcatcagcgccaacctgccctgcaacaagttcaagaacagactggtgaacatcatgccctacgagagcaccagagtgtgcctgcagcccatcagaggcgtggagggcagcgactacatcaacgccagcttcatcgacggctacagacagcagaaggcctacatcgccacccagggccccctggccgagaccaccgaggacttctggagaatgctgtgggagcacaacagcaccatcgtggtgatgctgaccaagctgagagagatgggcagagagaagtgccaccagtactggcccgccgagagaagcgccagataccagtacttcgtggtggaccccatggccgagtacaacatgccccagtacatcctgagagagttcaaggtgaccgacgccagagacggccagagcagaaccgtgagacagttccagttcaccgactggcccgagcagggcgtgcccaagagcggcgagggcttcatcgacttcatcggccaggtgcacaagaccaaggagcagttcggccaggacggccccatcagcgtgcactgcagcgccggcgtgggcagaaccggcgtgttcatcaccctgagcatcgtgctggagagaatgagatacgagggcgtggtggacatcttccagaccgtgaagatgctgagaacccagagacccgccatggtgcagaccgaggaccagtaccagttcagctacagagccgccctggagtacctgggcagcttcgaccactacgccacctag

SEQ ID NO: 233637 - protein, 1506 aa, Artificial Sequence
  derived and/or modified sequence
MVHVARLLLLLLTFFLRTDAETPPRFTRTPVDQTGVSGGVASFICQATGDPRPKIVWNKKGKKVSNQRFEVIEFDDGSGSVLRIQPLRTPRDEAIYECVASNNVGEISVSTRLTVLREDQIPRGFPTIDMGPQLKVVERTRTATMLCAASGNPDPEITWFKDFLPVDTSNNNGRIKQLRSESIGGTPIRGALQIEQSEESDQGKYECVATNSAGTRYSAPANLYVRELREVRRVPPRFSIPPTNHEIMPGGSVNITCVAVGSPMPYVKWMLGAEDLTPEDDMPIGRNVLELNDVRQSANYTCVAMSTLGVIEAIAQITVKALPKPPGTPVVTESTATSITLTWDSGNPEPVSYYIIQHKPKNSEELYKEIDGVATTRYSVAGLSPYSDYEFRVVAVNNIGRGPPSEPVLTQTSEQAPSSAPRDVQARMLSSTTILVQWKEPEEPNGQIQGYRVYYTMDPTQHVNNWMKHNVADSQITTIGNLVPQKTYSVKVLAFTSIGDGPLSSDIQVITQTGVPGQPLNFKAEPESETSILLSWTPPRSDTIANYELVYKDGEHGEEQRITIEPGTSYRLQGLKPNSLYYFRLAARSPQGLGASTAEISARTMQSMFAKNFHVKAVMKTSVLLSWEIPENYNSAMPFKILYDDGKMVEEVDGRATQKLIVNLKPEKSYSFVLTNRGNSAGGLQHRVTAKTAPDVLRTKPAFIGKTNLDGMITVQLPEVPANENIKGYYIIIVPLKKSRGKFIKPWESPDEMELDELLKEISRKRRSIRYGREVELKPYIAAHFDVLPTEFTLGDDKHYGGFTNKQLQSGQEYVFFVLAVMEHAESKMYATSPYSDPVVSMDLDPQPITDEEEGLIWVVGPVLAVVFIICIVIAILLYKSSKPDRKRAESDSRKSSIPNNKEIPSHHPTDPVELRRLNFQTPGMASHPPIPILELADHIERLKANDNLKFSQEYESIDPGQQFTWEHSNLEVNKPKNRYANVIAYDHSRVLLSAIEGIPGSDYVNANYIDGYRKQNAYIATQGSLPETFGDFWRMIWEQRSATVVMMTKLEERSRVKCDQYWPSRGTETHGLVQVTLLDTVELATYCVRTFALYKNGSSEKREVRQFQFTAWPDHGVPEHPTPFLAFLRRVKTCNPPDAGPMVVHCSAGVGRTGCFIVIDAMLERIKHEKTVDIYGHVTLMRAQRNYMVQTEDQYIFIHDALLEAVTCGNTEVPARNLYAYIQKLTQIETGENVTGMELEFKRLASSKAHTSRFISANLPCNKFKNRLVNIMPYESTRVCLQPIRGVEGSDYINASFIDGYRQQKAYIATQGPLAETTEDFWRMLWEHNSTIVVMLTKLREMGREKCHQYWPAERSARYQYFVVDPMAEYNMPQYILREFKVTDARDGQSRTVRQFQFTDWPEQGVPKSGEGFIDFIGQVHKTKEQFGQDGPISVHCSAGVGRTGVFITLSIVLERMRYEGVVDIFQTVKMLRTQRPAMVQTEDQYQFSYRAALEYLGSFDHYAT

SEQ ID NO: 233638 - DNA, 4521 bp, Artificial Sequence
  derived and/or modified sequence
atggtccatgtggcacgcctgctgctccttctactcacttttttcctgaggaccgatgctgagacacccccaaggttcacgaggaccccagtcgaccagaccggagtgagcggaggcgttgccagctttatctgccaagccaccggcgatcctagacccaagatagtctggaacaagaaaggaaagaaagtgtccaaccagagatttgaggtgattgagtttgatgacggttcaggctcagtgctgcgaatacagcctctccggaccccccgagatgaggcaatatacgaatgcgtggccagtaacaacgtcggggagattagcgtgtcaaccaggttaaccgtgctaagagaggatcagatcccaaggggatttcctactatcgacatgggtccccagctcaaggtagtggagagaactaggaccgctactatgctgtgtgccgcttccggcaatcccgatccagaaatcacctggttcaaagacttcctcccagtggacacgagcaataacaacggtcggataaagcagttaaggagcgaatccataggcggaacccccatccgcggcgcgctccaaattgagcagagtgaggaaagtgaccaggggaaatatgaatgcgtggctacgaacagcgcaggcactcggtacagcgcacctgcgaatttatatgtgcgggaactgcgcgaggtgcgcagagttccacctagattcagtatccctcccactaaccatgaaataatgcctggaggtagtgtcaacatcacatgtgtcgctgtgggcagtcctatgccatatgtcaaatggatgttgggagcggaggatctgactcccgaagatgacatgccgatcggacgcaacgtcttggagctcaacgacgtaaggcagtccgctaattacacttgtgtcgctatgagcactcttggcgtgatagaggccatagctcagataaccgtgaaggctctgcccaagccccccggcacacccgtagtgactgagtcaactgcgacatcaattactctgacctgggattcaggtaaccctgaacctgtgtcatattacatcatccagcataagccaaagaactctgaggaactctacaaggagatagacggggtggctaccacaagatatagcgtcgcgggcttgtctccatacagcgattacgaattcagggtagtggcagttaataacataggcagaggacccccttctgagcctgtgctaacacagaccagcgagcaggcaccttcttccgccccccgggatgtgcaggcaagaatgctcagctccaccacaattctcgttcagtggaaggagcctgaggagccaaacggacagattcagggctaccgagtatactacaccatggaccctacccagcacgtaaataactggatgaaacacaatgtggcagacagccaaataacaacaattggcaatctggtacctcagaaaacgtacagcgtaaaggtcttggcttttaccagcatcggcgacggtcctcttagctctgatatccaggtgatcacacagacgggagtccccggccagcctctgaattttaaagcagagcccgagagcgaaacctccatcctgctttcatggaccccccctcggtctgacacaatcgctaactatgagctcgtatataaagatggcgagcacggagaggagcagaggattaccatcgaacctggaacgtcctatcggcttcaagggctcaagccaaactccctctattactttcgccttgccgcccggtcaccacaaggactgggcgcctctacagccgaaatctccgccagaacaatgcagtctatgttcgccaaaaacttccatgtgaaggccgtgatgaaaaccagcgttctcctgtcatgggaaattcccgagaactacaattccgccatgcccttcaagatcctatacgatgatggtaagatggtggaagaggtggacgggcgggcaacacagaaactcattgtgaatctcaaacccgagaagtcctacagttttgtgttgacaaatagaggtaacagtgcaggcggacttcagcaccgcgtaacggccaagaccgcaccagatgtgttgcgcactaagcccgcatttattggaaaaaccaatctggacggaatgataaccgtccagctccctgaggtacccgctaacgagaatatcaagggatactacattatcatcgttccactcaagaaatctcggggcaaattcatcaagccatgggagtcaccagacgagatggagctcgacgaactgctgaaggagatatccaggaagaggagaagtattcgatacggcagggaggtggaactcaagccatacatcgcggcacactttgatgtcctgcctactgaattcacgctgggcgatgacaagcactatggcggatttacgaacaaacagttacaatcaggacaggagtatgtattcttcgtcctcgccgtcatggaacacgccgagagcaagatgtatgctaccagcccatactccgatcccgtagtctccatggacctcgaccctcaaccgatcaccgacgaggaggagggactgatttgggtggtcggacctgtgctggccgtggtgttcattatttgtatcgtgattgccatattgctgtacaaatcctccaaaccagatcgaaagcgagcggaatccgatagccggaagagctcaatccctaacaacaaagagataccgtcccatcatcccactgatcctgtagaactcagacgcttgaacttccagaccccaggtatggctagtcacccccccatccctattctggagctggccgaccatatcgagcgtcttaaggctaacgacaatcttaagttttcccaggagtacgagtccatcgacccaggacaacagttcacctgggagcatagcaatctggaagtcaacaagccgaagaacaggtatgccaatgtaatcgcatacgatcactcgagggtcctcttatcagccatagaaggtatccctggttcagattacgtgaacgccaattacatcgatgggtaccggaaacagaatgcatacatcgccacacaaggaagcttaccagaaacgttcggcgacttctggagaatgatctgggaacagcggagtgcaaccgtggttatgatgaccaagctagaggagaggagtagagttaagtgcgatcaatattggccatcgagaggcacagagactcacggtctcgtgcaagttaccctcctggacacggttgagctggccacctactgtgtgagaacatttgctttatacaagaatggtagcagcgagaaacgcgaagtgaggcagtttcagtttactgcctggccggatcacggggtgcctgagcatccaaccccgttcttggcgtttctcagaagagttaaaacctgtaatccgcctgacgccggcccaatggttgtgcactgttctgcaggggtaggccgaaccggttgtttcatcgtgatagatgccatgctcgaacggattaagcacgagaaaacagtggatatctatggtcacgtcaccctgatgcgcgctcaaaggaattacatggtccagacagaggatcagtacatctttatccacgacgcactgctagaagcagtgacctgcggaaacacggaagttccagctcgtaatttgtatgcttacatccaaaagctgacacagatagagaccggtgaaaatgtcacaggaatggaactggaattcaagaggctggcttccagcaaagcccatacctcccgattcatcagtgccaacctgccttgtaataaattcaaaaatagacttgtgaacattatgccttatgagagcactagagtctgccttcagcctatccgaggtgtcgaggggagtgactatatcaatgcaagctttatagacggttataggcagcagaaggcctacatagcaacacagggtccactggccgaaacaaccgaggacttctggcggatgctgtgggagcacaacagtacaatcgtggtaatgcttactaagttgcgagaaatgggccgagaaaagtgccaccagtactggcccgcagagcgaagcgcccgttaccagtactttgtggtcgatccaatggccgagtataacatgccccagtatatcctacgagaatttaaggttactgatgccagggacggacaatcacggacagtgcggcagtttcaatttactgactggcccgagcaaggcgtgcctaaatccggagagggctttatcgattttatcggacaggttcataagactaaggaacagtttggacaagatggccccatcagcgtgcattgcagcgctggggtggggaggacaggggtgttcattacgctcagcatcgtgttggaacgcatgaggtacgaaggagtggtcgacatttttcagaccgtgaagatgctaagaactcagcgccccgctatggtgcagacagaagaccagtaccagttttcttaccgcgctgccttggaatatctgggtagctttgaccattatgctacctag

SEQ ID NO: 233639 - DNA, 4521 bp, Artificial Sequence
  derived and/or modified sequence
atggtgcacgtggcccggctgctgctgctgctgctgaccttcttcctgaggacagatgctgagaccccaccccgcttcaccaggacccctgtggaccagacaggagtgtctggaggagtggccagcttcatctgccaggccaccggggacccccggcccaagatcgtgtggaacaagaagggcaagaaggtgagcaaccagagatttgaagtcatcgagtttgatgatggcagcggctctgtgctgcgcatccagcccctgcggaccccaagagatgaggccatctatgaatgtgtggccagcaacaacgtgggggagatctctgtgtccacccggctgactgtgctgcgggaggaccagatcccccggggcttccccaccatcgacatgggcccccagctgaaggtggtggagaggaccaggacagccaccatgctgtgtgccgccagcggcaacccagaccctgagatcacctggttcaaggacttcctgcctgtggacaccagcaacaacaacggccgcatcaagcagctgcggtctgagagcattggaggcacccccatccggggggccctgcagatcgagcagagcgaggagagtgaccagggcaagtatgaatgtgtggccaccaacagcgctggcacccgctacagcgccccagccaacctgtatgtgcgggagctgcgggaggtgcggcgggtgcccccacgcttcagcatcccccccaccaaccacgagatcatgcctgggggctctgtgaacatcacctgtgtggccgtgggcagccccatgccctacgtgaagtggatgctgggcgctgaggacctgaccccagaagatgacatgcccatcggcagaaatgtgctggagctgaatgatgtgcggcagagcgccaactacacctgtgtggccatgagcaccctgggcgtgattgaggccatcgcccagatcaccgtgaaggccctgcccaagcccccaggcacccctgtggtgacagagagcacagccaccagcatcaccctgacctgggacagcggcaaccctgagcctgtgtcctactacatcatccagcacaagcccaagaacagcgaggagctgtacaaggagattgatggagtggccaccacccgctacagcgtggccggcctgagcccctacagcgactatgagttccgggtggtggccgtgaacaacatcggccggggccccccatctgagcctgtgctgacccagaccagcgagcaggcccccagcagcgcccccagagatgtgcaggccaggatgctgagcagcaccaccatcctggtgcagtggaaggagcctgaggagcccaacggccagatccagggctacagagtgtactacaccatggaccccacccagcacgtgaacaactggatgaagcacaacgtggccgacagccagatcaccaccatcggcaacctggtgccccagaagacctacagcgtgaaggtgctggccttcaccagcattggagatggccccctgagcagtgacatccaggtgatcacccagacaggagtgcccggccagcccctgaacttcaaggccgagcctgagagcgagaccagcatcctgctgtcctggaccccacccaggagtgacaccatcgccaactatgagctggtgtacaaggatggagagcacggggaggagcagaggatcaccatcgagcccggcaccagctaccgcctgcagggcctgaagcccaacagcctgtactacttccggctggccgcccggagcccccagggcctgggcgccagcacagctgagatcagcgcccggaccatgcagagcatgtttgccaagaacttccacgtgaaggctgtgatgaagacctctgtgctgctgtcctgggagatccctgagaactacaacagcgccatgcccttcaagatcctgtatgatgatggcaagatggtggaggaggtggatggccgggccacccagaagctgattgtgaacctgaagccagagaagagctacagctttgtgctgaccaacagaggcaacagcgctgggggcctgcagcaccgggtgacagccaagacagccccagatgtgctgcggaccaagccagccttcatcggcaagaccaacctggatggcatgatcaccgtgcagctgcctgaggtgcctgccaatgaaaacatcaagggctactacatcatcatcgtgcccctgaagaagagccggggcaagttcatcaagccctgggagagcccagatgagatggagctggatgagctgctgaaggagatcagcaggaagaggaggagcatccgctatggccgggaggtggagctgaagccctacatcgccgcccactttgatgtgctgcccacagagttcaccctgggagatgacaagcactacggcggcttcaccaacaagcagctgcagagcggccaggagtatgtgttctttgtgctggccgtgatggagcacgccgagagcaagatgtatgccaccagcccctacagcgaccctgtggtgtccatggacctggacccccagcccatcacagatgaggaggagggcctcatctgggtggtgggccctgtgctggccgtggtgttcatcatctgcatcgtcatcgccatcctgctgtacaagagcagcaagccagacaggaagagagctgagagtgacagcaggaagagcagcatccccaacaacaaggagatccccagccaccaccccacagatcctgtggagctgcggcggctgaacttccagaccccaggcatggccagccacccccccatccccatcctggagctggccgaccacatcgagcggctgaaggccaatgacaacctgaagttcagccaggagtatgagagcattgaccccggccagcagttcacctgggagcacagcaacctggaggtgaacaagcccaagaacagatatgccaacgtcatcgcctatgaccacagccgggtgctgctgagcgccatcgagggcatccctggcagtgactatgtgaatgccaactacattgatggctacaggaagcagaatgcctacatcgccacccagggcagcctgcctgagaccttcggggacttctggaggatgatctgggagcagaggtctgccaccgtggtgatgatgaccaagctggaggagaggagccgggtgaagtgtgaccagtactggcccagccggggcacagagacccacggcctggtgcaggtgaccctgctggacacagtggagctggccacctactgtgtgaggacctttgccctgtacaagaatggcagcagcgagaagcgggaggtgcggcagttccagttcaccgcctggccagaccacggcgtgcctgagcaccccacccccttcctggccttcctgcggcgggtgaagacctgcaaccccccagatgctggccccatggtggtgcactgcagcgctggggtgggccgcacaggctgcttcatcgtgattgatgccatgctggagcgcatcaagcatgagaagacagtggacatctacggccacgtgaccctgatgagggcccagaggaactacatggtgcagacagaggaccagtacatcttcatccatgatgccctgctggaggccgtgacctgtggcaacacagaggtgcctgccaggaacctgtatgcctacatccagaagctgacccagattgaaacaggagaaaatgtgacaggcatggagctggagttcaagaggctggccagcagcaaggcccacaccagccgcttcatcagcgccaacctgccctgcaacaagttcaagaaccggctggtgaacatcatgccctatgagagcaccagggtgtgcctgcagcccatccggggcgtggagggcagtgactacatcaatgccagcttcattgatggctaccggcagcagaaggcctacatcgccacccagggccccctggccgagaccacagaggacttctggaggatgctgtgggagcacaacagcaccatcgtggtgatgctgaccaagctgcgggagatgggccgggagaagtgccaccagtactggccagctgagaggtctgcccgctaccagtactttgtggtggaccccatggccgagtacaacatgccccagtacatcctgcgggagttcaaggtgacagatgccagagatggccagagcaggacagtgcggcagttccagttcacagactggccagagcagggcgtgcccaagagcggggagggcttcatcgacttcatcggccaggtgcacaagaccaaggagcagtttggccaggacggccccatctctgtgcactgcagcgctggggtgggccgcactggagtcttcatcaccctgagcatcgtgctggagaggatgagatatgagggcgtggtggacatcttccagacagtgaagatgctgcggacccagaggcctgccatggtgcagacagaggaccagtaccagttctcctacagagctgccctggagtacctgggcagctttgaccactacgccacctag

SEQ ID NO: 233640 - DNA, 4521 bp, Artificial Sequence
  derived and/or modified sequence
atggtgcacgtggcccggctgctgctgctgctgctgaccttcttccttcggacggacgccgaaacaccccccagattcacccgtacaccagtggatcaaaccggggtgtctggcggcgttgcatcattcatatgccaggccacaggagatcccaggcctaagatcgtgtggaacaagaagggtaaaaaagtgtctaatcagcggttcgaagtcattgaatttgatgacgggtctggctctgtgctgagaattcagccccttagaaccccacgcgacgaggctatctacgagtgcgtggctagtaataatgtgggtgaaataagcgtcagtacaagactgaccgttctgcgagaggatcagattccgagagggtttccgacaattgatatgggtcctcagcttaaagttgtggaaaggacgcgaacagcaacaatgctttgtgccgcttccggcaatccagatcctgagattacttggtttaaagatttcctgcctgtagataccagcaacaacaacggcagaattaaacagctgcgaagcgaaagtataggtggtacgccaatcagaggtgccctgcagatcgagcagagcgaggagtccgatcaggggaagtatgagtgtgtggccaccaactctgcaggaacaagatacagcgccccggcaaacctgtacgttagggaattacgagaggttagaagagttcctcccaggtttagcatccctccaacgaaccatgaaataatgccgggcggtagcgtcaacatcacctgtgtcgccgtgggctcccctatgccttacgtcaagtggatgctgggtgcagaagatctgacaccggaagatgatatgccaattggaagaaatgttcttgaacttaacgatgttagacaaagcgccaactatacctgtgtcgcaatgtccactttgggggtgattgaggcgatcgcacagattacagtgaaagcactacctaaaccccctggcacccccgtcgttactgagtccactgctacatctataacacttacatgggactctgggaatcccgagccagtgagttactacataattcaacacaaacctaaaaatagcgaggagctgtacaaggagatcgacggtgtagcaaccacaaggtacagtgtggccggcctgtctccatatagcgattatgagttcagggtggtggccgttaacaacatcggtcgaggccccccctctgaacctgtactgacccagacatctgaacaggccccgtcatctgcgcctcgggatgtgcaagctcggatgctctcctcaactaccatcctggtgcaatggaaagaacccgaggagccaaatgggcagatccagggataccgagtatactataccatggaccccacacagcacgtcaacaactggatgaaacacaacgttgctgacagccaaattacaacaatcggcaacttggtgccccaaaaaacctattctgtcaaagtcttggctttcacatctatcggcgacgggcctttgtcttctgacatacaggtaataacacagactggcgtacccggacaaccactgaattttaaagcagagccagagtcagaaacatccattttactgagctggaccccaccaaggtccgataccattgcaaactatgagctagtttataaggacggggagcacggggaagagcaacgaatcaccatagagcctgggacttcttaccggcttcagggtctcaaacctaattcactatactattttcgcttggcggcccgctcaccacagggcttaggcgcttctactgctgaaatatctgctagaactatgcagagcatgttcgccaagaacttccacgtcaaagcagtaatgaagacatccgttctcctttcatgggagattccggagaactataattcagccatgcccttcaaaatactgtatgatgatggaaagatggttgaagaggttgatggacgtgctactcaaaagctgattgttaatctgaagcccgaaaaaagctacagtttcgtacttacaaaccgaggcaactcagccgggggattgcagcatcgggtgacagccaagaccgcccctgatgtgttgcggactaaacccgccttcatcggaaaaaccaatctggacgggatgatcacagttcaacttccagaggtgcctgctaacgagaatatcaaagggtactatatcatcattgtcccacttaagaaatcacgaggtaaatttatcaaaccatgggagtcccctgacgagatggagctggatgaacttttgaaagaaatcagcaggaaacgcagatccattagatacgggcgcgaggtggagcttaagccctacattgccgcgcattttgacgttcttccaacagagtttactttaggagatgacaaacattacggcggtttcaccaacaaacagttgcagagcggccaagaatacgttttttttgtgctggccgtcatggagcacgccgaatccaaaatgtatgctacaagcccttacagcgaccctgtcgtgtccatggacttagacccccagcctattacagacgaagaggagggactgatctgggtggttggacctgtgttggcagttgtgttcattatctgcattgttatcgcaattttgctttacaagtcatctaaacccgatagaaaaagagctgaatcggacagcaggaagtcctcaatcccgaacaataaggagatcccaagccatcacccaacggacccagttgaactgcgcaggctcaacttccaaaccccaggaatggcttctcatccgccgattcccattctcgagttggccgatcacatcgagcggctgaaggctaatgacaatttaaagttttcccaggagtacgaatcgatcgacccaggacagcaattcacatgggaacattctaacctcgaagtgaataagcccaaaaatcgatatgcgaacgtgatagcatacgatcactcacgagtgctgctcagcgccatcgagggcatcccaggatcagattacgtgaatgccaattatatcgacggatatagaaagcagaatgcttatatcgctacacagggctccctgccagagaccttcggcgatttctggcgcatgatatgggaacagcggtccgcaacggtcgttatgatgacaaagctcgaagaacgatccagagtgaagtgcgatcagtactggccgagccggggcacagaaacccatggcctggtgcaggtcacacttctggatacagtagaattggcaacctattgtgtccgtaccttcgctctgtataagaatgggtcctcagaaaaacgggaagtccgacagtttcagtttaccgcatggccggatcacggagtcccagagcaccccactccgtttttggcatttttgcgaagggtgaagacttgtaaccccccagatgcggggcccatggttgtgcattgctctgcaggagttgggaggacaggctgtttcatcgtgatcgatgctatgctggaacgtataaagcacgagaaaaccgttgacatttatggccatgtcacgctgatgcgggcgcagcgcaactacatggtgcagacagaagatcagtacatctttatacatgatgccctgttggaagccgttacgtgtgggaatactgaggttcccgctagaaatctgtatgcatacatacagaagctgacccagattgaaacaggggaaaacgtcactggcatggagctcgagtttaaacgcttagcctcatcaaaagcccacacttcgaggtttatttccgctaatctgccctgtaacaagtttaaaaatcgtctagtcaacatcatgccctacgaatcaacacgggtttgtctgcagcccatacgcggggtggaaggatcagattacattaatgcttcttttatcgacggctatagacaacagaaagcctatatcgcaacccaggggccattagctgagacgactgaggatttctggcgaatgttatgggaacataattcaactatagtggtgatgctgaccaagctgagagagatgggacgggaaaaatgccatcagtactggcccgccgagcgctcagcccgttaccagtattttgtggtcgaccccatggcagaatacaacatgccacagtacattctgcgcgagtttaaggtgactgacgcacgagatggccagtcccggacagtccggcagtttcagttcaccgactggccggaacagggagtacctaaaagtggggaagggtttatcgactttatcggccaggtgcacaagactaaggagcagttcggtcaggatggccccatcagtgtgcactgcagcgctggggtaggaagaaccggcgtttttattaccctttccatcgtgctggaacggatgaggtacgagggtgttgtggacatattccagacagttaagatgcttagaacccagcgacccgccatggttcagaccgaagatcaatatcaattttcatatcgcgctgccctcgagtacttgggttcatttgatcattatgccacctag

SEQ ID NO: 233641 - DNA, 4521 bp, Artificial Sequence
  derived and/or modified sequence
atggtgcacgtcgccaggttactgcttctgctactcacgtttttcctcaggacagacgccgagactcccccaaggtttacacggacccctgttgaccagacaggcgtgtccggaggcgtggcctcattcatttgtcaggcaactggcgatccgcgacccaagatcgtatggaataagaagggaaagaaggtgtctaaccagagattcgaggtgattgagtttgatgatggatcaggatccgtcctacggatacagcccctacggactccaagagatgaggccatctatgagtgcgttgccagcaataacgtcggggagatctctgtgagcactcggttgacagtactccgtgaggatcagatcccacggggtttccctactatagacatgggtcctcagctaaaggtggtcgagagaacccgtactgccactatgctctgcgccgcttccggcaaccccgatcccgaaatcacatggttcaaggacttcctccccgtagatacatcaaacaacaacggaaggataaaacagctaagatccgagtctattggcggtacccccatacggggagcactgcaaatcgagcagagcgaggaatctgatcaggggaaatatgagtgtgtggctactaactctgccggtactagatacagcgcacccgctaacctctacgtgcgcgaattgagggaggtgagaagagtgcctccacggttctccatcccccctactaaccacgagatcatgccaggcggatctgtgaatattacttgtgttgccgtcggaagtcctatgccttatgtgaaatggatgctgggcgcagaagacttgaccccagaggacgatatgccgattggtcggaacgtgctagaattgaatgacgtcagacagagtgccaattacacctgtgtcgcaatgtccaccctgggcgtaattgaggccattgcccagataacagttaaggccctgcccaaacctccgggaacacctgttgtaaccgagtcgacggccacttctatcaccctgacgtgggacagcggcaatccggagcctgtgtcctactacatcatccagcacaaacccaaaaatagtgaagagttatataaagagatcgatggcgtggccaccactagatattctgttgcgggactgagcccctacagtgactacgagttccgcgtcgtcgctgtgaataatatcggcagaggcccaccctccgaacccgtgctcacacaaacatcagagcaggcgccaagtagtgccccacgggatgtgcaagcgagaatgctaagctcaactacaatactggtgcagtggaaggagcccgaagagcctaacgggcaaattcaaggctaccgagtctattataccatggatcctacacaacacgtgaacaactggatgaagcacaacgtcgccgactcacagatcaccactataggcaatctggttccacagaagacgtattctgtgaaagtcctggcctttactagtatcggggacggcccattgagcagcgatattcaagtgatcacccaaaccggagtgccgggacagccactgaattttaaagctgagccagagtctgagacatccattcttctgtcctggaccccccctcgaagtgataccatagccaactacgagctcgtgtacaaggacggcgaacatggggaagaacaacggataacaatcgagccaggcacctcctacagactgcagggcctgaagcccaacagcctgtactactttaggttggccgctagaagtcctcagggattaggcgcaagcaccgccgaaatttctgctcgcaccatgcagtctatgttcgctaaaaacttccatgtgaaggctgtgatgaagacatccgtcctcttgtcttgggagatcccggagaattataattctgctatgccattcaaaattctttatgatgacggaaagatggtggaagaagtcgatggacgcgcaacccagaagttaatagtgaatttaaagccagagaaatcttacagcttcgtgctgaccaatagagggaactccgccggaggcctgcaacaccgcgtgacggcaaaaaccgcccctgacgtgctgcgcactaaaccagccttcataggaaaaacaaacctggatggcatgattaccgtgcaattaccagaggtgcctgcaaacgaaaatatcaaaggctattacataattatcgtgccattgaaaaagagccgcggaaaattcatcaagccttgggagtccccagatgaaatggagctcgacgagttattgaaggagatatccaggaaacgtcgatctatccgttacggcagagaggtggaactaaagccttatatcgcagctcactttgatgttctgccaaccgagttcactttgggagatgataagcattatggagggttcaccaacaagcaacttcagtcggggcaggagtatgtgttttttgtacttgccgtcatggagcatgctgaaagtaagatgtatgcaacaagcccatattctgatcctgtggtatccatggacttagaccctcagcccataaccgatgaagaagaaggcctcatttgggttgtgggcccagtgctggccgtggtctttattatatgcatcgttatagcgatattgctttacaagagctcgaaaccagaccggaagagagccgaatcagacagtcgcaagtcctcgatacccaataataaggagatcccgagccatcatccgacagaccctgtagaactgcggcgtctgaattttcagactccaggaatggcctcccaccccccaattccgattctcgaattagccgaccacattgagaggctgaaagccaacgacaatctgaaattcagtcaggaatacgagtccatcgaccccggtcagcagtttacctgggagcatagtaacctggaggttaacaagccaaagaaccggtacgctaacgtcatcgcttatgaccactctagagtcctcctgtcggccatcgaagggatccctgggagtgattacgtcaacgctaattacatcgatggctaccgtaagcagaacgcctacatcgctacacaaggcagcctgcccgagacatttggggatttttggcgaatgatctgggaacagagatccgcaaccgtcgtgatgatgaccaaactggaggagaggagccgggtcaagtgtgatcaatactggccttctagaggcacagagacacacggacttgtccaggtgaccctccttgacacagtggagttggccacatattgcgtgaggactttcgctctgtacaagaatggcagcagtgagaaacgggaggttcgtcagtttcaatttacagcctggccagaccacggtgtgccggagcaccccacaccctttctcgcctttctgcgcagggtgaaaacctgcaatcctcccgacgccggtcctatggtggtccactgttccgccggagtgggaagaaccggctgctttatcgtgattgacgcgatgttggagaggatcaagcacgagaagacagttgacatctatgggcacgtgacgcttatgagggcccaaagaaactatatggtgcagacagaagatcagtacatcttcatacatgacgcactactcgaagcggtgacctgcgggaacacagaggtgccagctcgaaacctttacgcttacatccagaaactcacacaaattgagactggcgaaaatgtgactggtatggagctggaatttaaacgactggccagcagtaaagcccatacgtctagattcatctctgccaatttaccgtgcaacaagttcaagaaccggctagtaaacattatgccctatgagagtaccagagtatgccttcaacccattcggggagtggagggtagtgactacattaatgcgtcgtttatagacggctacaggcaacagaaggcctacattgctacccagggccctctggcagagactacagaagacttctggcgcatgttgtgggaacataacagcaccatcgttgttatgctgactaaattgcgggagatggggcgagaaaagtgtcaccagtactggcccgcagagcggtcagctcgctaccagtattttgtagtggacccaatggctgaatataatatgccacaatacatactgcgtgagttcaaagtgacagacgcgagagacgggcaaagtcggacagtgcgtcagttccaattcactgactggccggaacagggagtgcctaagagcggcgagggctttatcgattttatcggtcaggtgcataaaactaaagagcagttcggacaggacgggcctatctcggtgcactgctctgcgggtgtcggcaggactggcgtcttcattaccctttcgatcgtgttggaacggatgcgttacgaaggggtggtagacattttccagaccgtcaaaatgctgcgtacacaaagaccggctatggttcagacagaggaccagtaccagtttagctaccgggcagcactggagtatctgggcagctttgatcactatgccacttag

SEQ ID NO: 233642 - DNA, 8251 bp, Artificial Sequence
  derived and/or modified sequence
gctctgaaagtgttccagctgaaatttcagatcggacagactcgctgcggctccggaggcagtgattccaagctgctcgcgcacgctgctgccaagctgcaggatggtgcacgtagccaggctgctgctgctgctcctcactttcttcctccgcacggatgctgagacacctccaaggtttacacgaacacccgttgatcagacaggggtctctggcggagttgcctctttcatctgccaagctacgggagacccaagacctaaaattgtctggaacaaaaaaggaaagaaagtcagcaatcagagatttgaggtaatagagtttgacgatgggtctggatcagttctcagaatacaacccttacggactccgagggatgaggccatttatgaatgtgtggcctcaaataatgtgggagaaataagtgtatccaccagactcacagttttgcgggaagatcaaattcccaggggcttccctaccattgacatgggcccacagttgaaggtggttgagcgtactcgcacggccaccatgctttgtgcagccagtggtaatccggatccagaaatcacttggtttaaagatttcttacctgtggacacaagcaacaacaatggtcgtattaagcagttacgatcagaatctattggtggtacaccaataagaggagcccttcagattgagcagagtgaagagtctgaccaaggaaaatatgagtgtgttgccaccaacagcgcgggcactcgctattccgctcctgccaatttatatgtcagagagctgcgagaagttcgccgtgtcccaccaagattctctatcccacccactaatcatgaaatcatgccaggcggaagcgttaatatcacctgtgtggccgtggggtcaccaatgccttatgtaaagtggatgttgggggcagaagatctgacacctgaagatgatatgccaataggaagaaatgtgctagaactgaatgatgtaagacagtcagcaaattacacctgtgttgctatgtcaacactgggtgtcattgaagcaatagcacagatcactgtcaaagccttacccaaacctccaggaactcctgtagtgaccgagagcacagctacaagcatcacactgacgtgggactctgggaaccctgagcctgtttcttattacataattcagcataaacctaaaaactctgaggaactttacaaagaaattgatggggtggcgaccacacgctacagtgtcgctggactaagtccctactcggattatgaattcagggttgttgctgtcaataacattgggcgggggcctcccagcgaacctgtgctaacacaaacctcagagcaagcaccatccagtgccccgagggatgtccaggcacgaatgttgagttcgaccaccattttggtacagtggaaggaacctgaagagccaaatggacagatccaaggatatagagtttattatacaatggatcccactcaacatgtcaacaactggatgaaacacaatgtagctgacagccaaatcactactattggcaacttagtgccccagaaaacatattctgtcaaagtcctggcttttacctcaattggagatggtcccctttcaagtgacatacaagtcatcactcagacaggagtaccagggcagccactaaacttcaaagcagaacctgagtctgaaacaagtattttgctctcttggacacctccacgttcagataccattgccaactatgaactggtctacaaagatggggagcatggagaggagcaacgaattaccattgagccagggacatcatataggctgcaaggactgaaaccaaacagcttatactatttccgtctggctgcacgctcccctcaaggcctgggtgcttctactgcagaaatatcagctagaaccatgcagtcaatgtttgcaaaaaattttcatgtcaaagcagtaatgaagacttccgtgttgctgtcttgggagattccagagaattataactccgccatgcctttcaaaattctttatgatgatgggaaaatggtagaagaagtggatggccgagccacacagaagttaattgtcaacctgaagcctgagaaatcatattcatttgtgctgacaaatcgtggaaacagtgctggtgggctgcagcacagggtcacggcaaagactgcaccagatgtattacgtaccaagcctgccttcattgggaagaccaacttggatggcatgattactgtgcaactgcctgaagtacctgcaaatgagaatataaaaggttactacataataattgtgcctttgaagaaatctcgcgggaaatttatcaagccatgggagagtccagatgaaatggaattagatgagctgcttaaggagatatctaggaagcgcagaagcatccgttatgggagagaagttgaattaaagccatatattgccgctcactttgatgtccttcccactgagttcaccctgggggatgacaagcattatggtggatttacaaacaagcaactccaaagtggtcaagaatatgtcttctttgtgttagcagtaatggaacatgcagagtctaagatgtatgcaaccagcccttactccgaccccgtggtgtcaatggatctggatccgcagccaatcacggatgaagaagaaggcttgatctgggttgtaggtcctgtccttgcagtggtctttatcatctgcattgtcattgctattcttctttataaaagcagtaaacccgacaggaagagggcagagtccgactctagaaaaagcagcataccgaacaataaggagatcccttcacaccacccaacagaccctgtagaactgaggcgccttaactttcaaacaccgggtatggctagccatcctccaatacccatcttggaacttgcagaccacattgaaagattgaaagcaaatgacaacttgaagttttcccaggaatatgagtcaattgaccctggccagcagttcacttgggaacattcaaacttggaagtaaacaaaccaaagaatagatacgcgaatgtaatcgcatatgatcattcccgggttctcctatcagctatagaagggatcccaggaagtgactatgtgaatgccaactacatagatgggtataggaagcaaaatgcctatattgcaacacagggatctctccccgaaacatttggggacttttggagaatgatatgggaacaacggagtgccacagttgtcatgatgacaaaactagaagaaagatcaagggtgaagtgtgaccagtattggcctagcagaggcacagaaacccacggactcgttcaagtaacgctgcttgatactgtggagctggccacatattgtgttcgaacatttgcactttacaagaatggttcaagtgagaagagagaagtgagacaattccagttcaccgcctggcctgatcatggtgttccagaacaccctacaccttttctagctttcttacgtagagtcaaaacctgtaaccctcccgatgctggtccgatggttgtgcactgcagtgcgggagttggccggactggttgcttcatcgtcatagatgccatgttagaaagaataaagcatgaaaaaactgtagatatttatggccatgtaactttaatgagagcccagaggaactatatggttcaaacagaagaccaatacatctttatccatgatgcactgttagaagcagtgacttgtggaaataccgaagtgccagctagaaacttgtatgcctacattcagaagctgacacaaatagaaacgggagagaatgtcacaggaatggagctcgaatttaagcgtctagccagctcaaaagctcacacctcaaggtttatcagtgccaatcttccatgtaataaattcaaaaatcgccttgttaatattatgccatatgaatccacaagggtatgcctgcagcctatccgtggagtagaaggatctgattacatcaatgccagttttattgatggatacagacaacagaaagcctacatcgctacccaggggcccttggcagagaccactgaagacttctggcggatgctctgggaacacaattccaccatagttgtgatgctcaccaagctgcgtgaaatgggcagagagaaatgtcaccaatactggccagcagaacggtctgcaagataccagtactttgttgtagatcccatggctgagtacaacatgccacagtatatcctaagggaattcaaggtcacagatgccagggacggccagtcccgaacagtaaggcagttccagttcactgactggccagagcaaggagtgccaaagtccggagaaggatttattgacttcatcggccaagtccataaaacaaaagaacagtttggccaagatggacccatttcagtccattgcagcgcgggcgttggaagaactggagtcttcataacgctaagcattgttttggaaagaatgagatatgaaggagttgtagatatcttccagactgtcaaaatgttaagaacacaacgaccagctatggtacagacagaggatcaatatcagttttcctatcgtgccgcactagagtacctgggcagctttgaccactatgcaacgtagaaacccctgacccattctggatttttactacaggcccttcaatatccatggagtctcttctgagccatacagggcacttgagaagtccttcttaacttctagctaacaactacttagtgggactattacacacaaaacaaattaaaaacaaattattccaggtggaccaagaattcacagtttaataatctaacctgaaaaataatgaagagaatcctgactgatgaggcatctgaaggattttatttacagatacctcaaggattcaaaatcaagggaagaagaaatcacagcaaagaaccaccatcttattcaggattgcttgaaaggtgcaaggagaaattgccagaatgctgcagttcagcacaagatatgtgctggtgtggcttctcacaatgaaacggactctgctttgacatcgccccttcccaccatactgctcataataacattttagggggaaaggggagggaatgtttaaaaagaaagtccttgatttagttttttagtattgtaaagatactgctgacctgtgcttcatttctaactgtgtaaacttttttttaacaaaatgtatcattcgataaagtgaattttaaaaaagttacataactcttcatttttttatttccaaatcgtaggtttttttaagctgtagaactgttatctgtaatatcttgctgtagaaatatcaaatcatttgaaaatttgcacatttttgtgcaaaactcaatctacagtatcagtctcgtcagatatattaattttacacttcagttttgattggtgagaaagtacccattctcttcaaataatcaaagataattattattttgttttgtttttggaatcaacagggaggcgcaaagtataaagttgctgctaacatatatacatatatatccatattttataagggtgtctatgtatatatagacagtgtgtccacacaaaaaatagatacagttatcagtcagtcagttcttccatgatttagtttttttaaacgtagaaaagctattgtaaacatctctttccatttattcttaattttttgacatattggtatttctttaaagggaaatgaggaatgcacatcagtgattgattgtcaaacctcaccccctgatttcctacctaatctacccccacctaaccaatcaatcacatccacaaattgttttgtttgtttgttagtcaggcttccaacaaagttcaatatttctaacactctagtgcaataaaaattattattaaatagctaagaggtgtgcatgtgggaaaggtcagtgcatatccctttaggaggggagaatgttgtaatatatcagctatcgagttgtttaaaaaaagtgtattcaatcgtatattgtctatagtatgtgctatgaaatttgcatttatgatatgtaacaggggcaaagccaaattcatgttactctgttcagtcagaaacattttgtggcatacagcattcctgggaagtgctgtactttgtttcgttttggttttagttttgcatttagagtgccttataattgatgcctattttaatagcatttctttttagcttttggttcgtatttccattcactgttcgtatctgttactttctattaaagcattatctgtttaccacatgtacaaaaactctttgaataatatgcattcctagttttcagccaagtcggggatgttagtgattgtaccagcccaaagcacttggataatcagggcccttcttccttttataatcaatcatcaacatcagaaaaagctacttgttttatttatattcccttccaaatccgctctggaacatgcagtaactgcaccaaacttattttagtaacaaatatcattggcaactttggaatatatttgatattccattaggatttttctaaaaggggaaataaactatatatatatatgtatcttacccccaattcttccaacagaatttctataggaagccatggatgatggcataagtttgccacatattacatgattttaaataatcctcaaaatacccaaggaactcttaaagagttttggtatgagtatactactttggtttaattttagcttcatggatgttctgcatggaaggatttttgttttccacattttcccattgctagcagagtgaaatccaagagaccaaacatttgcaagcattgtatttgagcacttttgtaaaaaacaaagaaaaagaaaaaaaagaaaatatatataatactaaaaaaaagtatctagaaggctacctcagaatgagactctctaacctacatcagaaccagagaagaatgtgcactatgtgggtctgttatcattattttcttttagtttgtatctttttggagatttatccaagtgccagattactcagtgctataattttcttttagttaaacaaagggggtcagacagacattgcatcatccagacatgccttgttggacatgtagaatccgatggagcactgcacaccagaatgattggccaatgagcagcttctctccctgaaacaataactgcccatttggcaaagggaaagatgacaataatcagaagaagaaaatgaatgggatgcataccatagacgaacgaggcggagactattgcgggaatcttactgttcaggagctgttcctagaactaactcccttactgtcattgatgtgcattccactctgtgcttttctgtacaaccattcaagttttaatttcccaggtgaaccatctttatctgccattaccacaagctttcaagtttccagttattttcatcatcataaccagtacggtgctattatttacctatgtacgtgtagttatgtataattttgtaattagttacaatggtaaaaaaaatcaaaatatataaaaagtgatttgtacagaactttattttagctcttttttaaaaatgatttgcatggttagaaaacggcgaggacagccaggggagggaagggcctctagggaactttgcactttctatacctttgtactatgcactgccctattgattctacacccaataatgatattacttgaacccatctgtaagaaactgcttcggaaattcatttgtgtgtatgtaaataacacaacatagaaacaggaagggaaaaaagtctgcagtaatgcacgtattttttttctttcctgtttattttcggttttgctttaagtccttttatttttaattccctttttgtttttctttttgggttttggttccttttgggtttatgggtgccctgatactccagcagagatcagaaggctacagatccattctatccatccgttatgtggctttgccatcccagcttggagtgtctttacaaagataataacagttgtgttctttgctctcgttttggatgcatagactgaaaaattaaaacaaataacttgtaaaatggcttgttaaaaaatacaattacctctaattagtagtacgcgtaaatgttttacagaatgaaaggcgtgctttttattttcttacttcgttacattggtggcgaaagaagtctgtatgaaaatcagttctttgctgacacaagttccatttgttacaaatgaattctaataaaaatgtcagtgttatgc

SEQ ID NO: 233643 - DNA, 4521 bp, Artificial Sequence
  derived and/or modified sequence
atggtgcacgtggccagactgctgctgctgctgctgaccttcttcctgagaaccgacgccgagaccccccccagattcaccagaacccccgtggaccagaccggcgtgagcggcggcgtggccagcttcatctgccaggccaccggcgaccccagacccaagatcgtgtggaacaagaagggcaagaaggtgagcaaccagagattcgaggtgatcgagttcgacgacggcagcggcagcgtgctgagaatccagcccctgagaacccccagagacgaggccatctacgagtgcgtggccagcaacaacgtgggcgagatcagcgtgagcaccagactgaccgtgctgagagaggaccagatccccagaggcttccccaccatcgacatgggcccccagctgaaggtggtggagagaaccagaaccgccaccatgctgtgcgccgccagcggcaaccccgaccccgagatcacctggttcaaggacttcctgcccgtggacaccagcaacaacaacggcagaatcaagcagctgagaagcgagagcatcggcggcacccccatcagaggcgccctgcagatcgagcagagcgaggagagcgaccagggcaagtacgagtgcgtggccaccaacagcgccggcaccagatacagcgcccccgccaacctgtacgtgagagagctgagagaggtgagaagagtgccccccagattcagcatcccccccaccaaccacgagatcatgcccggcggcagcgtgaacatcacctgcgtggccgtgggcagccccatgccctacgtgaagtggatgctgggcgccgaggacctgacccccgaggacgacatgcccatcggcagaaacgtgctggagctgaacgacgtgagacagagcgccaactacacctgcgtggccatgagcaccctgggcgtgatcgaggccatcgcccagatcaccgtgaaggccctgcccaagccccccggcacccccgtggtgaccgagagcaccgccaccagcatcaccctgacctgggacagcggcaaccccgagcccgtgagctactacatcatccagcacaagcccaagaacagcgaggagctgtacaaggagatcgacggcgtggccaccaccagatacagcgtggccggcctgagcccctacagcgactacgagttcagagtggtggccgtgaacaacatcggcagaggcccccccagcgagcccgtgctgacccagaccagcgagcaggcccccagcagcgcccccagagacgtgcaggccagaatgctgagcagcaccaccatcctggtgcagtggaaggagcccgaggagcccaacggccagatccagggctacagagtgtactacaccatggaccccacccagcacgtgaacaactggatgaagcacaacgtggccgacagccagatcaccaccatcggcaacctggtgccccagaagacctacagcgtgaaggtgctggccttcaccagcatcggcgacggccccctgagcagcgacatccaggtgatcacccagaccggcgtgcccggccagcccctgaacttcaaggccgagcccgagagcgagaccagcatcctgctgagctggaccccccccagaagcgacaccatcgccaactacgagctggtgtacaaggacggcgagcacggcgaggagcagagaatcaccatcgagcccggcaccagctacagactgcagggcctgaagcccaacagcctgtactacttcagactggccgccagaagcccccagggcctgggcgccagcaccgccgagatcagcgccagaaccatgcagagcatgttcgccaagaacttccacgtgaaggccgtgatgaagaccagcgtgctgctgagctgggagatccccgagaactacaacagcgccatgcccttcaagatcctgtacgacgacggcaagatggtggaggaggtggacggcagagccacccagaagctgatcgtgaacctgaagcccgagaagagctacagcttcgtgctgaccaacagaggcaacagcgccggcggcctgcagcacagagtgaccgccaagaccgcccccgacgtgctgagaaccaagcccgccttcatcggcaagaccaacctggacggcatgatcaccgtgcagctgcccgaggtgcccgccaacgagaacatcaagggctactacatcatcatcgtgcccctgaagaagagcagaggcaagttcatcaagccctgggagagccccgacgagatggagctggacgagctgctgaaggagatcagcagaaagagaagaagcatcagatacggcagagaggtggagctgaagccctacatcgccgcccacttcgacgtgctgcccaccgagttcaccctgggcgacgacaagcactacggcggcttcaccaacaagcagctgcagagcggccaggagtacgtgttcttcgtgctggccgtgatggagcacgccgagagcaagatgtacgccaccagcccctacagcgaccccgtggtgagcatggacctggacccccagcccatcaccgacgaggaggagggcctgatctgggtggtgggccccgtgctggccgtggtgttcatcatctgcatcgtgatcgccatcctgctgtacaagagcagcaagcccgacagaaagagagccgagagcgacagcagaaagagcagcatccccaacaacaaggagatccccagccaccaccccaccgaccccgtggagctgagaagactgaacttccagacccccggcatggccagccacccccccatccccatcctggagctggccgaccacatcgagagactgaaggccaacgacaacctgaagttcagccaggagtacgagagcatcgaccccggccagcagttcacctgggagcacagcaacctggaggtgaacaagcccaagaacagatacgccaacgtgatcgcctacgaccacagcagagtgctgctgagcgccatcgagggcatccccggcagcgactacgtgaacgccaactacatcgacggctacagaaagcagaacgcctacatcgccacccagggcagcctgcccgagaccttcggcgacttctggagaatgatctgggagcagagaagcgccaccgtggtgatgatgaccaagctggaggagagaagcagagtgaagtgcgaccagtactggcccagcagaggcaccgagacccacggcctggtgcaggtgaccctgctggacaccgtggagctggccacctactgcgtgagaaccttcgccctgtacaagaacggcagcagcgagaagagagaggtgagacagttccagttcaccgcctggcccgaccacggcgtgcccgagcaccccacccccttcctggccttcctgagaagagtgaagacctgcaacccccccgacgccggccccatggtggtgcactgcagcgccggcgtgggcagaaccggctgcttcatcgtgatcgacgccatgctggagagaatcaagcacgagaagaccgtggacatctacggccacgtgaccctgatgagagcccagagaaactacatggtgcagaccgaggaccagtacatcttcatccacgacgccctgctggaggccgtgacctgcggcaacaccgaggtgcccgccagaaacctgtacgcctacatccagaagctgacccagatcgagaccggcgagaacgtgaccggcatggagctggagttcaagagactggccagcagcaaggcccacaccagcagattcatcagcgccaacctgccctgcaacaagttcaagaacagactggtgaacatcatgccctacgagagcaccagagtgtgcctgcagcccatcagaggcgtggagggcagcgactacatcaacgccagcttcatcgacggctacagacagcagaaggcctacatcgccacccagggccccctggccgagaccaccgaggacttctggagaatgctgtgggagcacaacagcaccatcgtggtgatgctgaccaagctgagagagatgggcagagagaagtgccaccagtactggcccgccgagagaagcgccagataccagtacttcgtggtggaccccatggccgagtacaacatgccccagtacatcctgagagagttcaaggtgaccgacgccagagacggccagagcagaaccgtgagacagttccagttcaccgactggcccgagcagggcgtgcccaagagcggcgagggcttcatcgacttcatcggccaggtgcacaagaccaaggagcagttcggccaggacggccccatcagcgtgcactgcagcgccggcgtgggcagaaccggcgtgttcatcaccctgagcatcgtgctggagagaatgagatacgagggcgtggtggacatcttccagaccgtgaagatgctgagaacccagagacccgccatggtgcagaccgaggaccagtaccagttcagctacagagccgccctggagtacctgggcagcttcgaccactacgccacctag

SEQ ID NO: 233644 - protein, 1383 aa, Artificial Sequence
  derived and/or modified sequence
MVHVARLLLLLLTFFLRTDAETPPRFTRTPVDQTGVSGGVASFICQATGDPRPKIVWNKKGKKVSNQRFEVIEFDDGSGSVLRIQPLRTPRDEAIYECVASNNVGEISVSTRLTVLREDQIPRGFPTIDMGPQLKVVERTRTATMLCAASGNPDPEITWFKDFLPVDTSNNNGRIKQLRSVSVCATYHTGALQIEQSEESDQGKYECVATNSAGTRYSAPANLYVRVNRKVRRVPPRFSIPPTNHEIMPGGSVNITCVAVGSPMPYVKWMLGAEDLTPEDDMPIGRNVLELNDVRQSANYTCVAMSTLGVIEAIAQITVKALPKPPGTPVVTESTATSITLTWDSGNPEPVSYYIIQHKPKNSEELYKEIDGVATTRYSVAGLSPYSDYEFRVVAVNNIGRGPPSEPVLTQTSEQAPSSAPRDVQARMLSSTTILVQWKEPEEPNGQIQGYRVYYTMDPTQHVNNWMKHNVADSQITTIGNLVPQKTYSVKVLAFTSIGDGPLSSDIQVITQTGVPGQPLNFKAEPESETSILLSWTPPRSDTIANYELVYKDGEHGEEQRITIEPGTSYRLQGLKPNSLYYFRLAARSPQGLGASTAEISARTMQSSKGYYIIIVPLKKSRGKFIKPWESPDEMELDELLKEISRKRRSIRYGREVELKPYIAAHFDVLPTEFTLGDDKHYGGFTNKQLQSGQEYVFFVLAVMEHAESKMYATSPYSDPVVSMDLDPQPITDEEEGLIWVVGPVLAVVFIICIVIAILLYKRKRAESDSRKSSIPNNKEIPSHHPTDPVELRRLNFQTPGMASHPPIPILELADHIERLKANDNLKFSQEYESIDPGQQFTWEHSNLEVNKPKNRYANVIAYDHSRVLLSAIEGIPGSDYVNANYIDGYRKQNAYIATQGSLPETFGDFWRMIWEQRSATVVMMTKLEERSRVKCDQYWPSRGTETHGLVQVTLLDTVELATYCVRTFALYKNGSSEKREVRQFQFTAWPDHGVPEHPTPFLAFLRRVKTCNPPDAGPMVVHCSAGVGRTGCFIVIDAMLERIKHEKTVDIYGHVTLMRAQRNYMVQTEDQYIFIHDALLEAVTCGNTEVPARNLYAYIQKLTQIETGENVTGMELEFKRLASSKAHTSRFISANLPCNKFKNRLVNIMPYESTRVCLQPIRGVEGSDYINASFIDGYRQQKAYIATQGPLAETTEDFWRMLWEHNSTIVVMLTKLREMGREKCHQYWPAERSARYQYFVVDPMAEYNMPQYILREFKVTDARDGQSRTVRQFQFTDWPEQGVPKSGEGFIDFIGQVHKTKEQFGQDGPISVHCSAGVGRTGVFITLSIVLERMRYEGVVDIFQTVKMLRTQRPAMVQTEDQYQFSYRAALEYLGSFDHYAT

SEQ ID NO: 233645 - DNA, 4152 bp, Artificial Sequence
  derived and/or modified sequence
atggtacacgtcgcgaggctcttgctgcttctcctaacctttttcttgcgaactgacgctgagacgccccccagatttacacgaacaccagtcgaccagactggggtgagcggcggagtggcctcttttatttgtcaggctactggggacccccgcccaaagattgtgtggaataagaaaggcaagaaagttagtaaccagaggtttgaagtgattgaatttgacgacggatctggtagtgtcttacggattcagccactgcggacacccagagatgaagctatttatgagtgcgtggcctcaaacaacgtgggagagattagcgtgtctactcggcttacggtcctgagagaagaccaaatccctagagggtttcccacaattgatatgggtccacaactgaaggtggttgagcggaccagaactgcaaccatgctgtgcgccgcatcagggaacccagaccccgaaatcacctggtttaaggactttctgcccgttgatacttccaataataacgggcgcataaaacagctgcgctctgtcagtgtttgcgcaacttatcacactggtgccctgcagattgaacagtccgaggagtctgatcagggaaaatacgaatgcgtggccacgaactctgcagggacacggtacagcgcgcctgccaacctatatgtgagagtgaaccggaaggtaaggagagtccctccgcggttcagcataccacccacaaaccacgagataatgccgggcggatcggtcaacataacatgcgtggctgtcggatctcccatgccctatgttaagtggatgctgggggcagaggacttgacacccgaagacgatatgcccatcggtcgcaatgtcctcgaactcaacgatgtgcggcaatcggccaactacacttgtgttgctatgagcaccctgggggtaattgaagccatcgctcagatcactgtcaaagcacttcccaagccgccaggcacgcccgttgtaacagagagcaccgcgacttccattaccctgacttgggactcaggaaatcccgagccagtgtcctactatatcatacagcacaagccaaaaaattccgaggagctctacaaggagattgacggagttgctaccacccgctattctgttgccggattgtctccgtattctgactacgagttccgggtggtggctgtgaacaacatcggccggggccctccaagcgagccagtcctgactcagaccagtgaacaggccccatcttcagcccccagggatgtacaggccagaatgctaagttctacaaccattctcgtccagtggaaagagcccgaagagcccaatggccagatacagggatatcgagtttactatactatggatccaacccagcatgtcaacaactggatgaaacacaacgtggcggattcgcaaatcactaccattgggaacctggtgcctcaaaaaacttatagcgtcaaggtcctggcattcacaagcattggggacggcccgctgagcagcgatatccaggtgattacccaaacgggagtgcccggccagccactgaactttaaggccgagccagaatccgagacctctatcctcttatcctggactccgccgagaagcgacacaattgcaaattatgagctggtttacaaggacggagaacacggggaggagcaaaggatcacaattgagccgggaacttcttataggcttcagggattgaagcccaatagcctctattacttccgcctcgcagcgcgcagtccccagggccttggagcctctacagccgagatatctgccaggacaatgcagtcttccaagggttactacatcattattgtgcctctgaaaaagtcccgcggcaagttcattaaaccatgggaatctccagacgagatggagctcgacgaattgcttaaggagattagccgcaagcggcggagcattcgttatggaagggaggttgaactgaagccctacattgctgcacatttcgatgtgctgcctaccgagtttactcttggggatgataagcactatggagggtttacgaataagcaattgcagtccggccaggaatacgtgtttttcgtgcttgctgtgatggaacatgctgagtcaaagatgtatgccactagtccttacagcgacccagtagtgagcatggacctcgatccacaacccatcacagacgaagaggaaggcttgatctgggtcgtcggccccgtgctcgcagtcgtttttattatttgcattgtcattgccatcctgctctacaaacggaagagggccgaaagtgacagtcgcaaatcgagcatccccaacaataaagagatcccatcccatcatccaacggatccagtggaacttcgacggcttaatttccaaacacctgggatggcaagtcaccctcccatccctattctcgagctcgctgatcacatagagcggctcaaagctaatgacaatctcaaattttctcaagagtatgagagcattgatccgggacaacagttcacttgggaacacagtaacctggaggtgaacaagcctaaaaatcggtacgcaaatgtaatagcgtatgaccactcgcgagtgctgctgtccgctatcgagggcattccagggagtgactacgtcaacgccaattatattgacgggtacaggaaacagaacgcctacattgctacacagggcagcctcccagagactttcggcgatttttggcggatgatctgggaacagagaagcgccacagttgtcatgatgaccaagttggaggaaagaagtagggtgaaatgcgaccagtattggccgagccggggtaccgagacacacggcctggtgcaagtgaccctgctggacactgtcgagctggccacctactgtgttcgcacatttgctctgtacaagaacgggtcctccgaaaaacgggaggtgagacagtttcaattcaccgcgtggccagaccacggtgtacccgaacacccaactcctttcctggccttcctcagacgagtgaaaacttgcaacccaccagatgccggtccaatggtggtgcactgtagcgcgggcgtgggccggactggatgttttatagtcattgatgccatgcttgaaagaatcaaacatgagaagacggtcgacatttacggtcacgtaacactcatgcgagcacagcggaactacatggttcagacagaggaccaatatatattcatacacgatgccctgctggaggctgtcacctgcggcaatacagaggttcccgcacgaaatttatatgcctatattcagaagctcacacagattgagacaggcgagaatgtgacaggcatggagctggagtttaaaaggctggcttcctcaaaggcacacactagcaggtttatcagtgcaaacctgccttgcaacaaattcaaaaaccgcctagtgaacatcatgccatatgagtctaccagggtatgcctgcagccaatcagaggagtggagggaagtgactacatcaacgcgtctttcatcgatggttatcgacagcagaaggcatatatagctactcaagggccattagcggagactaccgaagatttctggcggatgctgtgggagcacaattccaccatagtggtcatgttaacaaaactacgagagatggggagagagaagtgtcaccagtattggcccgccgagaggtcggcacggtaccaatactttgttgtagacccaatggctgagtataatatgccacagtatattctacgagagttcaaggtgaccgacgcccgagacggacagagccgtaccgtgcggcagttccagttcacagactggccggagcaaggcgtgccaaagagcggagagggattcatcgattttattggtcaggtgcacaagacaaaagagcaattcggtcaggatggacctatatccgtgcattgctccgccggcgtgggtcgtacaggtgtgtttattacgttgagtatcgtgctcgagcgcatgagatatgagggcgtcgtagacatatttcaaaccgttaaaatgcttcggacccagcgtcctgccatggtacagaccgaagatcagtatcagttcagttatcgggcggccctagagtacctggggtccttcgatcactatgcaacctag

SEQ ID NO: 233646 - DNA, 4152 bp, Artificial Sequence
  derived and/or modified sequence
atggtgcacgtggcccggctgctgctgctgctgctgaccttcttcctgaggacagatgctgagaccccaccccgcttcaccaggacccctgtggaccagacaggagtgtctggaggagtggccagcttcatctgccaggccaccggggacccccggcccaagatcgtgtggaacaagaagggcaagaaggtgagcaaccagagatttgaagtcatcgagtttgatgatggcagcggctctgtgctgcgcatccagcccctgcggaccccaagagatgaggccatctatgaatgtgtggccagcaacaacgtgggggagatctctgtgtccacccggctgactgtgctgcgggaggaccagatcccccggggcttccccaccatcgacatgggcccccagctgaaggtggtggagaggaccaggacagccaccatgctgtgtgccgccagcggcaacccagaccctgagatcacctggttcaaggacttcctgcctgtggacaccagcaacaacaacggccgcatcaagcagctgcggtctgtgtctgtgtgtgccacctaccacactggagccctgcagatcgagcagagcgaggagagtgaccagggcaagtatgaatgtgtggccaccaacagcgctggcacccgctacagcgccccagccaacctgtatgtgcgggtgaacaggaaggtgcggcgggtgcccccacgcttcagcatcccccccaccaaccacgagatcatgcctgggggctctgtgaacatcacctgtgtggccgtgggcagccccatgccctacgtgaagtggatgctgggcgctgaggacctgaccccagaagatgacatgcccatcggcagaaatgtgctggagctgaatgatgtgcggcagagcgccaactacacctgtgtggccatgagcaccctgggcgtgattgaggccatcgcccagatcaccgtgaaggccctgcccaagcccccaggcacccctgtggtgacagagagcacagccaccagcatcaccctgacctgggacagcggcaaccctgagcctgtgtcctactacatcatccagcacaagcccaagaacagcgaggagctgtacaaggagattgatggagtggccaccacccgctacagcgtggccggcctgagcccctacagcgactatgagttccgggtggtggccgtgaacaacatcggccggggccccccatctgagcctgtgctgacccagaccagcgagcaggcccccagcagcgcccccagagatgtgcaggccaggatgctgagcagcaccaccatcctggtgcagtggaaggagcctgaggagcccaacggccagatccagggctacagagtgtactacaccatggaccccacccagcacgtgaacaactggatgaagcacaacgtggccgacagccagatcaccaccatcggcaacctggtgccccagaagacctacagcgtgaaggtgctggccttcaccagcattggagatggccccctgagcagtgacatccaggtgatcacccagacaggagtgcccggccagcccctgaacttcaaggccgagcctgagagcgagaccagcatcctgctgtcctggaccccacccaggagtgacaccatcgccaactatgagctggtgtacaaggatggagagcacggggaggagcagaggatcaccatcgagcccggcaccagctaccgcctgcagggcctgaagcccaacagcctgtactacttccggctggccgcccggagcccccagggcctgggcgccagcacagctgagatcagcgcccggaccatgcagagcagcaagggctactacatcatcatcgtgcccctgaagaagagccggggcaagttcatcaagccctgggagagcccagatgagatggagctggatgagctgctgaaggagatcagcaggaagaggaggagcatccgctatggccgggaggtggagctgaagccctacatcgccgcccactttgatgtgctgcccacagagttcaccctgggagatgacaagcactacggcggcttcaccaacaagcagctgcagagcggccaggagtatgtgttctttgtgctggccgtgatggagcacgccgagagcaagatgtatgccaccagcccctacagcgaccctgtggtgtccatggacctggacccccagcccatcacagatgaggaggagggcctcatctgggtggtgggccctgtgctggccgtggtgttcatcatctgcatcgtcatcgccatcctgctgtacaagaggaagagagctgagagtgacagcaggaagagcagcatccccaacaacaaggagatccccagccaccaccccacagatcctgtggagctgcggcggctgaacttccagaccccaggcatggccagccacccccccatccccatcctggagctggccgaccacatcgagcggctgaaggccaatgacaacctgaagttcagccaggagtatgagagcattgatcctggccagcagttcacctgggagcacagcaacctggaggtgaacaagcccaagaacagatatgccaacgtgattgcctatgaccacagccgggtgctgctgagcgccatcgagggcatccctggcagtgactatgtgaatgccaactacattgatggctacaggaagcagaatgcctacatcgccacccagggcagcctgcctgagacctttggagacttctggaggatgatctgggagcagaggtctgccaccgtggtgatgatgaccaagctggaggagaggagccgggtgaagtgtgaccagtactggcccagccggggcacagagacccacggcctggtgcaggtgaccctgctggacacagtggagctggccacctactgtgtgaggacctttgccctgtacaagaatggcagcagcgagaagcgggaggtgcggcagttccagttcaccgcctggccagaccatggagtgcctgagcaccccacccccttcctggccttcctgcggcgggtgaagacctgcaaccccccagatgctggccccatggtggtgcactgcagcgctggggtgggccgcacaggctgcttcatcgtgattgatgccatgctggagcgcatcaagcatgagaagacagtggacatctacggccacgtgaccctgatgagggcccagaggaactacatggtgcagacagaggaccagtacatcttcatccatgatgccctgctggaggccgtgacctgtggcaacacagaggtgcctgccaggaacctgtatgcctacatccagaagctgacccagatcgagaccggggagaatgtgacaggcatggagctggagttcaagaggctggccagcagcaaggcccacaccagccgcttcatcagcgccaacctgccctgcaacaagttcaagaaccggctggtgaacatcatgccctatgagagcaccagggtgtgcctgcagcccatccggggcgtggagggcagtgactacatcaatgccagcttcattgatggctaccggcagcagaaggcctacatcgccacccagggccccctggccgagaccacagaggacttctggaggatgctgtgggagcacaacagcaccatcgtggtgatgctgaccaagctgcgggagatgggccgggagaagtgccaccagtactggccagctgagaggtctgcccgctaccagtactttgtggtggaccccatggccgagtacaacatgccccagtacatcctgcgggagttcaaggtgacagatgccagagatggccagagcaggacagtgcggcagttccagttcacagactggccagagcagggcgtgcccaagtctggagagggcttcatcgacttcatcggccaggtgcacaagaccaaggagcagtttggccaggacggccccatctctgtgcactgcagcgctggggtgggccgcactggagtcttcatcaccctgagcatcgtgctggagaggatgagatatgaaggagtggtggacatcttccagacagtgaagatgctgcggacccagaggcctgccatggtgcagacagaggaccagtaccagttctcctaccgggccgccctggagtacctgggcagctttgaccactacgccacctag

SEQ ID NO: 233647 - DNA, 4152 bp, Artificial Sequence
  derived and/or modified sequence
atggtgcacgtggcccggctgctgctgctgctgctgaccttcttcctgcggacggacgctgagacccccccccgcttcaccaggaccccagttgaccagactggagtgagtggaggcgtggcttcattcatctgccaggctacaggtgacccgaggccgaaaatcgtatggaacaagaagggcaagaaggttagcaaccagaggttcgaagtgattgagttcgatgacggctctgggtccgtgctgcggattcagcccctccgcactcctagggatgaagccatctatgagtgcgttgctagcaacaatgtcggcgaaatctccgtctccaccaggttaaccgtcctgcgagaagatcagattccacgggggttccctaccatcgacatgggtccacaattaaaagtagttgagaggacacggacagcaacgatgttgtgcgctgcatccgggaacccagatcctgaaatcacatggttcaaggacttcttacccgtggacacatctaataacaatggaaggatcaaacagctgaggtccgtgtccgtgtgcgccacctaccacaccggggctctccaaatcgagcagtcagaggaatctgatcagggaaaatatgagtgcgtggcaactaactccgcgggtacgagatattccgccccagccaatctctatgtccgagtgaacaggaaggttagacgcgtgcctccgcgattctcaatcccgcctaccaaccacgaaattatgccaggtggtagcgtgaatattacctgtgtcgctgttggcagtccaatgccttatgtaaagtggatgctgggggctgaagatctgacccccgaggacgatatgccgattggtcggaacgtcttggagctgaacgatgtgcggcagtctgccaactatacatgtgttgctatgagcacactcggagtcatcgaggccattgcacagattaccgtcaaagcactccccaagccacctgggactcctgtagttactgaatctacagctaccagcatcaccctcacctgggacagtgggaatccagaacctgtgtcatattacattatccagcacaaaccgaagaacagtgaagagctgtacaaagagattgacggcgtcgctaccacccggtattctgttgccggcctgtcgccatactccgactacgaattccgtgtcgtggctgtcaacaacattggccgcggtcctcctagtgaacccgtgctgacccagacatctgaacaggcaccctcctctgccccccgcgatgtgcaagcccggatgctttcctccaccactattctcgtccagtggaaggagcccgaagagccaaatgggcaaattcaaggatatcgggtctattacacaatggatcctacccagcacgtaaataattggatgaagcataatgtcgcggattcccagattactaccatcggaaacctggtgccccagaaaacttacagtgtcaaggtgctggcatttacgagtattggtgacggacccctaagcagcgatatccaggtcatcacccagacaggggtacctggtcagccgcttaactttaaagccgagccagaatcagagacctctatactgctctcctggactcccccgcggtctgacacaattgcaaattacgagttggtctataaggacggtgagcacggagaagaacagcgcatcacgattgagcccgggacgtcgtatagactacaaggccttaagccaaactcactctactattttcggctggccgcccgttccccccagggcctcggggccagcacggccgaaatatcggcacgcacaatgcagtcctctaaagggtactacatcatcatcgtccccctgaagaaaagccgcgggaaatttattaagccttgggaaagcccagacgagatggaactagatgaactgttaaaagaaattagtcggaaaaggaggtccatccggtatggtcgggaagttgaactgaagccctacattgctgctcacttcgatgttcttcctacggagttcaccttgggcgatgacaagcactacgggggcttcacaaacaaacagctgcagagcgggcaggagtacgtgttttttgtccttgctgtgatggagcacgcagaatcaaaaatgtacgctacttccccctacagtgatccagttgtatccatggatctcgatccacagccaataactgatgaggaggagggtctgatatgggttgtcggccctgtattagcggtggtgtttataatttgcattgtgatcgccatcctcctgtataaaaggaaaagggcagaaagcgattccagaaagtccagtattccaaacaataaggaaattccaagtcatcatcctacagaccctgttgagttacgcagactgaattttcagactcccgggatggccagtcacccccccatccctatccttgaactggctgatcacattgagagactgaaagcaaatgataaccttaagttctctcaagagtatgaaagtattgaccctggtcaacagtttacatgggagcacagtaatctggaggtgaataagcccaagaatcgatatgctaacgtgattgcatacgaccatagtagagtgcttctaagcgccattgagggaataccaggctctgattatgtgaatgctaattacatcgacggttaccggaagcagaacgcatatatcgcaacacaaggttctctaccggagaccttcggcgacttctggaggatgatttgggaacagcgctccgctactgtggtcatgatgacaaagctggaggaacgcagtcgcgtgaaatgtgatcagtactggccaagccggggtaccgagactcatggtctggttcaagttactctactagacaccgtggaactagcgacttactgcgtgcgcacgttcgcactgtataagaacgggagctctgaaaagcgcgaagttagacaattccagtttaccgcttggcccgaccacggggttcccgaacaccctaccccttttctcgccttcctgcggagggtcaaaacgtgtaacccccccgatgcagggcccatggtggtgcactgttctgccggggtgggacgcaccggctgttttattgttatcgatgcaatgttggagcggatcaaacatgagaagacagtggatatatatggccacgtcacactgatgcgagcccagcggaattatatggtgcagactgaggaccagtacatttttatccatgatgccctcctggaggctgttacatgtggcaacaccgaggtcccagcccgcaatctgtatgcctatattcagaagctcacccagatcgaaacgggggagaacgtcaccgggatggagctagagtttaagaggctcgcctcctccaaggctcataccagccgttttatctcagccaatcttccctgcaataagttcaagaacaggttagtcaatattatgccttatgagagcacaagagtgtgtctgcagccaatcagaggggtggagggcagtgattacattaacgcttcctttatcgacggctatcggcaacaaaaggcctacatagccactcagggcccactggcagagaccacagaggacttctggcgtatgctatgggagcacaattcaacaattgtagttatgttgaccaagctcagagaaatggggcgggaaaagtgccaccaatattggccagccgagcgcagtgctagataccagtatttcgtggttgaccccatggccgagtacaacatgccccaatacatcctcagggagttcaaagttaccgatgcccgagatggtcagagtcgaactgttcgccagttccaattcacggattggccagagcaaggagtcccgaagtccggcgagggatttatagacttcatcgggcaggtgcataagaccaaagagcaattcggtcaagatggaccaattagtgttcattgctcagccggagtcggaaggactggagtctttatcacgttgtccatcgttctggaacgaatgcgctatgaaggcgtcgtcgatattttccagacggttaagatgctgcgcacgcaacgcccagctatggtccagacggaagatcagtatcagtttagctatcgggctgcccttgaatatctgggcagcttcgaccactatgccacctag

SEQ ID NO: 233648 - DNA, 4152 bp, Artificial Sequence
  derived and/or modified sequence
atggtccacgtggctaggctacttctgcttctgctgaccttttttttgcggaccgatgcggaaaccccaccgcgtttcacacgaacccccgttgaccaaacgggagtgagtggcggagtggcatctttcatctgtcaggcaacaggagatcctaggccgaagattgtgtggaacaaaaagggaaaaaaagtctcgaaccagcggtttgaggttatcgagttcgatgatggatccggctcagtgcttcggatccagcccttacgcactccaagagacgaggccatatacgagtgtgtggcgtctaacaatgtaggagaaatttcagtctcaacgagactgaccgttcttagagaggaccagattcctcgcggattcccaacaatagacatgggaccccaactaaaggtggtggaaagaacaagaaccgctaccatgttgtgtgcggcatccggcaacccagatcctgaaataacttggttcaaagacttcctgcctgtggacaccagcaacaataacggaaggatcaaacaacttcgatcggtgagcgtgtgcgccacgtatcacactggggcactgcagatcgaacagtccgaggagtctgatcaagggaaatatgagtgcgtagctaccaacagtgccggtacaaggtacagtgccccagcaaacttgtacgtccgcgtgaacagaaaggtgcggagggttcctccacggttcagcattccacccactaaccacgagattatgcccggtggtagtgtgaacattacatgcgttgccgtgggttctcccatgccgtatgtcaagtggatgcttggggctgaggacttaaccccagaggatgacatgcccatcggtagaaacgtgctggagctgaatgacgtgcggcagtctgcgaactatacttgcgtcgccatgagcaccctcggggtgatcgaggctatagcccagattacagtgaaggccctaccaaagcctcctggtactccagtcgtgacggagtcgaccgctacttcaattacccttacgtgggacagtggtaaccccgagcctgtaagttactatatcatccagcacaagcccaaaaacagtgaggagctgtataaagagattgacggagtagctactacccggtacagcgtagccggactgtccccatattccgattacgagttcagggttgtagccgtaaacaatatcggccgaggacctccttccgagcctgtacttacccagacctcagaacaggccccaagctccgccccacgggacgtccaagctcgcatgctcagcagcactactatactggtacagtggaaggagcctgaagaacccaacgggcaaatccaaggttacagagtgtactacaccatggaccccacccagcacgtgaacaactggatgaaacataatgtcgccgatagtcagatcacaaccattggaaacttagtgccacaaaagacatactcagtgaaagtcctggcattcaccagcatcggcgatggaccgctctcatctgatatccaggtgatcacgcaaaccggcgtgccgggtcaacccctgaatttcaaagctgaacctgaatccgagacatctatcctgctcagttggactcccccacgatccgacactatcgcaaattatgaactcgtatataaggacggcgagcacggcgaagaacagcgaattacaatcgagccaggcacctcatatcgattacagggattaaaacccaactcactgtattacttcagattagctgctaggagcccccaaggactcggggcttccactgctgagataagcgctcgaacaatgcagagctctaaagggtattatattattatcgtccctctgaagaagagtcgcggaaagttcatcaagccttgggaatctcctgatgaaatggaattggatgaactactcaaggagattagccggaaacggagatccatccgatatgggagggaggtcgagctgaaaccctatatcgcagcccactttgatgtactcccaacagagttcaccctgggggatgacaagcattatgggggattcactaataaacaactgcagagtggtcaggaatatgtgttcttcgtgctcgccgtaatggagcacgccgaaagcaagatgtacgccacgtccccatactccgatccagtagtgtccatggatcttgatcctcagccaatcactgatgaagaagagggtttaatctgggttgtcgggccagtgcttgccgtggtcttcatcatctgcattgtcattgctattcttctgtacaagagaaagcgcgcagagtccgattcaagaaaaagttcgatacctaataacaaggagatccccagccatcatcccactgacccagttgagcttcgcaggctcaacttccaaactcccggaatggcctcccaccctccaatcccgatcctggagctcgccgatcatattgaacgcttgaaggctaacgacaatctgaaattctcccaggagtatgaatctatcgacccagggcagcagtttacatgggaacattcgaatcttgaggttaataagcctaaaaaccggtatgctaacgtcattgcgtacgaccattcccgagttcttttgtcagcaatcgaagggatcccaggatccgattatgtcaatgccaactatatcgacggataccgcaagcaaaacgcatatatcgctacccaaggttccttacctgagacatttggggatttttggcgtatgatttgggaacagagaagtgcaaccgtggttatgatgacaaagctggaggagcgatcccgggtgaaatgtgatcaatattggccatctcggggtactgagacgcacggcctcgtgcaggtgactctacttgacaccgtggaacttgcaacctactgtgtgcgcacatttgccctatataaaaatggttcctctgaaaagagagaggttcgacagttccaattcacagcctggcccgaccacggcgtgccggaacatcctacaccatttttagccttcctcaggcgcgtgaagacctgtaatccaccagacgctggaccaatggtggtccactgctccgcaggggtggggcgaacgggatgttttatagtgatcgatgccatgctggagaggatcaaacacgagaagacagtcgacatttacggacacgttacactgatgcgagcccagaggaactatatggtgcagactgaagatcagtacatctttatccacgacgccttgctcgaggccgtaacgtgcggaaacacagaagttcctgcacgaaatttatatgcctatattcagaagctgacacagatcgagactggggagaatgttacaggcatggaattggagttcaagcgcctggcaagcagcaaggcacatacttcaaggtttattagcgctaatctcccttgcaacaaatttaagaataggctggtcaatatcatgccctatgaatctacgagggtgtgcctgcagcccatccggggagtggaagggtccgattacattaacgccagctttatcgatgggtataggcaacagaaagcctacatagccacacaaggccctctcgccgagacaactgaggacttttggcgaatgctttgggaacacaactctaccattgttgtcatgctcacaaaactgcgagagatgggacgcgaaaagtgccatcagtactggccagctgagaggtcagccagataccaatactttgtggttgatcccatggcagagtacaacatgccgcagtacatcttgcgcgaattcaaggtgactgatgcaagggatggccaatctaggaccgttcggcagtttcagtttacagactggccggagcagggggttcccaagtcaggggagggctttattgatttcatagggcaagttcataaaacaaaggagcagtttggtcaggatggtcctatttcagtgcactgcagcgccggagtcggaagaacaggtgtgtttattacactgtctatcgtcttagagaggatgcgctacgaaggcgttgtcgatatattccagactgtgaagatgttgcgtacgcagcgccctgccatggtccagaccgaggatcaatatcagttttcgtatagagccgctctggaatacctgggctcatttgaccattacgctacatag

SEQ ID NO: 233649 - DNA, 7882 bp, Artificial Sequence
  derived and/or modified sequence
gctctgaaagtgttccagctgaaatttcagatcggacagactcgctgcggctccggaggcagtgattccaagctgctcgcgcacgctgctgccaagctgcaggatggtgcacgtagccaggctgctgctgctgctcctcactttcttcctccgcacggatgctgagacacctccaaggtttacacgaacacccgttgatcagacaggggtctctggcggagttgcctctttcatctgccaagctacgggagacccaagacctaaaattgtctggaacaaaaaaggaaagaaagtcagcaatcagagatttgaggtaatagagtttgacgatgggtctggatcagttctcagaatacaacccttacggactccgagggatgaggccatttatgaatgtgtggcctcaaataatgtgggagaaataagtgtatccaccagactcacagttttgcgggaagatcaaattcccaggggcttccctaccattgacatgggcccacagttgaaggtggttgagcgtactcgcacggccaccatgctttgtgcagccagtggtaatccggatccagaaatcacttggtttaaagatttcttacctgtggacacaagcaacaacaatggtcgtattaagcagttacgatcagtttctgtctgtgcaacttaccatacaggagcccttcagattgagcagagtgaagagtctgaccaaggaaaatatgagtgtgttgccaccaacagcgcgggcactcgctattccgctcctgccaatttatatgtcagagtaaatagaaaagttcgccgtgtcccaccaagattctctatcccacccactaatcatgaaatcatgccaggcggaagcgttaatatcacctgtgtggccgtggggtcaccaatgccttatgtaaagtggatgttgggggcagaagatctgacacctgaagatgatatgccaataggaagaaatgtgctagaactgaatgatgtaagacagtcagcaaattacacctgtgttgctatgtcaacactgggtgtcattgaagcaatagcacagatcactgtcaaagccttacccaaacctccaggaactcctgtagtgaccgagagcacagctacaagcatcacactgacgtgggactctgggaaccctgagcctgtttcttattacataattcagcataaacctaaaaactctgaggaactttacaaagaaattgatggggtggcgaccacacgctacagtgtcgctggactaagtccctactcggattatgaattcagggttgttgctgtcaataacattgggcgggggcctcccagcgaacctgtgctaacacaaacctcagagcaagcaccatccagtgccccgagggatgtccaggcacgaatgttgagttcgaccaccattttggtacagtggaaggaacctgaagagccaaatggacagatccaaggatatagagtttattatacaatggatcccactcaacatgtcaacaactggatgaaacacaatgtagctgacagccaaatcactactattggcaacttagtgccccagaaaacatattctgtcaaagtcctggcttttacctcaattggagatggtcccctttcaagtgacatacaagtcatcactcagacaggagtaccagggcagccactaaacttcaaagcagaacctgagtctgaaacaagtattttgctctcttggacacctccacgttcagataccattgccaactatgaactggtctacaaagatggggagcatggagaggagcaacgaattaccattgagccagggacatcatataggctgcaaggactgaaaccaaacagcttatactatttccgtctggctgcacgctcccctcaaggcctgggtgcttctactgcagaaatatcagctagaaccatgcagtcaagtaaaggttactacataataattgtgcctttgaagaaatctcgcgggaaatttatcaagccatgggagagtccagatgaaatggaattagatgagctgcttaaggagatatctaggaagcgcagaagcatccgttatgggagagaagttgaattaaagccatatattgccgctcactttgatgtccttcccactgagttcaccctgggggatgacaagcattatggtggatttacaaacaagcaactccaaagtggtcaagaatatgtcttctttgtgttagcagtaatggaacatgcagagtctaagatgtatgcaaccagcccttactccgaccccgtggtgtcaatggatctggatccgcagccaatcacggatgaagaagaaggcttgatctgggttgtaggtcctgtccttgcagtggtctttatcatctgcattgtcattgctattcttctttataaaaggaagagggcagagtccgactctagaaaaagcagcataccgaacaataaggagatcccttcacaccacccaacagaccctgtagaactgaggcgccttaactttcaaacaccgggtatggctagccatcctccaatacccatcttggaacttgcagaccacattgaaagattgaaagcaaatgacaacttgaagttttcccaggaatatgagtcaattgaccctggccagcagttcacttgggaacattcaaacttggaagtaaacaaaccaaagaatagatacgcgaatgtaatcgcatatgatcattcccgggttctcctatcagctatagaagggatcccaggaagtgactatgtgaatgccaactacatagatgggtataggaagcaaaatgcctatattgcaacacagggatctctccccgaaacatttggggacttttggagaatgatatgggaacaacggagtgccacagttgtcatgatgacaaaactagaagaaagatcaagggtgaagtgtgaccagtattggcctagcagaggcacagaaacccacggactcgttcaagtaacgctgcttgatactgtggagctggccacatattgtgttcgaacatttgcactttacaagaatggttcaagtgagaagagagaagtgagacaattccagttcaccgcctggcctgatcatggtgttccagaacaccctacaccttttctagctttcttacgtagagtcaaaacctgtaaccctcccgatgctggtccgatggttgtgcactgcagtgcgggagttggccggactggttgcttcatcgtcatagatgccatgttagaaagaataaagcatgaaaaaactgtagatatttatggccatgtaactttaatgagagcccagaggaactatatggttcaaacagaagaccaatacatctttatccatgatgcactgttagaagcagtgacttgtggaaataccgaagtgccagctagaaacttgtatgcctacattcagaagctgacacaaatagaaacgggagagaatgtcacaggaatggagctcgaatttaagcgtctagccagctcaaaagctcacacctcaaggtttatcagtgccaatcttccatgtaataaattcaaaaatcgccttgttaatattatgccatatgaatccacaagggtatgcctgcagcctatccgtggagtagaaggatctgattacatcaatgccagttttattgatggatacagacaacagaaagcctacatcgctacccaggggcccttggcagagaccactgaagacttctggcggatgctctgggaacacaattccaccatagttgtgatgctcaccaagctgcgtgaaatgggcagagagaaatgtcaccaatactggccagcagaacggtctgcaagataccagtactttgttgtagatcccatggctgagtacaacatgccacagtatatcctaagggaattcaaggtcacagatgccagggacggccagtcccgaacagtaaggcagttccagttcactgactggccagagcaaggagtgccaaagtccggagaaggatttattgacttcatcggccaagtccataaaacaaaagaacagtttggccaagatggacccatttcagtccattgcagcgcgggcgttggaagaactggagtcttcataacgctaagcattgttttggaaagaatgagatatgaaggagttgtagatatcttccagactgtcaaaatgttaagaacacaacgaccagctatggtacagacagaggatcaatatcagttttcctatcgtgccgcactagagtacctgggcagctttgaccactatgcaacgtagaaacccctgacccattctggatttttactacaggcccttcaatatccatggagtctcttctgagccatacagggcacttgagaagtccttcttaacttctagctaacaactacttagtgggactattacacacaaaacaaattaaaaacaaattattccaggtggaccaagaattcacagtttaataatctaacctgaaaaataatgaagagaatcctgactgatgaggcatctgaaggattttatttacagatacctcaaggattcaaaatcaagggaagaagaaatcacagcaaagaaccaccatcttattcaggattgcttgaaaggtgcaaggagaaattgccagaatgctgcagttcagcacaagatatgtgctggtgtggcttctcacaatgaaacggactctgctttgacatcgccccttcccaccatactgctcataataacattttagggggaaaggggagggaatgtttaaaaagaaagtccttgatttagttttttagtattgtaaagatactgctgacctgtgcttcatttctaactgtgtaaacttttttttaacaaaatgtatcattcgataaagtgaattttaaaaaagttacataactcttcatttttttatttccaaatcgtaggtttttttaagctgtagaactgttatctgtaatatcttgctgtagaaatatcaaatcatttgaaaatttgcacatttttgtgcaaaactcaatctacagtatcagtctcgtcagatatattaattttacacttcagttttgattggtgagaaagtacccattctcttcaaataatcaaagataattattattttgttttgtttttggaatcaacagggaggcgcaaagtataaagttgctgctaacatatatacatatatatccatattttataagggtgtctatgtatatatagacagtgtgtccacacaaaaaatagatacagttatcagtcagtcagttcttccatgatttagtttttttaaacgtagaaaagctattgtaaacatctctttccatttattcttaattttttgacatattggtatttctttaaagggaaatgaggaatgcacatcagtgattgattgtcaaacctcaccccctgatttcctacctaatctacccccacctaaccaatcaatcacatccacaaattgttttgtttgtttgttagtcaggcttccaacaaagttcaatatttctaacactctagtgcaataaaaattattattaaatagctaagaggtgtgcatgtgggaaaggtcagtgcatatccctttaggaggggagaatgttgtaatatatcagctatcgagttgtttaaaaaaagtgtattcaatcgtatattgtctatagtatgtgctatgaaatttgcatttatgatatgtaacaggggcaaagccaaattcatgttactctgttcagtcagaaacattttgtggcatacagcattcctgggaagtgctgtactttgtttcgttttggttttagttttgcatttagagtgccttataattgatgcctattttaatagcatttctttttagcttttggttcgtatttccattcactgttcgtatctgttactttctattaaagcattatctgtttaccacatgtacaaaaactctttgaataatatgcattcctagttttcagccaagtcggggatgttagtgattgtaccagcccaaagcacttggataatcagggcccttcttccttttataatcaatcatcaacatcagaaaaagctacttgttttatttatattcccttccaaatccgctctggaacatgcagtaactgcaccaaacttattttagtaacaaatatcattggcaactttggaatatatttgatattccattaggatttttctaaaaggggaaataaactatatatatatatgtatcttacccccaattcttccaacagaatttctataggaagccatggatgatggcataagtttgccacatattacatgattttaaataatcctcaaaatacccaaggaactcttaaagagttttggtatgagtatactactttggtttaattttagcttcatggatgttctgcatggaaggatttttgttttccacattttcccattgctagcagagtgaaatccaagagaccaaacatttgcaagcattgtatttgagcacttttgtaaaaaacaaagaaaaagaaaaaaaagaaaatatatataatactaaaaaaaagtatctagaaggctacctcagaatgagactctctaacctacatcagaaccagagaagaatgtgcactatgtgggtctgttatcattattttcttttagtttgtatctttttggagatttatccaagtgccagattactcagtgctataattttcttttagttaaacaaagggggtcagacagacattgcatcatccagacatgccttgttggacatgtagaatccgatggagcactgcacaccagaatgattggccaatgagcagcttctctccctgaaacaataactgcccatttggcaaagggaaagatgacaataatcagaagaagaaaatgaatgggatgcataccatagacgaacgaggcggagactattgcgggaatcttactgttcaggagctgttcctagaactaactcccttactgtcattgatgtgcattccactctgtgcttttctgtacaaccattcaagttttaatttcccaggtgaaccatctttatctgccattaccacaagctttcaagtttccagttattttcatcatcataaccagtacggtgctattatttacctatgtacgtgtagttatgtataattttgtaattagttacaatggtaaaaaaaatcaaaatatataaaaagtgatttgtacagaactttattttagctcttttttaaaaatgatttgcatggttagaaaacggcgaggacagccaggggagggaagggcctctagggaactttgcactttctatacctttgtactatgcactgccctattgattctacacccaataatgatattacttgaacccatctgtaagaaactgcttcggaaattcatttgtgtgtatgtaaataacacaacatagaaacaggaagggaaaaaagtctgcagtaatgcacgtattttttttctttcctgtttattttcggttttgctttaagtccttttatttttaattccctttttgtttttctttttgggttttggttccttttgggtttatgggtgccctgatactccagcagagatcagaaggctacagatccattctatccatccgttatgtggctttgccatcccagcttggagtgtctttacaaagataataacagttgtgttctttgctctcgttttggatgcatagactgaaaaattaaaacaaataacttgtaaaatggcttgttaaaaaatacaattacctctaattagtagtacgcgtaaatgttttacagaatgaaaggcgtgctttttattttcttacttcgttacattggtggcgaaagaagtctgtatgaaaatcagttctttgctgacacaagttccatttgttacaaatgaattctaataaaaatgtcagtgttatgc

SEQ ID NO: 233650 - DNA, 4152 bp, Artificial Sequence
  derived and/or modified sequence
atggtgcacgtggccagactgctgctgctgctgctgaccttcttcctgagaaccgacgccgagaccccccccagattcaccagaacccccgtggaccagaccggcgtgagcggcggcgtggccagcttcatctgccaggccaccggcgaccccagacccaagatcgtgtggaacaagaagggcaagaaggtgagcaaccagagattcgaggtgatcgagttcgacgacggcagcggcagcgtgctgagaatccagcccctgagaacccccagagacgaggccatctacgagtgcgtggccagcaacaacgtgggcgagatcagcgtgagcaccagactgaccgtgctgagagaggaccagatccccagaggcttccccaccatcgacatgggcccccagctgaaggtggtggagagaaccagaaccgccaccatgctgtgcgccgccagcggcaaccccgaccccgagatcacctggttcaaggacttcctgcccgtggacaccagcaacaacaacggcagaatcaagcagctgagaagcgtgagcgtgtgcgccacctaccacaccggcgccctgcagatcgagcagagcgaggagagcgaccagggcaagtacgagtgcgtggccaccaacagcgccggcaccagatacagcgcccccgccaacctgtacgtgagagtgaacagaaaggtgagaagagtgccccccagattcagcatcccccccaccaaccacgagatcatgcccggcggcagcgtgaacatcacctgcgtggccgtgggcagccccatgccctacgtgaagtggatgctgggcgccgaggacctgacccccgaggacgacatgcccatcggcagaaacgtgctggagctgaacgacgtgagacagagcgccaactacacctgcgtggccatgagcaccctgggcgtgatcgaggccatcgcccagatcaccgtgaaggccctgcccaagccccccggcacccccgtggtgaccgagagcaccgccaccagcatcaccctgacctgggacagcggcaaccccgagcccgtgagctactacatcatccagcacaagcccaagaacagcgaggagctgtacaaggagatcgacggcgtggccaccaccagatacagcgtggccggcctgagcccctacagcgactacgagttcagagtggtggccgtgaacaacatcggcagaggcccccccagcgagcccgtgctgacccagaccagcgagcaggcccccagcagcgcccccagagacgtgcaggccagaatgctgagcagcaccaccatcctggtgcagtggaaggagcccgaggagcccaacggccagatccagggctacagagtgtactacaccatggaccccacccagcacgtgaacaactggatgaagcacaacgtggccgacagccagatcaccaccatcggcaacctggtgccccagaagacctacagcgtgaaggtgctggccttcaccagcatcggcgacggccccctgagcagcgacatccaggtgatcacccagaccggcgtgcccggccagcccctgaacttcaaggccgagcccgagagcgagaccagcatcctgctgagctggaccccccccagaagcgacaccatcgccaactacgagctggtgtacaaggacggcgagcacggcgaggagcagagaatcaccatcgagcccggcaccagctacagactgcagggcctgaagcccaacagcctgtactacttcagactggccgccagaagcccccagggcctgggcgccagcaccgccgagatcagcgccagaaccatgcagagcagcaagggctactacatcatcatcgtgcccctgaagaagagcagaggcaagttcatcaagccctgggagagccccgacgagatggagctggacgagctgctgaaggagatcagcagaaagagaagaagcatcagatacggcagagaggtggagctgaagccctacatcgccgcccacttcgacgtgctgcccaccgagttcaccctgggcgacgacaagcactacggcggcttcaccaacaagcagctgcagagcggccaggagtacgtgttcttcgtgctggccgtgatggagcacgccgagagcaagatgtacgccaccagcccctacagcgaccccgtggtgagcatggacctggacccccagcccatcaccgacgaggaggagggcctgatctgggtggtgggccccgtgctggccgtggtgttcatcatctgcatcgtgatcgccatcctgctgtacaagagaaagagagccgagagcgacagcagaaagagcagcatccccaacaacaaggagatccccagccaccaccccaccgaccccgtggagctgagaagactgaacttccagacccccggcatggccagccacccccccatccccatcctggagctggccgaccacatcgagagactgaaggccaacgacaacctgaagttcagccaggagtacgagagcatcgaccccggccagcagttcacctgggagcacagcaacctggaggtgaacaagcccaagaacagatacgccaacgtgatcgcctacgaccacagcagagtgctgctgagcgccatcgagggcatccccggcagcgactacgtgaacgccaactacatcgacggctacagaaagcagaacgcctacatcgccacccagggcagcctgcccgagaccttcggcgacttctggagaatgatctgggagcagagaagcgccaccgtggtgatgatgaccaagctggaggagagaagcagagtgaagtgcgaccagtactggcccagcagaggcaccgagacccacggcctggtgcaggtgaccctgctggacaccgtggagctggccacctactgcgtgagaaccttcgccctgtacaagaacggcagcagcgagaagagagaggtgagacagttccagttcaccgcctggcccgaccacggcgtgcccgagcaccccacccccttcctggccttcctgagaagagtgaagacctgcaacccccccgacgccggccccatggtggtgcactgcagcgccggcgtgggcagaaccggctgcttcatcgtgatcgacgccatgctggagagaatcaagcacgagaagaccgtggacatctacggccacgtgaccctgatgagagcccagagaaactacatggtgcagaccgaggaccagtacatcttcatccacgacgccctgctggaggccgtgacctgcggcaacaccgaggtgcccgccagaaacctgtacgcctacatccagaagctgacccagatcgagaccggcgagaacgtgaccggcatggagctggagttcaagagactggccagcagcaaggcccacaccagcagattcatcagcgccaacctgccctgcaacaagttcaagaacagactggtgaacatcatgccctacgagagcaccagagtgtgcctgcagcccatcagaggcgtggagggcagcgactacatcaacgccagcttcatcgacggctacagacagcagaaggcctacatcgccacccagggccccctggccgagaccaccgaggacttctggagaatgctgtgggagcacaacagcaccatcgtggtgatgctgaccaagctgagagagatgggcagagagaagtgccaccagtactggcccgccgagagaagcgccagataccagtacttcgtggtggaccccatggccgagtacaacatgccccagtacatcctgagagagttcaaggtgaccgacgccagagacggccagagcagaaccgtgagacagttccagttcaccgactggcccgagcagggcgtgcccaagagcggcgagggcttcatcgacttcatcggccaggtgcacaagaccaaggagcagttcggccaggacggccccatcagcgtgcactgcagcgccggcgtgggcagaaccggcgtgttcatcaccctgagcatcgtgctggagagaatgagatacgagggcgtggtggacatcttccagaccgtgaagatgctgagaacccagagacccgccatggtgcagaccgaggaccagtaccagttcagctacagagccgccctggagtacctgggcagcttcgaccactacgccacctag

SEQ ID NO: 233651 - protein, 281 aa, Artificial Sequence
  derived and/or modified sequence
MVTILMRAINSLGIHVLDSSRPTDPLSHSSNSSSEPAMFIEDKAVDTLAYLSDGDARAGLNGLQLAVLARLSSRKMFCKKSGQSYSPSRVLITENDVKEGLQRSHILYDRAGEEHYNCISALHKSMRGSDQNASLYWLARMLEGGEDPLYVARRLVRFASEDIGLADPSALTQAVAAYQGCHFIGMPECEVLLAQCVVYFARAPKSIEVYSAYNNVKACLRNHQGPLPPVPLHLRNAPTRLMKDLGYGKGYKYNPMYSEPVDQEYLPEELRGVDFFKQRRC

SEQ ID NO: 233652 - protein, 640 aa, Artificial Sequence
  derived and/or modified sequence
MEVSGPEDDPFLSQLHQVQCPVCQQMMPAAHINSHLDRCLLLHPAGHAEPAAGSHRAGERAKGPSPPGAKRRRLSESSALKQPATPTAAESSEGEGEEGDDGGETESRESYDAPPTPSGARLIPDFPVARSSSPGRKGSGKRPAAAAAAGSASPRSWDEAEAQEEEEAVGDGDGDGDADADGEDDPGHWDADAAEAATAFGASGGGRPHPRALAAEEIRQMLQGKPLADTMRPDTLQDYFGQSKAVGQDTLLRSLLETNEIPSLILWGPPGCGKTTLAHIIASNSKKHSIRFVTLSATNAKTNDVRDVIKQAQNEKSFFKRKTILFIDEIHRFNKSQQVNAALLSRCRVIVLEKLPVEAMVTILMRAINSLGIHVLDSSRPTDPLSHSSNSSSEPAMFIEDKAVDTLAYLSDGDARAGLNGLQLAVLARLSSRKMFCKKSGQSYSPSRVLITENDVKEGLQRSHILYDRAGEEHYNCISALHKSMRGSDQNASLYWLARMLEGGEDPLYVARRLVRFASEDIGLADPSALTQAVAAYQGCHFIGMPECEVLLAQCVVYFARAPKSIEVYSAYNNVKACLRNHQGPLPPVPLHLRNAPTRLMKDLGYGKGYKYNPMYSEPVDQEYLPEELRGVDFFKQRRC

SEQ ID NO: 233653 - DNA, 846 bp, Artificial Sequence
  derived and/or modified sequence
atggtgaccatcctgatgagagccatcaacagcctgggcatccacgtgctggacagcagcagacccaccgaccccctgagccacagcagcaacagcagcagcgagcccgccatgttcatcgaggacaaggccgtggacaccctggcctacctgagcgacggcgacgccagagccggcctgaacggcctgcagctggccgtgctggccagactgagcagcagaaagatgttctgcaagaagagcggccagagctacagccccagcagagtgctgatcaccgagaacgacgtgaaggagggcctgcagagaagccacatcctgtacgacagagccggcgaggagcactacaactgcatcagcgccctgcacaagagcatgagaggcagcgaccagaacgccagcctgtactggctggccagaatgctggagggcggcgaggaccccctgtacgtggccagaagactggtgagattcgccagcgaggacatcggcctggccgaccccagcgccctgacccaggccgtggccgcctaccagggctgccacttcatcggcatgcccgagtgcgaggtgctgctggcccagtgcgtggtgtacttcgccagagcccccaagagcatcgaggtgtacagcgcctacaacaacgtgaaggcctgcctgagaaaccaccagggccccctgccccccgtgcccctgcacctgagaaacgcccccaccagactgatgaaggacctgggctacggcaagggctacaagtacaaccccatgtacagcgagcccgtggaccaggagtacctgcccgaggagctgagaggcgtggacttcttcaagcagagaagatgctag

SEQ ID NO: 233654 - DNA, 1923 bp, Artificial Sequence
  derived and/or modified sequence
atggaggtgagcggccccgaggacgaccccttcctgagccagctgcaccaggtgcagtgccccgtgtgccagcagatgatgcccgccgcccacatcaacagccacctggacagatgcctgctgctgcaccccgccggccacgccgagcccgccgccggcagccacagagccggcgagagagccaagggccccagcccccccggcgccaagagaagaagactgagcgagagcagcgccctgaagcagcccgccacccccaccgccgccgagagcagcgagggcgagggcgaggagggcgacgacggcggcgagaccgagagcagagagagctacgacgccccccccacccccagcggcgccagactgatccccgacttccccgtggccagaagcagcagccccggcagaaagggcagcggcaagagacccgccgccgccgccgccgccggcagcgccagccccagaagctgggacgaggccgaggcccaggaggaggaggaggccgtgggcgacggcgacggcgacggcgacgccgacgccgacggcgaggacgaccccggccactgggacgccgacgccgccgaggccgccaccgccttcggcgccagcggcggcggcagaccccaccccagagccctggccgccgaggagatcagacagatgctgcagggcaagcccctggccgacaccatgagacccgacaccctgcaggactacttcggccagagcaaggccgtgggccaggacaccctgctgagaagcctgctggagaccaacgagatccccagcctgatcctgtggggcccccccggctgcggcaagaccaccctggcccacatcatcgccagcaacagcaagaagcacagcatcagattcgtgaccctgagcgccaccaacgccaagaccaacgacgtgagagacgtgatcaagcaggcccagaacgagaagagcttcttcaagagaaagaccatcctgttcatcgacgagatccacagattcaacaagagccagcaggtgaacgccgccctgctgagcagatgcagagtgatcgtgctggagaagctgcccgtggaggccatggtgaccatcctgatgagagccatcaacagcctgggcatccacgtgctggacagcagcagacccaccgaccccctgagccacagcagcaacagcagcagcgagcccgccatgttcatcgaggacaaggccgtggacaccctggcctacctgagcgacggcgacgccagagccggcctgaacggcctgcagctggccgtgctggccagactgagcagcagaaagatgttctgcaagaagagcggccagagctacagccccagcagagtgctgatcaccgagaacgacgtgaaggagggcctgcagagaagccacatcctgtacgacagagccggcgaggagcactacaactgcatcagcgccctgcacaagagcatgagaggcagcgaccagaacgccagcctgtactggctggccagaatgctggagggcggcgaggaccccctgtacgtggccagaagactggtgagattcgccagcgaggacatcggcctggccgaccccagcgccctgacccaggccgtggccgcctaccagggctgccacttcatcggcatgcccgagtgcgaggtgctgctggcccagtgcgtggtgtacttcgccagagcccccaagagcatcgaggtgtacagcgcctacaacaacgtgaaggcctgcctgagaaaccaccagggccccctgccccccgtgcccctgcacctgagaaacgcccccaccagactgatgaaggacctgggctacggcaagggctacaagtacaaccccatgtacagcgagcccgtggaccaggagtacctgcccgaggagctgagaggcgtggacttcttcaagcagagaagatgctag

SEQ ID NO: 233655 - DNA, 846 bp, Artificial Sequence
  derived and/or modified sequence
atggttaccattctgatgcgcgctatcaattcgctgggcatccacgtgttagattcctcacgtcccaccgaccctctatcccactcttcgaactcatcttcggagcccgcgatgttcattgaggataaagccgtagacacactcgcctacttaagtgatggtgacgcgcgcgcgggccttaatggactccaacttgccgttctggctcgtctttcctcgcggaagatgttttgtaagaaatctggtcagtcttatagtccctcccgcgtcctcataactgaaaatgacgtgaaggaggggttacaacgatcacatatcctgtacgaccgagccggcgaggagcattacaactgtatatctgccctccacaaaagtatgaggggctctgaccagaacgcatcgctctattggctcgctcgcatgctggaagggggagaggaccctctgtatgtggcgaggagactggtccggtttgcctcagaagacattggtctggcagatccttccgcgcttacacaggccgtcgctgcctaccagggttgtcacttcattggcatgccagaatgcgaggtcctgttagcgcagtgcgtagtatactttgccagggccccaaagtccatagaggtgtacagcgcatacaataacgtcaaagcttgcttacgcaaccatcaaggtccactgccccctgtgcctctgcacctgcgaaacgctcctacgcgactgatgaaggacctcggttatggcaagggatataagtacaaccccatgtactctgagcccgtggatcaggagtatttaccagaggagctgaggggggttgacttctttaagcagagacgatgctag

SEQ ID NO: 233656 - DNA, 1923 bp, Artificial Sequence
  derived and/or modified sequence
atggaagtaagtgggcctgaagacgaccctttcttgtctcagcttcaccaggtgcaatgccctgtgtgccagcagatgatgccggcagcacatatcaattctcatctggaccgttgtctgttgttgcatccagccggacatgccgagccagcggcaggatcccacagagctggtgagcgcgccaagggcccctctcctcccggtgcaaaaagacggcgtctgagtgagagctcagcactgaagcagcccgccacccccacagctgcggagtcaagcgagggcgaaggggaagaaggtgatgacggtggggaaaccgagtcacgcgagagctatgatgcacctccaactccatctggcgcccggcttattcccgacttccccgtcgccaggtcttcatcccctggccggaaagggtccggtaaacgcccagcagccgcagctgccgccggtagtgcctctccacgttcgtgggacgaggccgaagcacaggaagaagaagaggccgtcggtgatggagatggcgacggtgacgctgacgcggacggagaggacgaccctggacactgggacgccgacgccgctgaggcagccactgcttttggagccagtggcggcggtcggccacatccccgtgctctcgctgccgaagagatccggcaaatgttgcaaggcaaaccattagcagacaccatgcggccggatacattgcaggattacttcggccagagtaaggctgtcgggcaagataccctgctgcggtccctgcttgagacaaacgaaatcccatctctgattctatggggtccacctggctgtgggaaaacgaccctcgctcacattattgcgtctaactccaaaaagcattctatcaggttcgtcaccttgagcgccaccaacgccaagaccaacgacgtgcgggacgttattaagcaggcccagaatgagaaaagcttcttcaaaaggaagaccatcttattcatcgatgagattcaccgctttaacaagtctcagcaggtgaacgctgccctactgtctaggtgccgggtgatcgtgttggaaaagcttccagtcgaagcaatggttactattctgatgcgagccataaatagcctgggaatccacgtgttagatagcagtagacccactgaccccctgagccattctagcaactcgagcagcgagcctgccatgttcatcgaggataaggctgtagataccttggcctatctctctgacggagacgcccgggctggacttaacggcttgcagcttgccgttcttgcacgtctatcgtcaagaaaaatgttctgcaagaaatcaggacagtcctacagtccctccagagtcctgattactgaaaacgacgtcaaggaggggctgcagcgctcccacattttgtatgacagagcaggcgaggagcactataactgcatttccgcactgcacaagagcatgcgaggcagtgatcagaatgccagcctctactggctcgcccgaatgctggaggggggggaggaccctctatatgtggcccggcggctggttcggttcgcatcagaggacatcggtctcgccgatccaagtgccctgacccaagccgttgccgcttatcagggatgccatttcatcggaatgccagaatgcgaggtactgctggctcagtgcgtagtctactttgctagggccccgaaatccatcgaagtgtacagcgcgtataataacgtgaaggcatgcctcaggaatcaccaaggacctctccccccagttcccctgcacttacgaaacgctccaacccggctcatgaaggacctaggctacgggaaaggctacaagtacaatcccatgtacagtgagcctgtggaccaagagtatctgccagaagaactgagaggcgtcgacttttttaagcagcgcaggtgttag

SEQ ID NO: 233657 - DNA, 846 bp, Artificial Sequence
  derived and/or modified sequence
atggtgaccatcctgatgagggccatcaacagcctgggcatccacgtgctggacagcagccggcccacagaccccctgagccacagcagcaacagcagcagcgagcccgccatgtttattgaggacaaggctgtggacaccctggcctacctgagtgatggagatgcccgggccggcctgaatggcctgcagctggccgtgctggcccggctgagcagcaggaagatgttctgcaagaagagcggccagagctacagccccagccgggtgctgatcacagaaaatgatgtgaaggagggcctgcagaggagccacatcctgtatgacagagctggggaggagcactacaactgcatcagcgccctgcacaagtccatgaggggcagtgaccagaatgccagcctgtactggctggccaggatgctggagggcggggaggaccccctgtatgtggcccggcggctggtgcgctttgcctctgaagatattggcctggccgaccccagcgccctgacccaggccgtggccgcctaccagggctgccacttcatcggcatgccagaatgtgaggtgctgctggcccagtgtgtggtgtactttgcccgggcccccaagagcattgaggtgtacagcgcctacaacaacgtgaaggcctgcctgaggaaccaccagggccccctgccccctgtgcccctgcacctgagaaatgcccccacccggctgatgaaggacctgggctacggcaagggctacaagtacaaccccatgtacagcgagcctgtggaccaggagtacctgcctgaggagctgcggggcgtggacttcttcaagcagaggcgctgctag

SEQ ID NO: 233658 - DNA, 1923 bp, Artificial Sequence
  derived and/or modified sequence
atggaggtgtctggcccagaagatgaccccttcctgagccagctgcaccaggtgcagtgccctgtgtgccagcagatgatgcctgctgcccacatcaacagccacctggaccgctgcctgctgctgcaccctgctggccacgccgagcctgctgctggcagccacagagctggggagcgggccaagggccccagccccccaggggccaagagaagaaggctgtctgagagcagcgccctgaagcagcctgccacccccacagctgctgagagcagcgagggggagggggaggagggagatgatggaggagaaacagagagccgggagagctatgatgccccacccacccccagcggggcccggctcatcccagacttccctgtggcccggagcagcagccctggcaggaaaggaagtggcaagaggcctgctgctgctgctgctgctggcagcgccagccccaggtcctgggatgaggccgaggcccaggaggaggaggaggccgtgggagatggagatggagatggagatgctgatgctgatggagaagatgaccccggccactgggatgctgatgctgctgaggccgccacagccttcggggccagcggcggcggccggccccacccccgggccctggccgctgaggagatccggcagatgctgcagggcaagcccctggccgacaccatgaggccagacaccctgcaggactacttcggccagagcaaggctgtgggccaggacaccctgctgcggagcctgctggagaccaatgagatccccagcctcatcctgtggggccccccaggctgtgggaagaccaccctggcccacatcatcgccagcaacagcaagaagcacagcatccgctttgtgaccctgagcgccaccaatgccaagaccaatgatgtgagagatgtgatcaagcaggcccagaatgagaagagcttcttcaagaggaagaccatcctcttcattgatgagatccaccgcttcaacaagagccagcaggtgaatgctgccctgctgagccgctgcagggtcatcgtgctggagaagctgcctgtggaggccatggtgaccatcctgatgagggccatcaacagcctgggcatccacgtgctggacagcagccggcccacagaccccctgagccacagcagcaacagcagcagcgagcccgccatgtttattgaggacaaggctgtggacaccctggcctacctgagtgatggagatgcccgggccggcctgaatggcctgcagctggccgtgctggcccggctgagcagcaggaagatgttctgcaagaagagcggccagagctacagccccagccgggtgctgatcacagaaaatgatgtgaaggagggcctgcagaggagccacatcctgtatgaccgggccggggaggagcactacaactgcatcagcgccctgcacaagtccatgaggggcagtgaccagaatgccagcctgtactggctggccaggatgctggagggcggggaggaccccctgtatgtggcccggcggctggtgcgctttgccagcgaggacatcggcctggccgaccccagcgccctgacccaggccgtggccgcctaccagggctgccacttcatcggcatgccagaatgtgaggtgctgctggcccagtgtgtggtgtactttgcccgggcccccaagagcattgaggtgtacagcgcctacaacaacgtgaaggcctgcctgaggaaccaccagggccccctgccccctgtgcccctgcacctgagaaatgcccccacccggctgatgaaggacctgggctacggcaagggctacaagtacaaccccatgtacagcgagcctgtggaccaggagtacctgcctgaggagctgcggggcgtggacttcttcaagcagaggcgctgctag

SEQ ID NO: 233659 - DNA, 846 bp, Artificial Sequence
  derived and/or modified sequence
atggtgaccatcctgatgcgggccatcaacagcctgggcatccacgtgctggatagcagcaggcccacagatcccttgtctcactccagcaattccagctcggaacccgccatgttcatagaggacaaagctgtggatacactggcctacctgagtgatggagacgctcgagcggggctgaacggcctacaactggcagtgctggcccgcctctccagccgtaagatgttttgtaagaaatccggacagagctactcacccagtagagtattgattactgagaatgacgtgaaggagggcttgcagagatcccatattctgtacgacagggcgggagaggagcactacaactgtatctcagctctccataaatctatgcgcggatccgaccagaacgcatccctgtattggctcgctagaatgctggagggaggtgaagatccactttacgttgctaggcgactggtgcgattcgcaagcgaggacatcggactcgcagatccatctgccctgacccaggcagtagccgcctatcagggatgccacttcatcggtatgcctgagtgcgaagtgttactagcccagtgcgtcgtgtatttcgcacgggccccaaaatctatcgaagtgtacagcgcttacaataacgtgaaggcttgtctgcggaatcatcaaggtcccctgccacccgttccacttcatctcaggaatgcgccaactagactgatgaaagacctcggctacggcaaaggttacaaatataacccgatgtactctgaacctgtggatcaggagtatttgccggaggagctcagaggtgtggacttttttaaacagaggcgatgctag

SEQ ID NO: 233660 - DNA, 1923 bp, Artificial Sequence
  derived and/or modified sequence
atggaggtgagcggccccgaggacgaccccttcctgagccagctgcatcaggtgcagtgccctgtctgtcagcaaatgatgcctgccgcacacatcaactcccatttggaccgctgcttgcttctccacccagcaggacacgccgagcccgcagccggttcccaccgcgccggagagagggccaaggggccaagccctccaggtgcaaagaggaggcgcttgtcagagtcatctgcactgaaacagcctgctacacctacagccgcagagtccagtgagggggaaggagaggagggggacgacggcggggagactgaatcacgcgagtcctacgacgcaccccccactccttccggcgcacgattgatacccgactttccggtggcccggagtagctcgcccggtcgcaaggggtctggtaaacggcctgccgcagctgccgccgctgggtcggcaagcccgcgtagttgggacgaggctgaggcccaggaagaggaggaggctgtgggcgatggtgacggcgacggggatgctgatgccgacggcgaggacgatcccggccattgggacgccgacgcggcagaggccgccactgcttttggtgcttcgggcggcggcagaccccatcctcgagcattggcggcagaggagatcaggcaaatgctgcagggtaagcccctagccgatacaatgagaccggacaccttgcaggattatttcggacagtcaaaagctgtgggacaggatactctgctccggtcactccttgaaactaatgagattccatctctgattttgtgggggccgcccggctgtggaaaaaccaccttggcccatatcattgcaagcaactccaaaaaacattcaattaggttcgtgactctctctgccaccaacgctaaaacaaacgacgtgcgcgacgtgataaagcaggcacagaatgaaaagtcattcttcaagcggaaaaccatcctcttcatagacgaaattcataggtttaataaaagccagcaggtcaatgcagctctcctcagccgatgtcgggtcattgtcttagagaaactcccggtggaggctatggtgacgatcctcatgagggctattaattccctgggtatccatgtgctcgattccagtagacctacagacccactgagccactccagcaacagtagtagcgagcccgcaatgttcatcgaggataaggccgtcgacacgttggcatatctgtccgacggcgacgcaagggcaggtctgaacggcctccagctcgccgttctcgccagactatccagtaggaagatgttctgcaaaaagtcaggacagtcctatagcccgtcacgcgtgctgatcaccgagaatgacgtcaaggaaggacttcagcggagccacatcctgtatgaccgcgctggggaggagcattataactgtatcagtgccctgcacaaatccatgcggggttcggatcagaacgcatctctgtactggctggctcgcatgctcgagggcggtgaagaccctctgtacgttgcccgtcgtctggtgcggtttgcatctgaagatatcgggctggcggatccctctgcgttaacccaagccgtggcggcttatcagggctgtcattttataggaatgcccgagtgcgaggtgctgctggcacagtgcgttgtctactttgcccgggctccgaaatccatcgaagtgtactcggcgtacaataatgtgaaagcctgcctgcgcaaccaccagggcccactgccaccggtgccactgcacctaagaaacgcacccacgaggcttatgaaggatttaggctatggaaaggggtacaaatacaatcctatgtactcagaacctgtcgaccaggagtacctgccagaagagctgaggggggtagatttcttcaagcagaggcgatgttag

SEQ ID NO: 233661 - DNA, 846 bp, Artificial Sequence
  derived and/or modified sequence
atggtcacaattctgatgagagcgataaactctctaggaattcacgtcctagattccagccggcctacagacccgctgagccatagttctaatagtagttctgaaccggcaatgttcatcgaagacaaagcagtggacactctcgcgtacttatctgatggtgacgccagggccggtctgaatggcctgcagctggctgtgctggctcggctgagcagcaggaagatgttctgtaagaagtctgggcagtcctacagtccatctagggtgttgattacagagaacgacgtcaaagagggactacagagatcacacatactctatgacagggccggtgaggagcattacaattgcatctcagccctgcacaaatccatgcgtgggagtgatcaaaacgccagcctttactggctggctcggatgctggagggtggcgaagaccccttgtacgtcgccaggagactggtcagatttgcctccgaagacataggattagccgacccatccgccctgactcaggcggtggcagcatatcagggctgtcatttcatcggcatgcctgagtgcgaggtcctcttggcacagtgcgtcgtctatttcgctcgcgctccaaaatccatcgaggtgtactcagcttacaataacgtcaaagcctgtctacgtaaccatcagggcccacttccccctgtgccactccacctcaggaacgcacccacaaggttgatgaaagatttgggttatggtaaagggtacaagtataatccaatgtacagtgagcctgtggatcaggagtacctgcccgaagaactgcggggagtggatttttttaagcagcggaggtgttag

SEQ ID NO: 233662 - DNA, 1923 bp, Artificial Sequence
  derived and/or modified sequence
atggaggtctccggaccagaggacgacccttttctgtctcagctccaccaagtgcagtgtccagtatgccaacagatgatgcccgctgcgcacatcaacagtcacctggaccgctgcttactgctgcaccctgccggacacgcagaacccgcagcgggatctcatagggctggggaaagggccaagggcccttcgcccccaggggcaaagcggcgtaggctgtctgagtctagtgccctgaagcagccagccactcctacagctgccgagtcctctgaaggagaaggagaagaaggtgacgacggaggtgaaaccgaatcccgggagagttacgacgcaccccctacacccagcggagcaaggcttatccctgactttccagtggctcgatcctcgtcccccggaaggaaaggaagcggcaaacgcccagcagccgcagccgcagctggctctgctagcccacgatcctgggacgaagcagaggcgcaggaagaggaagaggctgtgggcgacggcgatggagatggtgacgcagatgccgacggggaggatgatcccggacactgggacgcggacgctgctgaagccgcaaccgcctttggggcaagcgggggagggagaccccatcctagagcgctggctgccgaggaaatccgccagatgctgcaaggtaagcctttggctgacaccatgcgcccagacacattgcaggactacttcggacagtccaaggcagtaggccaagatacactgctgagaagccttctcgaaactaacgaaataccatctctgatcctgtggggcccaccaggatgcgggaaaacaacactcgcgcatattatcgcctctaactccaagaagcactccattcgtttcgtcacattaagcgctacaaatgccaaaacaaacgacgtccgcgatgtgatcaaacaggcacagaatgaaaagagcttttttaaacgtaaaactatactttttatagacgaaattcaccgctttaataagagtcagcaggtaaatgctgcattgctaagccgttgccgcgtgatcgtcctagagaaacttccagtggaagcgatggtgaccattctgatgagggctattaactcactaggcattcacgtccttgacagtagtcgaccgactgaccctctcagccactcatccaattcctcatcagaaccagcgatgttcatcgaggacaaggccgttgacacgctggcatacctttcggacggggacgctcgtgccggactcaacgggctccaactcgctgtcctggcacgtctctcctctaggaagatgttttgcaaaaagtccgggcagagctattcaccttccagagtgcttataacagaaaacgatgtgaaggaggggctccaacgctcgcacatcctttatgatcgagcaggggaggaacattacaactgtatttcggcactgcataaatcaatgagaggtagcgatcagaacgcaagtctgtactggttagccaggatgctggaaggcggagaagaccccctgtacgtcgctcgcagactggtcagattcgcgagtgaagatatcggtctcgctgatccttctgctctgacacaagctgtggccgcataccagggatgtcacttcattggtatgcccgagtgtgaggttctgctggcccagtgtgttgtctacttcgctagggcacccaagtccatcgaagtatactcggcttacaataacgtcaaggcctgtctcagaaatcaccagggtccactgccccctgtccctttacatctgagaaacgcccctacacggttaatgaaagatttgggctacggaaagggctacaagtataaccccatgtactccgagccagtggaccaggagtaccttcccgaggagctccgcggtgttgatttcttcaaacagcgacggtgttag

SEQ ID NO: 233663 - DNA, 2595 bp, Artificial Sequence
  derived and/or modified sequence
gaggcgctgccagcggccggccgagggcgggcggacgcgggagctgcggacgtgaggcatgagcggcgccctcctccggcccgcgagcgtcctgctggttccccgagcgagggtctcgcggcgcggggcctagcggagggcatcgaaggcctccgcgtgcgcacgggttgctgcggccgcgccgggcgccggggagggcggcggccgccatggaggtgagcgggccggaagacgaccccttcctttcgcagctgcaccaggtgcagtgccccgtgtgccagcagatgatgcccgccgcgcacatcaactcgcacctggaccgctgtctgctgctccacccggcggggcacgcggagcccgcggccgggtcgcaccgcgccggggagcgggccaaggggccctcgccgcccggcgccaagaggcggcggctgtcggagagctcggcgctgaagcagccagccaccccgacggcagccgagagcagcgagggcgagggtgaggagggcgacgacggcggcgagaccgagagccgcgagagctacgacgcgccgcccacacccagcggcgcccgccttatccccgacttcccggtggcccgctccagcagccccgggaggaaggggtcggggaagaggccggcggccgccgccgcggcggggagcgcgtctccgcgcagctgggacgaggcggaggcgcaggaggaggaggaggccgtgggcgacggcgatggcgacggggacgcggacgcggacggcgaggacgacccggggcactgggacgcggacgctgccgaagccgccaccgccttcggggccagtggcgggggccgcccgcacccccgggcgctggctgccgaggagatccgacagatgctacagggcaagccgctggccgacacgatgcgtcctgacacgctgcaggattacttcgggcagagcaaggccgtgggccaggataccctgctgcgctcgctcctggagaccaacgaaatcccctcgcttatcctgtgggggccgccgggctgcggcaagaccactctggctcacatcatagccagcaacagcaagaaacatagcataaggtttgtgacattatctgcaacaaatgccaagacaaatgatgtgcgagatgtcataaaacaagctcaaaatgaaaagagctttttcaaaaggaaaaccatcctttttattgatgagattcatcggttcaataaatctcagcaggtcaacgctgctcttctgagccgctgtcgagtgattgttcttgagaagcttccagtagaggcaatggtgactattttaatgcgagcgatcaactccctgggaatccacgtcctagactctagccgtcccactgaccctctgagccacagcagcaacagcagctcagagcccgccatgttcatagaggataaagcagtagacaccctggcttacctcagtgacggtgacgcccgagctgggttgaacggactgcagctggcggtgctggctaggttaagctctaggaagatgttctgtaagaagagtgggcaatcctattctcccagtagagttctgatcacagagaatgacgtgaaggagggcctacagcgatcccacattttatatgaccgggcaggtgaggagcattacaactgcatctccgccctgcacaagtccatgcggggctcagaccagaacgcctccctctactggctggctcgcatgctcgagggaggagaggacccactctacgtggcacggaggcttgtcaggtttgccagcgaggacataggtctggcagacccgtctgcgttaacacaagcggttgctgcctaccaaggctgtcattttataggcatgcctgaatgtgaggtgcttctggcccagtgtgtggtctactttgccagagccccaaagtccattgaggtgtacagcgcctacaacaacgtcaaagcctgcctgaggaaccaccaggggccactgccccccgtgcccctgcacctgaggaacgcgcccactaggctgatgaaggatttgggctatggcaaaggctacaagtacaaccccatgtacagcgagcctgtggatcaggagtacctgcctgaagagttgaggggggtagatttcttcaagcagaggaggtgctgactcctcagggcacgacagcagaaggatgttgcttttttaagggagggccagaaagaaagttagtggattgcaaagttggttgcctggtggaagttagaacagaccaacattttgtgccagaaatttaagagttccataggtggaggcgcagttctttcgaataaatgtgtaactttgaaattgtgttcatttgcactcggtgcagcggttatgcttatgaaaatacctggcagctttgtgcaatgaattaatgttataaggaattatctattttgtcatagtatttaagtcataatgtcatttcagaattcagttctgtaggattttcttttctttaaaaaatgtatattctgggtagttttaattggtaaaaaaatgtaattgtgatttaatactgcatagtgttttgggtattttttttatatgcaaaggtcttacgagccaataaaactatttcaaagta

SEQ ID NO: 233664 - protein, 642 aa, Artificial Sequence
  derived and/or modified sequence
MSNRSSFSRLTWFRKQRKAVVSTSDKKMPNGILEEQEQQRVMLLSRSPSGPKKYFPIPVEHLEEEIRIRSADDCKQFREEFNSLPSGHIQGTFELANKEENREKNRYPNILPNDHSRVILSQLDGIPCSDYINASYIDGYKEKNKFIAAQGPKQETVNDFWRMVWEQKSATIVMLTNLKERKEEKCHQYWPDQGCWTYGNIRVCVEDCVVLVDYTIRKFCIQPQLPDGCKAPRLVSQLHFTSWPDFGVPFTPIGMLKFLKKVKTLNPVHAGPIVVHCSAGVGRTGTFIVIDAMMAMMHAEQKVDVFEFVSRIRNQRPQMVQTDMQYTFIYQALLEYYLYGDTELDVSSLEKHLQTMHGTTTHFDKIGLEEEFRKLTNVRIMKENMRTGNLPANMKKARVIQIIPYDFNRVILSMKRGQEYTDYINASFIDGYRQKDYFIATQGPLAHTVEDFWRMIWEWKSHTIVMLTEVQEREQDKCYQYWPTEGSVTHGEITIEIKNDTLSEAISIRDFLVTLNQPQARQEEQVRVVRQFHFHGWPEIGIPAEGKGMIDLIAAVQKQQQQTGNHPITVHCSAGAGRTGTFIALSNILERVKAEGLLDVFQAVKSLRLQRPHMVQTLEQYEFCYKVVQDFIDIFSDYANFK

SEQ ID NO: 233665 - DNA, 1929 bp, Artificial Sequence
  derived and/or modified sequence
atgtccaatagatcgagcttctccaggttaacttggtttcgaaaacagaggaaagccgtggtatctacatccgacaaaaagatgcctaacggaattctggaggagcaagagcagcagcgcgtcatgctattgtctcgaagccctagtggccctaaaaagtacttccccattcccgtcgaacatctggaggaggagataaggattagatcggccgatgactgtaagcaatttagggaggagttcaactctctcccgtccggtcacattcaagggacattcgaattggccaacaaggaggaaaatagggaaaagaatagataccccaatattctgccaaatgaccactctagagtcatactgagccagctggatgggatcccctgtagcgattacattaatgccagctacattgatggctacaaagaaaagaataagttcatcgccgcccagggacccaagcaggagacagtgaatgacttctggcggatggtctgggagcaaaagtctgccacaatcgtgatgctgaccaacctgaaggagcgcaaagaggagaaatgtcatcagtactggcctgaccagggatgctggacatacgggaatatacgggtttgtgttgaggattgtgttgtactggttgactatacgatccgaaagttttgcatccagccccaacttcccgacgggtgcaaggctccacgtctggtcagtcagctgcactttacctcgtggccagacttcggagtgccattcactcctatcgggatgttgaaattcctgaaaaaagtgaagaccctaaatcctgtacacgctgggccaatagttgtgcactgtagcgcaggcgtcggccggactggtaccttcatcgtgattgacgccatgatggcaatgatgcatgctgagcagaaggttgatgtgttcgagttcgtcagtcggatcaggaatcaacggccccagatggtccagaccgacatgcagtatacctttatctatcaggccctcctggagtactatctgtacggtgacacagaactcgacgtctcctccctggaaaagcacttgcaaaccatgcacggcactacaacccactttgacaagatcgggctggaggaggaattcagaaagctcacgaatgtcaggataatgaaggaaaatatgagaaccggtaacctgccagctaatatgaagaaggcccgggtcatccaaatcatcccttatgacttcaatcgcgtcattttgtccatgaaaagaggacaagagtacaccgattacataaatgcctcgttcattgacgggtatagacagaaggactacttcatagctacacagggcccactcgcacatactgtggaggatttttggaggatgatttgggagtggaagagccacactatcgtgatgctgaccgaagtgcaggagcgcgagcaggataagtgctatcagtactggcctaccgaggggtcagtcactcacggcgagatcactatagagatcaaaaacgatacacttagtgaggccatttccatcagggattttctcgtgactcttaaccagccccaggcccgtcaggaagagcaggtccgggtggtgaggcagtttcattttcatgggtggccagaaatcggcatccccgctgaaggaaagggtatgatagatctgattgccgctgtgcagaagcagcaacagcaaaccggcaatcatccaatcaccgtccattgtagtgctggcgcgggaagaactggcacttttatcgctctgagtaatattttggagagggtgaaagctgagggcctgctggacgtcttccaggctgtgaagtccttgcgcctccaaagaccccacatggtgcagaccctggagcagtacgaattctgttataaggtggtccaggacttcatcgatattttttctgattatgctaatttcaaatag

SEQ ID NO: 233666 - DNA, 1929 bp, Artificial Sequence
  derived and/or modified sequence
atgagcaacagaagcagcttcagccggctgacctggttcaggaagcagaggaaggctgtggtgtccaccagtgacaagaagatgcccaacggcatcctggaggagcaggagcagcagagggtgatgctgctgagccgcagccccagcggccccaagaagtacttccccatccctgtggagcacctggaggaggagatccgcatccgctctgcagatgactgcaagcagttccgggaggagttcaacagcctgcccagcggccacatccagggcacctttgagctggccaacaaggaggagaaccgggagaagaaccgctaccccaacatcctgcccaatgaccacagcagggtcatcctgagccagctggatggcatcccctgcagcgactacatcaatgccagctacattgatggctacaaggagaagaacaagttcatcgccgcccagggccccaagcaggagaccgtgaatgacttctggaggatggtgtgggagcagaagagcgccaccatcgtgatgctgaccaacctgaaggagaggaaggaggagaagtgccaccagtactggccagaccagggctgctggacctacggcaacatccgggtgtgtgtggaggactgtgtggtgctggtggactacaccatcaggaagttctgcatccagccccagctgcctgatggctgcaaggccccccggctggtgtcccagctgcacttcacctcctggccagactttggagtgcccttcacccccatcggcatgctgaagttcctgaagaaggtgaagaccctgaaccctgtgcacgccggccccatcgtggtgcactgcagcgctggggtgggccgcacaggcaccttcatcgtgattgatgccatgatggccatgatgcatgctgagcagaaggtggatgtgtttgaatttgtgagccgcatccggaaccagaggccccagatggtgcagacagacatgcagtacaccttcatctaccaggccctgctggagtactacctgtatggagacacagagctggatgtgagcagcctggagaagcacctgcagaccatgcacggcaccaccacccactttgacaagattggcctggaggaggagttcaggaagctgaccaacgtgcgcatcatgaaggagaacatgaggactggaaacctgcctgccaacatgaagaaggcccgggtcatccagatcatcccctatgacttcaacagagtcatcctgtccatgaagaggggccaggagtacacagactacatcaatgccagcttcattgatggctaccggcagaaggactacttcatcgccacccagggccccctggcccacacagtggaggacttctggaggatgatctgggagtggaagagccacaccatcgtgatgctgacagaggtgcaggagcgggagcaggacaagtgctaccagtactggcccacagagggctctgtgacccacggggagatcaccatcgagatcaagaatgacaccctgtctgaggccatcagcatccgggacttcctggtgaccctgaaccagccccaggcccggcaggaggagcaggtgcgggtggtgcggcagttccacttccacggctggccagagatcggcatcccagctgagggcaagggcatgattgacctgattgctgctgtgcagaagcagcagcagcagacaggcaaccaccccatcaccgtgcactgcagcgctggggccggccgcacaggcaccttcatcgccctgagcaacatcctggagcgggtgaaggccgagggcctgctggatgtgttccaggccgtgaagagcctgcggctgcagaggccccacatggtgcagaccctggagcagtatgagttctgctacaaggtggtgcaggacttcatcgacatcttcagtgactatgccaacttcaagtag

SEQ ID NO: 233667 - DNA, 1929 bp, Artificial Sequence
  derived and/or modified sequence
atgagcaaccggagcagcttcagccggctgacctggttccggaagcagcgcaaagcagttgtaagcactagtgacaaaaagatgcctaacggaatcctggaggagcaggagcagcagagagtgatgctgctcagcaggtctccgtctgggcctaaaaaatatttcccaattcccgtcgagcacctggaggaggagattcggataaggagtgcggacgattgcaaacagttcagagaagagttcaatagtctcccgtctggtcacatccaaggcacattcgagctggcgaacaaggaggaaaatcgggagaaaaatcgatatcctaatatccttcctaatgaccacagtagggttatcttgtctcaattggatggcattccatgtagcgactatatcaatgcaagctatatcgatggctataaggagaagaacaagtttatcgcggctcaagggcctaagcaagaaacagtgaacgacttttggcggatggtgtgggagcaaaagagcgcgaccattgtcatgttgacaaatctcaaggagagaaaggaggagaagtgccatcagtattggccagaccagggatgttggacctatgggaacatccgggtatgcgtagaggactgtgtagtcttagtggactacactattcgtaagttctgtatccagccacagctgcctgatggttgtaaggcgccacggctggtttcacagctccattttaccagctggcccgacttcggggtgcccttcacccctatcggcatgctgaagttccttaaaaaggtcaagaccctcaatccagtacatgccggacctattgtggtgcactgtagtgccggtgtgggaagaacaggcacattcatcgtgatagacgctatgatggctatgatgcacgccgaacagaaagtggacgtctttgagttcgtatcccggattaggaatcaacgtcctcagatggtacagacagatatgcagtacacatttatctaccaggcactgctcgagtactatttgtatggcgacaccgagttagacgtctccagcctggagaagcacctgcaaaccatgcacggcaccactactcattttgataagataggtctggaagaagagttccgaaagcttactaatgttcggatcatgaaagaaaacatgcgcacaggtaacctacccgctaatatgaagaaggcaagagtaattcagataatcccctacgactttaatcgtgtgattcttagcatgaagcgcggccaggaatacacagactatattaatgcgtccttcatcgatgggtatcgtcagaaggactatttcatcgccactcaaggacccctggcccacactgtggaggatttttggagaatgatctgggagtggaagagccacacgatcgttatgctcacagaagtccaagaacgggaacaagacaaatgttatcagtattggcccactgagggtagtgtaacacacggagagattacgattgagattaaaaatgacaccctttccgaggctatatctatcagggatttcctcgtgactctgaatcaaccccaggctcgacaggaagagcaagtcagagtcgtgcggcagtttcacttccacggttggcccgagataggaattcccgccgagggtaagggaatgatcgatttaatcgctgccgtgcaaaaacagcagcaacagaccggcaaccaccctatcactgttcactgttccgcaggcgccgggcgcactgggacattcatcgccctcagtaacatcctggaacgcgtgaaggcggaaggattgttggacgtttttcaggctgtgaaaagcttgcggctgcagaggccccatatggtccaaaccctggaacagtacgaattttgctataaagtggtacaggatttcattgacatcttctccgattatgccaactttaaatag

SEQ ID NO: 233668 - DNA, 1929 bp, Artificial Sequence
  derived and/or modified sequence
atgtcaaacagaagctccttctccagactgacgtggttccgaaaacagcgcaaggccgttgtgtccacttcagacaagaaaatgccaaatggcatcctcgaggaacaggaacaacaaagggttatgctgttgtctaggagcccgagcggtcccaagaagtacttccccatcccagtggagcatctggaagaagaaattcgcatacgcagtgccgacgactgcaagcagtttcgtgaagagttcaacagcctcccttccggacatattcagggaacattcgagctagctaataaagaggaaaatcgggaaaaaaacagatatccaaatatcctcccaaacgaccactcccgcgttatcctcagccaattggacggcatcccatgtagtgattatatcaatgcgtcttatatcgatgggtataaagaaaaaaacaaatttattgctgcccaagggcctaagcaggaaactgtgaacgacttttggaggatggtctgggaacaaaagagcgcaacaatcgtaatgctcaccaacctcaaggaaagaaaggaggaaaagtgccaccagtactggccagatcagggttgctggacatacggcaatattagggtgtgcgtcgaagattgtgtcgtgcttgtggactatacaatccgtaagttctgcatccaaccacagctgcctgatggatgcaaggctcctcggcttgtctctcaactacactttacttcatggcccgatttcggggtgccattcacaccaataggcatgttgaaatttctgaagaaggtcaagactctcaacccagtccatgccggacccatcgttgtccattgctctgctggggtcggtcgcacaggcaccttcatcgtgatcgacgctatgatggcgatgatgcatgccgaacagaaggtggacgtcttcgagtttgtgtcccgaattaggaatcagcgacctcagatggtgcagaccgacatgcagtatacattcatataccaggctctgttagagtattacctgtacggtgacacagagctggacgtctcttcattggaaaagcacctccagaccatgcacgggacaactactcacttcgataaaattgggttagaagaggaattcaggaagctgaccaatgtgaggataatgaaagaaaacatgcgcaccgggaacctccctgccaacatgaaaaaagcgcgtgtgattcaaatcataccatacgatttcaaccgggtgatcctgtcaatgaagcgcggacaggagtatactgactacataaatgcctcgtttatcgatggataccgccagaaagactatttcatagcgacgcaaggccctttagcccataccgttgaagatttttggaggatgatatgggaatggaaatcccacactatcgtcatgcttacagaagtgcaggagcgagagcaggacaagtgctaccaatactggcctaccgagggatcggtgacacacggcgagatcaccatcgagatcaaaaacgatactttatccgaggctatctcaattagggacttcttagtgactctgaaccagccccaagcccgacaggaagagcaggtacgcgttgtcaggcagttccacttccatgggtggcctgagatagggatccctgcagaggggaagggaatgatcgaccttattgccgctgtacaaaagcagcagcaacagaccggcaaccaccccatcacagtgcactgttcggccggtgctggtcgtactggtaccttcattgccctctccaacatactcgagagggtcaaagcagaaggcctgctcgacgtgttccaggcagtcaagagtctacgtttacaacgtccgcacatggtgcagacccttgagcagtatgagttttgttacaaagttgtgcaggacttcattgacattttctcagattacgcaaacttcaaatag

SEQ ID NO: 233669 - DNA, 4957 bp, Artificial Sequence
  derived and/or modified sequence
gtgcagcagagggcagctgagaggctgggtggctgggcctgggagacacacagaggccaggccttagcgcggctcagccatgagcaacaggagtagcttttcccggctcacctggttcaggaagcagaggaaagctgtggtcagcaccagcgacaagaagatgcccaacggaatcttggaggagcaagagcagcaaagggtgatgctgctcagcaggtcaccctcagggcccaagaagtattttcccatccccgtggagcacctggaggaggagatccgtatcagatccgccgacgactgcaagcagtttcgggaggagttcaactcattgccatctggacacatacaaggaacttttgaactggcaaataaagaagaaaacagagaaaaaaacagatatcccaacatccttcccaatgaccattctagggtgattctgagccaactggatggaattccctgttcagactacatcaatgcttcctacatagatggttacaaagagaagaataaattcatagcagctcaaggtcccaaacaggaaacggttaacgacttctggagaatggtctgggagcaaaagtctgcgaccatcgtcatgttaacaaacttgaaagaaaggaaagaggaaaagtgccatcagtactggcccgaccaaggctgctggacctatggaaacatccgggtgtgcgtggaggactgcgtggttttggtcgactacaccatccggaagttctgcatacagccacagctccccgacggctgcaaagcccccaggctggtctcacagctgcacttcaccagctggcccgacttcggagtgccttttacccccattgggatgctgaagttcctcaagaaagtaaagacgctcaaccccgtgcacgctgggcccatcgtggtccactgtagcgcgggcgtgggccggacgggcaccttcattgtgatcgatgccatgatggccatgatgcacgcggagcagaaggtggatgtgtttgaatttgtgtctcgaatccgtaatcagcgccctcagatggttcaaacggatatgcagtacacgttcatctaccaagccttactcgagtactacctctacggggacacagagctggacgtgtcctccctggagaagcacctgcagaccatgcacggcaccaccacccacttcgacaagatcgggctggaggaggagttcaggaaattgacaaatgtccggatcatgaaggagaacatgaggacgggcaacttgccggcaaacatgaagaaggccagggtcatccagatcatcccgtatgacttcaaccgagtgatcctttccatgaaaaggggtcaagaatacacagactacatcaacgcatccttcatagacggctaccgacagaaggactatttcatcgccacccaggggccactggcacacacggttgaggacttctggaggatgatctgggaatggaaatcccacactatcgtgatgctgacggaggtgcaggagagagagcaggataaatgctaccagtattggccaaccgagggctcagttactcatggagaaataacgattgagataaagaatgataccctttcagaagccatcagtatacgagactttctggtcactctcaatcagccccaggcccgccaggaggagcaggtccgagtagtgcgccagtttcacttccacggctggcctgagatcgggattcccgccgagggcaaaggcatgattgacctcatcgcagccgtgcagaagcagcagcagcagacaggcaaccaccccatcaccgtgcactgcagtgccggagctgggcgaacaggtacattcatagccctcagcaacattttggagcgagtaaaagccgagggacttttagatgtatttcaagctgtgaagagtttacgacttcagagaccacatatggtgcaaaccctggaacagtatgaattctgctacaaagtggtacaagattttattgatatattttctgattatgctaatttcaaatgaagattcctgccttaaaatattttttaatttaatggtcagtatattttgtaaaaatcatgttaatttatttcatagttgacattaatatcttccctaatttctttgtatatattttgttatgccttaaaggccacctgctatacagttgttaaatcttaaatatgctttttaaaaattggaataatgtattaaggtcaaataatatcccataaaatatatatttctgctaatattagtaaatatcttaatttttcattagattcatatcatttaatttcacatattcaacacctttaaatgttgtaatcttaatatgcgaagtgtgcctctgcaagatactaacacaaagctcatgttaagaaaacagttgaggactcagaagtcagttcgaaaatgcactttcctaacagtgaattcacaaccctgaacagcagcatttttggaaggcaaactgttcgtgatggtacaatgtaaatggggacttctgtaaagttctcagtttcggtccatgtggtttatctttacattttaaagatcaaagaagtctttacaacctgaatccaggtctaaaacacactagagtagctggtgactataaataatattttaaaatgctgtgtctacaccatcaagactgtgtctacactatcttggctgaacgagaagagatgtaaatgctgggtggtcccgttgacccacggcgttgggtacaacaaaaccagccatcggagttacaccccaaagcaccatttgctgtccagctgcctgtcgtttggcccagaccaccctcagaaaaaaaccagctgcctctcccattctcccctcccgttctgccacagcggcctgggctggtccagtgctatgcctggaggctcaacacaaaacttcccatccaaacattcagatgaactgagcgtcttacacacgcagtacagaggagcacacattaggatagaaacagtagaataaccacgggcaattaaactttaaattttctgagcagcattttggtatttaaacatttcttgtaaaaagctgagacagtttgtaagaaaagaatccttaaaatctagatttataccattttttaaagtcccacctttcaatgtttaataaaacaaaaagagaaatccttaatctaaaagctaaattatttttgaatggaaatactactgagaccattgacactggataacagtaatgatcccattaccagataagattgactgacggggaaaaaaaaaaaaaaagaatggggtgtgaatgtaccaacactgaatcttacagcagttatctttctatggccattaggtacctagcagatgtgcacaatataaacaaaaagatatctggcctaccttactactaaaagcatttaacacgtgcatttttggtacttttttttttgttttctaaaagctacataaaggccttatttgacattttcactgataactgatcgcaccctcatgttgcagtgttcgtcccctattcattaacagtgtgtgcaaatgcaaccccaggacacattattgttctgatagatgctcacagggaatcaagcttctcgcccactccacggctctgagccccatccaagggcaagacttggtgcccagctggaaggacgaaagcacactttgtgaccgccatcctcaccagctgcatgcctgggctgcacactgctgaacgtgctcctctctccttctctgtacaatgattcagcatctcggcggaagaggaaaatggagctttttgaggctcgccaggtcccttttgttttcaccattaaaattccaaacccaaagcctttgtttgactgaaggagaagagagggaagtaagcttctgttcagcacctgaaccctagaaaaagagccagtttgctacgatgaaggtgacatttctctggtcatttatttgagagttcgaagtcaaagtcgaggggcaccggctttggttcatgtctaggagccctctgtcagaatccttgaagccctttaatggtctaactggcatctcttgtatcaagaagtacctttaaggtagaccttttcagggtgccctcaggaaagggccctgctcatgtttttttcctgtccccttagaccaaccccaggtgtccactgcaggggttctgcctgttcccaaactttttccattccaggaacaaaggagaagccactttccccaggacgcaagactctcccctccactgtccgggacagcgttcgccctttagcggggaggtcattacagcctcatggcctctaccaaggccccagatcacaggatctcctgggccttggagcacctcacgctgggggaatcaatccctgagggactcagaatcttctccgtgcaacctggaaagttcatctcttgtttccttcagtcaaagaaagtccattgtacataacaaaacagcccccaaacagcccagtgccgacaccattgttcctttcacactttcctttgttgcatgcagttgggttcaaatgccaaatagtgattagaagacgaccattctgatctgtgtgtgatctggtcactatgtgactgcctttacggtttctctccatgtgctatatgaatgaagaatgcataccagtgttttaaaaggtatttttatgtgtttttaaacacttttttaaatgagcctgacacctgtgtttcagcatttggagacatccccatgttattcttttaagtgtataattactgatacttttttgtttgtttgtttaactaagttgtgtttaacttatgtgcagtctttataatgtatgtatgttattacagtttcaactatcatattttctttgattacatttataatttgatcttgctctgattataatgccagtgaatgttgctgaactctttgtatatgcaaattgcaagatttaaaccattctgatgcaaggataaacctttactttgactacca

SEQ ID NO: 233670 - DNA, 1929 bp, Artificial Sequence
  derived and/or modified sequence
atgagcaacagaagcagcttcagcagactgacctggttcagaaagcagagaaaggccgtggtgagcaccagcgacaagaagatgcccaacggcatcctggaggagcaggagcagcagagagtgatgctgctgagcagaagccccagcggccccaagaagtacttccccatccccgtggagcacctggaggaggagatcagaatcagaagcgccgacgactgcaagcagttcagagaggagttcaacagcctgcccagcggccacatccagggcaccttcgagctggccaacaaggaggagaacagagagaagaacagataccccaacatcctgcccaacgaccacagcagagtgatcctgagccagctggacggcatcccctgcagcgactacatcaacgccagctacatcgacggctacaaggagaagaacaagttcatcgccgcccagggccccaagcaggagaccgtgaacgacttctggagaatggtgtgggagcagaagagcgccaccatcgtgatgctgaccaacctgaaggagagaaaggaggagaagtgccaccagtactggcccgaccagggctgctggacctacggcaacatcagagtgtgcgtggaggactgcgtggtgctggtggactacaccatcagaaagttctgcatccagccccagctgcccgacggctgcaaggcccccagactggtgagccagctgcacttcaccagctggcccgacttcggcgtgcccttcacccccatcggcatgctgaagttcctgaagaaggtgaagaccctgaaccccgtgcacgccggccccatcgtggtgcactgcagcgccggcgtgggcagaaccggcaccttcatcgtgatcgacgccatgatggccatgatgcacgccgagcagaaggtggacgtgttcgagttcgtgagcagaatcagaaaccagagaccccagatggtgcagaccgacatgcagtacaccttcatctaccaggccctgctggagtactacctgtacggcgacaccgagctggacgtgagcagcctggagaagcacctgcagaccatgcacggcaccaccacccacttcgacaagatcggcctggaggaggagttcagaaagctgaccaacgtgagaatcatgaaggagaacatgagaaccggcaacctgcccgccaacatgaagaaggccagagtgatccagatcatcccctacgacttcaacagagtgatcctgagcatgaagagaggccaggagtacaccgactacatcaacgccagcttcatcgacggctacagacagaaggactacttcatcgccacccagggccccctggcccacaccgtggaggacttctggagaatgatctgggagtggaagagccacaccatcgtgatgctgaccgaggtgcaggagagagagcaggacaagtgctaccagtactggcccaccgagggcagcgtgacccacggcgagatcaccatcgagatcaagaacgacaccctgagcgaggccatcagcatcagagacttcctggtgaccctgaaccagccccaggccagacaggaggagcaggtgagagtggtgagacagttccacttccacggctggcccgagatcggcatccccgccgagggcaagggcatgatcgacctgatcgccgccgtgcagaagcagcagcagcagaccggcaaccaccccatcaccgtgcactgcagcgccggcgccggcagaaccggcaccttcatcgccctgagcaacatcctggagagagtgaaggccgagggcctgctggacgtgttccaggccgtgaagagcctgagactgcagagaccccacatggtgcagaccctggagcagtacgagttctgctacaaggtggtgcaggacttcatcgacatcttcagcgactacgccaacttcaagtag

SEQ ID NO: 233671 - protein, 754 aa, Artificial Sequence
  derived and/or modified sequence
MHTGGETSACKPSSVRLAPSFSFHAAGLQMAGQMPHSHQYSDRRQPNISDQQVSALSYSDQIQQPLTNQRRMPQTFRDPATAPLRKLSVDLIKTYKHINEVYYAKKKRRHQQGQGDDSSHKKERKVYNDGYDDDNYDYIVKNGEKWMDRYEIDSLIGKGSFGQVVKAYDRVEQEWVAIKIIKNKKAFLNQAQIEVRLLELMNKHDTEMKYYIVHLKRHFMFRNHLCLVFEMLSYNLYDLLRNTNFRGVSLNLTRKFAQQMCTALLFLATPELSIIHCDLKPENILLCNPKRSAIKIVDFGSSCQLGQRIYQYIQSRFYRSPEVLLGMPYDLAIDMWSLGCILVEMHTGEPLFSGANEVDQMNKIVEVLGIPPAHILDQAPKARKFFEKLPDGTWNLKKTKDGKREYKPPGTRKLHNILGVETGGPGGRRAGESGHTVADYLKFKDLILRMLDYDPKTRIQPYYALQHSFFKKTADEGTNTSNSVSTSPAMEQSQSSGTTSSTSSSSGGSSGTSNSGRARSDPTHQHRHSGGHFTAAVQAMDCETHSPQVRQQFPAPLGWSGTEAPTQVTVETHPVQETTFHVAPQQNALHHHHGNSSHHHHHHHHHHHHHGQQALGNRTRPRVYNSPTNSSSTQDSMEVGHSHHSMTSLSSSTTSSSTSSSSTGNQGNQAYQNRPVAANTLDFGQNGAMDVNLTVYSNPRQETGIAGHPTYQFSANTGPAHYMTEGHLTMRQGADREESPMTGVCVQQSPVASS

SEQ ID NO: 233672 - DNA, 2265 bp, Artificial Sequence
  derived and/or modified sequence
atgcacactggtggggagaccagtgcttgcaaaccctccagcgtgcggctggcccctagcttttcattccacgccgccgggcttcaaatggcaggtcagatgcctcattcacatcagtactccgatcgtaggcagccaaacattagcgatcaacaggtgtcggctctgagttatagtgatcagatacaacagccactcaccaaccagcggagaatgccccaaacattccgggaccccgctaccgccccattgagaaagctgtcagtcgacctaattaagacttacaaacatattaatgaggtctattacgcaaaaaagaagagaagacaccaacagggccagggcgatgacagctcccacaagaaagagaggaaggtatataacgacgggtacgatgacgataattacgactatattgttaagaatggcgaaaagtggatggatagatacgaaatcgacagcttaatcggcaagggttctttcggccaagtggtgaaggcctatgatcgggtcgagcaagagtgggtggccattaaaataataaagaataaaaaggcattcctgaatcaagcccagattgaggttcgccttctcgaactgatgaacaaacatgatacagaaatgaaatattacattgtccatttgaagaggcacttcatgttccgaaatcacttatgcctggtttttgaaatgctgagctacaacctatatgatctgctgaggaacactaatttccggggtgtgtcccttaatctcacccgcaagttcgcccagcagatgtgtacagccttactcttccttgccactccggagctcagcatcatccactgcgatcttaaaccagaaaatatattgctgtgcaacccaaaacggtctgcaatcaagatcgttgatttcggatcttcttgtcagctcgggcagagaatctatcagtatattcaatctagattttatcgcagccccgaggtactgctgggcatgccttatgatctggccatcgacatgtggtccctgggctgtatcctcgtggaaatgcataccggagaaccactcttcagtggtgccaacgaggtagaccagatgaataagattgtggaggttttaggaatcccccctgcccacattctggaccaggctccgaaagctaggaaattttttgaaaagctgcctgacggaacatggaatctcaagaagacaaaggatggaaagcgggaatataagccccctggcactcggaaacttcacaacattctgggcgtggagaccggagggccaggcggacggcgtgcaggtgagtctggacacactgtcgccgactatttaaaatttaaggaccttattctgagaatgctagactacgaccctaagacacgcatccagccttactacgctcttcaacactcattcttcaaaaagaccgctgacgagggaactaatacctcaaactccgtgtccacctctcctgcaatggaacagtcgcaatcctctgggactacatctagcacctcctcctccagtggagggtctagtggcaccagtaactccggccgggctagatctgatccaacccaccagcatcgccactctggtggacacttcacagcagccgtgcaggcaatggactgcgagacccactctcctcaggtcagacagcaatttccagcacctttgggatggagcggtactgaggcccctactcaggttacagttgaaactcacccagtgcaggaaactaccttccacgtggccccccaacaaaacgctctgcatcatcaccatggtaatagcagtcaccaccatcatcaccaccaccatcaccatcaccatcacggccagcaggctctgggcaatagaacccgccctcgcgtgtacaattcaccgaccaattcttcatctactcaggattcaatggaggtgggccacagccatcactccatgacgtcattgagttcttccactacgtcctcctcaactagcagttcatccactggaaatcagggaaaccaggcttaccaaaatagaccagtggccgctaacactttagatttcgggcagaatggagccatggatgttaatctgaccgtgtattccaatcctcgacaggagactgggattgccggccaccctacatatcagtttagtgccaacacaggtccagcccactatatgacagaaggccacttgaccatgcgacaaggcgccgaccgagaagaatcccctatgaccggcgtctgcgtgcaacagtcgccggttgcatcctcgtag

SEQ ID NO: 233673 - DNA, 1608 bp, Artificial Sequence
  derived and/or modified sequence
atgttcagaaatcatctttgtcttgtctttgagatgctctcttacaacctatacgacctgctgcggaatacaaatttcaggggggttagtctcaacctcactcgtaaattcgcacagcagatgtgtaccgccttattgttccttgcgacaccagagctttccatcattcactgtgacttaaaacctgagaacattctgctgtgtaacccgaaaaggtccgctattaagattgtggattttgggtcctcatgccagctgggccaaaggatctatcaatatattcagtctcgcttctatcgtagccctgaagtactgctggggatgccctacgacctggctattgatatgtggagtctgggctgcatccttgttgagatgcataccggcgaacctctgttttccggggccaacgaggtagaccagatgaataagatcgtggaagtgcttgggataccacctgcacacattctggaccaggccccaaaggccaggaagttctttgaaaagcttcccgatgggacctggaatctgaaaaagactaaggatggcaaaagggaatacaaacctcccggcaccaggaagttacataatatccttggagttgagaccggcggcccaggaggcagacgagcaggcgagtcaggtcacacagtcgccgattatcttaaatttaaggatctgattctcagaatgctggattacgacccaaagactcgtatacagccgtattatgcgctgcagcactcatttttcaaaaagactgcggatgaaggcacaaacacatccaatagtgttagcacctcccccgcgatggaacagagtcagtcatccgggacaacaagttctacctcaagctcgagtggagggtcgagtgggactagcaatagcggacgggcacgatccgacccgacccaccagcatagacatagcggaggtcactttactgctgccgtccaagctatggactgtgagacacactcaccacaggtgcgccagcagtttcccgcgccattaggttggtccgggaccgaagcaccgacacaggttaccgtcgaaactcatcccgttcaggagacgacctttcacgtcgccccacagcaaaatgccctccatcatcaccacgggaactcctcccatcatcatcaccaccatcatcaccatcaccatcaccacgggcagcaggcattggggaatcggacccgaccccgggtctacaacagccccacgaacagcagttcaacgcaagattccatggaggttggtcattcccatcatagcatgactagtctatcttcctcaactactagctccagcacatcctcctcatcgaccggcaatcaggggaatcaagcttaccagaacaggcccgtggcagccaatacactcgattttggtcagaacggggcaatggacgtgaacttgacagtgtactctaacccccggcaggagaccgggatagctgggcatcccacatatcagttctcagccaacactggacccgctcactatatgacagagggccatctgacaatgcgccagggcgcagaccgcgaagagtccccaatgacaggagtgtgcgtccagcagtccccagtagcctcatcctag

SEQ ID NO: 233674 - DNA, 2265 bp, Artificial Sequence
  derived and/or modified sequence
atgcacactggaggagagaccagcgcctgcaagcccagctctgtgcggctggcccccagcttctccttccacgccgccggcctgcagatggccggccagatgccccacagccaccagtacagcgaccggcggcagcccaacatcagtgaccagcaggtgtctgccctgagctacagcgaccagatccagcagcccctgaccaaccagaggaggatgccccagaccttccgggaccctgccacagcccccctgaggaagctgtctgtggacctgatcaagacctacaagcacatcaatgaggtgtactatgccaagaagaagaggaggcaccagcagggccagggagatgacagcagccacaagaaggagaggaaggtgtacaatgatggctatgatgatgacaactatgactacatcgtgaagaatggagagaagtggatggacagatatgaaattgacagcctcatcggcaagggcagctttggccaggtggtgaaggcctatgacagagtggagcaggagtgggtggccatcaagatcatcaagaacaagaaggccttcctgaaccaggcccagatcgaggtgcggctgctggagctgatgaacaagcatgacacagagatgaagtactacatcgtgcacctgaagaggcacttcatgttcaggaaccacctgtgcctggtgtttgagatgctgagctacaacctgtatgacctgctgaggaacaccaacttccggggcgtgtccctgaacctgaccaggaagtttgcccagcagatgtgcacagccctgctcttcctggccaccccagagctgagcatcatccactgtgacctgaagccagagaacatcctgctgtgcaaccccaagaggtctgccatcaagatcgtggactttggcagcagctgccagctgggccagaggatctaccagtacatccagagccgcttctaccgcagccctgaggtgctgctgggcatgccctatgacctggccatcgacatgtggagcctgggctgcatcctggtggagatgcacactggagagcccctcttcagcggggccaatgaggtggaccagatgaacaagatcgtggaggtgctgggcatccccccagcccacatcctggaccaggcccccaaggccaggaagttctttgagaagctgcctgatggcacctggaacctgaagaagaccaaggatggcaagcgggagtacaagcccccaggcaccaggaagctgcacaacatcctgggcgtggagaccggcggccctgggggccggcgggccggggagagcggccacacagtggccgactacctgaagttcaaggacctgatcctgaggatgctggactatgaccccaagacccgcatccagccctactatgccctgcagcacagcttcttcaagaagacagcagatgagggcaccaacaccagcaacagcgtgtccaccagccctgccatggagcagagccagagcagcggcaccaccagcagcaccagcagcagcagcggcggcagcagcggcaccagcaacagcggccgggcccggagtgaccccacccaccagcaccgccacagcggcggccacttcaccgctgctgtgcaggccatggactgtgagacccacagcccccaggtgcggcagcagtttcctgcccccctgggctggagcggcacagaggcccccacccaggtgacagtggagacccaccctgtgcaggagaccaccttccacgtggccccccagcagaatgccctgcaccaccaccacggcaacagcagccaccaccaccaccaccaccaccaccaccaccaccaccacggccagcaggccctgggcaacagaacccggccccgggtgtacaacagccccaccaacagcagcagcacccaggacagcatggaggtgggccacagccaccacagcatgaccagcctgagcagcagcaccaccagcagcagcaccagcagcagcagcactggaaaccagggcaaccaggcctaccagaacagacctgtggccgccaacaccctggactttggccagaatggagccatggatgtgaacctgactgtgtacagcaacccccggcaggagactggaattgctggccaccccacctaccagttcagcgccaacacaggccctgcccactacatgacagagggccacctgaccatgaggcagggcgctgaccgggaggagagccccatgactggagtgtgtgtgcagcagagccctgtggccagcagctag

SEQ ID NO: 233675 - DNA, 1608 bp, Artificial Sequence
  derived and/or modified sequence
atgttcaggaaccacctgtgcctggtgtttgagatgctgagctacaacctgtatgacctgctgaggaacaccaacttccggggcgtgtccctgaacctgaccaggaagtttgcccagcagatgtgcacagccctgctcttcctggccaccccagagctgagcatcatccactgtgacctgaagccagagaacatcctgctgtgcaaccccaagaggtctgccatcaagatcgtggactttggcagcagctgccagctgggccagaggatctaccagtacatccagagccgcttctaccgcagccctgaggtgctgctgggcatgccctatgacctggccatcgacatgtggagcctgggctgcatcctggtggagatgcacactggagagcccctcttcagcggggccaatgaggtggaccagatgaacaagatcgtggaggtgctgggcatccccccagcccacatcctggaccaggcccccaaggccaggaagttctttgagaagctgcctgatggcacctggaacctgaagaagaccaaggatggcaagcgggagtacaagcccccaggcaccaggaagctgcacaacatcctgggcgtggagactggaggccctgggggcagaagagctggggagagcggccacacagtggccgactacctgaagttcaaggacctgatcctgaggatgctggactatgaccccaagacccgcatccagccctactatgccctgcagcacagcttcttcaagaagacagcagatgagggcaccaacaccagcaacagcgtgtccaccagccctgccatggagcagagccagagcagcggcaccaccagcagcaccagcagcagcagcggcggcagcagcggcaccagcaacagcggccgggcccggagtgaccccacccaccagcaccgccacagcggcggccacttcaccgctgctgtgcaggccatggactgtgagacccacagcccccaggtgcggcagcagtttcctgcccccctgggctggagcggcacagaggcccccacccaggtgacagtggagacccaccctgtgcaggagaccaccttccacgtggccccccagcagaatgccctgcaccaccaccacggcaacagcagccaccaccaccaccaccaccaccaccaccaccaccaccacggccagcaggccctgggcaacagaacccggccccgggtgtacaacagccccaccaacagcagcagcacccaggacagcatggaggtgggccacagccaccacagcatgaccagcctgagcagcagcaccaccagcagcagcaccagcagcagcagcacaggcaaccagggcaaccaggcctaccagaacagacctgtggccgccaacaccctggactttggccagaatggagccatggatgtgaacctgactgtgtacagcaacccccggcaggagaccggcattgctggccaccccacctaccagttcagcgccaacacaggccctgcccactacatgacagagggccacctgaccatgaggcagggcgctgaccgggaggagagccccatgactggagtgtgtgtgcagcagagccctgtggccagcagctag

SEQ ID NO: 233676 - DNA, 2265 bp, Artificial Sequence
  derived and/or modified sequence
atgcacaccggcggcgagaccagcgcctgcaagcccagcagcgtgcgactcgccccttctttcagctttcatgcagctgggcttcaaatggccggacaaatgccacacagccaccagtattctgataggagacagcctaacatctccgaccagcaggtatccgctttgtcctactcagaccagattcaacagcctttaactaaccaacgtagaatgccacagacttttcgcgaccctgcgaccgccccgctgaggaagctgagtgtggatctgatcaaaacatacaagcatatcaatgaggtttattacgcaaaaaaaaagaggcggcatcagcaaggtcagggggacgatagctcccacaagaaggaacgcaaggtatataacgacggttatgacgacgacaactatgattatattgttaagaatggggaaaagtggatggatcggtatgagatagacagcctgatcgggaaagggtcttttggccaggtggttaaagcttatgatagggtggagcaggagtgggtggccattaaaataatcaaaaacaagaaagctttcttaaatcaggcacaaatcgaagtcaggttactggagctcatgaataagcatgacacggagatgaagtactacatagttcacctgaagcgccactttatgttcaggaaccacctgtgcttggtgtttgagatgttaagctacaatctctatgacttactgaggaacaccaatttccggggggtcagtctgaacctaaccaggaaatttgcacagcaaatgtgcacagcattgctgtttctagcaacccctgaattatctattatccactgtgacttgaaaccagaaaatatcctgttgtgcaacccaaagcgctcggctattaagattgttgacttcggcagttcttgccagctcggtcagcgaatttaccagtacattcagtccagattttaccgcagtcccgaagttttgctcggcatgccttacgacttggctattgacatgtggtcgttggggtgcatccttgtggagatgcacaccggagagcccctgttctcaggcgccaacgaggtcgaccagatgaataagattgtggaggtgcttgggatcccgcccgcgcacatcctggaccaagcaccaaaggcacgcaagtttttcgagaaactgccggatggcacgtggaatttgaaaaagacaaaagacggcaagcgggagtataaaccacctggaacccgcaaactacacaacatcctcggcgtagaaacaggtgggcctggcggccgtcgtgctggtgaatcaggacataccgtggccgattatttgaagttcaaagacctgatcctgagaatgctcgattacgacccaaaaactaggatccagccctattacgcattgcagcactctttctttaaaaaaaccgccgatgaagggacgaatactagtaattcagttagcacaagcccagctatggagcagtcacaatcgtcaggcacgacttcctccacgtcatcttcctccggcggtagctctgggacatcaaatagtgggcgcgccagatccgaccctacgcaccagcaccgacacagcggcggacacttcacagccgcagtgcaggccatggactgcgagacccacagcccacaagtacgtcaacagtttccagctcctcttgggtggagtggaaccgaggcacctacccaggtcaccgtggaaacccatccagtccaggaaactacttttcatgtagctccccaacagaatgccttacatcaccaccatggcaacagcagccaccatcatcaccaccatcaccaccaccaccatcatcacgggcagcaggcacttggaaatagaacaagaccaagggtgtacaattccccaaccaactctagctcgacccaggactccatggaggttggccatagccaccacagcatgacatctttgtctagttctaccacctcaagctctactagtagctcaagcaccggcaatcaaggaaatcaagcttaccagaatcgacctgtcgccgcgaatacattagattttggccaaaacggggccatggacgtgaacctaactgtatactccaatccaagacaagagacaggcatagctggtcatccaacctatcagttctcagctaacactggacctgcccattacatgacagaaggacacctcactatgaggcagggtgctgatagagaagagtcaccgatgaccggagtttgtgtgcaacagtccccagtcgcttctagctag

SEQ ID NO: 233677 - DNA, 1608 bp, Artificial Sequence
  derived and/or modified sequence
atgttccggaaccacctgtgcctggtgttcgagatgctgagctacaacctgtacgatttgctccgcaatacgaacttccgcggagtcagcttgaatctgacccgaaagtttgcccagcagatgtgcaccgccctgttgttcctggctacacccgagctgagtattattcactgcgacttaaaacccgagaacatcctcctgtgtaaccccaagcgatcagcaatcaagatcgtagactttggctcctcttgtcagctgggtcaacgcatataccagtacatccaaagcaggttttacaggtcccctgaagtgttgttaggaatgccatacgacctagcaatcgacatgtggagcctgggctgcatacttgtggaaatgcatactggcgaacctctgttctccggggcaaatgaagtggatcagatgaataagattgtggaagtgctgggaatacctcccgctcatatcctcgatcaggcccccaaagcacggaagttctttgagaaacttcctgacggcacatggaacctgaaaaagactaaagatggcaaacgggagtacaagcccccaggcacgcgcaagttgcacaacattttaggcgtcgagacaggtggcccggggggccggcgagcgggggagagcggccacacggtggccgactacttgaaatttaaagatcttatcttgcggatgttagactatgatcctaaaactaggatccagccctattacgccctgcagcactcattctttaaaaagacagcagatgaaggtaccaacacaagcaactctgtgtccacctcaccagccatggagcagagccagagcagcggcaccacttcatcaaccagctcttcttccggcggcagcagcggtaccagtaattctggccgagccaggtctgaccccacacatcagcatagacactctggaggacactttacagctgccgtgcaggcaatggactgtgaaacccacagtccacaagtgcggcagcagttccccgctccactgggatggtccggcaccgaggctccaactcaggtaacagttgagacacaccccgtacaggaaaccacctttcatgtagcaccacagcagaacgcccttcatcaccaccatggaaatagttctcaccaccatcaccatcaccatcatcaccatcaccaccatggccagcaggccttgggtaaccgtaccagacctagagtttacaacagccccaccaacagcagctcgacacaggattctatggaggtaggtcattcgcatcatagtatgactagcctgtcgagttccacaacttcctcgagtacttcttcatcgtccactggcaaccaggggaatcaggcttaccagaaccggcccgtggcggccaacacattagattttggacaaaatggggccatggacgtgaacctgacggtctattccaatccgcgacaggagaccggcatcgctggacatcctacctatcaattctccgcgaatacaggtcctgcccactacatgacggagggacacctgacgatgcgacaaggtgctgatcgtgaagaaagcccaatgaccggcgtgtgtgtgcagcagtcgcccgttgcctcaagctag

SEQ ID NO: 233678 - DNA, 2265 bp, Artificial Sequence
  derived and/or modified sequence
atgcacaccggaggagaaacatccgcttgcaaaccctcctctgtgcggctggcaccgtcattttcattccatgctgccggactacaaatggcaggccagatgccccacagccaccagtatagtgaccgtagacagccgaatatctcagatcagcaggtcagcgccttgagttattccgatcagatccagcaacccctcactaaccagcgacggatgccacagacttttcgagaccctgcaacagcaccactgagaaaattgagtgtggacctcatcaagacctataaacatattaacgaggtgtactatgccaagaaaaagcggaggcatcagcaagggcagggcgatgactcctcacacaagaaagaacggaaggtttacaatgatggatacgacgatgacaattacgactacattgtgaagaatggcgagaagtggatggacagatatgagattgatagcctgatcgggaaaggcagtttcgggcaggttgtgaaggcttatgaccgcgtcgagcaggagtgggtggctattaagataatcaagaacaagaaggcttttttaaatcaagctcagatcgaagttagacttttggagctgatgaataaacacgacactgaaatgaagtactatatcgtacacttgaaacgacacttcatgtttaggaaccacctttgcctggtcttcgagatgctctcatataacctatatgacctgcttcggaataccaatttccggggagtgagcctcaatctcacgcgcaagttcgcgcaacaaatgtgtacagcactgctgttcctcgccacccctgagttgagtatcatacactgtgatttgaagcctgagaacattttgctgtgcaaccctaaaagaagtgccatcaagatcgtggatttcgggtcctcctgccagctggggcagcggatttaccagtatatccagtccagattctatcggagccccgaagtgctcctgggaatgccctacgatcttgcgatagatatgtggtccctgggctgcatcctggttgagatgcacacgggtgagccactgttttcaggtgccaatgaggtcgaccagatgaataaaatcgttgaagtgctcggcataccaccggctcatattctggaccaggctccgaaagcaagaaagtttttcgaaaagctgcctgacggaacatggaatctgaaaaagactaaggatggaaaaagagagtacaaaccccctggaacgaggaaattgcataatatcctgggagtcgagacaggtggtccaggcggacgtagagcgggagaaagcggacataccgtcgccgattacctgaaattcaaggatttgattctgagaatgcttgactatgatccaaagacacgcattcaaccatactacgccctgcagcactcttttttcaaaaagactgccgacgaaggaactaacacttcaaactccgtgagcacatctccagccatggaacagtcccaatcctcgggcaccacttccagcaccagctcctcttcggggggatctagcggaacttcgaacagcgggagggccagaagcgatccaacacatcagcaccgacactcgggcggacattttacagccgcagttcaggctatggattgtgaaacacattccccccaagtgcggcagcaattccccgctccgctcggctggagcgggacagaggcccctacccaggttaccgtggaaacccatccagtgcaggagacaacctttcacgtggctccccagcaaaacgctctgcaccaccatcacggtaactcgtcacaccatcaccaccaccaccatcaccatcatcatcatcatgggcagcaagctctcggtaatcgaactcgcccaagggtctataacagtccgaccaattcaagctccacacaggatagcatggaggtcggacattcgcaccatagtatgacatctttatctagtagtacaacatcctcttcaacttctagcagctccaccggtaaccaggggaaccaggcgtatcagaatcgccctgttgccgctaacacacttgacttcggacagaatggcgctatggatgtgaacctgaccgtgtattccaatcctcggcaagagactgggattgctggccacccaacttaccagttttcagccaatacagggcctgcgcactacatgacagaaggtcacctgacaatgaggcagggcgctgatcgcgaagaatccccaatgacgggagtctgcgtgcagcagagcccagtcgcatcgtcatag

SEQ ID NO: 233679 - DNA, 1608 bp, Artificial Sequence
  derived and/or modified sequence
atgttccggaaccatctctgtcttgtgtttgaaatgctgtcttacaatttgtacgatcttttacggaacacgaacttcagaggtgtgtctctcaacctgacaaggaagtttgcccagcagatgtgtacagcccttctgtttcttgctactcccgaactttcaattattcactgcgatctgaagcctgagaacattctcctctgcaaccctaagcggtccgcaattaaaatcgtggactttggctcttcatgccagctgggccagcggatttatcagtacattcagtccagattctatcgctccccagaagttctgttgggaatgccgtatgacttggcaatagacatgtggtcgctgggctgtatcctggttgaaatgcataccggggagcctctgtttagcggcgctaatgaggtggatcaaatgaacaagattgtggaggtgttaggaattccacccgcacacatcctcgaccaggctcctaaagccaggaagttcttcgagaagcttcctgatgggacctggaacttaaagaagaccaaggacgggaagagagagtataaaccccctggaacaaggaaattgcacaatatactcggtgtcgagactggcggaccgggagggagacgtgctggcgaatccggccatacagtcgcagactatctgaagtttaaggacctgatcttacgcatgctggactacgacccgaagacaaggattcagccatattacgcactccagcactctttcttcaagaagactgccgatgagggtacgaatacttccaactccgtgtcgaccagcccagcgatggagcaatcccagagcagtgggactactagctcaacaagcagttccagcgggggatctagtggtacgtcaaactccggcagggcgagaagcgaccctacccaccaacaccgccactcagggggacattttaccgcagctgtgcaggcaatggactgcgaaactcacagcccacaggtgcgccagcagttcccggcacccttggggtggagcggcactgaggcacctacccaggtcacagtcgaaacacaccctgtgcaagaaacaacattccatgtcgcaccccagcaaaatgctctgcaccaccaccatgggaatagcagtcatcaccaccaccatcaccaccatcaccatcaccaccatggacaacaggctttgggtaataggaccagacccagagtctacaattcacctaccaacagcagcagcacgcaggacagcatggaagtaggccattctcatcattccatgacttcattaagctcaagcacaacttcttcttctactagttcttcctctactggtaatcaagggaaccaggcctatcagaacagacccgtcgctgctaacacactggatttcggacagaacggtgcaatggatgtcaacctgaccgtatacagtaaccccagacaggaaaccggtatcgcaggccatccaacttatcagttcagcgcgaatacaggtcctgctcactatatgaccgagggtcatcttaccatgcggcagggagccgacagggaagagagtcctatgacgggtgtttgtgttcaacagagtccagtggcttcatcttag

SEQ ID NO: 233680 - DNA, 2265 bp, Artificial Sequence
  derived and/or modified sequence
atgcacaccggcggcgagaccagcgcctgcaagcccagcagcgtgagactggcccccagcttcagcttccacgccgccggcctgcagatggccggccagatgccccacagccaccagtacagcgacagaagacagcccaacatcagcgaccagcaggtgagcgccctgagctacagcgaccagatccagcagcccctgaccaaccagagaagaatgccccagaccttcagagaccccgccaccgcccccctgagaaagctgagcgtggacctgatcaagacctacaagcacatcaacgaggtgtactacgccaagaagaagagaagacaccagcagggccagggcgacgacagcagccacaagaaggagagaaaggtgtacaacgacggctacgacgacgacaactacgactacatcgtgaagaacggcgagaagtggatggacagatacgagatcgacagcctgatcggcaagggcagcttcggccaggtggtgaaggcctacgacagagtggagcaggagtgggtggccatcaagatcatcaagaacaagaaggccttcctgaaccaggcccagatcgaggtgagactgctggagctgatgaacaagcacgacaccgagatgaagtactacatcgtgcacctgaagagacacttcatgttcagaaaccacctgtgcctggtgttcgagatgctgagctacaacctgtacgacctgctgagaaacaccaacttcagaggcgtgagcctgaacctgaccagaaagttcgcccagcagatgtgcaccgccctgctgttcctggccacccccgagctgagcatcatccactgcgacctgaagcccgagaacatcctgctgtgcaaccccaagagaagcgccatcaagatcgtggacttcggcagcagctgccagctgggccagagaatctaccagtacatccagagcagattctacagaagccccgaggtgctgctgggcatgccctacgacctggccatcgacatgtggagcctgggctgcatcctggtggagatgcacaccggcgagcccctgttcagcggcgccaacgaggtggaccagatgaacaagatcgtggaggtgctgggcatcccccccgcccacatcctggaccaggcccccaaggccagaaagttcttcgagaagctgcccgacggcacctggaacctgaagaagaccaaggacggcaagagagagtacaagccccccggcaccagaaagctgcacaacatcctgggcgtggagaccggcggccccggcggcagaagagccggcgagagcggccacaccgtggccgactacctgaagttcaaggacctgatcctgagaatgctggactacgaccccaagaccagaatccagccctactacgccctgcagcacagcttcttcaagaagaccgccgacgagggcaccaacaccagcaacagcgtgagcaccagccccgccatggagcagagccagagcagcggcaccaccagcagcaccagcagcagcagcggcggcagcagcggcaccagcaacagcggcagagccagaagcgaccccacccaccagcacagacacagcggcggccacttcaccgccgccgtgcaggccatggactgcgagacccacagcccccaggtgagacagcagttccccgcccccctgggctggagcggcaccgaggcccccacccaggtgaccgtggagacccaccccgtgcaggagaccaccttccacgtggccccccagcagaacgccctgcaccaccaccacggcaacagcagccaccaccaccaccaccaccaccaccaccaccaccaccacggccagcaggccctgggcaacagaaccagacccagagtgtacaacagccccaccaacagcagcagcacccaggacagcatggaggtgggccacagccaccacagcatgaccagcctgagcagcagcaccaccagcagcagcaccagcagcagcagcaccggcaaccagggcaaccaggcctaccagaacagacccgtggccgccaacaccctggacttcggccagaacggcgccatggacgtgaacctgaccgtgtacagcaaccccagacaggagaccggcatcgccggccaccccacctaccagttcagcgccaacaccggccccgcccactacatgaccgagggccacctgaccatgagacagggcgccgacagagaggagagccccatgaccggcgtgtgcgtgcagcagagccccgtggccagcagctag

SEQ ID NO: 233681 - DNA, 1608 bp, Artificial Sequence
  derived and/or modified sequence
atgttcagaaaccacctgtgcctggtgttcgagatgctgagctacaacctgtacgacctgctgagaaacaccaacttcagaggcgtgagcctgaacctgaccagaaagttcgcccagcagatgtgcaccgccctgctgttcctggccacccccgagctgagcatcatccactgcgacctgaagcccgagaacatcctgctgtgcaaccccaagagaagcgccatcaagatcgtggacttcggcagcagctgccagctgggccagagaatctaccagtacatccagagcagattctacagaagccccgaggtgctgctgggcatgccctacgacctggccatcgacatgtggagcctgggctgcatcctggtggagatgcacaccggcgagcccctgttcagcggcgccaacgaggtggaccagatgaacaagatcgtggaggtgctgggcatcccccccgcccacatcctggaccaggcccccaaggccagaaagttcttcgagaagctgcccgacggcacctggaacctgaagaagaccaaggacggcaagagagagtacaagccccccggcaccagaaagctgcacaacatcctgggcgtggagaccggcggccccggcggcagaagagccggcgagagcggccacaccgtggccgactacctgaagttcaaggacctgatcctgagaatgctggactacgaccccaagaccagaatccagccctactacgccctgcagcacagcttcttcaagaagaccgccgacgagggcaccaacaccagcaacagcgtgagcaccagccccgccatggagcagagccagagcagcggcaccaccagcagcaccagcagcagcagcggcggcagcagcggcaccagcaacagcggcagagccagaagcgaccccacccaccagcacagacacagcggcggccacttcaccgccgccgtgcaggccatggactgcgagacccacagcccccaggtgagacagcagttccccgcccccctgggctggagcggcaccgaggcccccacccaggtgaccgtggagacccaccccgtgcaggagaccaccttccacgtggccccccagcagaacgccctgcaccaccaccacggcaacagcagccaccaccaccaccaccaccaccaccaccaccaccaccacggccagcaggccctgggcaacagaaccagacccagagtgtacaacagccccaccaacagcagcagcacccaggacagcatggaggtgggccacagccaccacagcatgaccagcctgagcagcagcaccaccagcagcagcaccagcagcagcagcaccggcaaccagggcaaccaggcctaccagaacagacccgtggccgccaacaccctggacttcggccagaacggcgccatggacgtgaacctgaccgtgtacagcaaccccagacaggagaccggcatcgccggccaccccacctaccagttcagcgccaacaccggccccgcccactacatgaccgagggccacctgaccatgagacagggcgccgacagagaggagagccccatgaccggcgtgtgcgtgcagcagagccccgtggccagcagctag

SEQ ID NO: 233682 - DNA, 6384 bp, Artificial Sequence
  derived and/or modified sequence
aaaaataactcatattgtctctgaggttcttttccagtgaagtgtttagtattgctgctatttggagtacaaagttggagcttttaaagaacctgggagttcaaaagtataaggagaaataaatgaaaagcagaaatattttgaggcaataagtatagactcaaatctatattatgacccacttgtagcaccacttggaattctaccaataagagatttatttgggcaaactataatggttgttggaaattgcaaatcttagtgtgaattattttagtccagttggtttctttctttctcttacctgaaatgaactatactgaggcaataggagctttgtatagtaatttaggagtgtaaaacaacttagggaaaaggattattaagcaggatgattgggatgacatcatgtgaaatttaggaattggaggcattgggaattgagagggtgctaacaaaggaaaacagcttattttagaatttgtctggaggatgtagaattgaagaagttttggtatttcttctgcagcggccccagtgcccttgaccaggaacatctcttggagtcagtagttttcatgaggctgacctaggaacttggccaacatatgcaacattgttctatttaaaatattccttgaattaaattcgatagtatcaatttaaaacataaagttttcactcaactcctttagaagttagattttagcttgtacttgtctttacctcttctgctgattatcagttgacaacactgagattactttcattttcctgtaagtcattatgaatttttctggtcaaccatgagttatcagtggaagcaataagtaggaagtactgtaaaagaattacaataaaataagagaaaccacttggagagcaagagggcttgtggacttgggggagcggttgtgagaaatgtctcagaacttaatttacaaataacattggtagattgacatgttgtctttcctataaagtaactttacctctgtcttaatagtaaactactatgaaagtgaattcgtgttcctcttgatttgtgaactgatgaaaattacaaaatgtggagttttttccccagataaagtaaatggtggaatattcaggtttatttgatacctagaaaatacctgaaattttccgtggtaataggcacattttgaaactgttttttttttctctgacaattgaatatattttatatatagttgattttgattattgaagactaaggaaaatttaagtttgaatgttagaaaatgaattttgcaaatttgaagtaattttattctttatgttttgggattgtagttatgttagatattcctcagttggggtaattgtcttgcatcattatctcttatcataatctgtttttcttcacacagtgttatagttttgccgctggactcttccctcccttcccccaccccatcaggatgatatgagacttgaaagaagacgatgcatacaggaggagagacttcagcatgcaaaccttcatctgttcggcttgcaccgtcattttcattccatgctgctggccttcagatggctggacagatgccccattcacatcagtacagtgaccgtcgccagccaaacataagtgaccaacaggtttctgccttatcatattctgaccagattcagcaacctctaactaaccagaggcggatgccccaaaccttccgtgacccagcaactgctcccctgagaaaactttctgttgacttgatcaaaacatacaagcatattaatgaggtttactatgcaaaaaagaagcgaagacaccaacagggccagggagacgattctagtcataagaaggaacggaaggtttacaatgatggttatgatgatgataactatgattatattgtaaaaaacggagaaaagtggatggatcgttacgaaattgactccttgataggcaaaggttcctttggacaggttgtaaaggcatatgatcgtgtggagcaagaatgggttgccattaaaataataaagaacaagaaggcttttctgaatcaagcacagatagaagtgcgacttcttgagctcatgaacaaacatgacactgaaatgaaatactacatagtgcatttgaaacgccactttatgtttcgaaaccatctctgtttagtttttgaaatgctgtcctacaacctctatgacttgctgagaaacaccaatttccgaggggtctctttgaacctaacacgaaagtttgcgcaacagatgtgcactgcactgcttttccttgcgactccagaacttagtatcattcactgtgatctaaaacctgaaaatatccttctttgtaaccccaaacgcagtgcaatcaagatagttgactttggcagttcttgtcagttggggcagaggatataccagtatattcagagtcgcttttatcggtctccagaggtgctactgggaatgccttatgaccttgccattgatatgtggtccctcgggtgtattttggttgaaatgcacactggagaacctctgttcagtggtgccaatgaggtagatcagatgaataaaatagtggaagttctgggtattccacctgctcatattcttgaccaagcaccaaaagcaagaaagttctttgagaagttgccagatggcacttggaacttaaagaagaccaaagatggaaaacgggagtacaaaccaccaggaacccgtaaacttcataacattcttggagtggaaacaggaggacctggtgggcgacgtgctggggagtcaggtcatacggtcgctgactacttgaagttcaaagacctcattttaaggatgcttgattatgaccccaaaactcgaattcaaccttattatgctctgcagcacagtttcttcaagaaaacagctgatgaaggtacaaatacaagtaatagtgtatctacaagccccgccatggagcagtctcagtcttcgggcaccacctccagtacatcgtcaagctcaggtggctcatcggggacaagcaacagtgggagagcccggtcggatccgacgcaccagcatcggcacagtggtgggcacttcacagctgccgtgcaggccatggactgcgagacacacagtccccaggtgcgtcagcaatttcctgctcctcttggttggtcaggcactgaagctcctacacaggtcactgttgaaactcatcctgttcaagaaacaacctttcatgtagcccctcaacagaatgcattgcatcatcaccatggtaacagttcccatcaccatcaccaccaccaccaccatcaccaccaccatggacaacaagccttgggtaaccggaccaggccaagggtctacaattctccaacgaatagctcctctacccaagattctatggaggttggccacagtcaccactccatgacatccctgtcttcctcaacgacttcttcctcgacatcttcctcctctactggtaaccaaggcaatcaggcctaccagaatcgcccagtggctgctaataccttggactttggacagaatggagctatggacgttaatttgaccgtctactccaatccccgccaagagactggcatagctggacatccaacataccaattttctgctaatacaggtcctgcacattacatgactgaaggacatctgacaatgaggcaaggggctgatagagaagagtcccccatgacaggagtttgtgtgcaacagagtcctgtagctagctcgtgactacattgaaacttgagtttgtttcttgtgtgtttttatagaagtggtgttttttttccaaaaacaaagtgcaaagctgcttgaatcaggaggagattaacacactgaaccgctacaagagggcaaagctgattttttttttaacttgaaaagattgcaaagggacattgaagtgtttaaaagagccatgtccaaacccatcttcatggatagctcagaggtatcctctttttgctcccccattttaacttgccacatcccagtcacagtggggtttttttgtctttctattcagcaaaagttaatattcagatgttggtcttggtcatttgccaactaattttaaagtaaaaggcactgcacataatttgcataaagggccccatgagggtgttttttttttttctttttgtcccccccatccccctttttttttgttttgttctgttttgttttgggtgggagggtgggaaatttgggtttttaagtcctctaaacacacttgggcacggaaatgcagtactgtaaggaagagggacctccagcttccacaaacaccatcttcagctgtatgaaagggacggttgtggtgaagtttgtcaggcacagtaagcatgctgagtggcggggatcagaactctcctatctgaacctactgaggagcaaagcagcaattacatgggatcctgtggctctcccgttgcagaggccacaggaagataggatggaacgtgactggtctcctaaccaaggtgcactgagaagcaatcaacgggtcggtcgtggccagtcctggggaggtctgagtggtggtctttgggataacctttggccttatggatttggactcgaaattagaagagcctaccatttcagatgcaatcacttttggacatgcttttgcagacagtccttaatgctgaaaacacagagaatgggtaattcaagaggcctttcttttaaaatagacttttgtgacccactaattgtaaggtattgcaaggtcactttgcgtgtgtcataaagttgacttccttattggttgaaggtcacagaagtagtggtttgctttgatggaaatagctacagctgtgtcccttcctgctttttactttttcttttgctttttctcggcacgtggtatctccaccatttcttctgcacaaagatgtcttctgttcatcctgaacatttttaaaaaatgcagaattttatgtgactgcttttttgcctcacaattatgctgtgaattttacaaaaatttattttcttttttgataatttattgtaccaaagctgtttttatagcacatagatgtctgtaaccaataatgtagcagttctgcactttgacacaaggtgtaactagaccatttttaaatgtcagttgaaaattatggctgtactattgcttaaacaaaactggaactgttgttgaatccatagccaatacatttacagcaatctgtgtactgaacatagtagattgacatctaattcaagattacaacatctgttacattctaagtgtgttcaggcttctgaaggtaaagggacactggatccagaagctatggaaccagcagttgattcttgtattcctgattaacctacttgtaaacttgaaagcaagaccttgattgcaccaacaggtccagagtatgagtgcaagcaaagcagaactctcatgcgtgacctgagcagacaggctggtatttaacaggtgcctcgtgttgagattacgctgccttaatgtaacacagtctggcagttgctaaatttgtgttcccattttaaattgaccaattttggggtgtgacacttttgagcggttgaattgggagaatgaagataagtaatttacctgtccaggatcaaaagaagcctagaaaagaagcagtaatctacctctgccgataacctgtttaagatgactcagcagaacaccgcgtttcattctattggtcaattccatgtggctgactaggtcaattttttttctgaacaaaagcaggtttttatatgtaaacagtgagaaaagaaaggctaaacactatgtaaatgtgaatggaaacttggaaatactcgtttttataaactacaaaaactttttgttgtttatcaggaaatccatatttattttgtaattaactgtcaagcctgtggatgatttttttgaacttggtagttcataaaggtttacagtgaataaaaggatatcatcttgagtatagcaatatcaaaaggaattcagtagttactgctgtttaggaatataaggttaagatatcatatgggtcaggtcattttttttttctgtgctggttgccacatcttagcaagcaccaaaaaactaaagcagtttttaaaccgatatttacgtaaagaaaatcataaaatccaatgcttctgcatactgtgttatgttacagtccagttttgtgtgctttactacacagtttggttacaggacttctgtgcattgtaaacataaacagcatggaaaaggttaaatacctgtgttcagattgtaagatctagtccggacttgctgtgtatattgtaacgttaaatgaaaaaagaacccccctttgtattatagtcatgcggtcttatgtatgataaacagttgaataatttgtcctcaga

SEQ ID NO: 233683 - DNA, 1735 bp, Artificial Sequence
  derived and/or modified sequence
agcagttactttttgcattcatttagtggcacctgcttaaccaggagattaaaagccatccacagaccatgattgtgagtgcatttgaaacgccactttatgtttcgaaaccatctctgtttagtttttgaaatgctgtcctacaacctctatgacttgctgagaaacaccaatttccgaggggtctctttgaacctaacacgaaagtttgcgcaacagatgtgcactgcactgcttttccttgcgactccagaacttagtatcattcactgtgatctaaaacctgaaaatatccttctttgtaaccccaaacgcagtgcaatcaagatagttgactttggcagttcttgtcagttggggcagaggatataccagtatattcagagtcgcttttatcggtctccagaggtgctactgggaatgccttatgaccttgccattgatatgtggtccctcgggtgtattttggttgaaatgcacactggagaacctctgttcagtggtgccaatgaggtagatcagatgaataaaatagtggaagttctgggtattccacctgctcatattcttgaccaagcaccaaaagcaagaaagttctttgagaagttgccagatggcacttggaacttaaagaagaccaaagatggaaaacgggagtacaaaccaccaggaacccgtaaacttcataacattcttggagtggaaacaggaggacctggtgggcgacgtgctggggagtcaggtcatacggtcgctgactacttgaagttcaaagacctcattttaaggatgcttgattatgaccccaaaactcgaattcaaccttattatgctctgcagcacagtttcttcaagaaaacagctgatgaaggtacaaatacaagtaatagtgtatctacaagccccgccatggagcagtctcagtcttcgggcaccacctccagtacatcgtcaagctcaggtggctcatcggggacaagcaacagtgggagagcccggtcggatccgacgcaccagcatcggcacagtggtgggcacttcacagctgccgtgcaggccatggactgcgagacacacagtccccaggtgcgtcagcaatttcctgctcctcttggttggtcaggcactgaagctcctacacaggtcactgttgaaactcatcctgttcaagaaacaacctttcatgtagcccctcaacagaatgcattgcatcatcaccatggtaacagttcccatcaccatcaccaccaccaccaccatcaccaccaccatggacaacaagccttgggtaaccggaccaggccaagggtctacaattctccaacgaatagctcctctacccaagattctatggaggttggccacagtcaccactccatgacatccctgtcttcctcaacgacttcttcctcgacatcttcctcctctactggtaaccaaggcaatcaggcctaccagaatcgcccagtggctgctaataccttggactttggacagaatggagctatggacgttaatttgaccgtctactccaatccccgccaagagactggcatagctggacatccaacataccaattttctgctaatacaggtcctgcacattacatgactgaaggacatctgacaatgaggcaaggggctgatagagaagagtcccccatgacaggagtttgtgtgcaacagagtcctgtagctagctcgtgactacattgaaacttgagtttgtttcttg

SEQ ID NO: 233684 - protein, 529 aa, Artificial Sequence
  derived and/or modified sequence
MHTGGETSACKPSSVRLAPSFSFHAAGLQMAGQMPHSHQYSDRRQPNISDQQVSALSYSDQIQQPLTNQVMPDIVMLQRRMPQTFRDPATAPLRKLSVDLIKTYKHINEVYYAKKKRRHQQGQGDDSSHKKERKVYNDGYDDDNYDYIVKNGEKWMDRYEIDSLIGKGSFGQVVKAYDRVEQEWVAIKIIKNKKAFLNQAQIEVRLLELMNKHDTEMKYYIVHLKRHFMFRNHLCLVFEMLSYNLYDLLRNTNFRGVSLNLTRKFAQQMCTALLFLATPELSIIHCDLKPENILLCNPKRSAIKIVDFGSSCQLGQRIYQYIQSRFYRSPEVLLGMPYDLAIDMWSLGCILVEMHTGEPLFSGANEVDQMNKIVEVLGIPPAHILDQAPKARKFFEKLPDGTWNLKKTKDGKREYKPPGTRKLHNILGVETGGPGGRRAGESGHTVADYLKFKDLILRMLDYDPKTRIQPYYALQHSFFKKTADEGTNTSNSVSTSPAMEQSQSSGTTSSTSSSSGASAISCSSWLVRH

SEQ ID NO: 233685 - protein, 131 aa, Artificial Sequence
  derived and/or modified sequence
MHTGGETSACKPSSVRLAPSFSFHAAGLQMAGQMPHSHQYSDRRQPNISDQQVSALSYSDQIQQPLTNQVMPDIVMLQRRMPQTFRDPATAPLRKLSVDLIKTYKHINEVYYAKKKRRHQQGQGDDSSHKK

SEQ ID NO: 233686 - protein, 46 aa, Artificial Sequence
  derived and/or modified sequence
MHTGGETSACKPSSVRLAPSFSFHAAGLQMAGQMPHSHQYSDRRQP

SEQ ID NO: 233687 - DNA, 1590 bp, Artificial Sequence
  derived and/or modified sequence
atgcacacgggaggcgaaacttctgcctgcaaaccttcgtccgtgaggctggcaccaagcttttcatttcacgcagccggcttgcagatggctggccaaatgccgcattcacatcagtattctgaccgccggcagccgaacatttctgaccagcaagtatcagccctttcatacagtgatcagatccagcaacccctgactaaccaggtgatgcccgacatagttatgcttcagaggagaatgccccaaacatttcgcgatcctgccaccgctcctttgagaaagttatctgtcgaccttatcaagacctataagcatatcaacgaggtatattacgcgaagaagaaacgcagacaccaacagggtcagggcgacgactcctcacataagaaagaaaggaaggtgtacaatgacggctacgacgatgacaattatgactatatcgttaaaaatggagagaagtggatggaccgctacgagatcgactcactgataggcaaaggaagctttggccaggttgttaaggcatacgaccgagtcgaacaagaatgggtggctataaaaattatcaagaacaaaaaggctttcctgaaccaggctcaaatcgaagtgagactcctggaattaatgaataaacatgacacggagatgaaatactacatcgtccaccttaagagacattttatgttccgaaatcatttgtgtctcgttttcgaaatgctcagttacaatctctacgaccttctcaggaacactaactttagaggcgtgagtctgaatttgaccaggaaattcgcccagcaaatgtgtacggctctgcttttcctggccaccccagaactcagcattatacattgcgacctgaaaccggaaaacatcctgctctgcaaccccaagagaagcgccatcaagattgttgatttcggaagctcatgtcagttgggacagcgaatctaccagtatatccaatctcgcttctatcggagtcctgaggtcctgctagggatgccttacgatctggcaattgacatgtggtcattaggctgtatcctggtcgagatgcatactggcgagcctctgttcagcggagccaatgaggtggatcaaatgaataaaatcgttgaggtgctcggtatcccgcccgcgcacattttagatcaggctcccaaggcccgcaagttctttgagaagttaccagatggcacctggaatctcaagaagacaaaggacggtaagcgggagtataaacccccaggtacaagaaaactgcataatattctgggcgtagagaccggcgggccaggggggagaagggcaggggagagtggacatacggttgcggattacctgaagtttaaagatttgatccttcgaatgttggattacgatccaaagacccgcattcagccttattacgctctccagcatagcttcttcaagaaaacggctgacgagggaacaaacacatcaaacagcgtgagcacttcgccggccatggagcaatcccagtcaagcgggacaacctcaagcacttcaagtagcagtggagcttctgcaatctcctgcagctcatggctggtacgccattag

SEQ ID NO: 233688 - DNA, 396 bp, Artificial Sequence
  derived and/or modified sequence
atgcatactggcggtgagacgagtgcttgcaagccctctagtgtgagacttgccccctctttcagctttcatgccgccggactacagatggccggccagatgccccactctcaccagtatagcgataggaggcagccaaacatatcagatcagcaggtgagcgccctctcctacagcgatcagatccagcagcccctgaccaaccaggtgatgcccgatatcgtgatgttgcagagacgcatgccccaaacttttagagacccagccactgcgcccctgaggaagttgtccgtcgacctgatcaagacatacaaacatattaacgaggtgtattacgctaagaaaaaaagaaggcatcagcagggccaaggagatgattcatcccataaaaaatag

SEQ ID NO: 233689 - DNA, 141 bp, Artificial Sequence
  derived and/or modified sequence
atgcatactgggggagagacatctgcttgtaagccaagttctgtgcgcctggcgccctcatttagtttccacgcagccggcctgcagatggcaggacagatgcctcactctcatcaatactcagatcgcaggcagccatag

SEQ ID NO: 233690 - DNA, 1590 bp, Artificial Sequence
  derived and/or modified sequence
atgcacactggaggagagaccagcgcctgcaagcccagctctgtgcggctggcccccagcttctccttccacgccgccggcctgcagatggccggccagatgccccacagccaccagtacagcgaccggcggcagcccaacatcagtgaccagcaggtgtctgccctgagctacagcgaccagatccagcagcccctgaccaaccaggtgatgccagacatcgtgatgctgcagaggaggatgccccagaccttccgggaccctgccacagcccccctgaggaagctgtctgtggacctgatcaagacctacaagcacatcaatgaggtgtactatgccaagaagaagagaagacaccagcagggccagggagatgacagcagccacaagaaggagaggaaggtgtacaatgatggctatgatgatgacaactatgactacatcgtgaagaatggagagaagtggatggacagatatgaaattgacagcctgattggcaagggcagctttggccaggtggtgaaggcctatgacagagtggagcaggagtgggtggccatcaagatcatcaagaacaagaaggccttcctgaaccaggcccagatcgaggtgcggctgctggagctgatgaacaagcatgacacagagatgaagtactacatcgtgcacctgaagaggcacttcatgttcaggaaccacctgtgcctggtgtttgagatgctgagctacaacctgtatgacctgctgaggaacaccaacttccggggcgtgtccctgaacctgaccaggaagtttgcccagcagatgtgcacagccctgctcttcctggccaccccagagctgagcatcatccactgtgacctgaagccagagaacatcctgctgtgcaaccccaagaggtctgccatcaagatcgtggactttggcagcagctgccagctgggccagaggatctaccagtacatccagagccgcttctaccgcagccctgaggtgctgctgggcatgccctatgacctggccatcgacatgtggagcctgggctgcatcctggtggagatgcacactggagagcccctcttcagcggggccaatgaggtggaccagatgaacaagatcgtggaggtgctgggcatccccccagcccacatcctggaccaggcccccaaggccaggaagttctttgagaagctgcctgatggcacctggaacctgaagaagaccaaggatggcaagcgggagtacaagcccccaggcaccaggaagctgcacaacatcctgggcgtggagactggaggccctgggggcagaagagctggggagagcggccacacagtggccgactacctgaagttcaaggacctgatcctgaggatgctggactatgaccccaagacccgcatccagccctactatgccctgcagcacagcttcttcaagaagacagcagatgagggcaccaacaccagcaacagcgtgtccaccagccctgccatggagcagagccagagcagcggcaccaccagcagcaccagcagcagcagcggggccagcgccatcagctgcagctcctggctggtgcgccactag

SEQ ID NO: 233691 - DNA, 396 bp, Artificial Sequence
  derived and/or modified sequence
atgcacactggaggagagaccagcgcctgcaagcccagctctgtgcggctggcccccagcttctccttccacgccgccggcctgcagatggccggccagatgccccacagccaccagtacagcgaccggcggcagcccaacatcagtgaccagcaggtgtctgccctgagctacagcgaccagatccagcagcccctgaccaaccaggtgatgccagacatcgtgatgctgcagaggaggatgccccagaccttccgggaccctgccacagcccccctgaggaagctgtctgtggacctgatcaagacctacaagcacatcaatgaggtgtactatgccaagaagaagagaagacaccagcagggccagggagatgacagcagccacaagaagtag

SEQ ID NO: 233692 - DNA, 141 bp, Artificial Sequence
  derived and/or modified sequence
atgcacactggaggagagaccagcgcctgcaagcccagctctgtgcggctggcccccagcttctccttccacgccgccggcctgcagatggccggccagatgccccacagccaccagtacagcgaccggcggcagccctag

SEQ ID NO: 233693 - DNA, 1590 bp, Artificial Sequence
  derived and/or modified sequence
atgcacaccggcggcgagaccagcgcctgcaagcccagcagcgtgagattagctcctagcttctcttttcacgccgctggtcttcaaatggcaggccagatgcctcactcgcaccagtactccgacagacggcagccaaacatctcagaccagcaggtgtccgccctgagctactccgaccaaatacagcagccgctgactaatcaggtgatgcctgatatcgtgatgctccagagacggatgccccaaacattccgcgatcccgctaccgctcctctgcgtaaattatccgtggacctgatcaaaacctacaagcatatcaacgaagtgtactatgcgaagaagaagaggagacatcagcaggggcagggtgacgattcttcgcacaaaaaagagcgtaaggtgtataacgatggttacgacgatgacaattatgattatatagtgaaaaacggagagaagtggatggatcgctatgagattgatagtttgatagggaagggcagttttggacaggtagtgaaagcttatgaccgggtagagcaggaatgggtagcaattaaaattattaagaataaaaaggcttttctcaatcaggctcaaatcgaagtgcggttgctggagctcatgaataaacatgatactgaaatgaaatattacatcgtgcacttgaaacgtcatttcatgtttcgcaaccatctgtgtttagtgttcgagatgctgtcttacaatctgtacgacctgctgcgcaatactaacttcaggggagtgagtctcaatctgacgaggaagttcgcccaacagatgtgcactgcactgctgtttcttgcgacacccgaactgagtatcatacactgtgacttgaaacccgaaaacatcctgctgtgcaatccaaaacgttcggctatcaagatcgtggattttgggagctcatgtcagctcggccagcggatctaccaatatatacagtcacggttttatcggtctcctgaggtattgctcggaatgccgtatgacctggcgatcgatatgtggtcactgggctgtatcctggtggaaatgcataccggggaacctctgttcagcggcgctaacgaggtagatcaaatgaataaaatagtggaggttctgggcattcctcctgcgcacattctagatcaggctccgaaggccagaaagttttttgagaagctgccagatgggacttggaatcttaaaaagaccaaggatggtaagagagaatataaacctccaggtacccgcaagcttcataacattctgggagttgagacagggggccctgggggcagacgtgctggtgaaagcggccacaccgtggcagattatttgaaattcaaagaccttatcctacggatgttagactatgatcccaaaacgaggatccagccttattacgctctccagcattcattcttcaaaaaaactgccgatgaaggaaccaacacctccaactccgtgtccacttcaccggccatggagcagtctcaaagtagtggcacaacatcaagtacctcttcaagctcaggagcaagcgctatttcctgcagcagctggctagtaagacactag

SEQ ID NO: 233694 - DNA, 396 bp, Artificial Sequence
  derived and/or modified sequence
atgcacaccggcggcgagaccagcgcctgcaagcccagcagcgtgaggctggccccatccttctcttttcacgcagccggattgcagatggcgggacaaatgccccatagtcaccagtacagtgaccgtcgacagccaaacatttctgatcagcaggtctcagccctctcatactcggatcagatacaacaacctttaaccaaccaggtgatgcctgacattgtgatgttacagcgccgtatgcctcagactttcagggatcccgccaccgccccactgcgaaaattgagcgtggatttaattaagacttacaaacatataaatgaggtgtactacgccaaaaagaaaagaaggcatcaacagggacagggagacgattcatcccataaaaagtag

SEQ ID NO: 233695 - DNA, 141 bp, Artificial Sequence
  derived and/or modified sequence
atgcacaccggcggcgagaccagcgcctgcaagcccagcagcgtgcgcttagccccaagtttttccttccacgccgccggcctgcagatggccggtcagatgccgcattctcatcagtatagcgatcgcagacagccttag

SEQ ID NO: 233696 - DNA, 1590 bp, Artificial Sequence
  derived and/or modified sequence
atgcatacaggcggagagacaagcgcatgtaagcctagctccgtccggctcgcgcctagtttctcatttcacgccgctggtctgcagatggctgggcaaatgccacattcgcaccaatacagtgatcggagacagccgaatatcagcgatcagcaggtttctgcgctcagttattctgatcaaattcagcagccattgacgaaccaggttatgccagatatcgttatgctacagcgcagaatgccccagacgttccgggatccggctacggcgcctctccggaagctgagcgtcgatttgattaagacgtataagcacatcaacgaagtttattatgcgaagaagaagagaaggcatcagcaaggccagggcgatgattccagccacaaaaaagagcgcaaggtatataatgatggctatgacgacgacaactatgattacattgttaagaatggagaaaaatggatggacagatacgaaatagactcacttataggcaaaggctcgttcggccaagtggtaaaggcctacgaccgcgtagagcaggagtgggtcgcaatcaagattattaagaacaagaaagcgttcctcaaccaggcccagatagaagtgcgtctgttggagctcatgaacaaacacgatactgaaatgaaatattacatagtgcacctgaaacgtcacttcatgttcagaaaccacttgtgcctggtgtttgagatgctgtcttacaatctgtacgatttgctgcggaacacaaacttccgcggtgtcagcctgaacctgactaggaaatttgctcaacaaatgtgtactgctctcttgttcctcgctactcctgaacttagtatcatacactgcgatcttaagccagagaacatactgctgtgcaaccctaagcggtctgccatcaaaattgtggattttggaagtagttgtcagctaggccagaggatctatcagtacatccagtccagattttaccggtctcccgaagtgctattgggtatgccatacgacttagctatagatatgtggagtctgggttgtatccttgtcgagatgcacacgggcgaacctttattttctggagctaatgaagtcgatcagatgaacaagattgtggaagtgctggggatacctcctgctcacatccttgatcaggcacccaaggctaggaagttctttgagaagctgcctgacggtacatggaatctgaaaaaaaccaaagacggaaagcgggagtataaaccccctggtacccgtaaactgcataatatcctgggtgtagaaaccggaggaccaggaggcagacgggcaggggagtccggccacacagtggctgattacctgaagttcaaggacctgattctcagaatgctggactatgaccctaagaccaggatacagccgtattatgcgctgcagcatagtttctttaagaagacagcggatgaaggcaccaataccagcaatagcgtgagcactagcccggctatggagcaaagtcaaagcagtggaaccacgagcagcacctcgtctagttctggcgcatccgctatctcttgttcctcatggctggttcggcactag

SEQ ID NO: 233697 - DNA, 396 bp, Artificial Sequence
  derived and/or modified sequence
atgcatacagggggtgaaacatcagcctgcaaaccctcaagcgtgagactggcacctagcttttctttccatgctgctggactacagatggctggacagatgcctcacagccaccaatattctgacagacggcaaccaaacatctccgaccagcaggtctccgcgttatcttactcggaccagattcagcagcctctcaccaatcaggtgatgccagacattgtaatgctgcagcgcaggatgccccagactttccgggaccccgctaccgccccattacggaagctctcagtggatctgatcaagacctataaacatatcaatgaagtctattacgcaaagaagaagcgcagacatcaacagggacagggtgacgacagcagccataaaaagtag

SEQ ID NO: 233698 - DNA, 141 bp, Artificial Sequence
  derived and/or modified sequence
atgcatacgggtggggaaacctctgcgtgcaagccaagctctgtgcgactagccccaagcttcagttttcacgccgcaggtctccagatggccggacagatgccacactctcaccagtactccgatagaagacaaccatag

SEQ ID NO: 233699 - DNA, 1590 bp, Artificial Sequence
  derived and/or modified sequence
atgcacaccggcggcgagaccagcgcctgcaagcccagcagcgtgagactggcccccagcttcagcttccacgccgccggcctgcagatggccggccagatgccccacagccaccagtacagcgacagaagacagcccaacatcagcgaccagcaggtgagcgccctgagctacagcgaccagatccagcagcccctgaccaaccaggtgatgcccgacatcgtgatgctgcagagaagaatgccccagaccttcagagaccccgccaccgcccccctgagaaagctgagcgtggacctgatcaagacctacaagcacatcaacgaggtgtactacgccaagaagaagagaagacaccagcagggccagggcgacgacagcagccacaagaaggagagaaaggtgtacaacgacggctacgacgacgacaactacgactacatcgtgaagaacggcgagaagtggatggacagatacgagatcgacagcctgatcggcaagggcagcttcggccaggtggtgaaggcctacgacagagtggagcaggagtgggtggccatcaagatcatcaagaacaagaaggccttcctgaaccaggcccagatcgaggtgagactgctggagctgatgaacaagcacgacaccgagatgaagtactacatcgtgcacctgaagagacacttcatgttcagaaaccacctgtgcctggtgttcgagatgctgagctacaacctgtacgacctgctgagaaacaccaacttcagaggcgtgagcctgaacctgaccagaaagttcgcccagcagatgtgcaccgccctgctgttcctggccacccccgagctgagcatcatccactgcgacctgaagcccgagaacatcctgctgtgcaaccccaagagaagcgccatcaagatcgtggacttcggcagcagctgccagctgggccagagaatctaccagtacatccagagcagattctacagaagccccgaggtgctgctgggcatgccctacgacctggccatcgacatgtggagcctgggctgcatcctggtggagatgcacaccggcgagcccctgttcagcggcgccaacgaggtggaccagatgaacaagatcgtggaggtgctgggcatcccccccgcccacatcctggaccaggcccccaaggccagaaagttcttcgagaagctgcccgacggcacctggaacctgaagaagaccaaggacggcaagagagagtacaagccccccggcaccagaaagctgcacaacatcctgggcgtggagaccggcggccccggcggcagaagagccggcgagagcggccacaccgtggccgactacctgaagttcaaggacctgatcctgagaatgctggactacgaccccaagaccagaatccagccctactacgccctgcagcacagcttcttcaagaagaccgccgacgagggcaccaacaccagcaacagcgtgagcaccagccccgccatggagcagagccagagcagcggcaccaccagcagcaccagcagcagcagcggcgccagcgccatcagctgcagcagctggctggtgagacactag

SEQ ID NO: 233700 - DNA, 396 bp, Artificial Sequence
  derived and/or modified sequence
atgcacaccggcggcgagaccagcgcctgcaagcccagcagcgtgagactggcccccagcttcagcttccacgccgccggcctgcagatggccggccagatgccccacagccaccagtacagcgacagaagacagcccaacatcagcgaccagcaggtgagcgccctgagctacagcgaccagatccagcagcccctgaccaaccaggtgatgcccgacatcgtgatgctgcagagaagaatgccccagaccttcagagaccccgccaccgcccccctgagaaagctgagcgtggacctgatcaagacctacaagcacatcaacgaggtgtactacgccaagaagaagagaagacaccagcagggccagggcgacgacagcagccacaagaagtag

SEQ ID NO: 233701 - DNA, 141 bp, Artificial Sequence
  derived and/or modified sequence
atgcacaccggcggcgagaccagcgcctgcaagcccagcagcgtgagactggcccccagcttcagcttccacgccgccggcctgcagatggccggccagatgccccacagccaccagtacagcgacagaagacagccctag

SEQ ID NO: 233702 - DNA, 1590 bp, Artificial Sequence
  derived and/or modified sequence
atgcatacaggaggagagacttcagcatgcaaaccttcatctgttcggcttgcaccgtcattttcattccatgctgctggccttcagatggctggacagatgccccattcacatcagtacagtgaccgtcgccagccaaacataagtgaccaacaggtttctgccttatcatattctgaccagattcagcaacctctaactaaccaggtgatgcctgatattgtcatgttacagaggcggatgccccaaaccttccgtgacccagcaactgctcccctgagaaaactttctgttgacttgatcaaaacatacaagcatattaatgaggtttactatgcaaaaaagaagcgaagacaccaacagggccagggagacgattctagtcataagaaggaacggaaggtttacaatgatggttatgatgatgataactatgattatattgtaaaaaacggagaaaagtggatggatcgttacgaaattgactccttgataggcaaaggttcctttggacaggttgtaaaggcatatgatcgtgtggagcaagaatgggttgccattaaaataataaagaacaagaaggcttttctgaatcaagcacagatagaagtgcgacttcttgagctcatgaacaaacatgacactgaaatgaaatactacatagtgcatttgaaacgccactttatgtttcgaaaccatctctgtttagtttttgaaatgctgtcctacaacctctatgacttgctgagaaacaccaatttccgaggggtctctttgaacctaacacgaaagtttgcgcaacagatgtgcactgcactgcttttccttgcgactccagaacttagtatcattcactgtgatctaaaacctgaaaatatccttctttgtaaccccaaacgcagtgcaatcaagatagttgactttggcagttcttgtcagttggggcagaggatataccagtatattcagagtcgcttttatcggtctccagaggtgctactgggaatgccttatgaccttgccattgatatgtggtccctcgggtgtattttggttgaaatgcacactggagaacctctgttcagtggtgccaatgaggtagatcagatgaataaaatagtggaagttctgggtattccacctgctcatattcttgaccaagcaccaaaagcaagaaagttctttgagaagttgccagatggcacttggaacttaaagaagaccaaagatggaaaacgggagtacaaaccaccaggaacccgtaaacttcataacattcttggagtggaaacaggaggacctggtgggcgacgtgctggggagtcaggtcatacggtcgctgactacttgaagttcaaagacctcattttaaggatgcttgattatgaccccaaaactcgaattcaaccttattatgctctgcagcacagtttcttcaagaaaacagctgatgaaggtacaaatacaagtaatagtgtatctacaagccccgccatggagcagtctcagtcttcgggcaccacctccagtacatcgtcaagctcaggtgcgtcagcaatttcctgctcctcttggttggtcaggcactga

SEQ ID NO: 233703 - DNA, 519 bp, Artificial Sequence
  derived and/or modified sequence
gctgagactcaccggaggaagcggcgcgagcgccccgccatcgtcccgtgttatagttttgccgctggactcttccctcccttcccccaccccatcaggatgatatgagacttgaaagaagacgatgcatacaggaggagagacttcagcatgcaaaccttcatctgttcggcttgcaccgtcattttcattccatgctgctggccttcagatggctggacagatgccccattcacatcagtacagtgaccgtcgccagccaaacataagtgaccaacaggtttctgccttatcatattctgaccagattcagcaacctctaactaaccaggtgatgcctgatattgtcatgttacagaggcggatgccccaaaccttccgtgacccagcaactgctcccctgagaaaactttctgttgacttgatcaaaacatacaagcatattaatgaggtttactatgcaaaaaagaagcgaagacaccaacagggccagggagacgattctagtcataagaagga

SEQ ID NO: 233704 - DNA, 338 bp, Artificial Sequence
  derived and/or modified sequence
gctgagactcaccggaggaagcggcgcgagcgccccgccatcgtcccggatctcaccctgttgcccaggctggagtgcagtggcatgatcagggctcactgcagccttgacttcctggaatcagtgttatagttttgccgctggactcttccctcccttcccccaccccatcaggatgatatgagacttgaaagaagacgatgcatacaggaggagagacttcagcatgcaaaccttcatctgttcggcttgcaccgtcattttcattccatgctgctggccttcagatggctggacagatgccccattcacatcagtacagtgaccgtcgccagcca

SEQ ID NO: 233705 - protein, 295 aa, Artificial Sequence
  derived and/or modified sequence
MGKRGRPRKEARCEGAGLAPAAPPAVPPAVAAPQPPALPEDPAGAKPRCPFSDIFNTSENSMEKHINTFLQNVQILLEAASYLEQIEKENKKCEHGYASSFPSMPSPRLQHSKPPRRLSRAQKHSSGSSNTSTANRSTHNELEKNRRAHLRLCLERLKVLIPLGPDCTRHTTLGLLNKAKAHIKKLEEAERKSQHQLENLEREQRFLKWRLEQLQGPQEMERIRMDSIGSTISSDRSDSEREEIEVDVESTEFSHGEVDNISTTSISDIDDHSSLPSIGSDEGYSSASVKLSFTS

SEQ ID NO: 233706 - protein, 192 aa, Artificial Sequence
  derived and/or modified sequence
MPSPRLQHSKPPRRLSRAQKHSSGSSNTSTANRSTHNELEKNRRAHLRLCLERLKVLIPLGPDCTRHTTLGLLNKAKAHIKKLEEAERKSQHQLENLEREQRFLKWRLEQLQGPQEMERIRMDSIGSTISSDRSDSEREEIEVDVESTEFSHGEVDNISTTSISDIDDHSSLPSIGSDEGYSSASVKLSFTS

SEQ ID NO: 233707 - protein, 226 aa, Artificial Sequence
  derived and/or modified sequence
MGKRGRPRKEARCEGAGLAPAAPPAVPPAVAAPQPPALPEDPAGAKPRCPFSDIFNTSENSMEKHINTFLQNVQILLEAASYLEQIEKENKKCEHGYASSFPSMPSPRLQHSKPPRRLSRAQKHSSGSSNTSTANRRAHLRLCLERLKVLIPLGPDCTRHTTLGLLNKAKAHIKKLEEAERKSQHQLENLEREQRFLKWRLEQLQGPQEMERIRMDSIGSTISSDR

SEQ ID NO: 233708 - DNA, 888 bp, Artificial Sequence
  derived and/or modified sequence
atgggcaagcggggtcgaccaaggaaggaagcacggtgcgagggcgctgggcttgcacctgctgctccgcctgcagtgccaccagcggttgctgctcctcaacctcctgccctaccggaggaccctgctggggcaaaacccagatgtcctttttctgacatctttaatacgtcagaaaattctatggagaaacatatcaacacttttttgcagaatgttcagatcttactcgaggcagcttcctatctcgaacagattgagaaagagaataagaagtgtgagcacggatacgcatcctctttcccttccatgcctagcccccgactgcagcactcaaaaccacctaggagattatctcgcgcccagaagcacagctccgggtctagcaatactagtactgctaaccggtccacacataatgaactggaaaagaatcgcagagcacatcttcgcctgtgcctcgagagactgaaggtgcttattcccctgggccccgactgcactaggcatacaacactgggcctgctcaacaaggccaaagctcacattaaaaagctcgaggaagccgaacggaagtcacagcatcagctggaaaacttagagcgagaacagcgattcctgaagtggcgcctcgagcagcttcaaggcccccaggagatggaacggatccgaatggactcgataggctcaacaatatccagcgacagaagcgactccgagcgggaggagatagaagttgatgtagaatccaccgaattcagtcacggcgaggtcgataatatttccacaacttcaatcagcgatattgatgatcattcgtctctccctagcatcggttctgacgagggctactcctctgcctctgtgaagcttagttttactagctag

SEQ ID NO: 233709 - DNA, 681 bp, Artificial Sequence
  derived and/or modified sequence
atgggcaaacgagggcgaccaagaaaagaagcgcgatgcgaaggcgcaggcctggcgccggccgcgccgcccgccgtgccccccgcggttgccgcgcctcagcctcctgcgctgcccgaggatccagcgggcgcgaagccaagatgcccctttagcgatatctttaatactagtgagaactccatggagaaacatatcaataccttcttgcaaaatgttcaaatcctcctggaggcagcttcttacttagagcaaattgagaaagaaaacaaaaagtgtgagcatgggtacgcctcttcttttccctctatgccatccccacgattgcagcattctaagccaccccggcgcctgtcgagggctcagaaacattcctctggatccagcaacacatcgacagcaaataggcgagctcatttgagattgtgtctcgaacgacttaaggtgctgattcctctcggtcccgactgcacgaggcataccacccttggcctcctgaataaagccaaggctcatattaaaaagttagaggaggcagaacgtaagtctcaacatcagttggaaaacctggaaagggaacagcgctttcttaaatggaggctcgagcagctgcaaggccctcaggaaatggagcggatccgcatggacagcatcggctctactatcagttctgatagatag

SEQ ID NO: 233710 - DNA, 888 bp, Artificial Sequence
  derived and/or modified sequence
atgggcaagaggggccggcccaggaaggaggcccgctgtgagggcgccggcctggccccagctgcccctcctgctgtgcccccagctgtggccgccccccagcccccagccctgcctgaggaccctgctggggccaagccccgctgccccttcagtgacatcttcaacaccagtgaaaattccatggagaagcacatcaacaccttcctgcagaatgtgcagatcctgctggaggccgccagctacctggagcagatcgagaaggagaacaagaagtgtgaacatggctacgccagcagcttccccagcatgcccagcccccggctgcagcacagcaagccaccccggcggctgagccgggcccagaagcacagcagcggcagcagcaacaccagcacagccaacagaagcacccacaatgagctggagaagaacagaagagcccacctgcggctgtgcctggagcggctgaaggtgctgatccccctgggccctgactgcaccaggcacaccaccctgggcctgctgaacaaggccaaggcccacatcaagaagctggaggaggccgagaggaagagccagcaccagctggagaacctggagcgggagcagcgcttcctgaagtggaggctggagcagctgcagggcccccaggagatggagcgcatccgcatggacagcatcggcagcaccatcagcagtgacagaagtgacagcgagcgggaggagattgaggtggatgtggagagcacagagttcagccatggagaggtggacaacatcagcaccaccagcatcagtgacattgatgaccacagcagcctgcccagcatcggcagtgatgagggctacagcagcgcctctgtgaagctgtccttcaccagctag

SEQ ID NO: 233711 - DNA, 681 bp, Artificial Sequence
  derived and/or modified sequence
atgggcaagaggggccggcccaggaaggaggcccgctgtgagggcgccggcctggccccagctgcccctcctgctgtgcccccagctgtggccgccccccagcccccagccctgcctgaggaccctgctggggccaagccccgctgccccttcagtgacatcttcaacaccagtgaaaattccatggagaagcacatcaacaccttcctgcagaatgtgcagatcctgctggaggccgccagctacctggagcagatcgagaaggagaacaagaagtgtgaacatggctacgccagcagcttccccagcatgcccagcccccggctgcagcacagcaagccaccccggcggctgagccgggcccagaagcacagcagcggcagcagcaacaccagcacagccaacagaagagcccacctgcggctgtgcctggagcggctgaaggtgctgatccccctgggccctgactgcaccaggcacaccaccctgggcctgctgaacaaggccaaggcccacatcaagaagctggaggaggccgagaggaagagccagcaccagctggagaacctggagcgggagcagcgcttcctgaagtggaggctggagcagctgcagggcccccaggagatggagcgcatccgcatggacagcatcggcagcaccatcagcagtgacagatag

SEQ ID NO: 233712 - DNA, 3470 bp, Artificial Sequence
  derived and/or modified sequence
atacacacagactcacagcgagaccgacacacactcccatacactcacacacacaactgcaggcagcgaggctcgggaagtcaggccggcttttcgccccggcgccttctctgctccagccggccgggtctccctgggggcccggagctcggccgggccgcgcagccccgttagaggacgagctcggcggacccccgctcctccatgggcaaacgcgggcggccgcgcaaggaggcgcgctgcgagggcgcggggctggcccccgccgcgcccccggctgtgccccccgccgtggccgcgccccagcccccggccctgcccgaggaccccgctggggccaagcccaggtgccccttctcagacattttcaacaccagcgagaactcgatggagaagcacatcaacacttttctgcagaacgtgcagattctgctcgaggccgccagctacctggagcagatcgagaaagaaaacaaaaagtgtgaacatggctacgcctcttcattcccgtccatgccgagcccccgactgcagcattcaaagcccccacggaggttgagccgggcacagaaacacagcagcgggagcagcaacaccagcactgccaacagatctacacacaatgagctggaaaagaatcgacgagctcatctgcgcctttgtttagaacgcttaaaagttctgattccactaggaccagactgcacccggcacacaacacttggtttgctcaacaaagccaaagcacacatcaagaaacttgaagaagctgaaagaaaaagccagcaccagctcgagaatttggaacgagaacagagatttttaaagtggcgactggaacagctgcagggtcctcaggagatggaacgaatacgaatggacagcattggatcaactatttcttcagatcgttctgattcagagcgagaggagattgaagtggatgttgaaagcacagagttctcccatggagaagtggacaatataagtaccaccagcatcagtgacattgatgaccacagcagcctgccgagtattgggagtgacgagggttactccagtgccagtgtcaaactttcattcacttcatagaacccagcatgacataacagtgcagggcaaaatattcactgggccaattcaatacaaacaatctcttaaattgggttcatgatgcagtctcctctttaaaacaaaacaaaacaaaacaaaactatacttgaacaaaagggtcagaggacctgtatttaagcaaatacttagcaaaaagtggggcagagcctcccaaggagaacaaatattcagaatattcatattggaaaaatcacaatttttaatggcagcagaaaacttgtgtgaaattttcttgatttgagttgattgagaagaggacattggagatgccatcctctttctcttttctagtttgctcatactacattgagtagacacatttaaggatggggttatgaacccttcctgagctttatggtcctaaaagcaaaataaaaactattcgaatgaaaagacaagaaaatcaggtattaatcttggatagctaataatgagctattaaaactcagcctgggacagtttatcatgaagcctgtggatgatcaatcctttattattattttttttttttgaaaaaagctcatttcatgctctgcaaaaggagagactcccatgaagccttttgaaagggatcatcatgcagctcaactttctgttggattccatgctaagcaagctaaccttatcctgcattgttagcactaggcacccagctgccacctctccatcctgctgcccttaggccacatgggagcagtccatgcatgacagcctctatcctacaaggcctatgagtatggattgggggggccaaaaggaaaaagctccatgtgcctctttgtctgcgtgggtcagaagagttgtgcacgcagattagcaggccaaggtctgagccacagcagcatttttatttcagattttgataactgtttatatgtgttgaaaaccaaaatgacatctttttaaagcttatccataaaaaaaaatagatgtcttttatagtggaaaaacacatggggaaaaaaatcatctattttgatgcagcatttgataatgataaaacacctcacacctcactctttatagtgcacaaaatgaatgaggtctgggctaggtagaaaaagggtcaatgctatttttgtttttagaatcattaccttttaccagcttttaaccatctgatatctatagtagacacactatcatagttaacatagtaagttcagcacttgtctcattttaatgtaaagatttgcttccattttcctacaggcagtctctctcttcctcacagtcccactgtgcaggtgctattgttactcttacgaatattttcagtaatgttattttcttctaagtgaaatttctagcctgcactttgatgtcatgtgttccctttgtctttcaaactccaaggttcccttgtggccctctcccttaccctgggaaggcctcttggagaccttacccctggctgtttggactttgtatactttaaataatttaactacccttaattacttaaaaaaaaaaaaaagctttatgattttcataacttattgctgattttaatggattgttaatttcagtcctgtagttttattttatgtttagatagggctgggcaaggaaaaagaaaataaagacaaccatatttagcagtgcagttgagttgtgtgttaatgttagactatccctttgtgagtgacactttaacagcattcactgcttctatatatagtgtaccatcttggtcatacattacgcctcaacatatacttgtgctcttcctttgcctccagaagaagtttttccttgattgtgctatgtttcagtggaagaaattctttgaagtagatgtgagtgaaaaactgcatgcctttagaagcccagtatcagaacttgctacgtttcaggtgctagggacttaatgaaaaacaggacaaaacaattcctttttgtggcccaggtaaattatttctggtttcacttataattactaatggctgagtcaagatgttgtctctgtgtttgcttactcttgatcaagtgtgagacagtttgaagactgtgctaccatacaaagtgaatgaagccagtgactaagcttctgtttgttttgttattctcatggccttcgcttgcattatttgggccttcattcagatgaacttgaggtgccattttgttgcatatgtacaggattatgggctggaaagcatttgttataaacctatagtgcacattttaactgccccctaaattacccttccctgggtttgttttccttggggtggtgtagattgtatgagtaagaagtattaattttttaaaagacaaatcaactttgaagacacaaaagttaattggaagaaataaaaactgtgaacgaagaa

SEQ ID NO: 233713 - DNA, 803 bp, Artificial Sequence
  derived and/or modified sequence
gtcaggccggcttttcgccccggcgccttctctgctccagccggccgggtctccctgggggcccggagctcggccgggccgcgcagccccgttagaggacgagctcggcggacccccgctcctccatgggcaaacgcgggcggccgcgcaaggaggcgcgctgcgagggcgcggggctggcccccgccgcgcccccggctgtgccccccgccgtggccgcgccccagcccccggccctgcccgaggaccccgctggggccaagcccaggtgccccttctcagacattttcaacaccagcgagaactcgatggagaagcacatcaacacttttctgcagaacgtgcagattctgctcgaggccgccagctacctggagcagatcgagaaagaaaacaaaaagtgtgaacatggctacgcctcttcattcccgtccatgccgagcccccgactgcagcattcaaagcccccacggaggttgagccgggcacagaaacacagcagcgggagcagcaacaccagcactgccaacagacgagctcatctgcgcctttgtttagaacgcttaaaagttctgattccactaggaccagactgcacccggcacacaacacttggtttgctcaacaaagccaaagcacacatcaagaaacttgaagaagctgaaagaaaaagccagcaccagctcgagaatttggaacgagaacagagatttttaaagtggcgactggaacagctgcagggtcctcaggagatggaacgaatacgaatggacagcattggatcaactatttcttcagatcgt

SEQ ID NO: 233714 - DNA, 888 bp, Artificial Sequence
  derived and/or modified sequence
atgggcaagcggggccggccccggaaggaggcccggtgcgagggcgccggactggcaccagctgctccccccgcggtgccacccgccgtggccgctccacagcctcccgctctccccgaggaccccgctggagcaaagcctaggtgtcccttttctgatatttttaatacaagtgagaattccatggagaaacatatcaatacattccttcagaatgtacagattctcctggaggctgcttcatacttagagcaaatcgagaaagagaataagaaatgcgagcatggatatgctagtagctttccctccatgccgtctccgcgactccagcatagtaagcctccacggagattgagcagggcccaaaagcacagtagcggcagttccaacacaagcacagcgaatcgaagcactcataacgagttggagaaaaatagacgcgcgcaccttagactgtgtctagaacgcctcaaagtcctgataccactgggaccagattgtacccgccacaccaccctcggattactgaacaaggccaaggctcatatcaagaagctggaggaggcagagcgcaagagccaacaccagttggagaacctcgaaagagagcagagattcctgaaatggcgccttgaacagttgcagggaccccaagagatggaacggatccgcatggactctataggatctacgataagtagcgaccgctcagattccgagagagaggagatcgaggtggacgttgagtccactgagttcagtcacggcgaagttgataacattagtaccacgagtatttcggacatcgacgaccactcctcacttccatctatcgggtccgatgagggatacagctcggctagcgtcaaactgtcattcacttcctag

SEQ ID NO: 233715 - DNA, 681 bp, Artificial Sequence
  derived and/or modified sequence
atgggcaagcggggccggccccggaaggaggcccggtgcgagggcgccgggctggcgccggcagccccgcctgctgtccctcccgccgtcgctgctccccagccacctgcccttcccgaggatccagctggcgcaaagccccggtgccctttctcagatattttcaataccagcgagaacagcatggaaaagcacattaacacctttctccagaacgtgcagatcctcctggaggccgccagctatctagaacaaatcgagaaagagaacaaaaaatgtgaacatggttacgcttcttcgttcccttccatgccatctcccagattgcaacatagcaaaccacctagaagactgtcacgagcccagaagcactcaagcggatccagtaacacatcaacggccaatcggcgtgcccacctgaggttatgtcttgagcgccttaaggtgctgatcccactggggccggactgtacccggcataccaccttgggcctgctgaataaagccaaagctcatattaagaagcttgaggaggcggagcgaaagagccaacaccagctagagaacctcgagagagaacagagattcctgaagtggcgcttagagcagctgcaggggccgcaggaaatggaacggatcagaatggacagtatcggcagcactatctccagtgatcggtag

SEQ ID NO: 233716 - DNA, 888 bp, Artificial Sequence
  derived and/or modified sequence
atgggaaagagggggaggccgaggaaggaggcgcgttgcgagggggctggacttgctccggctgctccacccgctgtgccccctgcggtcgctgccccacagccccctgcactgcccgaagatcctgccggagcaaaaccccgttgtccatttagcgatatttttaatacctccgagaactccatggagaaacacattaacactttcttgcagaacgtccagattcttctggaggcagccagctatttggagcagatcgagaaagaaaataaaaagtgtgagcatggctacgccagttcctttccatccatgccttcccctagactgcaacacagcaagccacctcgccgactgagtagggcgcagaagcattcctcagggtcatccaacacatctactgcaaaccgaagcacccacaacgaactcgaaaaaaatagaagagctcatttacggctgtgccttgagcggctgaaggtcctaatcccgctcggacccgattgcaccaggcacacaacattgggcctgctgaacaaggccaaggcccacattaaaaaactagaagaagccgagaggaagagccagcatcagttagaaaaccttgaaagggaacagagattcctgaagtggaggctggaacagcttcagggaccccaggagatggagcggatcaggatggacagcattggttcgactatctcctctgatcgcagcgacagcgaacgcgaagagattgaagtagatgtggagtcaactgagttctcccacggagaggtagataatataagcactacctcgatatcggatattgatgatcactcttcattgccctctatcgggagcgatgaagggtatagctccgcaagcgtgaagctctcgtttactagctag

SEQ ID NO: 233717 - DNA, 681 bp, Artificial Sequence
  derived and/or modified sequence
atgggtaagagaggccgtccgcgtaaggaagcgagatgtgaaggggctgggttagctcccgctgcccctccggcagtcccccctgccgtggccgctccccagcctcctgcattgcccgaagaccccgcaggcgctaaacctaggtgccctttcagtgacatttttaacacaagcgagaactccatggaaaagcacatcaacactttcctccagaatgtgcagatcctgcttgaggccgctagctatttagaacagatcgagaaagaaaacaagaagtgcgaacacggttatgcatccagcttcccttccatgccttctcctcgcttgcagcactccaaacctcccaggaggcttagtcgcgctcagaagcacagcagcggctccagtaacaccagcacggccaaccgccgtgcacacctgagactgtgtctcgagcgacttaaagtcctcatacccctcgggcctgactgcactaggcacacaaccctcgggctacttaacaaagccaaggcccatatcaaaaaactggaggaagccgagaggaagagtcaacaccagctggagaacctcgagcgggagcaaagatttctgaaatggaggctagagcagcttcagggtcctcaagagatggagcgcatccgaatggatagcattgggtctaccattagcagcgacagatag

SEQ ID NO: 233718 - DNA, 888 bp, Artificial Sequence
  derived and/or modified sequence
atgggcaagagaggcagacccagaaaggaggccagatgcgagggcgccggcctggcccccgccgccccccccgccgtgccccccgccgtggccgccccccagccccccgccctgcccgaggaccccgccggcgccaagcccagatgccccttcagcgacatcttcaacaccagcgagaacagcatggagaagcacatcaacaccttcctgcagaacgtgcagatcctgctggaggccgccagctacctggagcagatcgagaaggagaacaagaagtgcgagcacggctacgccagcagcttccccagcatgcccagccccagactgcagcacagcaagccccccagaagactgagcagagcccagaagcacagcagcggcagcagcaacaccagcaccgccaacagaagcacccacaacgagctggagaagaacagaagagcccacctgagactgtgcctggagagactgaaggtgctgatccccctgggccccgactgcaccagacacaccaccctgggcctgctgaacaaggccaaggcccacatcaagaagctggaggaggccgagagaaagagccagcaccagctggagaacctggagagagagcagagattcctgaagtggagactggagcagctgcagggcccccaggagatggagagaatcagaatggacagcatcggcagcaccatcagcagcgacagaagcgacagcgagagagaggagatcgaggtggacgtggagagcaccgagttcagccacggcgaggtggacaacatcagcaccaccagcatcagcgacatcgacgaccacagcagcctgcccagcatcggcagcgacgagggctacagcagcgccagcgtgaagctgagcttcaccagctag

SEQ ID NO: 233719 - DNA, 681 bp, Artificial Sequence
  derived and/or modified sequence
atgggcaagagaggcagacccagaaaggaggccagatgcgagggcgccggcctggcccccgccgccccccccgccgtgccccccgccgtggccgccccccagccccccgccctgcccgaggaccccgccggcgccaagcccagatgccccttcagcgacatcttcaacaccagcgagaacagcatggagaagcacatcaacaccttcctgcagaacgtgcagatcctgctggaggccgccagctacctggagcagatcgagaaggagaacaagaagtgcgagcacggctacgccagcagcttccccagcatgcccagccccagactgcagcacagcaagccccccagaagactgagcagagcccagaagcacagcagcggcagcagcaacaccagcaccgccaacagaagagcccacctgagactgtgcctggagagactgaaggtgctgatccccctgggccccgactgcaccagacacaccaccctgggcctgctgaacaaggccaaggcccacatcaagaagctggaggaggccgagagaaagagccagcaccagctggagaacctggagagagagcagagattcctgaagtggagactggagcagctgcagggcccccaggagatggagagaatcagaatggacagcatcggcagcaccatcagcagcgacagatag

SEQ ID NO: 233720 - protein, 213 aa, Artificial Sequence
  derived and/or modified sequence
MVPEEEPQDREKGLWWFQLKVWSMAVVSILLLSVCFTVSSVVPHNFMYSKTVKRLSKLREYQQYHPSLTCVMEGKDIEDWSCCPTPWTSFQSSCYFISTGMQSWTKSQKNCSVMGADLVVINTREEQDFIIQNLKRNSSYFLGLSDPGGRRHWQWVDQTPYNENVTFWHSGEPNNLDERCAIINFRSSEEWGWNDIHCHVPQKSICKMKKIYI

SEQ ID NO: 233721 - DNA, 642 bp, Artificial Sequence
  derived and/or modified sequence
atggtgccggaggaggagcctcaggaccgggagaaaggcctatggtggttccaactgaaagtctggagtatggcagtggttagcatcctcttgctgagtgtgtgctttaccgtctcctccgtggtcccgcacaactttatgtacagcaagaccgttaagcgcctcagtaaactgcgcgaataccagcagtaccacccgagcctgacatgtgtcatggagggcaaagacattgaggattggagctgctgtccaaccccttggacctcattccagagctcttgctatttcatttcaaccgggatgcaatcatggacaaaaagccagaagaattgctctgtcatgggagcggatttggtggtaataaacactagagaagagcaagatttcattattcagaatctgaaacgcaactcttcctattttctgggccttagcgaccccggtggacgccgtcactggcaatgggtggaccagactccctataatgagaacgtaacgttttggcactctggcgaaccaaacaatctggatgaaagatgcgcgataattaattttaggagctccgaggaatgggggtggaatgacatccattgccatgtcccacagaaatccatatgcaaaatgaaaaagatctacatctag

SEQ ID NO: 233722 - DNA, 642 bp, Artificial Sequence
  derived and/or modified sequence
atggtcccagaagaagaaccccaagatcgggaaaagggtctctggtggtttcagctgaaagtttggagcatggccgtggtgtccattttgttgctctcggtctgtttcacagtaagttctgtggtacctcataatttcatgtattctaagactgtgaaaaggctctccaagttgcgggaataccagcagtatcatccttctctcacatgtgtgatggagggcaaggatatagaagattggtcatgctgccccactccctggacatcttttcaatcttcatgttatttcatttccacaggaatgcagtcgtggactaaatctcagaagaactgtagcgtcatgggggccgatctggtcgtaatcaatacccgtgaggagcaggatttcatcatccagaacttaaagagaaactcatcttatttcctgggcctctcggaccccggaggccgccgacattggcagtgggtggaccaaacgccatataatgaaaacgtgacattctggcattctggagaaccaaataatctcgacgaacgctgcgctatcattaactttcgctcaagcgaggagtggggttggaacgacatacactgccatgtccctcagaagagcatctgcaagatgaagaagatttacatctag

SEQ ID NO: 233723 - DNA, 642 bp, Artificial Sequence
  derived and/or modified sequence
atggtgcctgaggaggagccccaggaccgggagaagggcctgtggtggttccagctgaaggtgtggagcatggctgtggtgtccatcctgctgctgtctgtgtgcttcaccgtgtcctctgtggtgccccacaacttcatgtacagcaagacagtgaagaggctgagcaagctgcgggagtaccagcagtaccaccccagcctgacctgtgtgatggagggcaaggacatcgaggactggagctgctgccccaccccctggaccagcttccagagcagctgctacttcatcagcacaggcatgcagagctggaccaagagccagaagaactgcagcgtgatgggcgctgacctggtggtgatcaacacccgggaggagcaggacttcatcatccagaacctgaagaggaacagcagctacttcctgggcctgagtgaccccggcggccgccgccactggcagtgggtggaccagaccccctacaatgaaaatgtgaccttctggcacagcggggagcccaacaacctggatgagcgctgtgccatcatcaacttccgcagcagcgaggagtggggctggaatgacatccactgccacgtgccccagaagagcatctgcaagatgaagaagatctacatctag

SEQ ID NO: 233724 - DNA, 642 bp, Artificial Sequence
  derived and/or modified sequence
atggtgcccgaggaggagccccaggaccgggagaagggcctgtggtggtttcagctaaaggtgtggtctatggccgttgtgtcaattctcttgttgagcgtgtgtttcaccgtgagttccgttgtcccccacaactttatgtattcaaagaccgttaagagattgtctaagcttcgggaatatcagcagtaccatccctcgttaacttgtgtgatggaagggaaagatatcgaggactggtcatgttgccccactccctggacaagctttcaaagttcttgctatttcatctcaaccggcatgcagagttggaccaaaagtcagaagaattgttccgtgatgggcgccgacctagtggtgattaacaccagggaggagcaggactttattattcagaatctgaagaggaacagctcctatttccttgggctttctgatccaggcggtaggcgccactggcagtgggtcgatcagacgccatacaatgagaacgttactttctggcatagcggtgaaccaaacaatctagatgagcgctgcgccattatcaattttaggagtagcgaagagtggggatggaatgatatccattgccacgtgcctcagaaatccatctgcaagatgaagaaaatttatatctag

SEQ ID NO: 233725 - DNA, 642 bp, Artificial Sequence
  derived and/or modified sequence
atggtgcccgaggaggagccccaggaccgggagaagggcctgtggtggttccagttgaaagtgtggtctatggccgtcgtgtccattctgctcttgtctgtgtgcttcacagttagctctgtagttccgcataatttcatgtactctaaaaccgtgaagcgcctctccaagctgcgggagtatcaacagtatcatccaagtctgacatgtgttatggaaggaaaagacatcgaagactggagttgttgtcctacaccctggacttcattccagagcagttgctactttatcagcactggcatgcagtcttggaccaaaagccagaagaactgcagcgtgatgggggccgacctagttgtgataaacactcgcgaggaacaagatttcataatccagaatctaaaacgaaattcctcatactttctgggtcttagcgatccagggggtcggcggcactggcaatgggtggaccagacgccatataatgagaatgtgaccttttggcatagtggggaacccaacaatcttgacgaaaggtgtgccatcatcaatttccggtcctccgaggagtggggttggaatgacattcactgtcacgtcccacaaaaaagcatatgcaagatgaagaagatctatatctag

SEQ ID NO: 233726 - DNA, 642 bp, Artificial Sequence
  derived and/or modified sequence
atggtccctgaagaggagccccaggaccgcgagaaaggtctgtggtggttccaacttaaagtttggtctatggccgtcgtgagcatactgctgttgagcgtttgttttactgtgtcctccgtggtacctcataattttatgtatagtaagacggtgaagagacttagtaagctacgggagtaccagcaataccaccctagcttgacctgcgtgatggaagggaaagatatcgaggactggagctgctgccccacaccatggacaagctttcagtcaagctgctatttcatttctacgggtatgcaaagctggactaagagccaaaaaaattgttcagtcatgggtgccgatctggtggtcattaatacccgggaggagcaggatttcattatacagaacctcaagcgcaatagcagttacttcctggggctgagtgacccgggaggcaggcggcactggcaatgggtagaccaaaccccctacaatgagaacgtgacattttggcatagcggcgagccaaacaatttagacgaaagatgtgcaattataaacttccggagcagcgaggaatgggggtggaacgacattcattgtcacgtgccgcaaaagtccatctgtaagatgaagaagatttatatctag

SEQ ID NO: 233727 - DNA, 642 bp, Artificial Sequence
  derived and/or modified sequence
atggtgcccgaggaggaaccacaggatagggagaagggactgtggtggttccagctgaaagtgtggtctatggccgtggttagcatattgctgctgtccgtttgcttcacagtatcgtcagtcgtgccccacaattttatgtactccaagacagtgaaacgtttgagcaagctacgcgagtaccagcagtaccatccatcactgacatgtgttatggaaggtaaagatatcgaggactggagctgctgtcccacaccctggaccagttttcagagctcctgctattttattagtaccggaatgcagagctggactaagagtcaaaaaaattgctcggtgatgggcgctgaccttgtcgttataaacacgcgggaagagcaggatttcataatccaaaatctgaagcggaattcttcttacttcctcggcctatccgatcctggcggtaggaggcactggcagtgggtcgatcagactccttacaacgagaatgtgacgttttggcacagcggtgagcctaataacctagacgaaagatgcgccatcatcaatttcagatcaagtgaagagtggggatggaatgatatccactgtcatgtgccgcagaaatccatctgcaaaatgaagaaaatctatatttag

SEQ ID NO: 233728 - DNA, 970 bp, Artificial Sequence
  derived and/or modified sequence
actgcagagtctcctaagtcacatctcttcctttgcaagagtaggcgaagaaggatctaagggcttggcttgtttgaaagaaccacaccccgaaagtaacatctttggagaaagtgatacaagagcttctgcacccacctgatagaggaagtccaaagggtgtgcgcacacacaatggtgcctgaagaagagcctcaagaccgagagaaaggactctggtggttccagttgaaggtctggtccatggcagtcgtatccatcttgctcctcagtgtctgtttcactgtgagttctgtggtgcctcacaattttatgtatagcaaaactgtcaagaggctgtccaagttacgagagtatcaacagtatcatccaagcctgacctgcgtcatggaaggaaaggacatagaagattggagctgctgcccaaccccttggacttcatttcagtctagttgctactttatttctactgggatgcaatcttggactaagagtcaaaagaactgttctgtgatgggggctgatctggtggtgatcaacaccagggaagaacaggatttcatcattcagaatctgaaaagaaattcttcttattttctggggctgtcagatccagggggtcggcgacattggcaatgggttgaccagacaccatacaatgaaaatgtcacattctggcactcaggtgaacccaataaccttgatgagcgttgtgcgataataaatttccgttcttcagaagaatggggctggaatgacattcactgtcatgtacctcagaagtcaatttgcaagatgaagaagatctacatataaatgaaatattctccctggaaatgtgtttgggttggcatccaccgttgtagaaagctaaattgattttttaatttatgtgtaagttttgtacaaggaatgcccctaaaatgtttcagcaggctgtcacctattacacttatgatataatccattc

SEQ ID NO: 233729 - DNA, 1314 bp, Artificial Sequence
  derived and/or modified sequence
cagtgattctcgtgcctcagcctcctgagtagccgaaattacagacgtgtgccaccatgcttggctaattttttggatttttagtagagatggggtttcactatgttggccaggctagtcttgaactcctggcctgaagcaatccgcccacctcagcctcccaaagtgctgagattataggcacgagccactacacctggccacaaaattctttaaagaagccaatcccatcctccctcaagagccaaggggccacctcaccctcttgttacagcagatcctgcctcccacagtcaccctgctcccaagtgcaacctctgtctgaccctgcatggtgtgcggtgccctcctgcctcaggccgcgaagaaggatctaagggcttggcttgtttgaaagaaccacaccccgaaagtaacatctttggagaaagtgatacaagagcttctgcacccacctgatagaggaagtccaaagggtgtgcgcacacacaatggtgcctgaagaagagcctcaagaccgagagaaaggactctggtggttccagttgaaggtctggtccatggcagtcgtatccatcttgctcctcagtgtctgtttcactgtgagttctgtggtgcctcacaattttatgtatagcaaaactgtcaagaggctgtccaagttacgagagtatcaacagtatcatccaagcctgacctgcgtcatggaaggaaaggacatagaagattggagctgctgcccaaccccttggacttcatttcagtctagttgctactttatttctactgggatgcaatcttggactaagagtcaaaagaactgttctgtgatgggggctgatctggtggtgatcaacaccagggaagaacaggatttcatcattcagaatctgaaaagaaattcttcttattttctggggctgtcagatccagggggtcggcgacattggcaatgggttgaccagacaccatacaatgaaaatgtcacattctggcactcaggtgaacccaataaccttgatgagcgttgtgcgataataaatttccgttcttcagaagaatggggctggaatgacattcactgtcatgtacctcagaagtcaatttgcaagatgaagaagatctacatataaatgaaatattctccctggaaatgtgtttgggttggcatccaccgttgtagaaagctaaattgattttttaatttatgtgtaagttttgtacaaggaatgcccctaaaatgtttcagcaggctgtcacctattacacttatgatataatccattcacacattcatttattcatttattcatt

SEQ ID NO: 233730 - DNA, 642 bp, Artificial Sequence
  derived and/or modified sequence
atggtgcccgaggaggagccccaggacagagagaagggcctgtggtggttccagctgaaggtgtggagcatggccgtggtgagcatcctgctgctgagcgtgtgcttcaccgtgagcagcgtggtgccccacaacttcatgtacagcaagaccgtgaagagactgagcaagctgagagagtaccagcagtaccaccccagcctgacctgcgtgatggagggcaaggacatcgaggactggagctgctgccccaccccctggaccagcttccagagcagctgctacttcatcagcaccggcatgcagagctggaccaagagccagaagaactgcagcgtgatgggcgccgacctggtggtgatcaacaccagagaggagcaggacttcatcatccagaacctgaagagaaacagcagctacttcctgggcctgagcgaccccggcggcagaagacactggcagtgggtggaccagaccccctacaacgagaacgtgaccttctggcacagcggcgagcccaacaacctggacgagagatgcgccatcatcaacttcagaagcagcgaggagtggggctggaacgacatccactgccacgtgccccagaagagcatctgcaagatgaagaagatctacatctag

SEQ ID NO: 233731 - DNA, 744 bp, Artificial Sequence
  derived and/or modified sequence
atgcaggttgtaaaagagcaagtgatgcgggctctcaccactaagccctccagtttggatcaatttaagtcaaagctgcagaacctctcatacacagaaatactgaaaattaggcagagcgagagaatgaatcaggaggacttccagagccggccaatcctggagttaaaagagaagatccagcccgagatcctggaacttatcaagcagcagcgcctgaaccgcttagtggagggcacttgtttccggaagctgaatgcacgccggcggcaggacaaattctggtactgtcggcttagtcctaatcacaaggttcttcattacggagacctcgaggaaagcccgcagggcgaagtgccccacgattccttacaggacaagctgcctgtggccgacatcaaggcagtcgtgacaggaaaggattgtccacacatgaaagagaaaggagccctgaagcagaacaaagaggtgctggagttagcgttttctatcttatatgacagtaactgtcagctaaattttattgcgcccgacaagcatgaatattgtatctggaccgatgggctcaacgccctgctgggaaaagatatgatgtccgacctcacgaggaacgacctggatactctgttatcaatggaaataaaattgagacttctggatctggagaacattcagattcccgacgctccaccccccatccccaaagagccaagcaattacgactttgtgtacgattgtaactag

SEQ ID NO: 233732 - DNA, 744 bp, Artificial Sequence
  derived and/or modified sequence
atgcaggtggttaaagaacaggtgatgcgtgctctcactaccaagccatctagtctggaccagtttaaaagtaagctgcagaacctgagctacactgagatcctgaagatcagacagtccgagagaatgaatcaggaggatttccagtcacgacctattttggagctcaaggaaaagattcagcctgaaattctcgagctgatcaaacagcagaggctgaacagactggtggagggaacatgtttcagaaagctcaacgcaaggaggagacaggacaagttttggtactgtagattgagtcctaatcacaaagtgttacactatggtgaccttgaggagagcccccagggagaggtgccacatgacagcttgcaggacaagctgccggtggcagatattaaggcagttgtcacaggaaaagactgcccgcatatgaaggaaaagggcgccctgaaacagaacaaagaggtgctggagctggcctttagcatcctctacgactctaattgccaactgaactttattgccccagacaagcatgaatactgtatatggactgacggtcttaacgctctgctcggcaaagatatgatgtcagacttgacacggaatgacttggacactctgctttccatggagataaagttaagactgctggacttggaaaacatccaaatcccagacgctcctccgcccatcccaaaagagccttctaattacgacttcgtgtatgactgtaattag

SEQ ID NO: 233733 - DNA, 744 bp, Artificial Sequence
  derived and/or modified sequence
atgcaggtggtgaaggagcaggtgatgagggccctgaccaccaagcccagcagcctggaccagttcaagagcaagctgcagaacctgagctacacagagatcctgaagatccggcagagcgagaggatgaaccaggaggacttccagagccggcccatcctggagctgaaggagaagatccagcctgagatcctggagctgatcaagcagcagaggctgaaccggctggtggagggcacctgcttcaggaagctgaatgcccggcggcggcaggacaagttctggtactgccgcctgagccccaaccacaaggtgctgcactacggggacctggaggagagcccccagggcgaggtgccccatgacagcctgcaggacaagctgcctgtggccgacatcaaggctgtggtgacaggcaaggactgcccccacatgaaggagaagggggccctgaagcagaacaaggaggtgctggagctggccttcagcatcctgtatgacagcaactgccagctgaacttcatcgccccagacaagcatgagtactgcatctggacagatggcctgaatgccctgctgggcaaggacatgatgtctgacctgaccagaaatgacctggacaccctgctgtccatggagatcaagctgcggctgctggacctggagaacatccagatcccagatgcccccccacccatccccaaggagcccagcaactatgactttgtgtatgactgcaactag

SEQ ID NO: 233734 - DNA, 744 bp, Artificial Sequence
  derived and/or modified sequence
atgcaggtggtgaaggagcaggtgatgcgggccctgaccaccaagccaagtagcctggaccaatttaaaagcaaactgcagaacctctcttatactgagatcctgaagatcaggcagtcggagaggatgaaccaggaggactttcagtctagacctatacttgaactcaaggagaagatccagcctgagatcctggaacttattaagcaacaaagactgaatagactggtagaaggtacctgctttcggaagctgaacgctagaagacgacaggacaagttctggtactgccgattatccccaaaccacaaggtgctgcactatggagacctggaagagtcgcctcagggagaagtgccacatgatagcctgcaagataagctgcccgtggcagacattaaggccgtggtcacaggaaaggattgtccacatatgaaagagaaaggagccctgaagcagaacaaggaggttctggagctcgctttttcaatcttatatgactctaattgccagcttaatttcattgcaccagacaaacacgaatactgtatttggactgacgggcttaatgccctgctcgggaaggacatgatgtcagatctgacgcgaaacgatttggacaccttactgtcaatggagattaaattaaggttactcgatcttgagaatatccagatacctgacgccccacctcctattcccaaggagccaagtaattatgatttcgtctacgattgtaactag

SEQ ID NO: 233735 - DNA, 744 bp, Artificial Sequence
  derived and/or modified sequence
atgcaggtggtgaaggagcaggtgatgcgggccctgaccaccaagccaagctcactggaccagtttaaaagcaaactgcagaatctgagctatactgagattttaaaaattagacaatcggagagaatgaaccaggaagacttccagagccgcccgatactcgagttaaaagagaagattcagcccgaaatcctcgaattaatcaaacaacaaaggctgaaccgcctggtggaaggtacatgttttcggaagttgaatgcgaggcgcagacaggacaagttctggtactgtcggttgagtccgaatcacaaagtgctgcactacggggatctcgaggagtctccccagggcgaggtgccacacgactccctccaggacaagctgccagtggctgacattaaggctgtagtcacagggaaggattgcccccacatgaaagagaaaggggccctgaagcagaacaaggaagtgctggaactcgccttctcgatcctttatgacagtaactgccaactgaatttcatcgcacccgacaagcacgagtattgcatttggaccgatgggttgaacgcactgttggggaaggacatgatgtctgacctcacaaggaacgacttagacacactgttatcgatggagatcaaattgcggctgctggatttggagaacatccagattccagacgccccccctcctatccccaaagagcctagcaactacgacttcgtgtacgactgcaactag

SEQ ID NO: 233736 - DNA, 744 bp, Artificial Sequence
  derived and/or modified sequence
atgcaagtggtgaaagagcaggttatgcgggctctcaccacaaagccctccagcctcgatcagtttaagagcaagcttcagaatttaagctacactgaaattctcaagataaggcaaagcgagcgaatgaaccaagaggacttccagagtaggcccatacttgaacttaaggagaagattcagcctgaaatcctggagcttatcaagcagcagaggttgaatcggttagtggagggcacctgtttcaggaagctcaacgccagacgtcgacaggacaaattctggtattgccggctatcccctaatcataaggtgttacactacggcgacttggaggagagtccacagggcgaggtgccccacgatagcctgcaggacaaactgccggtcgccgatatcaaggctgtggtcacgggaaaagattgtcctcacatgaaggaaaagggcgcactgaagcagaataaagaggttctagaacttgccttttcaatcctgtatgactccaattgccaattgaactttatcgcacctgacaaacacgagtactgcatctggacagatggcctgaatgctctcctgggcaaggacatgatgagcgacttgacacggaatgatctggatactctgctctccatggagatcaaattacgcctcctggaccttgagaatatccagatcccggatgcaccacccccaattcccaaggagccctcaaattatgactttgtatacgactgcaactag

SEQ ID NO: 233737 - DNA, 744 bp, Artificial Sequence
  derived and/or modified sequence
atgcaggttgttaaggagcaagtcatgagagcactgactacaaagccctcgagcctagaccagttcaaatcaaagctccagaatttgtcttataccgagatactaaaaatacggcaatctgaaaggatgaatcaggaggacttccaatcaaggcctatcttggaattgaaagaaaagatccagcctgagatccttgaacttatcaagcagcagcgtctcaatcgccttgtcgaaggcacttgcttccggaagttgaacgcccgtcggcgacaggataaattttggtattgcagactgagccccaaccataaagttcttcactacggagacctggaagagtcacctcagggtgaggtgcctcatgacagcttacaagataagcttcctgttgcggacatcaaggccgttgttacgggaaaggattgtccccatatgaaggagaagggcgcactgaaacagaataaagaagtgttagaactagcattttctattctgtatgacagcaactgtcaactcaactttatcgctcctgataagcacgaatattgtatctggaccgacgggttaaatgcattgctgggtaaggatatgatgagtgatctgacaagaaatgatctggacacactgttgagcatggagattaagcttcggctgctggacctggaaaacatccagatcccagatgccccaccacccattcctaaggaaccctctaactacgatttcgtgtacgactgtaattag

SEQ ID NO: 233738 - DNA, 744 bp, Artificial Sequence
  derived and/or modified sequence
atgcaggtggtgaaggagcaggtgatgagagccctgaccaccaagcccagcagcctggaccagttcaagagcaagctgcagaacctgagctacaccgagatcctgaagatcagacagagcgagagaatgaaccaggaggacttccagagcagacccatcctggagctgaaggagaagatccagcccgagatcctggagctgatcaagcagcagagactgaacagactggtggagggcacctgcttcagaaagctgaacgccagaagaagacaggacaagttctggtactgcagactgagccccaaccacaaggtgctgcactacggcgacctggaggagagcccccagggcgaggtgccccacgacagcctgcaggacaagctgcccgtggccgacatcaaggccgtggtgaccggcaaggactgcccccacatgaaggagaagggcgccctgaagcagaacaaggaggtgctggagctggccttcagcatcctgtacgacagcaactgccagctgaacttcatcgcccccgacaagcacgagtactgcatctggaccgacggcctgaacgccctgctgggcaaggacatgatgagcgacctgaccagaaacgacctggacaccctgctgagcatggagatcaagctgagactgctggacctggagaacatccagatccccgacgcccccccccccatccccaaggagcccagcaactacgacttcgtgtacgactgcaactag

SEQ ID NO: 233739 - DNA, 1982 bp, Artificial Sequence
  derived and/or modified sequence
tggaggggcagcgtggggaacgagaaactctttgcctgtagggacccttctagctgcaaacttaaaaatgtatgtggcaagatgcaacccaagcaccgagcaggattccagacgagttataatcattctgaacggggagaggaaaggtaatgcaggtggtgaaggagcaggttatgagagcacttacaaccaagcctagctccctggaccagttcaagagcaaactgcagaacctgagctacactgagatcctgaaaatccgccagtccgagaggatgaaccaggaagatttccagtcccgcccgattttggaactaaaggagaagattcagccagaaatcttagagctgatcaaacagcaacgcctgaaccgccttgtggaagggacctgctttaggaaactcaatgcccggcggaggcaagacaagttttggtattgtcggctttcgccaaatcacaaagtcctgcattacggagacttagaagagagtcctcagggagaagtgccccacgattccttgcaggacaaactgccggtggcagatatcaaagccgtggtgacgggaaaggactgccctcatatgaaagagaaaggtgcccttaaacaaaacaaggaggtgcttgaactcgctttctccatcttgtatgactcaaactgccaactgaacttcatcgctcctgacaagcatgagtactgtatctggacggatggactgaatgcgctactcgggaaggacatgatgagcgacctgacgcggaatgacctggacaccctgctcagcatggaaatcaagctccgcctcctggacctggaaaacatccagatccctgacgcacctccgccgattcccaaggagcccagcaactatgacttcgtctatgactgtaactgaagtggccgggcccagacatgccccttccaaaactggaacacctagctaacaggagagaggaatgaaaacacacccacgccttggaaccgtcctttggtaaagggaagctgtgggtccacattcccttcagcatcacctctagccctggcaactttcagcccctagctggcatcttgctcaccgccctgattctgttcctcggctccactgcttcaggtcacttcccatggctgcagtccactggtgggacaagagcaaagcccactgccagtaagaaggccaaagggcccttccatcctagccctctgcaggcatgcccttccttcccttgggcaggaaagccagcagccccagactgcccaaaaacttgcccaccagaccaagggcagtgccccaaggcccctgtctggaggaaatggcctagctatttgatgagaagaccaaaccccacatcctcctttcccctctctctagaatcatctcgcaccaccagttacacttgaattaagatctgcgctcaaatctcctcccacctctctccctgcttttgccttgctctgttcctctttggtcccaagagcagcagccgcagcctcctcgtgatcctccctagcataaatttcccaaacagtccacaggtcccatgcccactttgcgtctgcactgtgatcgtgacaaatcttccctcctcaccagctagtctggggtttcctctccctgccccaggccagaactgccttcttcatttccacccacgctcccagcctcttagctgaaagcacaaatggtgaaatcagtagtctcgctccatctctaatagactaaacctaaatgcctctaggacggactgttgctatccaagcgtttggtgttaccttctcctgggaggtcctgctgcaactcaagttccacaggatggtcaagctgtcagacatccaagtttacatcattgtaattattactggtatttacaatttgcaagagttttgggttagtttttttttttttttttgctttgtttttgtacaaaagagtctaacattttttgccaaacagatatatatttaatgaaaagaagagatacataaa

SEQ ID NO: 233740 - DNA, 2524 bp, Artificial Sequence
  derived and/or modified sequence
tgatgaatatgaactatctccagcccatcaccagctttttctttttcttcttgtccttatttgttttttagttctttataagaaaaagtgggggatatattgagaagtaccaagacggggagctatgggtttattgacaaaagagcataggacactaaaatagaaacgaagttattatttttctcttgtgatactctaagagaaaagctcttcctggaaaagccgatgatctctgaagatgctaaataaatgagcaggagtttccctgaaatggaggcgccctttgattggctgatctttccccgactcctgccaatcggagcatccctgggctccagctccataaacataagcaaagctacatgcttattcttctggacttggagtgtataccatttaaaggtgtgcggcgggtctctgttcacatggctcaactggaaacctgtttcatgaacaagcttactcaggaaccatctggtggtattccagcacattgttcttcagggggacgactctaagtcgctttgtggtggcagcagcttagaatcagtatttgtggttgggaaagatggacttacgggagcttggtaatgcaggtggtgaaggagcaggttatgagagcacttacaaccaagcctagctccctggaccagttcaagagcaaactgcagaacctgagctacactgagatcctgaaaatccgccagtccgagaggatgaaccaggaagatttccagtcccgcccgattttggaactaaaggagaagattcagccagaaatcttagagctgatcaaacagcaacgcctgaaccgccttgtggaagggacctgctttaggaaactcaatgcccggcggaggcaagacaagttttggtattgtcggctttcgccaaatcacaaagtcctgcattacggagacttagaagagagtcctcagggagaagtgccccacgattccttgcaggacaaactgccggtggcagatatcaaagccgtggtgacgggaaaggactgccctcatatgaaagagaaaggtgcccttaaacaaaacaaggaggtgcttgaactcgctttctccatcttgtatgactcaaactgccaactgaacttcatcgctcctgacaagcatgagtactgtatctggacggatggactgaatgcgctactcgggaaggacatgatgagcgacctgacgcggaatgacctggacaccctgctcagcatggaaatcaagctccgcctcctggacctggaaaacatccagatccctgacgcacctccgccgattcccaaggagcccagcaactatgacttcgtctatgactgtaactgaagtggccgggcccagacatgccccttccaaaactggaacacctagctaacaggagagaggaatgaaaacacacccacgccttggaaccgtcctttggtaaagggaagctgtgggtccacattcccttcagcatcacctctagccctggcaactttcagcccctagctggcatcttgctcaccgccctgattctgttcctcggctccactgcttcaggtcacttcccatggctgcagtccactggtgggacaagagcaaagcccactgccagtaagaaggccaaagggcccttccatcctagccctctgcaggcatgcccttccttcccttgggcaggaaagccagcagccccagactgcccaaaaacttgcccaccagaccaagggcagtgccccaaggcccctgtctggaggaaatggcctagctatttgatgagaagaccaaaccccacatcctcctttcccctctctctagaatcatctcgcaccaccagttacacttgaattaagatctgcgctcaaatctcctcccacctctctccctgcttttgccttgctctgttcctctttggtcccaagagcagcagccgcagcctcctcgtgatcctccctagcataaatttcccaaacagtccacaggtcccatgcccactttgcgtctgcactgtgatcgtgacaaatcttccctcctcaccagctagtctggggtttcctctccctgccccaggccagaactgccttcttcatttccacccacgctcccagcctcttagctgaaagcacaaatggtgaaatcagtagtctcgctccatctctaatagactaaacctaaatgcctctaggacggactgttgctatccaagcgtttggtgttaccttctcctgggaggtcctgctgcaactcaagttccacaggatggtcaagctgtcagacatccaagtttacatcattgtaattattactggtatttacaatttgcaagagttttgggttagtttttttttttttttttgctttgtttttgtacaaaagagtctaacattttttgccaaacagatatatatttaatgaaaagaagagatacataaatgtgtgaatttccagtttttttttaattattttaatcccaaacatcttcctgaaaataacattcccttaaacatgctgtggaataaaatggattgtgatga

SEQ ID NO: 233741 - protein, 317 aa, Artificial Sequence
  derived and/or modified sequence
MADTQYILPNDIGVSSLDCREAFRLLSPTERLYAYHLSRAAWYGGLAVLLQTSPEAPYIYALLSRLFRAQDPDQLRQHALAEGLTEEEYQAFLVYAAGVYSNMGNYKSFGDTKFVPNLPKEKLERVILGSEAAQQHPEEVRGLWQTCGELMFSLEPRLRHLGLGKEGITTYFSGNCTMEDARVRLDRSKIRSVGKPALERFLRRLQVLKSTGDVAGGRALYEGYATVTDAPPECFLTLRDTVLLRKESRKLIVQPNTRLEGSDVQLLEYEASAAGLIRSFSERFPEDGPELEEILTQLATADARFWKGPSEAPSGQA

SEQ ID NO: 233742 - protein, 737 aa, Artificial Sequence
  derived and/or modified sequence
MADTQYILPNDIGVSSLDCREAFRLLSPTERLYAYHLSRAAWYGGLAVLLQTSPEAPYIYALLSRLFRAQDPDQLRQHALAEGLTEEEYQAFLVYAAGVYSNMGNYKSFGDTKFVPNLPKEKLERVILGSEAAQQHPEEVRGLWQTCGELMFSLEPRLRHLGLGKEGITTYFSGNCTMEDAKLAQDFLDSQNLSAYNTRLFKEVDGEGKPYYEVRLASVLGSEPSLDSEVTSKLKSYEFRGSPFQVTRGDYAPILQKVVEQLEKAKAYAANSHQGQMLAQYIESFTQGSIEAHKRGSRFWIQDKGPIVESYIGFIESYRDPFGSRGEFEGFVAVVNKAMSAKFERLVASAEQLLKELPWPPTFEKDKFLTPDFTSLDVLTFAGSGIPAGINIPNYDDLRQTEGFKNVSLGNVLAVAYATQREKLTFLEEDDKDLYILWKGPSFDVQVGLHELLGHGSGKLFVQDEKGAFNFDQETVINPETGEQIQSWYRSGETWDSKFSTIASSYEECRAESVGLYLCLHPQVLEIFGFEGADAEDVIYVNWLNMVRAGLLALEFYTPEAFNWRQAHMQARFVILRVLLEAGEGLVTITPTTGSDGRPDARVRLDRSKIRSVGKPALERFLRRLQVLKSTGDVAGGRALYEGYATVTDAPPECFLTLRDTVLLRKESRKLIVQPNTRLEGSDVQLLEYEASAAGLIRSFSERFPEDGPELEEILTQLATADARFWKGPSEAPSGQA

SEQ ID NO: 233743 - protein, 90 aa, Artificial Sequence
  derived and/or modified sequence
MADTQYILPNDIGVSSLDCREAFRLLSPTERLYAYHLSRAAWYGGLAVLLQTSPEAPYIYALLSRLFRAQDPDQLRQHALAEGLTEEEYQ

SEQ ID NO: 233744 - protein, 201 aa, Artificial Sequence
  derived and/or modified sequence
MADTQYILPNDIGVSSLDCREAFRLLSPTERLYAYHLSRAAWYGGLAVLLQTSPEAPYIYALLSRLFRAQDPDQLRQHALAEGLTEEEYQAFLVYAAGVYSNMGNYKSFGDTKFVPNLPKEKLERVILGSEAAQQHPEEVRGLWQTCGELMFSLEPRLRHLGLGKEGITTYFSGNCTMEDAKLAQDFLDSQNLSAYNTRLF

SEQ ID NO: 233745 - protein, 757 aa, Artificial Sequence
  derived and/or modified sequence
MGEPEAGSEFANGAAAAAGPMADTQYILPNDIGVSSLDCREAFRLLSPTERLYAYHLSRAAWYGGLAVLLQTSPEAPYIYALLSRLFRAQDPDQLRQHALAEGLTEEEYQAFLVYAAGVYSNMGNYKSFGDTKFVPNLPKEKLERVILGSEAAQQHPEEVRGLWQTCGELMFSLEPRLRHLGLGKEGITTYFSGNCTMEDAKLAQDFLDSQNLSAYNTRLFKEVDGEGKPYYEVRLASVLGSEPSLDSEVTSKLKSYEFRGSPFQVTRGDYAPILQKVVEQLEKAKAYAANSHQGQMLAQYIESFTQGSIEAHKRGSRFWIQDKGPIVESYIGFIESYRDPFGSRGEFEGFVAVVNKAMSAKFERLVASAEQLLKELPWPPTFEKDKFLTPDFTSLDVLTFAGSGIPAGINIPNYDDLRQTEGFKNVSLGNVLAVAYATQREKLTFLEEDDKDLYILWKGPSFDVQVGLHELLGHGSGKLFVQDEKGAFNFDQETVINPETGEQIQSWYRSGETWDSKFSTIASSYEECRAESVGLYLCLHPQVLEIFGFEGADAEDVIYVNWLNMVRAGLLALEFYTPEAFNWRQAHMQARFVILRVLLEAGEGLVTITPTTGSDGRPDARVRLDRSKIRSVGKPALERFLRRLQVLKSTGDVAGGRALYEGYATVTDAPPECFLTLRDTVLLRKESRKLIVQPNTRLEGSDVQLLEYEASAAGLIRSFSERFPEDGPELEEILTQLATADARFWKGPSEAPSGQA

SEQ ID NO: 233746 - protein, 756 aa, Artificial Sequence
  derived and/or modified sequence
MGEPEAGSEFANGAAAAGPMADTQYILPNDIGVSSLDCREAFRLLSPTERLYAYHLSRAAWYGGLAVLLQTSPEAPYIYALLSRLFRAQDPDQLRQHALAEGLTEEEYQAFLVYAAGVYSNMGNYKSFGDTKFVPNLPKEKLERVILGSEAAQQHPEEVRGLWQTCGELMFSLEPRLRHLGLGKEGITTYFSGNCTMEDAKLAQDFLDSQNLSAYNTRLFKEVDGEGKPYYEVRLASVLGSEPSLDSEVTSKLKSYEFRGSPFQVTRGDYAPILQKVVEQLEKAKAYAANSHQGQMLAQYIESFTQGSIEAHKRGSRFWIQDKGPIVESYIGFIESYRDPFGSRGEFEGFVAVVNKAMSAKFERLVASAEQLLKELPWPPTFEKDKFLTPDFTSLDVLTFAGSGIPAGINIPNYDDLRQTEGFKNVSLGNVLAVAYATQREKLTFLEEDDKDLYILWKGPSFDVQVGLHELLGHGSGKLFVQDEKGAFNFDQETVINPETGEQIQSWYRSGETWDSKFSTIASSYEECRAESVGLYLCLHPQVLEIFGFEGADAEDVIYVNWLNMVRAGLLALEFYTPEAFNWRQAHMQARFVILRVLLEAGEGLVTITPTTGSDGRPDARVRLDRSKIRSVGKPALERFLRRLQVLKSTGDVAGGRALYEGYATVTDAPPECFLTLRDTVLLRKESRKLIVQPNTRLEGSDVQLLEYEASAAGLIRSFSERFPEDGPELEEILTQLATADARFWKGPSEAPSGQA

SEQ ID NO: 233747 - protein, 635 aa, Artificial Sequence
  derived and/or modified sequence
MGNYKSFGDTKFVPNLPKEKLERVILGSEAAQQHPEEVRGLWQTCGELMFSLEPRLRHLGLGKEGITTYFSGNCTMEDAKLAQDFLDSQNLSAYNTRLFKEVDGEGKPYYEVRLASVLGSEPSLDSEVTSKLKSYEFRGSPFQVTRGDYAPILQKVVEQLEKAKAYAANSHQGQMLAQYIESFTQGSIEAHKRGSRFWIQDKGPIVESYIGFIESYRDPFGSRGEFEGFVAVVNKAMSAKFERLVASAEQLLKELPWPPTFEKDKFLTPDFTSLDVLTFAGSGIPAGINIPNYDDLRQTEGFKNVSLGNVLAVAYATQREKLTFLEEDDKDLYILWKGPSFDVQVGLHELLGHGSGKLFVQDEKGAFNFDQETVINPETGEQIQSWYRSGETWDSKFSTIASSYEECRAESVGLYLCLHPQVLEIFGFEGADAEDVIYVNWLNMVRAGLLALEFYTPEAFNWRQAHMQARFVILRVLLEAGEGLVTITPTTGSDGRPDARVRLDRSKIRSVGKPALERFLRRLQVLKSTGDVAGGRALYEGYATVTDAPPECFLTLRDTVLLRKESRKLIVQPNTRLEGSDVQLLEYEASAAGLIRSFSERFPEDGPELEEILTQLATADARFWKGPSEAPSGQA

SEQ ID NO: 233748 - DNA, 954 bp, Artificial Sequence
  derived and/or modified sequence
atggcagacacgcagtacattctccccaacgacattggggtaagcagcctcgactgtagggaggcctttcggctcctcagcccaaccgaaagactgtacgcgtaccacctgtcaagggctgcgtggtatggcgggcttgctgtgctgttacagacctcacccgaagctccttacatttatgctctgctgagccggcttttccgggcacaggatccggaccagctgagacagcatgctctggcagaaggcctaaccgaggaagagtaccaagccttcctcgtgtacgctgccggagtctattccaacatggggaactacaaatcatttggcgatacaaagttcgtacctaacctgccaaaagaaaaactagaaagagttatccttgggtctgaagccgcccaacagcatcctgaagaggtccgaggactgtggcagacctgtggagaattgatgttcagtctggagccccggttacgccatctcggcctgggcaaggaaggcatcaccacctacttttcagggaactgtacgatggaagatgcccgggttcgtctggataggtccaagatccggtctgttggcaaaccagcactggagcggttcctgcggcgcctgcaggtgctaaagtcaacgggggatgtggccgggggcagggctctgtacgagggttatgctacggtaacagacgcacccccggaatgctttctcactctgcgcgatacggtgctgctgcgcaaggaatccagaaagctgatcgtgcagcctaacacccgcttggagggcagtgacgtgcagctattagagtacgaagcctccgcagcgggcctcattcgtagtttctccgagagattcccggaggacgggcctgaactggaggagatcctcacacagctagctactgcagatgccaggttttggaaaggacctagcgaagcccccagcgggcaggcatag

SEQ ID NO: 233749 - DNA, 2214 bp, Artificial Sequence
  derived and/or modified sequence
atggcggatacacagtatatactgcctaacgatattggggtgtcaagcttagactgtagagaagcgttccgtctgctgagccccacagaacggttatacgcttaccacttgtcaagggcggcctggtacggcggcctagcggtattgttgcagaccagcccagaggcaccttatatttacgcattacttagtagattgttccgcgcgcaggaccctgaccagctccggcagcacgcactggccgagggcctgactgaggaggagtatcaggcttttctcgtgtacgcggccggggtgtattccaatatggggaactataaatccttcggcgataccaagttcgtcccaaatttacccaaagagaagcttgagcgggtgattttgggatctgaagccgctcagcagcaccctgaagaagtgcgcggattatggcaaacctgcggcgagctcatgttctccctggagccaaggctcaggcatctgggccttggcaaagaagggatcaccacttatttcagcgggaattgtacaatggaggatgctaagctggcccaggactttcttgattcccagaacctgtccgcttacaatactagattattcaaggaagtggatggcgagggaaaaccttactacgaggtgagactggctagtgtgctaggctccgagcctagcctagactctgaagtaacctctaaactgaaatcatatgagttcagggggtctcctttccaagtgacccgaggagattacgcacctattctgcagaaggtagttgagcagctggagaaagctaaggcctacgccgctaatagccaccagggccagatgttagctcagtacattgagagcttcacgcagggtagtattgaagcccataagaggggttctagattctggatacaggataagggacctattgttgagagctatataggctttatcgagtcttaccgagatccatttggctcgagaggtgagtttgaggggtttgtcgccgtagtgaataaggctatgagcgccaagttcgaaagactggtggcctcggccgaacagctgctaaaggaattgccctggccccctacgttcgagaaagacaagttcctgacacctgacttcacatcactcgacgtgctcacatttgccggatctggcatacctgccggaattaacattccaaattacgatgatctgcgccagaccgaaggtttcaagaacgtttctctcggcaatgttttagcagtcgcatatgcaacccagcgcgagaaattgaccttcctggaggaggacgataaagatctgtatattctgtggaaggggccatcattcgacgtccaggtgggtctgcacgagctccttggtcatggatcagggaagctcttcgtgcaggacgaaaagggggcattcaatttcgaccaggaaacagttattaaccccgagacgggagagcagattcagtcctggtatcgcagtggcgagacctgggacagcaaattctctacaattgcaagctcttatgaagaatgccgcgccgaatcagtgggtctgtacctgtgtctccatccacaggtcttagagattttcggttttgaaggtgcagacgcggaagacgttatctacgtgaactggctgaacatggtgcgggccggactcctggccctggagttctatacccccgaggcttttaattggaggcaggctcacatgcaggccagatttgttatcctgcgggtcctgctcgaagccggagagggcctggtgacaattaccccgactaccggctcagatggtagacccgatgcacgtgtacgcctggaccgaagcaagattcggagtgtcggaaaacccgcgcttgagcgatttttgcgacgccttcaggtcttaaagagtacaggggacgttgcaggaggcagagcgctgtacgaaggctatgcaaccgtgacagatgctcccccagagtgctttcttactctgagagatactgtgttactcagaaaagaaagtaggaaactgatcgtccagcctaacaccaggctggagggaagtgatgtgcagctgctagagtacgaggctagcgctgccggactcatccgctcattcagcgagcggttccctgaggatggcccggaactggaggaaattctgacgcagctggctaccgccgatgctaggttctggaagggcccgagcgaggctccatcaggacaggcctag

SEQ ID NO: 233750 - DNA, 2214 bp, Artificial Sequence
  derived and/or modified sequence
atggccgatacccagtatatcttgccaaacgacatcggcgtaagctccctcgactgtcgggaggctttcaggcttttaagtccaacagaaagattgtacgcgtaccacctctcaagggctgcctggtacggtggcctggctgtgctgctgcagacaagtcccgaagccccctacatctacgcattgctgagcagattgtttcgggcccaggacccagatcagctgcgacagcacgcactggcagagggtctgacggaggaggagtatcaggcctttttggtttacgctgcaggagtgtacagcaacatgggtaattataaaagcttcggtgacacaaagttcgtgcctaacctgcccaaggaaaagctagaacgtgtaatcttgggcagcgaggctgcccagcagcaccctgaggaggtcagggggctgtggcagacatgtggcgagctgatgttttccctcgagccccgtctgagacatttgggcttgggtaaggagggcattaccacatacttttctggaaactgtaccatggaggacgccaagctagcccaggactttctggacagtcagaacctgtccgcgtacaacaccaggttgttcaaagaggttgacggcgaggggaaaccctactatgaggtacgcctggcttcagtattagggagcgaacctagcctggacagcgaagtcacgagcaagctcaaatcttacgagttccgtgggtctccattccaggtgactaggggcgactacgcaccaattttacagaaagtagtggagcaactggaaaaagccaaggcttacgccgccaactcccaccaggggcagatgctcgctcagtatatagagagtttcactcaggggagcattgaggcacacaagcgcgggagtaggttctggattcaggataagggacccatcgttgaatcctacattggcttcatcgaatcctacagagaccccttcggtagtaggggcgagttcgagggatttgtggcagtggttaacaaagctatgtccgcgaagtttgaaaggctagttgcctccgccgagcagctcctgaaagaactcccttggcctcctacattcgaaaaagataagttcttgactcccgactttaccagcctggatgtgcttacctttgcaggatcgggaatcccagctggcatcaacattccaaactatgatgacctgagacagactgaaggttttaagaatgtgtcactggggaacgttctggctgtggcgtatgctacccaaagggagaaactgacgttcctggaggaggacgataaagatctttatatcctgtggaaaggcccgtccttcgatgttcaggttggtctgcatgagctgcttgggcacgggtctggcaagctgttcgtgcaagacgaaaaaggtgcattcaacttcgaccaggaaaccgtaattaaccctgagacaggcgaacagatccaatcatggtacaggagcggggaaacatgggactctaaattctccacaatcgcatcctcatatgaagaatgccgggcggagtcggtagggctgtacctgtgtctccacccacaagtcttggaaatttttgggttcgagggcgccgacgcggaggatgtgatttacgtgaactggctcaatatggttagggccggtctcttggcgctcgagttctacactcctgaggctttcaactggaggcaggcccatatgcaggctcgctttgtaatcctgcgggtcctcctggaagctggggaagggttggtgaccatcacacccaccaccgggagcgacggcagaccagacgcccgagtgcgcttagatcgaagtaaaatcagatccgtaggtaaacccgccttggagagatttctgcgcagattacaggtcctgaaatcaacgggcgatgtggccggtggtcgggccttgtatgaggggtacgccacagtgacggatgctccccccgaatgcttcctgaccctgagagacacagttctactgagaaaagaaagtcgaaagctaatcgtgcagcccaatacacgtctagaaggctccgatgtgcagctacttgagtatgaggcctccgcggccgggctgattcgctctttctccgaacggtttccagaggacggcccagaattagaggaaatcctgacgcagctagccacagccgacgcgagattttggaagggcccttccgaagcaccctctggacaagcttag

SEQ ID NO: 233751 - DNA, 606 bp, Artificial Sequence
  derived and/or modified sequence
atggctgatacgcagtatattctccccaacgacatcggtgtgtcgtctctggattgtcgcgaggcattccggctgttgtcacctactgaaagactttatgcctatcacttatcccgcgccgcatggtatggcggtctggccgtacttctccaaacgtctccagaggccccctacatttacgcgctcctttctagactgtttagagcacaggatcctgaccagttgcgacagcacgccttggccgaggggttgactgaggaggagtaccaggcttttctggtgtatgctgctggagtctattcgaatatgggtaattacaagagtttcggggataccaaatttgtgcccaatttaccaaaagagaagcttgaacgcgtaatcttaggctccgaagctgcccaacagcatcctgaggaggtgaggggcttgtggcagacttgcggggaactcatgttttctctggagcccagactgaggcacctaggcctcggtaaagagggtataactacatacttcagcggaaattgcacgatggaagacgccaagctcgcacaagactttctggactctcagaatttgtcagcttacaataccagactcttctag

SEQ ID NO: 233752 - DNA, 2274 bp, Artificial Sequence
  derived and/or modified sequence
atgggtgagcccgaggcaggttcggagttcgctaatggagccgctgcagccgccggccccatggctgacactcagtatattctgcctaacgatatcggagtgtcatcgctagattgccgggaggcattccgccttctctcgcccacagagagactgtatgcataccacctcagcagagccgcctggtacggcggtctggctgtgcttctacaaaccagccctgaggcaccttacatttatgctttgttgtctcgactgtttcgagcccaggaccctgatcaactacgacaacacgcattagctgaaggcctgacagaagaggaataccaggcatttctagtttacgcggccggtgtctactccaacatgggtaattataagagttttggcgacacgaaattcgtaccgaatttgcccaaggagaaactggaaagagtgattctgggcagcgaagcggctcagcagcacccagaagaggtgaggggactttggcagacctgcggagagctgatgttcagcttggaaccacgtctccgccacttgggcctggggaaagagggtataacaacatacttctcaggaaattgcactatggaggacgccaagctggctcaagacttccttgattcacagaacttatcggcctataatactcgcttatttaaagaagtggatggcgagggaaaaccctattatgaagtccgactcgccagtgtgctgggctccgaacctagcctggattcagaagtgacatctaagctgaagtcctatgagtttcgtggttctccattccaggtcacccgcggtgactatgctccaattctacaaaaggtcgtcgagcagcttgagaaggcgaaggcatatgctgccaattcacaccagggacagatgctcgctcaatacatcgagagcttcacacaggggtcgatcgaagcccataaaagggggtctcggttttggatccaggataaaggacccatagtggagagctacatcggatttatcgagagttacagggatccattcggatctcggggagaattcgagggctttgtcgccgtggtgaataaggcaatgagcgcaaagtttgagcggttggttgctagcgcagaacaattgttaaaagagctgccctggcctcctacctttgaaaaggataagttccttaccccagacttcacctccctggacgttttaacatttgctgggtctggcattccagccggcattaacattcctaactacgacgacctgagacaaaccgaaggattcaagaacgtgagcctgggtaatgtgcttgcagtcgcctacgccacgcagagggagaaactgactttcctcgaagaagacgataaagacctctacatcttatggaaggggcctagttttgacgtgcaggtggggctccacgaactcttgggtcacggaagcgggaaactgttcgtgcaagatgaaaaaggagcctttaactttgatcaagaaacagtgatcaaccccgagaccggagaacaaatccagagctggtatcgatcaggggaaacctgggacagtaagttttccactatcgcaagttcctacgaagagtgccgcgctgagtccgtggggctctacttgtgcctgcatccccaagttcttgagattttcgggttcgagggtgcggatgccgaggatgtgatttacgtgaattggctgaacatggtgcgagccggattgctagccctggaattctacactcccgaggcttttaattggaggcaggcacatatgcaagcaagatttgtgatactcagggttctgctcgaggcaggcgagggcctggtgacaatcacccctaccacaggatcagacggaaggccagatgctcgagtccgcttggaccgaagtaagattagatctgtcggaaagccagcattggaaagatttctgcggaggctgcaggttttgaaatcaacaggggatgtggctggaggcagggcattgtacgaggggtatgctacagttacggatgcccctcctgagtgcttcctgaccctgcgggatacagtgcttcttagaaaagagtctagaaagctgattgttcagcctaatactcggctcgaggggagtgatgttcagctgctggagtacgaagcatcggccgcaggtctgatccggtctttcagcgagagattccccgaggatggacccgagttggaagaaattctgactcaactggctacggctgatgctcgcttctggaaaggaccatccgaggccccttcaggccaggcatag

SEQ ID NO: 233753 - DNA, 2271 bp, Artificial Sequence
  derived and/or modified sequence
atgggggagcccgaggccggttcagaattcgccaacggggccgccgctgctgggcctatggcagatactcagtacattttgcccaacgatatcggtgtgtctagcctcgattgtcgagaagcttttcgactgctgtctccaacagagaggctctatgcgtatcatctgagtcgggctgcctggtacggaggattggctgtcttgctgcagacttcacctgaagcgccgtacatctatgctttactcagccgcctgtttagggctcaagatcctgaccagttaagacaacatgcactggctgaaggcctcactgaggaagagtatcaggcatttctggtgtatgctgctggagtgtacagcaatatggggaattacaagtctttcggcgacacaaagtttgttcctaacctacccaaggaaaagctggagagagtgatactggggtccgaggccgcacagcagcatccagaagaagttcggggactgtggcaaacctgtggggagctgatgttctctttagagcctcggctgaggcatctgggattgggtaaagagggaattaccacttacttttcgggaaactgtaccatggaagatgccaagctggcacaggacttcttggattctcagaatctttccgcatataatacacggctctttaaagaagtcgatggagaaggaaaaccctactatgaggtgcgcctcgcttcggtactaggatccgaaccatccctggatagcgaggtaacttcgaaactgaagtcctacgaatttaggggctcaccatttcaagtcacccgtggagactatgctcctatcttgcaaaaggtggtcgagcagctagagaaggcgaaggcttatgccgccaattcgcatcaggggcagatgctggcccaatatatcgaaagcttcacacaaggttccattgaggcgcacaagcgcgggtccaggttctggattcaggacaagggacccatcgtggaatcgtatatagggttcattgagtcatatagggacccattcgggtccaggggcgagtttgagggtttcgtggccgtggtgaataaagctatgtcagccaaattcgaaagactggtggccagcgcagagcagctattgaaagagctgccgtggccaccaacattcgagaaagataaatttctgaccccggattttacctccctggacgtactcaccttcgcaggttcaggtatccctgcagggataaacatcccaaactacgatgatcttagacaaacggaggggttcaagaatgtttccctggggaacgtgctcgcggtcgcttacgcaacacagcgcgaaaagctgacttttcttgaggaggacgacaaggatttgtatatattatggaaggggccaagtttcgacgtccaagtgggactgcacgaactgcttggccacggctctggtaagcttttcgtccaggacgaaaagggggcttttaattttgaccaagagactgtgattaatcccgaaacaggagaacagatacagtcatggtacagaagcggagagacttgggactctaagttcagcactatcgcatcgtcctatgaagagtgtcgggccgagtccgtcggactttatctttgcctgcacccacaggttctcgagatttttggcttcgagggcgctgatgctgaggatgtcatctatgtgaattggctgaatatggtcagggctggcctgctggcactcgaattttatacccccgaagcctttaattggcggcaggctcacatgcaggcgaggtttgtgatcctgcgggtgctgctggaggctggcgagggcttggtaactatcactcccacaacgggatcagatggacggcccgatgctagagtacggttagataggtcaaaaatccgctccgtggggaaaccggctctcgagaggttccttagacgcctccaggtgctcaaatcaaccggagatgtcgctggcgggcgggccctgtacgagggatatgcgaccgttactgatgctccaccagagtgctttttgacccttcgagacacagtgctgctccggaaggaatctaggaaactaatcgtccaacctaacactagactggaaggctctgatgtgcagcttctggagtacgaggccagcgctgccgggctcatccgcagtttttccgaacgtttcccagaagatggtccggagcttgaggaaatcttgactcagctagcaactgcagatgcccgtttctggaaggggccgagtgaagctccctccgggcaggcttag

SEQ ID NO: 233754 - DNA, 2214 bp, Artificial Sequence
  derived and/or modified sequence
atggctgacacccagtatatcctgccgaatgacattggcgtgtcatctcttgattgcagagaagcgtttcggcttctctctcctactgagagactgtatgcttatcatctctctagggcagcctggtacggcggattggcagtgttactgcagactagtcctgaggccccatacatatatgccctgttatccagactcttcagggcacaggatccagatcaattgaggcagcatgccctcgcagagggactcaccgaggaagagtatcaggcgttcctggtctatgcggcaggggtgtactccaacatgggcaactataagagttttggcgacacgaaattcgtccccaacctgccaaaagaaaagctcgaacgggtgatcctcggaagcgaagctgcgcagcaacatcctgaggaggtgagagggttatggcagacttgtggagaactcatgttctctctcgagccacggttgagacatctcgggcttggaaaagagggtattaccacctacttttcaggaaattgcaccatggaggatgcaaagctagcccaagattttctcgacagtcaaaacctgtccgcttataacacaaggcttttcaaggaggtagacggagagggtaagccctactatgaggtaaggctcgcctcagtactcggctccgaaccatcactagattccgaggtaacaagtaaactaaagtcatacgagtttcggggctccccatttcaggtcactagaggggactatgccccaatcctccaaaaagttgtggagcagttagaaaaagcaaaggcctatgctgcgaattcacatcagggccagatgctggctcaatatatagagtcctttacgcagggatcaatcgaggcccataaaagggggtccagattttggattcaggacaagggacccatagtcgaatcctacatcggctttatcgaatcttaccgggacccttttggttctaggggcgagtttgagggcttcgtggctgtggtcaacaaggctatgtcggcgaagtttgaaagactggtggctagcgcagagcagctgttgaaggagctgccttggccacccaccttcgagaaggataagttcctgacacccgacttcaccagtctggacgtactaaccttcgctggttctggaatcccggcaggcattaatattcccaactacgacgacttaaggcaaacggagggtttcaagaatgtaagcctaggtaatgtgctggctgtggcgtacgccacccagcgggagaagcttacatttcttgaggaagacgataaggatttatacatactgtggaaaggcccctctttcgacgtgcaagttggtctgcatgaactgctgggacacgggtctggtaagcttttcgtccaggatgagaaaggcgctttcaatttcgatcaggaaactgttataaatccagagacaggtgagcaaattcagtcctggtatagatcaggagaaacatgggactccaagttctctacaatcgcttccagctatgaagagtgccgcgctgaatcagtaggactctacctgtgcctgcaccctcaggttctggagattttcgggttcgaaggcgcagacgcagaggacgtaatctatgtgaactggttgaacatggtccgggctgggctcctggctctagagttttacacgcctgaagcctttaactggaggcaggcccatatgcaagctaggttcgtgattctgagagtcctgttggaagcaggcgaagggttagtgacaattactccaacgaccgggagcgatggccgccccgatgcacgcgtgagactcgacaggagtaagattcggtccgttggtaagcccgcactcgaaagatttctccggagattgcaggtgcttaagagcaccggcgatgtggctggcggtagagcgctgtacgagggatacgcaaccgtcaccgacgccccaccggagtgcttcttaactttaagggacacggtgcttcttcggaaggagtcccgaaaactgatcgtccagcccaacacacgactcgagggctctgatgtgcagctgcttgagtatgaagctagcgctgccggattgatccggtcatttagcgagcgattccccgaagacggcccggagcttgaggagatcctcactcaactcgccaccgctgacgcccgtttctggaagggaccttccgaagcaccatcggggcaggcatag

SEQ ID NO: 233755 - DNA, 1908 bp, Artificial Sequence
  derived and/or modified sequence
atgggaaactacaaatctttcggcgacacgaagttcgtgccaaatctcccaaaggagaagctagaacgggttattcttggatcggaggccgcccagcagcaccccgaagaggtacgtggcctatggcaaacatgtggtgagttgatgtttagtttggagcccaggctgcgccatctgggacttggcaaggagggaatcacaacttatttttccggaaattgcaccatggaggatgcgaagctcgcccaagactttctcgatagtcaaaatctgtcagcttataacacacgtttgtttaaagaggtcgatggcgagggtaagccttattatgaggtgaggctggcgagtgttttaggatccgaaccttcactcgatagcgaagttacttctaaactcaaatcctacgagtttcgcgggagccccttccaggtaacccggggtgattatgctccaattctacagaaagtcgttgaacagctggaaaaagctaaggcctacgccgcgaactcccatcagggacaaatgctcgctcagtacatcgagagctttacgcaagggagcattgaggctcataagagagggagcaggttctggattcaggataagggtcccattgttgagtcctacattggattcattgaatcatatagagaccctttcggctctcgcggtgaatttgaaggcttcgtggctgttgtgaataaggcgatgtcagcgaagttcgagaggctcgtggcgtccgccgagcagctcctgaaagagctcccctggcctccaactttcgaaaaggacaagttccttacgcccgactttacgtccctcgatgtgctcaccttcgcaggctccggcatccctgccggaatcaatattcctaactatgacgatctgaggcaaacagagggattcaagaacgtcagcctaggaaacgtgctggctgtcgcctacgccacacagcgggagaaactcacttttctggaggaagacgataaggacctgtacattctatggaaggggccctcctttgatgtgcaggtggggctgcacgagctcctgggacatggctcaggaaagctgttcgttcaggacgagaagggcgcttttaacttcgatcaggagacagtcattaaccccgaaacaggcgagcagattcaaagctggtacagaagtggggagacgtgggattctaagttttctacaatagcatcttcttatgaggagtgccgggccgagtctgtggggctctatttatgtcttcatccacaggtgctcgagatctttggcttcgaaggtgccgacgcggaggatgtcatttacgtcaattggctaaacatggtcagggcgggccttctggccctggagttctatactccggaggcgtttaattggcgccaggctcacatgcaggcccgcttcgtcatcctgcgggtgctcctcgaggctggggaagggctcgtgacaataacgcctaccactgggagcgacgggcgaccagacgctcgggtgagactggatagatcaaagatccgatcagtgggtaagcctgcactcgaaaggttcctgaggagattacaggtgcttaaatcaaccggtgatgtggcaggaggtagggctctttatgagggctatgccacagtgaccgacgctcctcccgagtgcttccttacgctacgggataccgttctccttaggaaagagtccaggaagttgattgtgcagcccaacacccggctggaaggtagcgacgtccagctgctggagtatgaagctagcgccgctgggctgatccgttcttttagcgagcgattccccgaggatggtcccgaactggaggaaattctgacgcagctcgccaccgccgatgcgcggttctggaagggaccaagtgaagcacctagcggccaagcctag

SEQ ID NO: 233756 - DNA, 954 bp, Artificial Sequence
  derived and/or modified sequence
atggctgacacccagtacatcctgcccaatgacatcggcgtgagcagcctggactgccgggaggccttccggctgctgagccccacagagcggctgtatgcctaccacctgagccgggccgcctggtatggaggcctggccgtgctgctgcagaccagccctgaggccccctacatctatgccctgctgagccgcctcttccgggcccaggaccctgaccagctgcggcagcacgccctggccgagggcctgacagaggaggagtaccaggccttcctggtgtatgctgctggggtgtacagcaacatgggcaactacaagagctttggagacaccaagtttgtgcccaacctgcccaaggagaagctggagagggtcatcctgggcagcgaggccgcccagcagcaccctgaggaggtgcggggcctgtggcagacctgtggggagctgatgttcagcctggagccccggctgcggcacctgggcctgggcaaggagggcatcaccacctacttcagcggcaactgcaccatggaggatgcccgggtgcggctggacaggagcaagatccgctctgtgggcaagccagccctggagcgcttcctgcggcggctgcaggtgctgaagagcactggagatgtggccggcggccgggccctgtatgagggctacgccaccgtgacagatgcccccccagagtgcttcctgaccctgcgggacacagtgctgctgaggaaggagagcaggaagctgattgtgcagcccaacacccggctggagggcagtgatgtgcagctgctggagtatgaggccagcgctgctggcctcatccgctccttcagcgagcgcttcccagaagatggccctgagctggaggagatcctgacccagctggccacagcagatgcccgcttctggaagggccccagcgaggcccccagcggccaggcctag

SEQ ID NO: 233757 - DNA, 2214 bp, Artificial Sequence
  derived and/or modified sequence
atggctgacacccagtacatcctgcccaatgacatcggcgtgagcagcctggactgccgggaggccttccggctgctgagccccacagagcggctgtatgcctaccacctgagccgggccgcctggtatggaggcctggccgtgctgctgcagaccagccctgaggccccctacatctatgccctgctgagccgcctcttccgggcccaggaccctgaccagctgcggcagcacgccctggccgagggcctgacagaggaggagtaccaggccttcctggtgtatgctgctggggtgtacagcaacatgggcaactacaagagctttggagacaccaagtttgtgcccaacctgcccaaggagaagctggagagggtcatcctgggcagcgaggccgcccagcagcaccctgaggaggtgcggggcctgtggcagacctgtggggagctgatgttcagcctggagccccggctgcggcacctgggcctgggcaaggagggcatcaccacctacttcagcggcaactgcaccatggaggatgccaagctggcccaggacttcctggacagccagaacctgagcgcctacaacaccaggctcttcaaggaggtggatggagagggcaagccctactatgaggtgcggctggcctctgtgctgggcagcgagcccagcctggacagcgaggtgaccagcaagctgaagagctatgagttccggggcagccccttccaggtgaccaggggggactatgcccccatcctgcagaaggtggtggagcagctggagaaggccaaggcctatgctgccaacagccaccagggccagatgctggcccagtacatcgagagcttcacccagggcagcattgaggcccacaagaggggcagccgcttctggatccaggacaagggccccatcgtggagagctacatcggcttcatcgagagctacagagaccccttcggcagcagaggagaatttgagggctttgtggccgtggtgaacaaggccatgtctgccaagtttgagcggctggtggccagcgctgagcagctgctgaaggagctgccctggccacccacctttgagaaggacaagttcctgaccccagacttcaccagcctggatgtgctgacctttgctggcagcggcatcccagctggcatcaacatccccaactatgatgacctgcggcagacagagggcttcaagaatgtgtccctgggcaatgtgctggccgtggcctatgccacccagcgggagaagctgaccttcctggaggaggatgacaaggacctgtacatcctgtggaagggccccagctttgatgtgcaggtgggcctgcacgagctgctgggccacggcagcggcaagctgtttgtgcaggatgagaagggggccttcaactttgaccaggagaccgtcatcaaccctgagactggagagcagatccagagctggtacagaagtggagagacctgggacagcaagttcagcaccatcgccagcagctatgaggagtgcagagctgagagcgtgggcctgtacctgtgcctgcacccccaggtgctggagatcttcggctttgagggcgcagatgctgaagatgtgatctacgtgaactggctgaacatggtgcgggccggcctgctggccctggagttctacaccccagaggccttcaactggaggcaggcccacatgcaggccaggtttgtgatcctgcgggtgctgctggaggccggggagggcctggtgaccatcacccccaccactggaagtgatggccgcccagatgcccgggtgcggctggacaggagcaagatccgctctgtgggcaagccagccctggagcgcttcctgcggcggctgcaggtgctgaagagcactggagatgtggccggcggccgggccctgtatgagggctacgccaccgtgacagatgcccccccagagtgcttcctgaccctgcgggacacagtgctgctgaggaaggagagcaggaagctgattgtgcagcccaacacccggctggagggcagtgatgtgcagctgctggagtatgaggccagcgctgctggcctcatccgctccttcagcgagcgcttcccagaagatggccctgagctggaggagatcctgacccagctggccacagcagatgcccgcttctggaagggccccagcgaggcccccagcggccaggcctag

SEQ ID NO: 233758 - DNA, 606 bp, Artificial Sequence
  derived and/or modified sequence
atggctgacacccagtacatcctgcccaatgacatcggcgtgagcagcctggactgccgggaggccttccggctgctgagccccacagagcggctgtatgcctaccacctgagccgggccgcctggtatggaggcctggccgtgctgctgcagaccagccctgaggccccctacatctatgccctgctgagccgcctcttccgggcccaggaccctgaccagctgcggcagcacgccctggccgagggcctgacagaggaggagtaccaggccttcctggtgtatgctgctggggtgtacagcaacatgggcaactacaagagctttggagacaccaagtttgtgcccaacctgcccaaggagaagctggagagggtcatcctgggcagcgaggccgcccagcagcaccctgaggaggtgcggggcctgtggcagacctgtggggagctgatgttcagcctggagccccggctgcggcacctgggcctgggcaaggagggcatcaccacctacttcagcggcaactgcaccatggaggatgccaagctggcccaggacttcctggacagccagaacctgagcgcctacaacaccaggctcttctag

SEQ ID NO: 233759 - DNA, 2274 bp, Artificial Sequence
  derived and/or modified sequence
atgggagagcctgaggccggcagcgagtttgccaacggggctgctgctgctgctggccccatggctgacacccagtacatcctgcccaatgacatcggcgtgagcagcctggactgccgggaggccttccggctgctgagccccacagagcggctgtatgcctaccacctgagccgggccgcctggtatggaggcctggccgtgctgctgcagaccagccctgaggccccctacatctatgccctgctgagccgcctcttccgggcccaggaccctgaccagctgcggcagcacgccctggccgagggcctgacagaggaggagtaccaggccttcctggtgtatgctgctggggtgtacagcaacatgggcaactacaagagctttggagacaccaagtttgtgcccaacctgcccaaggagaagctggagagggtcatcctgggcagcgaggccgcccagcagcaccctgaggaggtgcggggcctgtggcagacctgtggggagctgatgttcagcctggagccccggctgcggcacctgggcctgggcaaggagggcatcaccacctacttcagcggcaactgcaccatggaggatgccaagctggcccaggacttcctggacagccagaacctgagcgcctacaacaccaggctcttcaaggaggtggatggagagggcaagccctactatgaggtgcggctggcctctgtgctgggcagcgagcccagcctggacagcgaggtgaccagcaagctgaagagctatgagttccggggcagccccttccaggtgaccaggggggactatgcccccatcctgcagaaggtggtggagcagctggagaaggccaaggcctatgctgccaacagccaccagggccagatgctggcccagtacatcgagagcttcacccagggcagcattgaggcccacaagaggggcagccgcttctggatccaggacaagggccccatcgtggagagctacatcggcttcatcgagagctacagagaccccttcggcagcagaggagaatttgagggctttgtggccgtggtgaacaaggccatgtctgccaagtttgagcggctggtggccagcgctgagcagctgctgaaggagctgccctggccacccacctttgagaaggacaagttcctgaccccagacttcaccagcctggatgtgctgacctttgctggcagcggcatcccagctggcatcaacatccccaactatgatgacctgcggcagacagagggcttcaagaatgtgtccctgggcaatgtgctggccgtggcctatgccacccagcgggagaagctgaccttcctggaggaggatgacaaggacctgtacatcctgtggaagggccccagctttgatgtgcaggtgggcctgcacgagctgctgggccacggcagcggcaagctgtttgtgcaggatgagaagggggccttcaactttgaccaggagaccgtcatcaaccctgagactggagagcagatccagagctggtacagaagtggagagacctgggacagcaagttcagcaccatcgccagcagctatgaggagtgcagagctgagagcgtgggcctgtacctgtgcctgcacccccaggtgctggagatcttcggctttgagggcgcagatgctgaagatgtgatctacgtgaactggctgaacatggtgcgggccggcctgctggccctggagttctacaccccagaggccttcaactggaggcaggcccacatgcaggccaggtttgtgatcctgcgggtgctgctggaggccggggagggcctggtgaccatcacccccaccactggaagtgatggccgcccagatgcccgggtgcggctggacaggagcaagatccgctctgtgggcaagccagccctggagcgcttcctgcggcggctgcaggtgctgaagagcactggagatgtggccggcggccgggccctgtatgagggctacgccaccgtgacagatgcccccccagagtgcttcctgaccctgcgggacacagtgctgctgaggaaggagagcaggaagctgattgtgcagcccaacacccggctggagggcagtgatgtgcagctgctggagtatgaggccagcgctgctggcctcatccgctccttcagcgagcgcttcccagaagatggccctgagctggaggagatcctgacccagctggccacagcagatgcccgcttctggaagggccccagcgaggcccccagcggccaggcctag

SEQ ID NO: 233760 - DNA, 2271 bp, Artificial Sequence
  derived and/or modified sequence
atgggagagcctgaggccggcagcgagtttgccaacggggctgctgctgctggccccatggctgacacccagtacatcctgcccaatgacattggagtgagcagcctggactgccgggaggccttccggctgctgagccccacagagcggctgtatgcctaccacctgagcagagctgcctggtacggcggcctggccgtgctgctgcagaccagccctgaggccccctacatctatgccctgctgagccgcctcttccgggcccaggaccctgaccagctgcggcagcacgccctggccgagggcctgacagaggaggagtaccaggccttcctggtgtatgctgctggggtgtacagcaacatgggcaactacaagagctttggagacaccaagtttgtgcccaacctgcccaaggagaagctggagagggtcatcctgggcagcgaggccgcccagcagcaccctgaggaggtgcggggcctgtggcagacctgtggggagctgatgttcagcctggagccccggctgcggcacctgggcctgggcaaggagggcatcaccacctacttcagcggcaactgcaccatggaggatgccaagctggcccaggacttcctggacagccagaacctgagcgcctacaacaccaggctcttcaaggaggtggatggagagggcaagccctactatgaggtgcggctggcctctgtgctgggcagcgagcccagcctggacagcgaggtgaccagcaagctgaagagctatgagttccggggcagccccttccaggtgaccaggggggactatgcccccatcctgcagaaggtggtggagcagctggagaaggccaaggcctatgctgccaacagccaccagggccagatgctggcccagtacatcgagagcttcacccagggcagcattgaggcccacaagaggggcagccgcttctggatccaggacaagggccccatcgtggagagctacatcggcttcatcgagagctacagagaccccttcggcagcagaggagaatttgagggctttgtggccgtggtgaacaaggccatgtctgccaagtttgagcggctggtggccagcgctgagcagctgctgaaggagctgccctggccacccacctttgagaaggacaagttcctgaccccagacttcaccagcctggatgtgctgacctttgctggcagcggcatcccagctggcatcaacatccccaactatgatgacctgcggcagacagagggcttcaagaatgtgtccctgggcaatgtgctggccgtggcctatgccacccagcgggagaagctgaccttcctggaggaggatgacaaggacctgtacatcctgtggaagggccccagctttgatgtgcaggtgggcctgcacgagctgctgggccacggcagcggcaagctgtttgtgcaggatgagaagggggccttcaactttgaccaggagaccgtcatcaaccctgagaccggggagcagatccagagctggtaccgcagcggggagacctgggacagcaagttcagcaccatcgccagcagctatgaagaatgtagagctgagagcgtgggcctgtacctgtgcctgcacccccaggtgctggagatctttggatttgaaggagcagatgctgaagatgtgatctacgtgaactggctgaacatggtgcgggccggcctgctggccctggagttctacaccccagaggccttcaactggaggcaggcccacatgcaggcccgcttcgtcatcctgcgggtgctgctggaggccggggagggcctggtgaccatcacccccaccaccggcagtgatggccgcccagatgcccgggtgcggctggacaggagcaagatccgctctgtgggcaagccagccctggagcgcttcctgcggcggctgcaggtgctgaagagcactggagatgtggccggcggccgggccctgtatgagggctacgccaccgtgacagatgcccctcctgagtgcttcctgaccctgcgggacacagtgctgctgaggaaggagagcaggaagctgattgtgcagcccaacacccggctggagggcagtgatgtgcagctgctggagtatgaggccagcgctgctggcctcatccgctccttcagcgagcgcttcccagaagatggccctgagctggaggagatcctgacccagctggccacagcagatgcccgcttctggaagggccccagcgaggcccccagcggccaggcctag

SEQ ID NO: 233761 - DNA, 1908 bp, Artificial Sequence
  derived and/or modified sequence
atgggcaactacaagagctttggagacaccaagtttgtgcccaacctgcccaaggagaagctggagagggtcatcctgggcagcgaggccgcccagcagcaccctgaggaggtgcggggcctgtggcagacctgtggggagctgatgttcagcctggagccccggctgcggcacctgggcctgggcaaggagggcatcaccacctacttcagcggcaactgcaccatggaggatgccaagctggcccaggacttcctggacagccagaacctgagcgcctacaacaccaggctcttcaaggaggtggatggagagggcaagccctactatgaggtgcggctggcctctgtgctgggcagcgagcccagcctggacagcgaggtgaccagcaagctgaagagctatgagttccggggcagccccttccaggtgaccaggggggactatgcccccatcctgcagaaggtggtggagcagctggagaaggccaaggcctatgctgccaacagccaccagggccagatgctggcccagtacatcgagagcttcacccagggcagcattgaggcccacaagaggggcagccgcttctggatccaggacaagggccccatcgtggagagctacatcggcttcatcgagagctacagagaccccttcggcagcagaggagaatttgagggctttgtggccgtggtgaacaaggccatgtctgccaagtttgagcggctggtggccagcgctgagcagctgctgaaggagctgccctggccacccacctttgagaaggacaagttcctgaccccagacttcaccagcctggatgtgctgacctttgctggcagcggcatcccagctggcatcaacatccccaactatgatgacctgcggcagacagagggcttcaagaatgtgtccctgggcaatgtgctggccgtggcctatgccacccagcgggagaagctgaccttcctggaggaggatgacaaggacctgtacatcctgtggaagggccccagctttgatgtgcaggtgggcctgcacgagctgctgggccacggcagcggcaagctgtttgtgcaggatgagaagggggccttcaactttgaccaggagaccgtcatcaaccctgagactggagagcagatccagagctggtacagaagtggagagacctgggacagcaagttcagcaccatcgccagcagctatgaggagtgcagagctgagagcgtgggcctgtacctgtgcctgcacccccaggtgctggagatcttcggctttgagggcgcagatgctgaagatgtgatctacgtgaactggctgaacatggtgcgggccggcctgctggccctggagttctacaccccagaggccttcaactggaggcaggcccacatgcaggccaggtttgtgatcctgcgggtgctgctggaggccggggagggcctggtgaccatcacccccaccactggaagtgatggccgcccagatgcccgggtgcggctggacaggagcaagatccgctctgtgggcaagccagccctggagcgcttcctgcggcggctgcaggtgctgaagagcactggagatgtggccggcggccgggccctgtatgagggctacgccaccgtgacagatgcccccccagagtgcttcctgaccctgcgggacacagtgctgctgaggaaggagagcaggaagctgattgtgcagcccaacacccggctggagggcagtgatgtgcagctgctggagtatgaggccagcgctgctggcctcatccgctccttcagcgagcgcttcccagaagatggccctgagctggaggagatcctgacccagctggccacagcagatgcccgcttctggaagggccccagcgaggcccccagcggccaggcctag

SEQ ID NO: 233762 - DNA, 954 bp, Artificial Sequence
  derived and/or modified sequence
atggccgacacccagtacatcctgcccaacgacatcggcgtgagcagcttggattgcagggaagctttccggctgctcagcccaacagagcggctctatgcctaccatctgtctcgcgctgcatggtacggtgggttagccgtcctcctccaaacatcgcccgaggcaccctacatttacgccctattatctcgcctcttcagggcccaggacccagaccagttaagacagcatgctttggcagaagggctcacagaagaagagtaccaggccttcttggtgtatgcggcgggggtttattcaaacatgggcaactacaagagcttcggagatacaaagtttgtgcccaaccttccaaaagaaaagctggagagggtgattctggggtcagaggcagcacaacagcatccagaggaggtccgtgggttatggcaaacctgtggggaactcatgttctctctggagcccagactcagacatctcggactgggaaaggaaggaatcactacgtatttctctgggaattgcaccatggaagacgctcgcgtgcgactcgatcgtagcaagatacgttcagtgggcaagcccgccttggaaagatttttaaggagactgcaggtcctaaagagcactggggatgtggccggaggccgtgccctgtacgaagggtacgccaccgttacagacgctcctccagagtgtttcctcacacttagagacacagtcctgctccggaaggaatccagaaaactcatagtccagcccaacaccaggctcgagggctccgacgtgcagctgctggaatacgaagcttccgccgccggtctcattcggtctttcagtgaaagattccccgaagatgggccggagctggaagaaatcctgacacagttagctactgccgacgccagattctggaagggaccgtccgaagctccatctggacaggcttag

SEQ ID NO: 233763 - DNA, 2214 bp, Artificial Sequence
  derived and/or modified sequence
atggccgacacccagtacatcctgcccaacgacatcggcgtgagctctctggactgccgggaggcctttcgtctgcttagtcctacggagagactgtatgcttaccacttgagcagagccgcgtggtatggcggtcttgctgtgttactgcagacgtcccctgaggcaccctatatttatgcccttctgtctcgcctgtttagagcccaagaccccgatcagctgcgccagcacgctctggctgagggacttaccgaggaggagtaccaggccttcttagtttatgctgccggggtctattccaacatggggaattataagtcattcggagacactaaatttgtgcccaacctacccaaggagaaactggaacgggttatcttagggagtgaggcggcccagcaacatcctgaggaggtccgcggattgtggcagacttgtggcgagcttatgttcagcttggagccacggctgaggcacttaggtctgggcaaggaaggtatcactacatacttttccggaaattgtacaatggaagatgcaaaacttgcccaagactttctggatagccagaacctctctgcttacaataccaggctttttaaggaggtggatggcgagggtaaaccttactacgaagtgcgactcgccagtgtgctgggcagcgagccctcgctcgactccgaggttacctcaaaactgaaatcctatgaatttaggggctctccttttcaggtgacgcggggggattacgcccctatactccagaaggttgtcgaacagcttgaaaaggccaaagcctatgccgccaattcccaccagggccagatgctcgcacaatacatcgagtcattcactcagggttcaatagaggcacacaagcgcggatccagattctggatacaggacaaagggcctattgtagagtcatatatcgggttcattgaatcctacagagacccgtttggctcccggggagagtttgagggattcgtcgctgtggtcaataaggctatgtctgctaaattcgaacgtctggtagcatctgccgagcaactgctaaaggagctgccctggcctccgaccttcgaaaaggacaagttcctcaccccagactttacatctttagatgtactcacgttcgccggctccggaatacctgccggtatcaacataccaaactatgatgatctgagacagacagaagggttcaaaaatgtgagcttggggaacgtcctcgccgtggcgtatgcaacccagcgcgagaagttaacattccttgaagaagacgataaagatctgtacatcctttggaagggaccgagttttgacgttcaggtgggcctccacgagctgttaggccacggttcggggaagctcttcgttcaggacgagaagggagcctttaactttgaccaggagactgtgatcaatccagaaaccggtgaacagatccagagttggtatcgctcaggcgagacctgggacagcaaattcagtaccatcgcatcttcatacgaggaatgtagagcagaaagcgttggcctttatttgtgcctacatcctcaggtgttggaaatatttggcttcgaaggagccgatgcagaagatgtcatttacgtgaattggttaaacatggtcagagccgggctgttggctttggaattctacacccccgaagcatttaattggcgccaggcacatatgcaagcacggtttgtgattcttcgagttctgttggaggccggtgagggtctcgtcacaattacccccactacagggtccgatggaagacccgacgcacgggtgagactggaccggtccaagattcgctctgtcggaaaaccagccttggaacgcttcctgcggcggctccaggtactcaaaagcactggggatgttgccggaggcagagcactctacgagggatacgcaacagtgacggatgcccctccagagtgcttccttacacttcgggatacagttctactgaggaaagaaagtcgaaaactgatcgtgcagcccaacacccgacttgaggggagcgatgtacagctgctggaatatgaggcgtccgcagcagggttaatacggtcatttagcgaacggttccctgaggacggaccggaacttgaggaaatattgacccagctggcgaccgccgacgcccgcttctggaaggggccaagtgaggccccgagcggacaggcctag

SEQ ID NO: 233764 - DNA, 2214 bp, Artificial Sequence
  derived and/or modified sequence
atggccgacacccagtacatcctgcccaacgacatcggcgtgagctcactggattgtagggaggcatttagactgctgtctcctacagaaagactgtatgcatatcatctgtcgcgcgccgcctggtacggcggcctcgcagtgctgttacagacaagtcctgaggccccatatatttatgcccttttaagccgcctgtttagagcacaagaccccgaccagctcagacagcacgcccttgctgagggattgaccgaagaagagtatcaggcattcttggtttacgcggcgggggtttattctaatatggggaactataaaagtttcggcgacactaagtttgtacccaacctgcccaaggagaagctagagcgagtgattctcggatcagaagccgcgcagcagcatccggaagaggttcgggggctgtggcaaacgtgcggcgagctcatgttcagcctggagcccaggttacggcacctcgggctcggaaaggagggaataaccacttatttttcagggaactgcactatggaagacgctaaactggcccaggacttcttagattcccaaaacctgtccgcatacaatactaggctgtttaaggaagtagacggggagggtaaaccctattatgaagtgagattggcgtctgtgctgggatccgaaccttccctggactctgaggtgaccagcaagctcaaaagctatgagttccggggtagcccttttcaagtcacacgtggggactacgcccccattctgcaaaaggtagtggaacagctggagaaggcgaaggcctacgcggcgaatagtcatcagggacagatgttagcccagtatatcgagagttttactcaggggtccatcgaggcacataagcgaggaagtcgcttttggatacaggataagggacctatcgttgaaagctacattgggtttatcgaatcttatcgggaccctttcggcagcagaggcgagttcgagggtttcgtcgcagtggttaataaggcgatgagcgctaaatttgaacgtctggtcgccagtgccgagcagctgctaaaggagctgccatggccgcccacctttgagaaggacaagtttttgactccggacttcacttccctggacgtgttgacattcgccggcagtgggatcccagccggtattaatattcccaactacgatgacttacgccaaactgaaggctttaagaatgtgtcgctcggaaacgtgctagctgtcgcgtacgcaacgcagcgcgagaaacttacctttttagaagaggatgataaagatctgtacattctatggaagggaccctcatttgatgtccaggtggggctgcatgaactgttgggccatggatccggaaagctttttgtgcaggatgagaaaggcgcattcaacttcgatcaggagactgtcattaaccccgagacgggagagcagattcagagctggtaccggagtggcgaaacctgggatagtaagttctccacaattgccagttcctacgaggaatgtagggctgagagcgtgggtctatacctctgtctccaccctcaggtcttagaaatcttcggcttcgagggagctgatgcagaggacgtcatctatgtgaattggctcaatatggtgcgggccggactgctcgccttggagttttacacacctgaggcctttaattggagacaggctcacatgcaggcccgtttcgtgatcctgcgtgtgctgctggaagctggcgaaggtctggtgactatcacccccactaccggatcggatggaaggccagacgccagggtacgtctcgataggagcaagatccgttccgtgggaaagccggctcttgaacggtttctgcggcgactgcaggtcctgaaatccaccggcgacgttgccgggggccgagctttatatgagggctatgctacagtaaccgatgccccacccgagtgcttcctcacccttcgagatactgtgcttcttaggaaggaatctcgcaaattaattgtacagcccaatactcgtctggaaggatccgacgttcagttacttgaatacgaagcaagtgcagccggcctcattcggagcttctcagagcggtttccagaagacggccccgagctggaagaaatcctgacacagctagccaccgctgacgctcgcttctggaagggcccgagtgaagcaccttctggccaggcttag

SEQ ID NO: 233765 - DNA, 606 bp, Artificial Sequence
  derived and/or modified sequence
atggccgacacccagtacatcctgcccaacgacatcggcgtgagctcactggactgtcgcgaggccttcaggctgctctctcccacagagaggctatacgcttatcacctctctcgggccgcgtggtacgggggcttggctgtacttctgcagacctcccccgaggccccatatatctacgccctcctgagcagactttttagagctcaggatcctgatcagctgcgccagcatgctctggcggaggggctcaccgaagaggaataccaggcttttctggtctacgctgcgggtgtctatagtaacatggggaattataaatccttcggagataccaagttcgtaccaaacctgcctaaagaaaaacttgaacgcgttattctggggagcgaggccgctcagcagcaccccgaagaggtgagaggcctttggcagacttgcggcgagctgatgttcagcctcgagccccgcctgcgacacctgggactgggcaaagaaggaattactacgtatttcagcggcaattgcaccatggaagacgccaagttggcccaggattttctggattcacaaaatctgtccgcttataacacgcgcctgttttag

SEQ ID NO: 233766 - DNA, 2274 bp, Artificial Sequence
  derived and/or modified sequence
atgggcgagcccgaggccggcagcgagttcgccaacggcgccgccgcagccgccggacccatggccgatactcagtatattctgcctaatgatatcggggtgtcatcgctggattgccgggaagcttttcggctgctcagccctaccgaacggctttatgcttatcatctgtcccgcgccgcatggtacgggggccttgcagttctcctgcagacctctcccgaggccccctatatctatgccttgttaagcagactctttagggctcaggacccagaccagctgcggcagcatgctttggccgagggcctgacagaagaagagtatcaggccttcttagtctacgcggccggagtgtattctaatatggggaactataaatcttttggagacaccaaatttgtcccaaacttgcctaaggaaaaactggaacgcgtaatcctgggttcagaggcagcccaacagcatcctgaggaagtccgaggactgtggcagacctgtggcgaactgatgttcagtctagagcccagactgcgacacttgggcctcgggaaggagggtatcactacttactttagcggtaactgtactatggaggatgcaaagctggcgcaagacttcctggactctcagaatttgagcgcctataacactagactctttaaggaggtggatggagaggggaagccttattacgaggttagacttgccagtgttctgggaagcgagcctagcttagatagcgaggtaacctcaaaactcaagagctatgagttccgagggtcaccgtttcaagtaactaggggcgactatgcgcccatcctgcaaaaagtcgttgaacaattagagaaggccaaggcctacgccgcaaactcacaccaaggacagatgctagcccagtacatcgagtcttttacacagggatctatagaagcccacaaaaggggaagtcggttttggattcaggacaagggccctatcgtggagagctacatcggctttattgagagttacagggatccctttgggtccaggggcgagttcgaggggtttgtggccgtcgtgaataaggctatgagcgcaaagttcgagcgtctggtggctagtgcagagcagctgctcaaagaactcccttggcctccgaccttcgaaaaggataaattcctgactccggacttcacctcacttgacgttctgacatttgcaggttccggaatccccgctggcattaacatacctaattacgacgacctgaggcagactgaaggcttcaaaaatgtttctttaggaaatgtgctggctgtcgcttacgccactcagagagaaaaacttactttcctcgaggaagacgataaggatctgtatattctgtggaagggcccttcctttgatgttcaagtcggcctgcatgaactgctgggccatggttcgggaaaactatttgtgcaggatgaaaaaggcgcatttaatttcgatcaggagaccgttatcaaccccgagaccggcgagcaaatccagtcctggtatcgcagcggcgagacatgggattcgaagttttctactatcgcgtcttcatacgaagaatgtagagccgagtcggttggactttacctttgcctgcacccacaggttcttgaaattttcggttttgaaggagcagacgctgaggatgtcatctacgtaaattggctcaatatggtaagagccggcctgctggctctggagttctacacaccagaagcatttaactggcgacaggctcacatgcaggctaggttcgtgattctgagggtcctgttggaggcaggcgaagggttggtgactattaccccaacgaccggctccgacgggaggcctgacgcacgggtccgcctggatcgcagtaagattcgaagtgtcggcaaaccggcgctggaacgtttcctgcgaagactgcaggtcctgaagtccacaggcgatgttgctggtggcagggctctatatgaaggctacgcaacagtcacagacgccccccccgagtgcttccttacccttcgcgacacggtgctcctgcgaaaagagtcaaggaagctgatcgttcaacctaacacgcgccttgagggcagcgacgtgcagctcctggaatacgaggcgagcgctgctgggttgattagatccttttcggaacggttcccagaggatgggcctgagttggaagaaatcctgacacagcttgcaactgcggacgctcggttctggaagggtcctagcgaggcccctagtggtcaggcttag

SEQ ID NO: 233767 - DNA, 2271 bp, Artificial Sequence
  derived and/or modified sequence
atgggcgagcccgaggccggcagcgagttcgccaacggcgccgccgcggcaggccctatggccgatactcagtatatcttgcctaatgacatcggtgttagctctttggactgtcgggaggcctttaggctcctctcaccaaccgagcggctgtacgcctaccacctttcccgcgcagcatggtatgggggcctggccgtgttgctacaaacctcacctgaagctccatatatttacgctcttctgtcacggttgtttcgcgcccaggaccccgatcagcttcgacaacacgccctggcagaagggctcaccgaagaagagtatcaggcattcctggtctacgcagctggagtctactccaacatggggaattacaaatccttcggcgacaccaaattcgtccccaatctgcccaaagagaaactcgaaagggtcatccttgggtccgaagcagcccagcagcacccagaggaggtgagagggctgtggcagacatgcggggaactaatgttcagccttgaaccccgtctgcgccatctggggctgggtaaggaaggtattactacctatttttccgggaattgtactatggaggacgccaagctcgcacaagatttcctggactcccagaatttgtcagcgtacaatacaaggctgttcaaggaggtcgacggcgaaggcaaaccttactacgaagttcgtctagcttccgtcttggggtccgaaccaagcttggattctgaagtgacctccaagctgaaatcttatgagtttcggggctctccgtttcaagtaactcggggcgattatgccccaattctccagaaggtggtggagcaattagagaaagctaaagcttatgctgcgaactcccaccaaggacagatgctggctcagtatattgaaagctttactcagggctccatcgaggcacataagaggggatctagattttggattcaggataaggggccaattgtggagtcgtacataggattcatcgaaagttatagagaccccttcggcagtaggggggaatttgagggtttcgtcgcggtggtgaataaagcaatgtctgctaaattcgagcgcctggtggcttcggctgagcagctgctgaaggagcttccctggccccccaccttcgagaaggataagtttttaacaccagattttacaagcttagacgtgcttacattcgcagggtccggtatacccgcaggcatcaatataccgaactacgatgacctcagacagacagagggatttaagaatgtgtccctcggcaacgtcctagctgtggcctacgccacgcagagagagaaactaacatttctcgaagaagacgacaaagacctgtatatcctctggaagggaccaagctttgatgtacaggtaggcctgcatgagctactgggacatggtagtggaaaactttttgtgcaagatgaaaaaggcgcgtttaacttcgaccaggaaaccgtcatcaacccggagacaggtgaacaaatccaaagttggtaccgttctggagaaacttgggatagcaagttctccaccatcgcaagttcatatgaagagtgtcgggcggagagtgttggattgtatctgtgcctacatcctcaggttctggaaatatttggcttcgaaggcgccgacgccgaggatgtcatatacgtcaattggctgaatatggtccgtgccggactcttagcattagagttctatacgcccgaagctttcaattggcgccaggcgcatatgcaagcccgtttcgtgattctacgtgttctgctggaggctggcgaaggactggtgacaataaccccaactaccgggagcgacggacgtcccgatgcacgggtgcgccttgacaggagcaaaatcaggtctgtggggaagcctgcattggagcgctttctacggagattgcaagtgctgaagagtactggcgacgtggctggtggcagagccctttacgaaggttacgccaccgtgactgacgccccccctgaatgctttctgacactgcgtgatactgtgttgctgagaaaagaaagccgaaaactgatcgtgcagcccaacactcgcctagaggggtctgacgtgcaactcctagaatacgaggctagcgcagcgggtctgatccggagtttctcagaaagatttcccgaagacgggcccgaactggaggaaatcctcacacaactcgctactgctgacgcaaggttttggaaaggcccttcagaggccccctctggacaagcgtag

SEQ ID NO: 233768 - DNA, 2214 bp, Artificial Sequence
  derived and/or modified sequence
atggccgacacccagtacatcctgcccaacgacatcggcgtgagcagcctggactgccgcgaagcatttcgcttgttgtccccaacagagcgcctgtatgcctaccatctgagtcgagcagcgtggtatggcggtctggcggtgctgctccaaacctcccctgaagctccctatatctatgccttgctcagcagactgttccgcgctcaggacccagatcagcttcgtcaacacgctctggccgaaggcctgaccgaggaagagtatcaggcctttctggtctacgcagccggagtgtatagcaacatggggaattacaaatccttcggcgacacaaaatttgtgcctaatctgccgaaagaaaagcttgagcgggtgatactgggaagtgaagctgcacagcaacacccagaagaagtccggggcttgtggcagacctgcggagaacttatgttctccctggagccaagactgaggcacttgggccttggtaaagaaggtattacaacttatttcagtgggaactgcaccatggaggacgctaagttggctcaagacttcttagattctcaaaatctttcagcctacaacaccaggctcttcaaggaggtcgacggcgaagggaagccgtattacgaggtgagactcgcgtcagtactcgggtccgagccttcgttagactctgaggtaacatcgaaactgaagtcatatgagttcagagggtcaccgtttcaggtgacgcggggagactatgcccccatactgcaaaaagtggtagagcagttagagaaggccaaggcttatgcagccaattcgcatcaggggcaaatgcttgcccagtatatcgagtctttcacccaggggtcaatagaggcacacaaacgaggctcaagattttggatccaggataagggtccaatagtggagtcctatattggatttatcgagtcgtatcgcgatccatttggttctcgaggagagtttgaggggttcgttgctgtagtcaacaaggctatgtctgccaagtttgaaagactagtggcttcagctgaacagctcttaaaggaactgccttggccccctacgttcgagaaagacaaatttttgacaccggactttacatccttagacgtactgacattcgcgggatcggggatccccgctgggattaatatccccaattacgatgatctgagacagactgaaggcttcaaaaatgtgagcctagggaacgttttggccgttgcatacgcaacccagcgagaaaagctcacgtttttggaggaagacgacaaagacttgtacattctgtggaaagggccctccttcgatgtccaggtgggattacatgaactactgggacatggtagcgggaagttgttcgtccaggatgaaaaaggggcttttaatttcgatcaggagactgtgattaaccccgaaactggtgagcagattcagagctggtaccggtccggcgagacctgggacagcaaattttcaacgatagcttcctcttacgaagagtgtagggctgagagcgtcgggctatatctgtgtttgcatccacaggtcctcgagatattcggcttcgaaggggctgatgcagaagatgtgatctatgtgaactggttaaacatggtccgggcagggctactggctctcgaattctacacccccgaagcatttaactggaggcaggctcatatgcaggctcggttcgtcattttgagagtgctgctggaggccggtgagggtttagttaccatcacacctacaaccgggtctgatgggcgaccggacgcaagagttcggctggatcggagcaagattagatccgtgggtaagccagcgctggagagatttctccgaagattacaagtgctgaagtccaccggcgatgtagctgggggtcgggccctgtatgagggctatgccacagtgacagacgcaccccctgagtgcttcttaacgctgcgcgatactgtgttgctgcgcaaagagtcccgtaaactcatcgtccagcctaacacaagactggagggcagtgacgtgcagctccttgagtatgaagcctccgccgcgggcctgatcagaagctttagtgaacgattcccagaagacggccctgagcttgaggagattctgacccagctcgcaacagcggacgcccggttctggaaaggcccatccgaagcaccaagcggacaggcatag

SEQ ID NO: 233769 - DNA, 1908 bp, Artificial Sequence
  derived and/or modified sequence
atgggcaactacaagagcttcggcgacaccaagttcgtgcccaacctgccaaaagagaaattggaacgcgtgatactgggctctgaagccgcccagcagcatcccgaagaggtgcgggggctgtggcagacatgcggcgaactgatgttctctttagagccaaggcttaggcaccttggcttgggcaaggaggggattactacatattttagcggaaattgcaccatggaggatgccaagcttgcacaggacttcctggatagccagaatctatcggcctataatactcggctgtttaaggaagtcgatggggaagggaagccatactatgaagtgcgcctcgcgtcagtgctggggagtgagccctcccttgacagcgaagttacaagcaaactcaagagctacgagttcagaggatcaccctttcaggtcacccggggcgactacgcgcccattctgcagaaggtagtggagcagctcgaaaaggccaaggcatatgccgctaacagtcaccagggacagatgctcgcccagtatattgagtctttcacgcagggaagcatcgaagcacacaaacgaggatcaagattctggattcaggacaagggtcctattgtggaaagctacattggcttcatcgagagttatcgagaccccttcggtagcaggggagagtttgaagggttcgtggcggtggtaaacaaagcaatgtccgcaaaatttgagcgactggtggcttctgctgaacaactgctcaaagaactaccatggccacctacctttgagaaggacaaattcctcactccggatttcactagcctcgacgttttgacgttcgctggctcaggcatcccggcaggaattaacatccccaactatgacgacctaaggcagaccgaggggttcaaaaatgtgtctctaggcaatgtgctggcagtggcctatgctacacagagagaaaaactgacttttttggaggaggacgacaaagacctatacatactatggaagggtccttcattcgacgttcaggtggggttgcatgagcttttaggacacggctctggcaaactatttgtccaggatgaaaagggggctttcaacttcgatcaggaaacagtgattaacccagagaccggtgagcagatccagagctggtaccgcagtggcgagacatgggactccaagttttccacgattgccagctcctatgaggaatgcagagctgaatccgtaggtctttatctctgtctgcaccctcaagtgctggaaatatttgggttcgagggggcggatgcagaggacgttatctacgtgaactggctgaacatggtgagggcggggctattggcactggaattctacacacctgaggccttcaactggcggcaggctcacatgcaggctcgatttgttatactgcgagtgctgctcgaggccggtgaggggctggtgactattacccccacaacagggagtgatggtcgcccagacgcccgcgtgaggttggatagatcaaaaatcaggagtgtcgggaagccggccctggagagattcttacgccggctgcaggttctgaaatccacgggggatgtcgcaggagggagggccctgtacgagggctatgcaaccgtgactgatgctccccctgagtgtttccttacgctgagagacaccgtactgctgaggaaggagtcaagaaaacttatcgttcagccaaataccagacttgagggtagcgatgtccagctattagaatacgaagctagtgccgcaggtctcatacggtccttcagcgaaaggttcccagaagacggccccgagctagaggaaatcttgacacagctggcaacagcagacgcgagattttggaaaggcccatcagaagccccttcaggacaggcctag

SEQ ID NO: 233770 - DNA, 954 bp, Artificial Sequence
  derived and/or modified sequence
atggccgacacccagtatattctcccgaacgacattggtgtttcaagcctggactgcagggaagcctttagactcttaagtccaacggagcgtttgtacgcgtatcatttgtcgcgggctgcatggtacgggggactggcagtcctcctgcaaacctcaccggaggctccatatatctatgcactgctgtctcggctgtttagagctcaagatcctgaccaattgcggcagcatgccctcgcggagggcttaactgaggaagagtatcaagctttcctggtatatgccgctggggtatactctaatatgggcaactataagtcgtttggagatactaaatttgtacctaacctccctaaggaaaagcttgaaagggttatcctggggagtgaagccgcacagcagcaccccgaggaggttcggggtttgtggcaaacctgtggggaacttatgttcagcctggagcctagacttcggcacctgggcctagggaaggaaggcattacaacctactttagtggaaattgcactatggaagacgcacgcgtccgacttgatagaagcaaaatcagatccgtgggcaagccggctctggaaagattcctgcggagactccaagttctgaagtccacaggagacgtggccggtggccgtgcactttacgagggctacgccacagtcactgacgcaccccctgagtgctttctgacactgagggacacagtacttcttcgtaaagaatctcgtaagctgatcgtgcagcctaacacacgacttgagggatctgatgtgcaactcctcgagtacgaggcaagcgctgccggactcatcaggagcttcagcgaaagatttcctgaggacggtcccgaactggaggaaattctcacccaattagccactgctgatgccaggttttggaaagggccttccgaggctccctctgggcaggcctag

SEQ ID NO: 233771 - DNA, 2214 bp, Artificial Sequence
  derived and/or modified sequence
atggccgacacacagtatattcttccgaacgatatcggtgtgtccagcctagactgtagagaggcattcagattgcttagtccaaccgagcgcctatacgcataccatctcagccgggcagcatggtatggtggactggcagtgctactgcagacgtctcctgaggccccttatatctacgctcttctcagcaggctgtttagagcccaggaccctgatcagcttcgccagcacgccttagctgaggggctgacggaggaagagtaccaggccttccttgtttatgccgctggtgtgtacagcaatatggggaactacaagtcctttggtgatactaaatttgttcccaatctgccaaaagagaaactagagagggttattcttggttccgaagccgcacagcagcatcctgaagaagtccgaggcttgtggcagacatgtggagaactgatgttttctctcgaacccaggctgcgccaccttgggctgggcaaggagggcatcaccacatacttttcaggcaattgtacgatggaagacgccaaactggctcaagactttctcgactcgcagaacctgagtgcctacaatacaagactgttcaaagaggtagatggtgagggcaagccctactatgaagtacggcttgcctccgtgctgggcagtgaaccaagtctggactctgaggttacgagcaaactgaagtcctatgagttccgcggttcaccttttcaggtgactaggggcgactacgcccctatcctgcagaaggtggtggaacagctggaaaaagctaaggcgtatgccgctaacagtcatcagggacagatgctcgcccaatatatcgaatctttcacccaagggagtatagaggcacataaacgtggatccaggttctggatacaggacaaaggaccaatagtcgaaagctacattggcttcatagagtcttaccgagatccctttggatctcggggagaatttgaagggttcgttgctgttgtgaataaggcaatgagcgccaaattcgaacgactggttgcctctgcggagcagctgctcaaggaacttccatggcctccgaccttcgagaaggacaagttcttgaccccagactttacttccctcgacgtgctaacttttgcaggcagtggaattcccgcaggaataaacattccaaactacgacgacctaaggcagactgaggggttcaagaacgtctctcttggcaacgtgcttgctgtagcttacgctacacagagggaaaaacttacatttttggaggaggacgataaggacctgtatatcctgtggaagggtccttcctttgacgtccaagtcgggctgcatgaactacttggccatgggtcaggaaaactctttgttcaagatgagaagggtgccttcaattttgaccaagaaactgtcatcaacccagagacaggcgaacaaattcagtcctggtaccgctccggggagacctgggacagtaagttttctacaatcgcctcctcctatgaggagtgtcgggcagagtcagtaggattgtacctgtgtctccatccacaggtattagaaatctttggctttgaaggtgccgatgcagaagacgtgatctatgtcaactggctgaacatggtaagggctggactcttggcacttgagttctatacacccgaagctttcaattggcgtcaagcccatatgcaggctaggtttgtgattcttagggtgttgttggaagccggagaaggtttagtcacgataactccaacaactggaagtgatggacgcccagacgccagagtcagactggaccgcagtaagatccgcagcgtaggcaagcccgctctggagcgattcttgcggaggctgcaggttctcaagtcgaccggcgacgtcgctggcggaagggctctatacgagggttatgctacagtcactgatgcacctcccgaatgcttcctaacgctacgcgacaccgtcctcctgaggaaggaatcaaggaagttaatagtccagcctaacactagactggagggatccgacgtgcagctgttggaatacgaagccagcgcagccggtctgattagaagcttttctgaaagattccccgaggacggccctgagttagaagagatccttactcagctggccaccgccgatgccaggttttggaaaggcccatctgaggcaccctccggtcaggcttag

SEQ ID NO: 233772 - DNA, 2214 bp, Artificial Sequence
  derived and/or modified sequence
atggccgacacacaatacatcttgcccaatgatattggagtgtcgtctctcgactgccgcgaggccttcaggttactgtctcccaccgagagactttacgcctaccacctgtctagagctgcgtggtacgggggactggcagtcttgctccaaacgtcccccgaagcaccttatatctatgccttacttagtcgcttgttcagagcccaagatccagatcagttgaggcagcatgccctggcggaaggcctgaccgaggaagagtaccaggccttcttggtgtatgcagccggagtgtatagcaatatgggcaattataagagctttggagatacaaagttcgtccccaacctgccgaaagagaagcttgagagagttatccttggaagcgaggctgcacagcagcacccagaagaggtccggggactttggcagacttgcggggagctgatgttctccctggagccacgactgcgtcatcttggcctgggcaaagaaggtatcactacgtactttagcggcaactgcacaatggaggacgcaaaactggcacaggatttcctcgacagccagaatctgtcagcgtacaacacacgactttttaaggaggtggatggtgagggaaaaccctactacgaggtgcgcctcgctagcgttctcggaagcgagccctccctcgatagtgaggtgacctccaagctgaagtcctacgaatttcgcggaagcccatttcaggtgaccaggggcgattacgcgcctattctgcaaaaggttgttgagcagctggagaaggctaaggcatacgcagcaaatagccatcagggtcagatgctcgcgcaatacattgaatcatttacccagggatctatcgaagctcacaaaagggggagccgcttctggatccaagacaaaggacctattgtggaatcttatattggattcattgagagctacagagaccctttcggaagccgcggagaatttgaaggattcgtggcggtggtcaacaaggcaatgtcggctaaatttgaacgccttgtggcctctgcagagcaactcttaaaggagctaccttggcccccaaccttcgagaaagacaaattcctgacgcctgactttacgtcacttgacgtccttacgtttgctggctcggggatccctgcaggaattaatataccgaactacgatgacctgcgtcagaccgaaggctttaagaatgtgtctctcggtaacgttttggcggtagcttacgcaacgcagagagagaagctaactttcctggaagaagacgataaggacctatatattctgtggaaggggcctagttttgatgtccaagttgggctccatgagctgctaggccatggctcaggtaaattgttcgtgcaagacgaaaaaggagcttttaattttgaccaggagacagtgattaatcccgaaacaggcgaacagattcaaagttggtatcggtcgggggaaacatgggactccaagttttctactatagccagcagttatgaggaatgtagagcagagtctgtgggcctatacctttgcctgcatcctcaagtcctcgaaattttcggcttcgaaggagctgacgcagaagatgtaatctacgtgaactggctgaacatggtcagggcgggactgctggcattggagttttatacacctgaagccttcaactggcgccaggcccacatgcaggctcgatttgtgatcctgagggtcctgttggaggccggagaaggtctcgtcactatcaccccgacgacgggtagtgatggacgcccagatgcccgagttagactggaccggagtaaaattcgtagcgtagggaaacctgctctcgagcggtttctcagacggctacaagtcctgaaaagcacgggagatgtggcgggaggcagggccctttacgagggttacgccactgtgacagacgctccccctgagtgcttcctgacgcttcgagataccgtgttgctcagaaaggaatctcggaaactaatagtgcagccaaacacacggctggaagggtccgacgtgcaacttctggagtacgaagcctctgcagctggactgattcgatctttctcggaacgttttcccgaggacggcccagaacttgaggagatcctgacccagctagccactgcagatgccagattctggaagggtccctctgaggcacccagcgggcaggcctag

SEQ ID NO: 233773 - DNA, 606 bp, Artificial Sequence
  derived and/or modified sequence
atggccgacacccagtatattttacccaacgatattggggtgagttcactagactgccgggaggcatttaggctcctctccccaaccgagcggttatacgcttatcatctaagcagagcagcttggtacggtggtttggctgtgctgttgcagacaagtcccgaggccccttatatatatgccctgctgagtagactattccgagcccaggaccccgaccagctaagacagcacgccttggccgaggggcttacggaggaagaataccaagcattcctggtttatgccgcaggcgtctactccaatatgggcaactacaaaagttttggggatacgaaattcgtgccaaacctgcctaaagagaagttagagcgggtaatccttggatctgaagcggcacagcagcatcccgaagaagtccgtggtctctggcagacctgcggcgagctgatgttctctctggagcccagactgcgtcacctcggccttgggaaagaggggatcacaacatacttctccggcaactgcaccatggaagatgcaaaattagcccaagatttcctcgattcccaaaatctctcagcttataatacccggcttttctag

SEQ ID NO: 233774 - DNA, 2274 bp, Artificial Sequence
  derived and/or modified sequence
atgggggaacctgaggcagggtctgaattcgcgaacggggcagccgcagcagccggtcccatggccgatacccagtacatactgccgaatgacataggagtgagttcgctggattgccgggaggcatttcgtctgctgtctcctacagagcggttatacgcttatcacctgagccgcgctgcctggtacggcggattggccgtactgctccagacctcccccgaggccccttacatctatgcactcctgtcgcgactgtttagagctcaggatcccgaccagttgcgccagcacgccttggccgagggattgaccgaggaagagtatcaggcgttcctggtctatgctgcaggggtgtactctaacatgggaaactataagagtttcggcgacactaagttcgttcccaatctgcccaaggagaaacttgaaagggttatcctcgggagcgaagccgcacagcagcaccctgaggaggttagaggcctttggcaaacctgtggagaactgatgttttccctggagcctcgcctgaggcacctgggcctcgggaaggagggaattaccacatatttttctggcaactgcacgatggaggacgctaagctggcccaggactttttggatagtcagaatctgagcgcttataacactcggctcttcaaggaggttgacggggaaggcaagccatattatgaggtcaggcttgcaagtgtgctagggtcagagccgagcctggactctgaagtgacctcaaaactcaagtcatacgagtttcggggaagcccatttcaggtaacaaggggggactatgccccaatcctgcagaaagtggtcgagcagcttgaaaaggctaaagcttacgcagctaattcccatcagggacagatgctcgcgcagtatatagagagctttactcagggcagcattgaagcgcacaagagaggtagcaggttttggattcaagacaaaggacctattgtggagtcgtatatcggcttcattgagtcttatcgcgaccccttcggatcccggggagagttcgaaggcttcgtggctgtggttaacaaggcgatgagcgccaagttcgaacgtcttgtcgcaagcgctgaacaactcttgaaggaactcccctggccacctacattcgaaaaagataagttcttgacaccagacttcacatctttggacgtgctcactttcgccggatccggaatcccagccggtatcaacattccgaactatgacgacctgaggcagactgagggattcaaaaatgtcagcctgggaaacgttctggccgttgcatatgccacccaacgagagaaactgaccttccttgaggaagatgacaaggacctgtatattctctggaagggtccttcctttgacgtccaggttggcttacatgaattactagggcacggatccggtaagttgttcgtgcaggacgagaaaggtgcattcaattttgatcaagagacggttatcaaccccgagaccggggagcaaatccaaagctggtatcgttcaggcgagacctgggattcaaaatttagtactatagcttccagctacgaagagtgccgcgcagagtctgttggactttatttgtgtcttcacccccaggtgctcgagatttttgggttcgagggtgctgacgctgaggacgtgatctatgtgaactggctgaacatggtgcgggctggcttactggccttggaattctatacacccgaggcttttaactggcgacaggcccacatgcaggccagatttgtaatcctccgagtgttactggaagcgggagagggacttgtgaccatcactccaacaacaggatcagatggaagaccagatgctcgtgtgaggttagatcggtccaaaatcaggagcgtgggcaagccagccttggaacggttcttgcgcaggctgcaggtgctaaaaagtaccggggatgtggctggcggtagagctctgtacgagggatacgcaaccgtaacggacgcgcctcctgaatgttttctgactctccgggacactgttctactgagaaaggagagtcgcaaactcatcgtgcagcctaacacccggcttgagggttctgacgtccagctactcgaatatgaagcttcagccgctggcctaataagatctttctcagagagatttcctgaagatggccctgagctggaggagattttaactcagctggctaccgcagacgcgagattctggaagggtccatcagaagcacctagcgggcaggcttag

SEQ ID NO: 233775 - DNA, 2271 bp, Artificial Sequence
  derived and/or modified sequence
atgggggaacctgaagccggatccgaattcgccaatggtgcggctgccgcagggccaatggcagatactcagtatatcttgcctaatgacataggagtctcatccctggattgtagggaggcctttagattgctgtcacccacagagaggctctacgcctatcacttatcaagagccgcatggtacgggggtctcgctgtgctgctgcaaacgtcccccgaagctccgtacatctatgccctcctgtcccgtctgttcagagctcaggacccggatcagttaaggcaacatgcgcttgctgaaggcctaactgaggaggaataccaagcctttctggtgtatgctgctggggtctacagtaatatgggcaactacaagtcattcggagacaccaaattcgtccccaatctgccaaaagagaagctggaacgggttatattgggatcagaagcagctcagcaacatcccgaagaggtgcgcggactctggcagacctgcggtgaattgatgttttcgctggagcccaggctgaggcatctgggtctgggcaaggagggaataaccacttatttctctggtaactgtacaatggaggatgcaaaactggctcaggatttcctagacagtcaaaacctgtccgcatacaatacgcgccttttcaaggaggttgacggcgaaggcaagccttactacgaggtaagactcgccagtgtcctcggtagcgaaccttccctggacagcgaggttaccagcaagcttaaaagctacgagtttagagggtcgccctttcaggtcacccggggtgattacgcacccatcctccagaaagtggtggaacagttggagaaggcgaaggcctacgcagcaaatagtcatcaggggcagatgcttgcccaatacatagaatcattcactcagggcagtatagaggctcataagcggggatctagattctggattcaggacaaaggacctatagtggaatcctatattggctttattgaatcatatagagatcccttcggctctcgcggtgagttcgagggatttgtggccgtggttaacaaagccatgtccgctaaattcgaaaggctggtggctagtgctgaacagctgttaaaggaattaccctggccgcctacttttgagaaagacaaatttttgactccagatttcactagcttggacgtgcttacctttgccggttctggcattcccgcaggaattaacattccaaactacgacgatctccgacagacggagggctttaaaaatgtctctctgggcaatgtgttggcagtggcctacgccactcagcgtgagaaactcacattccttgaggaagatgacaaagacctttatatcctttggaaggggcctagctttgatgttcaggttggactgcacgagctcctcggacacggatccggcaagctgttcgtccaagatgagaaaggggcatttaattttgatcaagagactgttatcaacccagagactggggagcagattcaatcatggtatcgttctggcgagacatgggattcgaaatttagtacaatcgcaagtagttatgaggaatgccgcgcagagtctgtgggcctgtatctttgcttgcatccacaggtgttagagatttttgggtttgagggtgcggacgccgaggatgtgatatacgtaaactggttaaacatggtcagagctgggcttctggccctggagttttatacgccggaggcttttaattggcggcaagcccatatgcaggccagattcgtgatcctgcgggtgctgttggaggccggagaaggacttgtgacaatcacacccactactggctcagatgggagacccgacgctagagtccgcctggatagatccaagattcgttcagtgggaaaacctgccctggagcgatttttgcgcagactacaagtcctgaagtccacaggggacgtagccggaggaagggccctctatgagggctatgcaaccgtaaccgacgctccacccgagtgcttcttgactctaagggacacagtgctgcttcgtaaggagtcccggaaactgatcgtgcaacccaacaccaggctcgaaggctctgacgtgcagcttctagaatatgaagctagcgccgcaggattgatccgcagttttagcgagcggtttccagaggacgggccagagcttgaggagatccttacccagctcgccacagcggacgcgaggttctggaaggggccatccgaggccccatccggccaggcctag

SEQ ID NO: 233776 - DNA, 2214 bp, Artificial Sequence
  derived and/or modified sequence
atggcggacacccaatacatccttcctaacgacatcggtgtgagcagtctggactgcagagaggccttcagactgctgagcccgaccgaacgcctctatgcttatcatctttcccgggctgcctggtacggaggccttgcagttttactgcagaccagtcctgaggctccctacatttacgctttactgtcccgcctttttagggcccaagatccagatcagcttaggcaacatgccctggcagaggggctcactgaggaagaatatcaggcctttctagtctatgcagccggagtgtattccaatatggggaactataagagcttcggagataccaaatttgtcccgaaccttcccaaggaaaagttggagcgggtcatcctgggtagcgaggccgctcagcagcaccccgaggaggttaggggactttggcagacctgcggcgagcttatgttctccctagagccccgattaaggcatttgggcctcggaaaggagggaattacaacctatttttccggtaattgcacaatggaggacgctaagctggctcaggacttcctggacagtcagaaccttagcgcctataatacccgcctgttcaaggaagtggatggcgaaggaaaaccttactatgaggtccgtctcgccagtgtccttgggtccgagccaagtctcgactctgaagtaacatcaaaattgaagtcttacgagttccggggaagtccatttcaggtaacacgcggtgattatgcaccaatactgcagaaggtggttgagcagctggaaaaagctaaagcctatgccgctaattcccaccaggggcaaatgcttgcccaatatatcgagagcttcactcaaggctcaattgaagcacataagcggggttcaagattctggatccaggataaaggacccatcgttgagagttatatcggctttattgagtcctacagggaccctttcgggtcacggggagaatttgagggattcgttgctgtagtcaataaggcaatgtcggctaaatttgagcgcctggtcgccagtgcagaacaactgttaaaggagctcccgtggcctccaacattcgagaaagacaagttcctaacaccagactttaccagcctcgatgttttgacgtttgctggctctggaattcctgctggcatcaacatcccaaactatgatgacctgcgccaaactgaaggatttaagaacgtgtccctgggtaatgtgctggcagtagcatatgctacgcagcgagagaaactgactttcctggaagaagatgacaaagacctgtacattctatggaagggtccttcattcgacgtgcaggtggggctgcacgagctactagggcacgggtctggtaaactgtttgtccaagatgagaaaggggctttcaatttcgaccaggagacagtaataaaccccgaaaccggcgagcagattcaaagttggtatcgttcaggcgagacctgggattcgaagttttccaccattgctagcagctacgaggagtgtcgggcagagtctgtcggcctctacttatgccttcacccccaagtgcttgagatatttggctttgagggggctgatgctgaagatgtaatttatgtaaactggctaaacatggtcagggctggcctactggccctggagttctatactcccgaagccttcaattggcgacaggcccacatgcaagcgcgattcgtgattctgcgggtgctgttagaggctggagaaggcttggtcacaatcacacctaccactggatctgacggtcggcctgatgctagggtccggcttgacaggtcaaagatcagaagcgtgggaaaaccagcactggagaggtttctccgacgactccaggtcctgaaatccactggagacgtggccggaggaagggctttatacgagggctacgctacggtgacagacgcaccccctgagtgttttctgactttgcgcgataccgttctgctgcgtaaggagagcaggaagttgatagtccagcctaacacgcggctcgagggtagcgatgttcagctgctcgagtacgaggctagcgccgctggactcattcgaagtttctccgagagatttcccgaagacggaccagagctggaagaaatcctaacccagcttgctacggcagatgcacgattttggaaggggcctagcgaggctccaagtgggcaggcctag

SEQ ID NO: 233777 - DNA, 1908 bp, Artificial Sequence
  derived and/or modified sequence
atgggaaactacaagtccttcggagataccaagtttgtgcctaatctccctaaagagaaattggaacgcgtaatcctaggttccgaggccgcacagcagcatcccgaagaagtgcgaggactgtggcagacatgtggtgagctgatgttttccctggagccgaggctcagacatctggggctcgggaaagaggggatcactacatacttcagcggtaattgtacaatggaagatgcaaaattggcccaggacttccttgatagccaaaacttatctgcttataacaccaggctgtttaaagaggtggacggagagggtaagccttattacgaagtgagactggccagtgtccttggatccgaaccctctctcgatagcgaggtaacaagtaaactgaaaagctacgagttccggggatcaccgttccaagtgacccgtggagattacgctcctattctccagaaggtcgtggagcaattagaaaaggctaaggcatacgcagctaactcccaccaggggcagatgttggctcagtatatcgaaagttttacccaaggctcaatcgaagcacacaagagggggagtagattctggatccaagacaaaggccctatcgtggaatcctatattggatttatagagagctatcgcgatcccttcggatcccggggtgaatttgaggggtttgtcgcagtcgtgaacaaggctatgtctgcaaagtttgagaggctcgtggcgagcgcagagcagctccttaaggaactgccatggcccccaacatttgagaaggacaaatttcttactcccgacttcacttccttagatgttctgacgttcgcaggctccggcattccagccggtataaacattcctaattacgatgatctgcgccaaaccgaagggttcaaaaatgtgtcgttggggaacgtgctggccgtggcatatgctacccagagagagaagctgacctttttagaagaggatgataaagacttatacatcttatggaaaggcccaagcttcgatgtccaggtgggcctgcacgaactcctggggcatggctcaggcaagctgtttgtgcaggacgagaagggtgccttcaactttgatcaggagacagtgattaacccggagactggagagcagatccagtcatggtaccgaagcggtgaaacctgggactctaaatttagcacaattgctagcagctatgaagaatgtcgcgctgagtctgtgggtctgtacctgtgcctccatccccaggtactggagatattcggctttgaaggtgccgacgccgaggacgttatttacgtcaactggttaaatatggtgcgggctggattgctggcgctggagttctacactcctgaagctttcaactggcgccaggcccacatgcaggcgaggtttgtaatcctgcgcgtgcttttagaagcgggtgaagggcttgtaaccatcactccgaccactgggtccgacggaagaccagacgctcgggtgagactagacagatcgaaaatccgtagtgtgggcaagccggcactggaacgtttcctgcggagactccaagtgttgaaaagcactggagacgtcgccggagggcgtgcgctgtacgagggttacgccaccgtgacagacgcgccacccgagtgcttcctcactctccgcgacaccgtgctgctgcggaaggaaagtcgaaagctgattgtccagccaaacacaaggctggaaggcagcgatgttcaactgcttgagtacgaagccagcgcggctggactaattcggagtttcagcgaaaggtttcccgaggatgggccagaactggaggaaattttgacccagttagcgaccgccgacgccaggttttggaaaggtccttctgaggctcccagcggacaggcctag

SEQ ID NO: 233778 - DNA, 954 bp, Artificial Sequence
  derived and/or modified sequence
atggccgacacccagtacatcctgcccaacgacatcggcgtgagcagcctggactgcagagaggccttcagactgctgagccccaccgagagactgtacgcctaccacctgagcagagccgcctggtacggcggcctggccgtgctgctgcagaccagccccgaggccccctacatctacgccctgctgagcagactgttcagagcccaggaccccgaccagctgagacagcacgccctggccgagggcctgaccgaggaggagtaccaggccttcctggtgtacgccgccggcgtgtacagcaacatgggcaactacaagagcttcggcgacaccaagttcgtgcccaacctgcccaaggagaagctggagagagtgatcctgggcagcgaggccgcccagcagcaccccgaggaggtgagaggcctgtggcagacctgcggcgagctgatgttcagcctggagcccagactgagacacctgggcctgggcaaggagggcatcaccacctacttcagcggcaactgcaccatggaggacgccagagtgagactggacagaagcaagatcagaagcgtgggcaagcccgccctggagagattcctgagaagactgcaggtgctgaagagcaccggcgacgtggccggcggcagagccctgtacgagggctacgccaccgtgaccgacgccccccccgagtgcttcctgaccctgagagacaccgtgctgctgagaaaggagagcagaaagctgatcgtgcagcccaacaccagactggagggcagcgacgtgcagctgctggagtacgaggccagcgccgccggcctgatcagaagcttcagcgagagattccccgaggacggccccgagctggaggagatcctgacccagctggccaccgccgacgccagattctggaagggccccagcgaggcccccagcggccaggcctag

SEQ ID NO: 233779 - DNA, 2214 bp, Artificial Sequence
  derived and/or modified sequence
atggccgacacccagtacatcctgcccaacgacatcggcgtgagcagcctggactgcagagaggccttcagactgctgagccccaccgagagactgtacgcctaccacctgagcagagccgcctggtacggcggcctggccgtgctgctgcagaccagccccgaggccccctacatctacgccctgctgagcagactgttcagagcccaggaccccgaccagctgagacagcacgccctggccgagggcctgaccgaggaggagtaccaggccttcctggtgtacgccgccggcgtgtacagcaacatgggcaactacaagagcttcggcgacaccaagttcgtgcccaacctgcccaaggagaagctggagagagtgatcctgggcagcgaggccgcccagcagcaccccgaggaggtgagaggcctgtggcagacctgcggcgagctgatgttcagcctggagcccagactgagacacctgggcctgggcaaggagggcatcaccacctacttcagcggcaactgcaccatggaggacgccaagctggcccaggacttcctggacagccagaacctgagcgcctacaacaccagactgttcaaggaggtggacggcgagggcaagccctactacgaggtgagactggccagcgtgctgggcagcgagcccagcctggacagcgaggtgaccagcaagctgaagagctacgagttcagaggcagccccttccaggtgaccagaggcgactacgcccccatcctgcagaaggtggtggagcagctggagaaggccaaggcctacgccgccaacagccaccagggccagatgctggcccagtacatcgagagcttcacccagggcagcatcgaggcccacaagagaggcagcagattctggatccaggacaagggccccatcgtggagagctacatcggcttcatcgagagctacagagaccccttcggcagcagaggcgagttcgagggcttcgtggccgtggtgaacaaggccatgagcgccaagttcgagagactggtggccagcgccgagcagctgctgaaggagctgccctggccccccaccttcgagaaggacaagttcctgacccccgacttcaccagcctggacgtgctgaccttcgccggcagcggcatccccgccggcatcaacatccccaactacgacgacctgagacagaccgagggcttcaagaacgtgagcctgggcaacgtgctggccgtggcctacgccacccagagagagaagctgaccttcctggaggaggacgacaaggacctgtacatcctgtggaagggccccagcttcgacgtgcaggtgggcctgcacgagctgctgggccacggcagcggcaagctgttcgtgcaggacgagaagggcgccttcaacttcgaccaggagaccgtgatcaaccccgagaccggcgagcagatccagagctggtacagaagcggcgagacctgggacagcaagttcagcaccatcgccagcagctacgaggagtgcagagccgagagcgtgggcctgtacctgtgcctgcacccccaggtgctggagatcttcggcttcgagggcgccgacgccgaggacgtgatctacgtgaactggctgaacatggtgagagccggcctgctggccctggagttctacacccccgaggccttcaactggagacaggcccacatgcaggccagattcgtgatcctgagagtgctgctggaggccggcgagggcctggtgaccatcacccccaccaccggcagcgacggcagacccgacgccagagtgagactggacagaagcaagatcagaagcgtgggcaagcccgccctggagagattcctgagaagactgcaggtgctgaagagcaccggcgacgtggccggcggcagagccctgtacgagggctacgccaccgtgaccgacgccccccccgagtgcttcctgaccctgagagacaccgtgctgctgagaaaggagagcagaaagctgatcgtgcagcccaacaccagactggagggcagcgacgtgcagctgctggagtacgaggccagcgccgccggcctgatcagaagcttcagcgagagattccccgaggacggccccgagctggaggagatcctgacccagctggccaccgccgacgccagattctggaagggccccagcgaggcccccagcggccaggcctag

SEQ ID NO: 233780 - DNA, 606 bp, Artificial Sequence
  derived and/or modified sequence
atggccgacacccagtacatcctgcccaacgacatcggcgtgagcagcctggactgcagagaggccttcagactgctgagccccaccgagagactgtacgcctaccacctgagcagagccgcctggtacggcggcctggccgtgctgctgcagaccagccccgaggccccctacatctacgccctgctgagcagactgttcagagcccaggaccccgaccagctgagacagcacgccctggccgagggcctgaccgaggaggagtaccaggccttcctggtgtacgccgccggcgtgtacagcaacatgggcaactacaagagcttcggcgacaccaagttcgtgcccaacctgcccaaggagaagctggagagagtgatcctgggcagcgaggccgcccagcagcaccccgaggaggtgagaggcctgtggcagacctgcggcgagctgatgttcagcctggagcccagactgagacacctgggcctgggcaaggagggcatcaccacctacttcagcggcaactgcaccatggaggacgccaagctggcccaggacttcctggacagccagaacctgagcgcctacaacaccagactgttctag

SEQ ID NO: 233781 - DNA, 2274 bp, Artificial Sequence
  derived and/or modified sequence
atgggcgagcccgaggccggcagcgagttcgccaacggcgccgccgccgccgccggccccatggccgacacccagtacatcctgcccaacgacatcggcgtgagcagcctggactgcagagaggccttcagactgctgagccccaccgagagactgtacgcctaccacctgagcagagccgcctggtacggcggcctggccgtgctgctgcagaccagccccgaggccccctacatctacgccctgctgagcagactgttcagagcccaggaccccgaccagctgagacagcacgccctggccgagggcctgaccgaggaggagtaccaggccttcctggtgtacgccgccggcgtgtacagcaacatgggcaactacaagagcttcggcgacaccaagttcgtgcccaacctgcccaaggagaagctggagagagtgatcctgggcagcgaggccgcccagcagcaccccgaggaggtgagaggcctgtggcagacctgcggcgagctgatgttcagcctggagcccagactgagacacctgggcctgggcaaggagggcatcaccacctacttcagcggcaactgcaccatggaggacgccaagctggcccaggacttcctggacagccagaacctgagcgcctacaacaccagactgttcaaggaggtggacggcgagggcaagccctactacgaggtgagactggccagcgtgctgggcagcgagcccagcctggacagcgaggtgaccagcaagctgaagagctacgagttcagaggcagccccttccaggtgaccagaggcgactacgcccccatcctgcagaaggtggtggagcagctggagaaggccaaggcctacgccgccaacagccaccagggccagatgctggcccagtacatcgagagcttcacccagggcagcatcgaggcccacaagagaggcagcagattctggatccaggacaagggccccatcgtggagagctacatcggcttcatcgagagctacagagaccccttcggcagcagaggcgagttcgagggcttcgtggccgtggtgaacaaggccatgagcgccaagttcgagagactggtggccagcgccgagcagctgctgaaggagctgccctggccccccaccttcgagaaggacaagttcctgacccccgacttcaccagcctggacgtgctgaccttcgccggcagcggcatccccgccggcatcaacatccccaactacgacgacctgagacagaccgagggcttcaagaacgtgagcctgggcaacgtgctggccgtggcctacgccacccagagagagaagctgaccttcctggaggaggacgacaaggacctgtacatcctgtggaagggccccagcttcgacgtgcaggtgggcctgcacgagctgctgggccacggcagcggcaagctgttcgtgcaggacgagaagggcgccttcaacttcgaccaggagaccgtgatcaaccccgagaccggcgagcagatccagagctggtacagaagcggcgagacctgggacagcaagttcagcaccatcgccagcagctacgaggagtgcagagccgagagcgtgggcctgtacctgtgcctgcacccccaggtgctggagatcttcggcttcgagggcgccgacgccgaggacgtgatctacgtgaactggctgaacatggtgagagccggcctgctggccctggagttctacacccccgaggccttcaactggagacaggcccacatgcaggccagattcgtgatcctgagagtgctgctggaggccggcgagggcctggtgaccatcacccccaccaccggcagcgacggcagacccgacgccagagtgagactggacagaagcaagatcagaagcgtgggcaagcccgccctggagagattcctgagaagactgcaggtgctgaagagcaccggcgacgtggccggcggcagagccctgtacgagggctacgccaccgtgaccgacgccccccccgagtgcttcctgaccctgagagacaccgtgctgctgagaaaggagagcagaaagctgatcgtgcagcccaacaccagactggagggcagcgacgtgcagctgctggagtacgaggccagcgccgccggcctgatcagaagcttcagcgagagattccccgaggacggccccgagctggaggagatcctgacccagctggccaccgccgacgccagattctggaagggccccagcgaggcccccagcggccaggcctag

SEQ ID NO: 233782 - DNA, 2271 bp, Artificial Sequence
  derived and/or modified sequence
atgggcgagcccgaggccggcagcgagttcgccaacggcgccgccgccgccggccccatggccgacacccagtacatcctgcccaacgacatcggcgtgagcagcctggactgcagagaggccttcagactgctgagccccaccgagagactgtacgcctaccacctgagcagagccgcctggtacggcggcctggccgtgctgctgcagaccagccccgaggccccctacatctacgccctgctgagcagactgttcagagcccaggaccccgaccagctgagacagcacgccctggccgagggcctgaccgaggaggagtaccaggccttcctggtgtacgccgccggcgtgtacagcaacatgggcaactacaagagcttcggcgacaccaagttcgtgcccaacctgcccaaggagaagctggagagagtgatcctgggcagcgaggccgcccagcagcaccccgaggaggtgagaggcctgtggcagacctgcggcgagctgatgttcagcctggagcccagactgagacacctgggcctgggcaaggagggcatcaccacctacttcagcggcaactgcaccatggaggacgccaagctggcccaggacttcctggacagccagaacctgagcgcctacaacaccagactgttcaaggaggtggacggcgagggcaagccctactacgaggtgagactggccagcgtgctgggcagcgagcccagcctggacagcgaggtgaccagcaagctgaagagctacgagttcagaggcagccccttccaggtgaccagaggcgactacgcccccatcctgcagaaggtggtggagcagctggagaaggccaaggcctacgccgccaacagccaccagggccagatgctggcccagtacatcgagagcttcacccagggcagcatcgaggcccacaagagaggcagcagattctggatccaggacaagggccccatcgtggagagctacatcggcttcatcgagagctacagagaccccttcggcagcagaggcgagttcgagggcttcgtggccgtggtgaacaaggccatgagcgccaagttcgagagactggtggccagcgccgagcagctgctgaaggagctgccctggccccccaccttcgagaaggacaagttcctgacccccgacttcaccagcctggacgtgctgaccttcgccggcagcggcatccccgccggcatcaacatccccaactacgacgacctgagacagaccgagggcttcaagaacgtgagcctgggcaacgtgctggccgtggcctacgccacccagagagagaagctgaccttcctggaggaggacgacaaggacctgtacatcctgtggaagggccccagcttcgacgtgcaggtgggcctgcacgagctgctgggccacggcagcggcaagctgttcgtgcaggacgagaagggcgccttcaacttcgaccaggagaccgtgatcaaccccgagaccggcgagcagatccagagctggtacagaagcggcgagacctgggacagcaagttcagcaccatcgccagcagctacgaggagtgcagagccgagagcgtgggcctgtacctgtgcctgcacccccaggtgctggagatcttcggcttcgagggcgccgacgccgaggacgtgatctacgtgaactggctgaacatggtgagagccggcctgctggccctggagttctacacccccgaggccttcaactggagacaggcccacatgcaggccagattcgtgatcctgagagtgctgctggaggccggcgagggcctggtgaccatcacccccaccaccggcagcgacggcagacccgacgccagagtgagactggacagaagcaagatcagaagcgtgggcaagcccgccctggagagattcctgagaagactgcaggtgctgaagagcaccggcgacgtggccggcggcagagccctgtacgagggctacgccaccgtgaccgacgccccccccgagtgcttcctgaccctgagagacaccgtgctgctgagaaaggagagcagaaagctgatcgtgcagcccaacaccagactggagggcagcgacgtgcagctgctggagtacgaggccagcgccgccggcctgatcagaagcttcagcgagagattccccgaggacggccccgagctggaggagatcctgacccagctggccaccgccgacgccagattctggaagggccccagcgaggcccccagcggccaggcctag

SEQ ID NO: 233783 - DNA, 1908 bp, Artificial Sequence
  derived and/or modified sequence
atgggcaactacaagagcttcggcgacaccaagttcgtgcccaacctgcccaaggagaagctggagagagtgatcctgggcagcgaggccgcccagcagcaccccgaggaggtgagaggcctgtggcagacctgcggcgagctgatgttcagcctggagcccagactgagacacctgggcctgggcaaggagggcatcaccacctacttcagcggcaactgcaccatggaggacgccaagctggcccaggacttcctggacagccagaacctgagcgcctacaacaccagactgttcaaggaggtggacggcgagggcaagccctactacgaggtgagactggccagcgtgctgggcagcgagcccagcctggacagcgaggtgaccagcaagctgaagagctacgagttcagaggcagccccttccaggtgaccagaggcgactacgcccccatcctgcagaaggtggtggagcagctggagaaggccaaggcctacgccgccaacagccaccagggccagatgctggcccagtacatcgagagcttcacccagggcagcatcgaggcccacaagagaggcagcagattctggatccaggacaagggccccatcgtggagagctacatcggcttcatcgagagctacagagaccccttcggcagcagaggcgagttcgagggcttcgtggccgtggtgaacaaggccatgagcgccaagttcgagagactggtggccagcgccgagcagctgctgaaggagctgccctggccccccaccttcgagaaggacaagttcctgacccccgacttcaccagcctggacgtgctgaccttcgccggcagcggcatccccgccggcatcaacatccccaactacgacgacctgagacagaccgagggcttcaagaacgtgagcctgggcaacgtgctggccgtggcctacgccacccagagagagaagctgaccttcctggaggaggacgacaaggacctgtacatcctgtggaagggccccagcttcgacgtgcaggtgggcctgcacgagctgctgggccacggcagcggcaagctgttcgtgcaggacgagaagggcgccttcaacttcgaccaggagaccgtgatcaaccccgagaccggcgagcagatccagagctggtacagaagcggcgagacctgggacagcaagttcagcaccatcgccagcagctacgaggagtgcagagccgagagcgtgggcctgtacctgtgcctgcacccccaggtgctggagatcttcggcttcgagggcgccgacgccgaggacgtgatctacgtgaactggctgaacatggtgagagccggcctgctggccctggagttctacacccccgaggccttcaactggagacaggcccacatgcaggccagattcgtgatcctgagagtgctgctggaggccggcgagggcctggtgaccatcacccccaccaccggcagcgacggcagacccgacgccagagtgagactggacagaagcaagatcagaagcgtgggcaagcccgccctggagagattcctgagaagactgcaggtgctgaagagcaccggcgacgtggccggcggcagagccctgtacgagggctacgccaccgtgaccgacgccccccccgagtgcttcctgaccctgagagacaccgtgctgctgagaaaggagagcagaaagctgatcgtgcagcccaacaccagactggagggcagcgacgtgcagctgctggagtacgaggccagcgccgccggcctgatcagaagcttcagcgagagattccccgaggacggccccgagctggaggagatcctgacccagctggccaccgccgacgccagattctggaagggccccagcgaggcccccagcggccaggcctag

SEQ ID NO: 233784 - DNA, 1389 bp, Artificial Sequence
  derived and/or modified sequence
gcgaacggagcagctgctgcagcagggcccatggcggacacccagtacatcctgcccaatgacatcggcgtgtctagcctggactgccgtgaggccttccgcctgctgtcacccacagagcgcctctatgcctaccacctgtcccgtgccgcctggtacggaggcctggctgtgctgcttcagacctcccctgaggccccctacatctatgctctgctcagccgcctcttccgcgcccaggaccccgaccagctgcgccaacatgccctggctgaaggccttaccgaggaggagtatcaggcgttcctggtctatgccgcgggtgtttactccaacatgggcaactacaagtcctttggtgacaccaagtttgttcccaacttgcccaaggaaaagctggaacgggtgatcctagggagtgaggctgctcagcagcacccagaagaagtcaggggcctctggcagacctgcggggagcttatgttctctctggagccaaggcttcgacacctcggactggggaaggagggaatcaccacctatttctctgggaattgtaccatggaagatgcccgggtccgcctcgaccgcagcaagatccggtctgtgggcaagcctgctctagagcgcttcctgcggagacttcaggtgctgaagtccacaggggatgtggccggagggcgggccctgtacgaggggtatgcaacagtcactgatgcgccccccgagtgcttcctcaccctcagggacacggtgctgctgcgtaaggaatctcggaagctcattgttcagcccaacactcgccttgaaggctcagacgtgcagcttctggaatacgaggcgtcagctgctggcctcatccgatccttctctgagcgtttcccagaggatggacccgagttggaggagatcctcacacagctggccacagccgatgcccgattctggaagggccccagtgaggccccatctggccaagcttgaggaagatgtgtggccttgcccccaattccatcagaccaaggctgcaagtggccctccattcgtgtgtgtatttaggggctggggagggggaggggcaggagcttggaccttggtactacctcagctgagggtggtgacacaaccccttccatttgtcagcactttccagcctgccaattgcttcccctctgtgatctcatttcatctgcactgccatacgtggagtgagcaagacagggcttaccatcctgtctaccagatgaggaaatggcagttctgagaagtcactggtctagatcccgcaggtggcacgtgacagctagggttcaaaacgttctcaccaaatccaatgctcctcacatattaattttataaccagacaaataaatattagagacaaccacc

SEQ ID NO: 233785 - DNA, 2687 bp, Artificial Sequence
  derived and/or modified sequence
aatgaatgggggagccggaagcaggaagtgagtttgcgaacggagcagctgctgcagcagggcccatggcggacacccagtacatcctgcccaatgacatcggcgtgtctagcctggactgccgtgaggccttccgcctgctgtcacccacagagcgcctctatgcctaccacctgtcccgtgccgcctggtacggaggcctggctgtgctgcttcagacctcccctgaggccccctacatctatgctctgctcagccgcctcttccgcgcccaggaccccgaccagctgcgccaacatgccctggctgaaggccttaccgaggaggagtatcaggcgttcctggtctatgccgcgggtgtttactccaacatgggcaactacaagtcctttggtgacaccaagtttgttcccaacttgcccaaggaaaagctggaacgggtgatcctagggagtgaggctgctcagcagcacccagaagaagtcaggggcctctggcagacctgcggggagcttatgttctctctggagccaaggcttcgacacctcggactggggaaggagggaatcaccacctatttctctgggaattgtaccatggaagatgccaaattggcccaggactttctggactcacagaacctcagtgcctacaacacccggctcttcaaagaggtcgatggagaagggaagccctactacgaggtgcggctggcttctgtgcttggctcagagccttccctggactctgaggtgacttccaagctgaagagctatgaattccggggaagccctttccaggtgacccggggggactacgcgcccatcctccagaaggtggtggagcagctggagaaagccaaggcctatgcagccaacagccaccaggggcagatgctggcccagtatatagagagcttcacccagggctccatcgaggcccacaagaggggctcccgcttctggatccaggacaaaggccccatcgtggagagttacatcgggttcatcgagagctaccgcgacccctttggttcccgaggagaatttgaaggtttcgtagctgtggtgaacaaggccatgagtgccaagtttgagcggctggtggcgagcgcagagcagctgctgaaggagctgccctggcccccaacctttgagaaggacaagttcctcacccctgacttcacctccctggatgttctcaccttcgctggctccggcatccctgccggcatcaacatccccaactacgatgatctgaggcagacggaaggctttaagaacgtgtcgctggggaatgtgctggctgtggcctacgccacgcagcgggagaagcttacctttctggaggaggatgacaaggacctgtacatcctctggaaggggccctccttcgatgtgcaggtgggcctgcacgagctgctgggccatggcagtggcaagctcttcgtacaggacgaaaaaggagcattcaactttgaccaggaaacagtgatcaacccagagacgggcgagcagattcagagctggtatcggagcggggagacctgggatagcaagttcagcaccatcgcctccagctacgaagagtgccgggctgagagcgtgggtctctacctctgtctccacccgcaagtgctggagatctttggctttgagggggctgatgcggaggacgtgatctacgtgaactggctcaacatggttcgggccgggctgctcgctctggagttctacacacctgaggccttcaactggcgacaggcccatatgcaggcccggtttgtgatcctgagagtcttgctggaggctggcgagggactcgttaccatcactcccaccacaggctccgatgggcgcccagatgcccgggtccgcctcgaccgcagcaagatccggtctgtgggcaagcctgctctagagcgcttcctgcggagacttcaggtgctgaagtccacaggggatgtggccggagggcgggccctgtacgaggggtatgcaacagtcactgatgcgccccccgagtgcttcctcaccctcagggacacggtgctgctgcgtaaggaatctcggaagctcattgttcagcccaacactcgccttgaaggctcagacgtgcagcttctggaatacgaggcgtcagctgctggcctcatccgatccttctctgagcgtttcccagaggatggacccgagttggaggagatcctcacacagctggccacagccgatgcccgattctggaagggccccagtgaggccccatctggccaagcttgaggaagatgtgtggccttgcccccaattccatcagaccaaggctgcaagtggccctccattcgtgtgtgtatttaggggctggggagggggaggggcaggagcttggaccttggtactacctcagctgagggtggtgacacaaccccttccatttgtcagcactttccagcctgccaattgcttcccctctgtgatctcatttcatctgcactgccatacgtggagtgagcaagacagggcttaccatcctgtctaccagatgaggaaatggcagttctgagaagtcactggtctagatcccgcaggtggcacgtgacagctagggttcaaaacgttctcaccaaatccaatgctcctcacatattaattttataaccagacaaataaatattagagacaaccaccatc

SEQ ID NO: 233786 - DNA, 2684 bp, Artificial Sequence
  derived and/or modified sequence
aatgaatgggggagccggaagcaggaagtgagtttgcgaacggagcagctgctgcagggcccatggcggacacccagtacatcctgcccaatgacatcggcgtgtctagcctggactgccgtgaggccttccgcctgctgtcacccacagagcgcctctatgcctaccacctgtcccgtgccgcctggtacggaggcctggctgtgctgcttcagacctcccctgaggccccctacatctatgctctgctcagccgcctcttccgcgcccaggaccccgaccagctgcgccaacatgccctggctgaaggccttaccgaggaggagtatcaggcgttcctggtctatgccgcgggtgtttactccaacatgggcaactacaagtcctttggtgacaccaagtttgttcccaacttgcccaaggaaaagctggaacgggtgatcctagggagtgaggctgctcagcagcacccagaagaagtcaggggcctctggcagacctgcggggagcttatgttctctctggagccaaggcttcgacacctcggactggggaaggagggaatcaccacctatttctctgggaattgtaccatggaagatgccaaattggcccaggactttctggactcacagaacctcagtgcctacaacacccggctcttcaaagaggtcgatggagaagggaagccctactacgaggtgcggctggcttctgtgcttggctcagagccttccctggactctgaggtgacttccaagctgaagagctatgaattccggggaagccctttccaggtgacccggggggactacgcgcccatcctccagaaggtggtggagcagctggagaaagccaaggcctatgcagccaacagccaccaggggcagatgctggcccagtatatagagagcttcacccagggctccatcgaggcccacaagaggggctcccgcttctggatccaggacaaaggccccatcgtggagagttacatcgggttcatcgagagctaccgcgacccctttggttcccgaggagaatttgaaggtttcgtagctgtggtgaacaaggccatgagtgccaagtttgagcggctggtggcgagcgcagagcagctgctgaaggagctgccctggcccccaacctttgagaaggacaagttcctcacccctgacttcacctccctggatgttctcaccttcgctggctccggcatccctgccggcatcaacatccccaactacgatgatctgaggcagacggaaggctttaagaacgtgtcgctggggaatgtgctggctgtggcctacgccacgcagcgggagaagcttacctttctggaggaggatgacaaggacctgtacatcctctggaaggggccctccttcgatgtgcaggtgggcctgcacgagctgctgggccatggcagtggcaagctcttcgtacaggacgaaaaaggagcattcaactttgaccaggaaacagtgatcaacccagagacgggcgagcagattcagagctggtatcggagcggggagacctgggatagcaagttcagcaccatcgcctccagctacgaagagtgccgggctgagagcgtgggtctctacctctgtctccacccgcaagtgctggagatctttggctttgagggggctgatgcggaggacgtgatctacgtgaactggctcaacatggttcgggccgggctgctcgctctggagttctacacacctgaggccttcaactggcgacaggcccatatgcaggcccggtttgtgatcctgagagtcttgctggaggctggcgagggactcgttaccatcactcccaccacaggctccgatgggcgcccagatgcccgggtccgcctcgaccgcagcaagatccggtctgtgggcaagcctgctctagagcgcttcctgcggagacttcaggtgctgaagtccacaggggatgtggccggagggcgggccctgtacgaggggtatgcaacagtcactgatgcgccccccgagtgcttcctcaccctcagggacacggtgctgctgcgtaaggaatctcggaagctcattgttcagcccaacactcgccttgaaggctcagacgtgcagcttctggaatacgaggcgtcagctgctggcctcatccgatccttctctgagcgtttcccagaggatggacccgagttggaggagatcctcacacagctggccacagccgatgcccgattctggaagggccccagtgaggccccatctggccaagcttgaggaagatgtgtggccttgcccccaattccatcagaccaaggctgcaagtggccctccattcgtgtgtgtatttaggggctggggagggggaggggcaggagcttggaccttggtactacctcagctgagggtggtgacacaaccccttccatttgtcagcactttccagcctgccaattgcttcccctctgtgatctcatttcatctgcactgccatacgtggagtgagcaagacagggcttaccatcctgtctaccagatgaggaaatggcagttctgagaagtcactggtctagatcccgcaggtggcacgtgacagctagggttcaaaacgttctcaccaaatccaatgctcctcacatattaattttataaccagacaaataaatattagagacaaccaccatc

SEQ ID NO: 233787 - DNA, 733 bp, Artificial Sequence
  derived and/or modified sequence
tacaatagtattcccttccacatgggcttttgggaggattaaatgagatcataagagttcagagccaggtatgcaattggtatggggtaaacaacagctgtgatgacagtgatggttctcagcagggcccatggcggacacccagtacatcctgcccaatgacatcggcgtgtctagcctggactgccgtgaggccttccgcctgctgtcacccacagagcgcctctatgcctaccacctgtcccgtgccgcctggtacggaggcctggctgtgctgcttcagacctcccctgaggccccctacatctatgctctgctcagccgcctcttccgcgcccaggaccccgaccagctgcgccaacatgccctggctgaaggccttaccgaggaggagtatcaggcgttcctggtctatgccgcgggtgtttactccaacatgggcaactacaagtcctttggtgacaccaagtttgttcccaacttgcccaaggaaaagctggaacgggtgatcctagggagtgaggctgctcagcagcacccagaagaagtcaggggcctctggcagacctgcggggagcttatgttctctctggagccaaggcttcgacacctcggactggggaaggagggaatcaccacctatttctctgggaattgtaccatggaagatgccaaattggcccaggactttctggactcacagaacctcagtgcctacaacacccggctcttc

SEQ ID NO: 233788 - DNA, 2974 bp, Artificial Sequence
  derived and/or modified sequence
attactcctattgtgtaggttcccacctgcaagagtgctgtcgggtcctctgaggtgaaaccccaaaggaaagcgggatcgggactgggggagggggattcccaagtccctgacacccgcgccgtctcggcctgggcttggtgacctcgtcagtcccgtctgccgggactaggccgcggccaggccgggcacagcggtacccggtccggcgcgtgtgcggcctgctgacaaaaggccgagcccgcagggccaatccgcgcgccaccccgtagcgcctgggggcgggagcgggcgagccgagaagctcgtcttggcgcgtctattggctggtactgacgcccatccggaccccgaggccaggcagttggccaaggggggcggggttcgcagagccccaatgaatgggggagccggaagcaggaagtgagtttgcgaacggagcagctgctgcagcagggcccatggcggacacccagtacatcctgcccaatgacatcggcgtgtctagcctggactgccgtgaggccttccgcctgctgtcacccacagagcgcctctatgcctaccacctgtcccgtgccgcctggtacggaggcctggctgtgctgcttcagacctcccctgaggccccctacatctatgctctgctcagccgcctcttccgcgcccaggaccccgaccagctgcgccaacatgccctggctgaaggccttaccgaggaggagtatcaggcgttcctggtctatgccgcgggtgtttactccaacatgggcaactacaagtcctttggtgacaccaagtttgttcccaacttgcccaaggaaaagctggaacgggtgatcctagggagtgaggctgctcagcagcacccagaagaagtcaggggcctctggcagacctgcggggagcttatgttctctctggagccaaggcttcgacacctcggactggggaaggagggaatcaccacctatttctctgggaattgtaccatggaagatgccaaattggcccaggactttctggactcacagaacctcagtgcctacaacacccggctcttcaaagaggtcgatggagaagggaagccctactacgaggtgcggctggcttctgtgcttggctcagagccttccctggactctgaggtgacttccaagctgaagagctatgaattccggggaagccctttccaggtgacccggggggactacgcgcccatcctccagaaggtggtggagcagctggagaaagccaaggcctatgcagccaacagccaccaggggcagatgctggcccagtatatagagagcttcacccagggctccatcgaggcccacaagaggggctcccgcttctggatccaggacaaaggccccatcgtggagagttacatcgggttcatcgagagctaccgcgacccctttggttcccgaggagaatttgaaggtttcgtagctgtggtgaacaaggccatgagtgccaagtttgagcggctggtggcgagcgcagagcagctgctgaaggagctgccctggcccccaacctttgagaaggacaagttcctcacccctgacttcacctccctggatgttctcaccttcgctggctccggcatccctgccggcatcaacatccccaactacgatgatctgaggcagacggaaggctttaagaacgtgtcgctggggaatgtgctggctgtggcctacgccacgcagcgggagaagcttacctttctggaggaggatgacaaggacctgtacatcctctggaaggggccctccttcgatgtgcaggtgggcctgcacgagctgctgggccatggcagtggcaagctcttcgtacaggacgaaaaaggagcattcaactttgaccaggaaacagtgatcaacccagagacgggcgagcagattcagagctggtatcggagcggggagacctgggatagcaagttcagcaccatcgcctccagctacgaagagtgccgggctgagagcgtgggtctctacctctgtctccacccgcaagtgctggagatctttggctttgagggggctgatgcggaggacgtgatctacgtgaactggctcaacatggttcgggccgggctgctcgctctggagttctacacacctgaggccttcaactggcgacaggcccatatgcaggcccggtttgtgatcctgagagtcttgctggaggctggcgagggactcgttaccatcactcccaccacaggctccgatgggcgcccagatgcccgggtccgcctcgaccgcagcaagatccggtctgtgggcaagcctgctctagagcgcttcctgcggagacttcaggtgctgaagtccacaggggatgtggccggagggcgggccctgtacgaggggtatgcaacagtcactgatgcgccccccgagtgcttcctcaccctcagggacacggtgctgctgcgtaaggaatctcggaagctcattgttcagcccaacactcgccttgaaggctcagacgtgcagcttctggaatacgaggcgtcagctgctggcctcatccgatccttctctgagcgtttcccagaggatggacccgagttggaggagatcctcacacagctggccacagccgatgcccgattctggaagggccccagtgaggccccatctggccaagcttgaggaagatgtgtggccttgcccccaattccatcagaccaaggctgcaagtggccctccattcgtgtgtgtatttaggggctggggagggggaggggcaggagcttggaccttggtactacctcagctgagggtggtgacacaaccccttccatttgtcagcactttccagcctgccaattgcttcccctctgtgatctcatttcatctgcactgccatacgtggagtgagcaagacagggcttaccatcctgtctaccagatgaggaaatggcagttctgagaagtcactggtctagatc

SEQ ID NO: 233789 - DNA, 3078 bp, Artificial Sequence
  derived and/or modified sequence
attactcctattgtgtaggttcccacctgcaagagtgctgtcgggtcctctgaggtgaaaccccaaaggaaagcgggatcgggactgggggagggggattcccaagtccctgacacccgcgccgtctcggcctgggcttggtgacctcgtcagtcccgtctgccgggactaggccgcggccaggccgggcacagcggtacccggtccggcgcgtgtgcggcctgctgacaaaaggccgagcccgcagggccaatccgcgcgccaccccgtagcgcctgggggcgggagcgggcgagccgagaagctcgtcttggcgcgtctattggctggtactgacgcccatccggaccccgaggccaggcagttggccaaggggggcggggttcgcagagccccaatgaatgggggagccggaagcaggaagtgagtttgcgaacggagcagctgctgcagggcccatggcggacacccagtacatcctgcccaatgacatcggcgtgtctagcctggactgccgtgaggccttccgcctgctgtcacccacagagcgcctctatgcctaccacctgtcccgtgccgcctggtacggaggcctggctgtgctgcttcagacctcccctgaggccccctacatctatgctctgctcagccgcctcttccgcgcccaggaccccgaccagctgcgccaacatgccctggctgaaggccttaccgaggaggagtatcaggcgttcctggtctatgccgcgggtgtttactccaacatgggcaactacaagtcctttggtgacaccaagtttgttcccaacttgcccaaggaaaagctggaacgggtgatcctagggagtgaggctgctcagcagcacccagaagaagtcaggggcctctggcagacctgcggggagcttatgttctctctggagccaaggcttcgacacctcggactggggaaggagggaatcaccacctatttctctgggaattgtaccatggaagatgccaaattggcccaggactttctggactcacagaacctcagtgcctacaacacccggctcttcaaagaggtcgatggagaagggaagccctactacgaggtgcggctggcttctgtgcttggctcagagccttccctggactctgaggtgacttccaagctgaagagctatgaattccggggaagccctttccaggtgacccggggggactacgcgcccatcctccagaaggtggtggagcagctggagaaagccaaggcctatgcagccaacagccaccaggggcagatgctggcccagtatatagagagcttcacccagggctccatcgaggcccacaagaggggctcccgcttctggatccaggacaaaggccccatcgtggagagttacatcgggttcatcgagagctaccgcgacccctttggttcccgaggagaatttgaaggtttcgtagctgtggtgaacaaggccatgagtgccaagtttgagcggctggtggcgagcgcagagcagctgctgaaggagctgccctggcccccaacctttgagaaggacaagttcctcacccctgacttcacctccctggatgttctcaccttcgctggctccggcatccctgccggcatcaacatccccaactacgatgatctgaggcagacggaaggctttaagaacgtgtcgctggggaatgtgctggctgtggcctacgccacgcagcgggagaagcttacctttctggaggaggatgacaaggacctgtacatcctctggaaggggccctccttcgatgtgcaggtgggcctgcacgagctgctgggccatggcagtggcaagctcttcgtacaggacgaaaaaggagcattcaactttgaccaggaaacagtgatcaacccagagacgggcgagcagattcagagctggtatcggagcggggagacctgggatagcaagttcagcaccatcgcctccagctacgaagagtgccgggctgagagcgtgggtctctacctctgtctccacccgcaagtgctggagatctttggctttgagggggctgatgcggaggacgtgatctacgtgaactggctcaacatggttcgggccgggctgctcgctctggagttctacacacctgaggccttcaactggcgacaggcccatatgcaggcccggtttgtgatcctgagagtcttgctggaggctggcgagggactcgttaccatcactcccaccacaggctccgatgggcgcccagatgcccgggtccgcctcgaccgcagcaagatccggtctgtgggcaagcctgctctagagcgcttcctgcggagacttcaggtgctgaagtccacaggggatgtggccggagggcgggccctgtacgaggggtatgcaacagtcactgatgcgccccccgagtgcttcctcaccctcagggacacggtgctgctgcgtaaggaatctcggaagctcattgttcagcccaacactcgccttgaaggctcagacgtgcagcttctggaatacgaggcgtcagctgctggcctcatccgatccttctctgagcgtttcccagaggatggacccgagttggaggagatcctcacacagctggccacagccgatgcccgattctggaagggccccagtgaggccccatctggccaagcttgaggaagatgtgtggccttgcccccaattccatcagaccaaggctgcaagtggccctccattcgtgtgtgtatttaggggctggggagggggaggggcaggagcttggaccttggtactacctcagctgagggtggtgacacaaccccttccatttgtcagcactttccagcctgccaattgcttcccctctgtgatctcatttcatctgcactgccatacgtggagtgagcaagacagggcttaccatcctgtctaccagatgaggaaatggcagttctgagaagtcactggtctagatcccgcaggtggcacgtgacagctagggttcaaaacgttctcaccaaatccaatgctcctcacatattaattttataaccagacaaataaatattagagacaaccacca

SEQ ID NO: 233790 - DNA, 2676 bp, Artificial Sequence
  derived and/or modified sequence
aggaagtgagtttgcgaacggagcagctgctgcagtgatggttctcagcagggcccatggcggacacccagtacatcctgcccaatgacatcggcgtgtctagcctggactgccgtgaggccttccgcctgctgtcacccacagagcgcctctatgcctaccacctgtcccgtgccgcctggtacggaggcctggctgtgctgcttcagacctcccctgaggccccctacatctatgctctgctcagccgcctcttccgcgcccaggaccccgaccagctgcgccaacatgccctggctgaaggccttaccgaggaggagtatcaggcgttcctggtctatgccgcgggtgtttactccaacatgggcaactacaagtcctttggtgacaccaagtttgttcccaacttgcccaaggaaaagctggaacgggtgatcctagggagtgaggctgctcagcagcacccagaagaagtcaggggcctctggcagacctgcggggagcttatgttctctctggagccaaggcttcgacacctcggactggggaaggagggaatcaccacctatttctctgggaattgtaccatggaagatgccaaattggcccaggactttctggactcacagaacctcagtgcctacaacacccggctcttcaaagaggtcgatggagaagggaagccctactacgaggtgcggctggcttctgtgcttggctcagagccttccctggactctgaggtgacttccaagctgaagagctatgaattccggggaagccctttccaggtgacccggggggactacgcgcccatcctccagaaggtggtggagcagctggagaaagccaaggcctatgcagccaacagccaccaggggcagatgctggcccagtatatagagagcttcacccagggctccatcgaggcccacaagaggggctcccgcttctggatccaggacaaaggccccatcgtggagagttacatcgggttcatcgagagctaccgcgacccctttggttcccgaggagaatttgaaggtttcgtagctgtggtgaacaaggccatgagtgccaagtttgagcggctggtggcgagcgcagagcagctgctgaaggagctgccctggcccccaacctttgagaaggacaagttcctcacccctgacttcacctccctggatgttctcaccttcgctggctccggcatccctgccggcatcaacatccccaactacgatgatctgaggcagacggaaggctttaagaacgtgtcgctggggaatgtgctggctgtggcctacgccacgcagcgggagaagcttacctttctggaggaggatgacaaggacctgtacatcctctggaaggggccctccttcgatgtgcaggtgggcctgcacgagctgctgggccatggcagtggcaagctcttcgtacaggacgaaaaaggagcattcaactttgaccaggaaacagtgatcaacccagagacgggcgagcagattcagagctggtatcggagcggggagacctgggatagcaagttcagcaccatcgcctccagctacgaagagtgccgggctgagagcgtgggtctctacctctgtctccacccgcaagtgctggagatctttggctttgagggggctgatgcggaggacgtgatctacgtgaactggctcaacatggttcgggccgggctgctcgctctggagttctacacacctgaggccttcaactggcgacaggcccatatgcaggcccggtttgtgatcctgagagtcttgctggaggctggcgagggactcgttaccatcactcccaccacaggctccgatgggcgcccagatgcccgggtccgcctcgaccgcagcaagatccggtctgtgggcaagcctgctctagagcgcttcctgcggagacttcaggtgctgaagtccacaggggatgtggccggagggcgggccctgtacgaggggtatgcaacagtcactgatgcgccccccgagtgcttcctcaccctcagggacacggtgctgctgcgtaaggaatctcggaagctcattgttcagcccaacactcgccttgaaggctcagacgtgcagcttctggaatacgaggcgtcagctgctggcctcatccgatccttctctgagcgtttcccagaggatggacccgagttggaggagatcctcacacagctggccacagccgatgcccgattctggaagggccccagtgaggccccatctggccaagcttgaggaagatgtgtggccttgcccccaattccatcagaccaaggctgcaagtggccctccattcgtgtgtgtatttaggggctggggagggggaggggcaggagcttggaccttggtactacctcagctgagggtggtgacacaaccccttccatttgtcagcactttccagcctgccaattgcttcccctctgtgatctcatttcatctgcactgccatacgtggagtgagcaagacagggcttaccatcctgtctaccagatgaggaaatggcagttctgagaagtcactggtctagatcccgcaggtggcacgtgacagctagggttcaaaacgttctcaccaaatccaatgctcctcacatattaattttataaccagacaaataaatattagagacaaccacca

SEQ ID NO: 233791 - DNA, 2403 bp, Artificial Sequence
  derived and/or modified sequence
agtttgcgaacggagcagctgctgcagggcccatggcggacacccagtacatcctgcccaatgacatcggcgtgtctagcctggactgccgtgaggccttccgcctgctgtcacccacagagcgcctctatgcctaccacctgtcccgtgccgcctcttccgcgcccaggaccccgaccagctgcgccaacatgccctggctgaaggccttaccgaggaggagtatcaggcgttcctggtctatgccgcgggtgtttactccaacatgggcaactacaagtcctttggtgacaccaagtttgttcccaacttgcccaaggaaaagctggaacgggtgatcctagggagtgaggctgctcagcagcacccagaagaagtcaggggcctctggcagacctgcggggagcttatgttctctctggagccaaggcttcgacacctcggactggggaaggagggaatcaccacctatttctctgggaattgtaccatggaagatgccaaattggcccaggactttctggactcacagaacctcagtgcctacaacacccggctcttcaaagaggtcgatggagaagggaagccctactacgaggtgcggctggcttctgtgcttggctcagagccttccctggactctgaggtgacttccaagctgaagagctatgaattccggggaagccctttccaggtgacccggggggactacgcgcccatcctccagaaggtggtggagcagctggagaaagccaaggcctatgcagccaacagccaccaggggcagatgctggcccagtatatagagagcttcacccagggctccatcgaggcccacaagaggggctcccgcttctggatccaggacaaaggccccatcgtggagagttacatcgggttcatcgagagctaccgcgacccctttggttcccgaggagaatttgaaggtttcgtagctgtggtgaacaaggccatgagtgccaagtttgagcggctggtggcgagcgcagagcagctgctgaaggagctgccctggcccccaacctttgagaaggacaagttcctcacccctgacttcacctccctggatgttctcaccttcgctggctccggcatccctgccggcatcaacatccccaactacgatgatctgaggcagacggaaggctttaagaacgtgtcgctggggaatgtgctggctgtggcctacgccacgcagcgggagaagcttacctttctggaggaggatgacaaggacctgtacatcctctggaaggggccctccttcgatgtgcaggtgggcctgcacgagctgctgggccatggcagtggcaagctcttcgtacaggacgaaaaaggagcattcaactttgaccaggaaacagtgatcaacccagagacgggcgagcagattcagagctggtatcggagcggggagacctgggatagcaagttcagcaccatcgcctccagctacgaagagtgccgggctgagagcgtgggtctctacctctgtctccacccgcaagtgctggagatctttggctttgagggggctgatgcggaggacgtgatctacgtgaactggctcaacatggttcgggccgggctgctcgctctggagttctacacacctgaggccttcaactggcgacaggcccatatgcaggcccggtttgtgatcctgagagtcttgctggaggctggcgagggactcgttaccatcactcccaccacaggctccgatgggcgcccagatgcccgggtccgcctcgaccgcagcaagatccggtctgtgggcaagcctgctctagagcgcttcctgcggagacttcaggtgctgaagtccacaggggatgtggccggagggcgggccctgtacgaggggtatgcaacagtcactgatgcgccccccgagtgcttcctcaccctcagggacacggtgctgctgcgtaaggaatctcggaagctcattgttcagcccaacactcgccttgaaggctcagacgtgcagcttctggaatacgaggcgtcagctgctggcctcatccgatccttctctgagcgtttcccagaggatggacccgagttggaggagatcctcacacagctggccacagccgatgcccgattctggaagggccccagtgaggccccatctggccaagcttgaggaagatgtgtggccttgcccccaattccatcagaccaaggctgcaagtggccctccattcgtgtgtgtatttaggggctggggagggggaggggcaggagcttggaccttggtactacctcagctgagggtggtgacacaaccccttccatttgtcagcactttccagcctgccaattgcttcccctctgtgatctcatttcatctgcactgccatacgtggagtgagc

SEQ ID NO: 233792 - protein, 1754 aa, Artificial Sequence
  derived and/or modified sequence
MAPYPCGCHILLLLFCCLAAARANLLNLNWLWFNNEDTSHAATTIPEPQGPLPVQPTADTTTHVTPRNGSTEPATAPGSPEPPSELLEDGQDTPTSAESPDAPEENIAGVGAEILNVAKGIRSFVQLWNDTVPTESLARAETLVLETPVGPLALAGPSSTPQENGTTLWPSRGIPSSPGAHTTEAGTLPAPTPSPPSLGRPWAPLTGPSVPPPSSGRASLSSLLGGAPPWGSLQDPDSQGLSPAAAAPSQQLQRPDVRLRTPLLHPLVMGSLGKHAAPSAFSSGLPGALSQVAVTTLTRDSGAWVSHVANSVGPGLANNSALLGADPEAPAGRCLPLPPSLPVCGHLGISRFWLPNHLHHESGEQVRAGARAWGGLLQTHCHPFLAWFFCLLLVPPCGSVPPPAPPPCCQFCEALQDACWSRLGGGRLPVACASLPTQEDGYCVLIGPAAERISEEVGLLQLLGDPPPQQVTQTDDPDVGLAYVFGPDANSGQVARYHFPSLFFRDFSLLFHIRPATEGPGVLFAITDSAQAMVLLGVKLSGVQDGHQDISLLYTEPGAGQTHTAASFRLPAFVGQWTHLALSVAGGFVALYVDCEEFQRMPLARSSRGLELEPGAGLFVAQAGGADPDKFQGVIAELKVRRDPQVSPMHCLDEEGDDSDGASGDSGSGLGDARELLREETGAALKPRLPAPPPVTTPPLAGGSSTEDSRSEEVEEQTTVASLGAQTLPGSDSVSTWDGSVRTPGGRVKEGGLKGQKGEPGVPGPPGRAGPPGSPCLPGPPGLPCPVSPLGPAGPALQTVPGPQGPPGPPGRDGTPGRDGEPGDPGEDGKPGDTGPQGFPGTPGDVGPKGDKGDPGVGERGPPGPQGPPGPPGPSFRHDKLTFIDMEGSGFGGDLEALRGPRGFPGPPGPPGVPGLPGEPGRFGVNSSDVPGPAGLPGVPGREGPPGFPGLPGPPGPPGREGPPGRTGQKGSLGEAGAPGHKGSKGAPGPAGARGESGLAGAPGPAGPPGPPGPPGPPGPGLPAGFDDMEGSGGPFWSTARSADGPQGPPGLPGLKGDPGVPGLPGAKGEVGADGVPGFPGLPGREGIAGPQGPKGDRGSRGEKGDPGKDGVGQPGLPGPPGPPGPVVYVSEQDGSVLSVPGPEGRPGFAGFPGPAGPKGNLGSKGERGSPGPKGEKGEPGSIFSPDGGALGPAQKGAKGEPGFRGPPGPYGRPGYKGEIGFPGRPGRPGMNGLKGEKGEPGDASLGFGMRGMPGPPGPPGPPGPPGTPVYDSNVFAESSRPGPPGLPGNQGPPGPKGAKGEVGPPGPPGQFPFDFLQLEAEMKGEKGDRGDAGQKGERGEPGGGGFFGSSLPGPPGPPGPPGPRGYPGIPGPKGESIRGQPGPPGPQGPPGIGYEGRQGPPGPPGPPGPPSFPGPHRQTISVPGPPGPPGPPGPPGTMGASSGVRLWATRQAMLGQVHEVPEGWLIFVAEQEELYVRVQNGFRKVQLEARTPLPRGTDNEVAALQPPVVQLHDSNPYPRREHPHPTARPWRADDILASPPRLPEPQPYPGAPHHSSYVHLRPARPTSPPAHSHRDFQPVLHLVALNSPLSGGMRGIRGADFQCFQQARAVGLAGTFRAFLSSRLQDLYSIVRRADRAAVPIVNLKDELLFPSWEALFSGSEGPLKPGARIFSFDGKDVLRHPTWPQKSVWHGSDPNGRRLTESYCETWRTEAPSATGQASSLLGGRLLGQSAASCHHAYIVLCIENSFMTASK

SEQ ID NO: 233793 - protein, 1754 aa, Artificial Sequence
  derived and/or modified sequence
MAPYPCGCHILLLLFCCLAAARANLLNLNWLWFNNEDTSHAATTIPEPQGPLPVQPTADTTTHVTPRNGSTEPATAPGSPEPPSELLEDGQDTPTSAESPDAPEENIAGVGAEILNVAKGIRSFVQLWNDTVPTESLARAETLVLETPVGPLALAGPSSTPQENGTTLWPSRGIPSSPGAHTTEAGTLPAPTPSPPSLGRPWAPLTGPSVPPPSSGRASLSSLLGGAPPWGSLQDPDSQGLSPAAAAPSQQLQRPDVRLRTPLLHPLVMGSLGKHAAPSAFSSGLPGALSQVAVTTLTRDSGAWVSHVANSVGPGLANNSALLGADPEAPAGRCLPLPPSLPVCGHLGISRFWLPNHLHHESGEQVRAGARAWGGLLQTHCHPFLAWFFCLLLVPPCGSVPPPAPPPCCQFCEALQDACWSRLGGGRLPVACASLPTQEDGYCVLIGPAAERISEEVGLLQLLGDPPPQQVTQTDDPDVGLAYVFGPDANSGQVARYHFPSLFFRDFSLLFHIRPATEGPGVLFAITDSAQAMVLLGVKLSGVQDGHQDISLLYTEPGAGQTHTAASFRLPAFVGQWTHLALSVAGGFVALYVDCEEFQRMPLARSSRGLELEPGAGLFVAQAGGADPDKFQGVIAELKVRRDPQVSPMHCLDEEGDDSDGASGDSGSGLGDARELLREETGAALKPRLPAPPPVTTPPLAGGSSTEDSRSEEVEEQTTVASLGAQTLPGSDSVSTWDGSVRTPGGRVKEGGLKGQKGEPGVPGPPGRAGPPGSPCLPGPPGLPCPVSPLGPAGPALQTVPGPQGPPGPPGRDGTPGRDGEPVSPHVPPSPGDTGPQGFPGTPGDVGPKGDKGDPGVGERGPPGPQGPPGPPGPSFRHDKLTFIDMEGSGFGGDLEALRGPRGFPGPPGPPGVPGLPGEPGRFGVNSSDVPGPAGLPGVPGREGPPGFPGLPGPPGPPGREGPPGRTGQKGSLQGAGAPGVQGSKGAPGPAGARGESGLAGAPGPAGPPGPPGPPGPPGPGLPAGFDDMEGSGGPFWSTARSADGPQGPPGLPGLKGDPGVPGLPGAKGEVGADGVPGFPGLPGREGIAGPQGPKGDRGSRGEKGDPGKDGVGQPGLPGPPGPPGPVVYVSEQDGSVLSVPGPEGRPGFAGFPGPAGPKGNLGSKGERGSPGPKGEKGEPGSIFSPDGGALGPAQKGAKGEPGFRGPPGPYGRPGYKGEIGFPGRPGRPGMNGLKGEKGEPGDASLGFGMRGMPGPPGPPGPPGPPGTPVYDSNVFAESSRPGPPGLPGNQGPPGPKGAKGEVGPPGPPGQFPFDFLQLEAEMKGEKGDRGDAGQKGERGEPGGGGFFGSSLPGPPGPPGPPGPRGYPGIPGPKGESIRGQPGPPGPQGPPGIGYEGRQGPPGPPGPPGPPSFPGPHRQTISVPGPPGPPGPPGPPGTMGASSGVRLWATRQAMLGQVHEVPEGWLIFVAEQEELYVRVQNGFRKVQLEARTPLPRGTDNEVAALQPPVVQLHDSNPYPRREHPHPTARPWRADDILASPPRLPEPQPYPGAPHHSSYVHLRPARPTSPPAHSHRDFQPVLHLVALNSPLSGGMRGIRGADFQCFQQARAVGLAGTFRAFLSSRLQDLYSIVRRADRAAVPIVNLKDELLFPSWEALFSGSEGPLKPGARIFSFDGKDVLRHPTWPQKSVWHGSDPNGRRLTESYCETWRTEAPSATGQASSLLGGRLLGQSAASCHHAYIVLCIENSFMTASK

SEQ ID NO: 233794 - DNA, 5265 bp, Artificial Sequence
  derived and/or modified sequence
atggccccctacccctgcggctgccacatcctgctgctgctgttctgctgcctggccgccgccagagccaacctgctgaacctgaactggctgtggttcaacaacgaggacaccagccacgccgccaccaccatccccgagccccagggccccctgcccgtgcagcccaccgccgacaccaccacccacgtgacccccagaaacggcagcaccgagcccgccaccgcccccggcagccccgagccccccagcgagctgctggaggacggccaggacacccccaccagcgccgagagccccgacgcccccgaggagaacatcgccggcgtgggcgccgagatcctgaacgtggccaagggcatcagaagcttcgtgcagctgtggaacgacaccgtgcccaccgagagcctggccagagccgagaccctggtgctggagacccccgtgggccccctggccctggccggccccagcagcaccccccaggagaacggcaccaccctgtggcccagcagaggcatccccagcagccccggcgcccacaccaccgaggccggcaccctgcccgcccccacccccagcccccccagcctgggcagaccctgggcccccctgaccggccccagcgtgcccccccccagcagcggcagagccagcctgagcagcctgctgggcggcgcccccccctggggcagcctgcaggaccccgacagccagggcctgagccccgccgccgccgcccccagccagcagctgcagagacccgacgtgagactgagaacccccctgctgcaccccctggtgatgggcagcctgggcaagcacgccgcccccagcgccttcagcagcggcctgcccggcgccctgagccaggtggccgtgaccaccctgaccagagacagcggcgcctgggtgagccacgtggccaacagcgtgggccccggcctggccaacaacagcgccctgctgggcgccgaccccgaggcccccgccggcagatgcctgcccctgccccccagcctgcccgtgtgcggccacctgggcatcagcagattctggctgcccaaccacctgcaccacgagagcggcgagcaggtgagagccggcgccagagcctggggcggcctgctgcagacccactgccaccccttcctggcctggttcttctgcctgctgctggtgcccccctgcggcagcgtgcccccccccgccccccccccctgctgccagttctgcgaggccctgcaggacgcctgctggagcagactgggcggcggcagactgcccgtggcctgcgccagcctgcccacccaggaggacggctactgcgtgctgatcggccccgccgccgagagaatcagcgaggaggtgggcctgctgcagctgctgggcgacccccccccccagcaggtgacccagaccgacgaccccgacgtgggcctggcctacgtgttcggccccgacgccaacagcggccaggtggccagataccacttccccagcctgttcttcagagacttcagcctgctgttccacatcagacccgccaccgagggccccggcgtgctgttcgccatcaccgacagcgcccaggccatggtgctgctgggcgtgaagctgagcggcgtgcaggacggccaccaggacatcagcctgctgtacaccgagcccggcgccggccagacccacaccgccgccagcttcagactgcccgccttcgtgggccagtggacccacctggccctgagcgtggccggcggcttcgtggccctgtacgtggactgcgaggagttccagagaatgcccctggccagaagcagcagaggcctggagctggagcccggcgccggcctgttcgtggcccaggccggcggcgccgaccccgacaagttccagggcgtgatcgccgagctgaaggtgagaagagacccccaggtgagccccatgcactgcctggacgaggagggcgacgacagcgacggcgccagcggcgacagcggcagcggcctgggcgacgccagagagctgctgagagaggagaccggcgccgccctgaagcccagactgcccgcccccccccccgtgaccaccccccccctggccggcggcagcagcaccgaggacagcagaagcgaggaggtggaggagcagaccaccgtggccagcctgggcgcccagaccctgcccggcagcgacagcgtgagcacctgggacggcagcgtgagaacccccggcggcagagtgaaggagggcggcctgaagggccagaagggcgagcccggcgtgcccggcccccccggcagagccggcccccccggcagcccctgcctgcccggcccccccggcctgccctgccccgtgagccccctgggccccgccggccccgccctgcagaccgtgcccggcccccagggcccccccggcccccccggcagagacggcacccccggcagagacggcgagcccggcgaccccggcgaggacggcaagcccggcgacaccggcccccagggcttccccggcacccccggcgacgtgggccccaagggcgacaagggcgaccccggcgtgggcgagagaggcccccccggcccccagggcccccccggcccccccggccccagcttcagacacgacaagctgaccttcatcgacatggagggcagcggcttcggcggcgacctggaggccctgagaggccccagaggcttccccggcccccccggcccccccggcgtgcccggcctgcccggcgagcccggcagattcggcgtgaacagcagcgacgtgcccggccccgccggcctgcccggcgtgcccggcagagagggcccccccggcttccccggcctgcccggcccccccggcccccccggcagagagggcccccccggcagaaccggccagaagggcagcctgggcgaggccggcgcccccggccacaagggcagcaagggcgcccccggccccgccggcgccagaggcgagagcggcctggccggcgcccccggccccgccggcccccccggcccccccggcccccccggcccccccggccccggcctgcccgccggcttcgacgacatggagggcagcggcggccccttctggagcaccgccagaagcgccgacggcccccagggcccccccggcctgcccggcctgaagggcgaccccggcgtgcccggcctgcccggcgccaagggcgaggtgggcgccgacggcgtgcccggcttccccggcctgcccggcagagagggcatcgccggcccccagggccccaagggcgacagaggcagcagaggcgagaagggcgaccccggcaaggacggcgtgggccagcccggcctgcccggcccccccggcccccccggccccgtggtgtacgtgagcgagcaggacggcagcgtgctgagcgtgcccggccccgagggcagacccggcttcgccggcttccccggccccgccggccccaagggcaacctgggcagcaagggcgagagaggcagccccggccccaagggcgagaagggcgagcccggcagcatcttcagccccgacggcggcgccctgggccccgcccagaagggcgccaagggcgagcccggcttcagaggcccccccggcccctacggcagacccggctacaagggcgagatcggcttccccggcagacccggcagacccggcatgaacggcctgaagggcgagaagggcgagcccggcgacgccagcctgggcttcggcatgagaggcatgcccggcccccccggcccccccggcccccccggcccccccggcacccccgtgtacgacagcaacgtgttcgccgagagcagcagacccggcccccccggcctgcccggcaaccagggcccccccggccccaagggcgccaagggcgaggtgggcccccccggcccccccggccagttccccttcgacttcctgcagctggaggccgagatgaagggcgagaagggcgacagaggcgacgccggccagaagggcgagagaggcgagcccggcggcggcggcttcttcggcagcagcctgcccggcccccccggcccccccggcccccccggccccagaggctaccccggcatccccggccccaagggcgagagcatcagaggccagcccggcccccccggcccccagggcccccccggcatcggctacgagggcagacagggcccccccggcccccccggcccccccggcccccccagcttccccggcccccacagacagaccatcagcgtgcccggcccccccggcccccccggcccccccggcccccccggcaccatgggcgccagcagcggcgtgagactgtgggccaccagacaggccatgctgggccaggtgcacgaggtgcccgagggctggctgatcttcgtggccgagcaggaggagctgtacgtgagagtgcagaacggcttcagaaaggtgcagctggaggccagaacccccctgcccagaggcaccgacaacgaggtggccgccctgcagccccccgtggtgcagctgcacgacagcaacccctaccccagaagagagcacccccaccccaccgccagaccctggagagccgacgacatcctggccagcccccccagactgcccgagccccagccctaccccggcgccccccaccacagcagctacgtgcacctgagacccgccagacccaccagcccccccgcccacagccacagagacttccagcccgtgctgcacctggtggccctgaacagccccctgagcggcggcatgagaggcatcagaggcgccgacttccagtgcttccagcaggccagagccgtgggcctggccggcaccttcagagccttcctgagcagcagactgcaggacctgtacagcatcgtgagaagagccgacagagccgccgtgcccatcgtgaacctgaaggacgagctgctgttccccagctgggaggccctgttcagcggcagcgagggccccctgaagcccggcgccagaatcttcagcttcgacggcaaggacgtgctgagacaccccacctggccccagaagagcgtgtggcacggcagcgaccccaacggcagaagactgaccgagagctactgcgagacctggagaaccgaggcccccagcgccaccggccaggccagcagcctgctgggcggcagactgctgggccagagcgccgccagctgccaccacgcctacatcgtgctgtgcatcgagaacagcttcatgaccgccagcaagtag

SEQ ID NO: 233795 - DNA, 5265 bp, Artificial Sequence
  derived and/or modified sequence
atggccccctacccctgcggctgccacatcctgctgctgctgttctgctgcctggccgccgccagagccaacctgctgaacctgaactggctgtggttcaacaacgaggacaccagccacgccgccaccaccatccccgagccccagggccccctgcccgtgcagcccaccgccgacaccaccacccacgtgacccccagaaacggcagcaccgagcccgccaccgcccccggcagccccgagccccccagcgagctgctggaggacggccaggacacccccaccagcgccgagagccccgacgcccccgaggagaacatcgccggcgtgggcgccgagatcctgaacgtggccaagggcatcagaagcttcgtgcagctgtggaacgacaccgtgcccaccgagagcctggccagagccgagaccctggtgctggagacccccgtgggccccctggccctggccggccccagcagcaccccccaggagaacggcaccaccctgtggcccagcagaggcatccccagcagccccggcgcccacaccaccgaggccggcaccctgcccgcccccacccccagcccccccagcctgggcagaccctgggcccccctgaccggccccagcgtgcccccccccagcagcggcagagccagcctgagcagcctgctgggcggcgcccccccctggggcagcctgcaggaccccgacagccagggcctgagccccgccgccgccgcccccagccagcagctgcagagacccgacgtgagactgagaacccccctgctgcaccccctggtgatgggcagcctgggcaagcacgccgcccccagcgccttcagcagcggcctgcccggcgccctgagccaggtggccgtgaccaccctgaccagagacagcggcgcctgggtgagccacgtggccaacagcgtgggccccggcctggccaacaacagcgccctgctgggcgccgaccccgaggcccccgccggcagatgcctgcccctgccccccagcctgcccgtgtgcggccacctgggcatcagcagattctggctgcccaaccacctgcaccacgagagcggcgagcaggtgagagccggcgccagagcctggggcggcctgctgcagacccactgccaccccttcctggcctggttcttctgcctgctgctggtgcccccctgcggcagcgtgcccccccccgccccccccccctgctgccagttctgcgaggccctgcaggacgcctgctggagcagactgggcggcggcagactgcccgtggcctgcgccagcctgcccacccaggaggacggctactgcgtgctgatcggccccgccgccgagagaatcagcgaggaggtgggcctgctgcagctgctgggcgacccccccccccagcaggtgacccagaccgacgaccccgacgtgggcctggcctacgtgttcggccccgacgccaacagcggccaggtggccagataccacttccccagcctgttcttcagagacttcagcctgctgttccacatcagacccgccaccgagggccccggcgtgctgttcgccatcaccgacagcgcccaggccatggtgctgctgggcgtgaagctgagcggcgtgcaggacggccaccaggacatcagcctgctgtacaccgagcccggcgccggccagacccacaccgccgccagcttcagactgcccgccttcgtgggccagtggacccacctggccctgagcgtggccggcggcttcgtggccctgtacgtggactgcgaggagttccagagaatgcccctggccagaagcagcagaggcctggagctggagcccggcgccggcctgttcgtggcccaggccggcggcgccgaccccgacaagttccagggcgtgatcgccgagctgaaggtgagaagagacccccaggtgagccccatgcactgcctggacgaggagggcgacgacagcgacggcgccagcggcgacagcggcagcggcctgggcgacgccagagagctgctgagagaggagaccggcgccgccctgaagcccagactgcccgcccccccccccgtgaccaccccccccctggccggcggcagcagcaccgaggacagcagaagcgaggaggtggaggagcagaccaccgtggccagcctgggcgcccagaccctgcccggcagcgacagcgtgagcacctgggacggcagcgtgagaacccccggcggcagagtgaaggagggcggcctgaagggccagaagggcgagcccggcgtgcccggcccccccggcagagccggcccccccggcagcccctgcctgcccggcccccccggcctgccctgccccgtgagccccctgggccccgccggccccgccctgcagaccgtgcccggcccccagggcccccccggcccccccggcagagacggcacccccggcagagacggcgagcccgtgagcccccacgtgccccccagccccggcgacaccggcccccagggcttccccggcacccccggcgacgtgggccccaagggcgacaagggcgaccccggcgtgggcgagagaggcccccccggcccccagggcccccccggcccccccggccccagcttcagacacgacaagctgaccttcatcgacatggagggcagcggcttcggcggcgacctggaggccctgagaggccccagaggcttccccggcccccccggcccccccggcgtgcccggcctgcccggcgagcccggcagattcggcgtgaacagcagcgacgtgcccggccccgccggcctgcccggcgtgcccggcagagagggcccccccggcttccccggcctgcccggcccccccggcccccccggcagagagggcccccccggcagaaccggccagaagggcagcctgcagggcgccggcgcccccggcgtgcagggcagcaagggcgcccccggccccgccggcgccagaggcgagagcggcctggccggcgcccccggccccgccggcccccccggcccccccggcccccccggcccccccggccccggcctgcccgccggcttcgacgacatggagggcagcggcggccccttctggagcaccgccagaagcgccgacggcccccagggcccccccggcctgcccggcctgaagggcgaccccggcgtgcccggcctgcccggcgccaagggcgaggtgggcgccgacggcgtgcccggcttccccggcctgcccggcagagagggcatcgccggcccccagggccccaagggcgacagaggcagcagaggcgagaagggcgaccccggcaaggacggcgtgggccagcccggcctgcccggcccccccggcccccccggccccgtggtgtacgtgagcgagcaggacggcagcgtgctgagcgtgcccggccccgagggcagacccggcttcgccggcttccccggccccgccggccccaagggcaacctgggcagcaagggcgagagaggcagccccggccccaagggcgagaagggcgagcccggcagcatcttcagccccgacggcggcgccctgggccccgcccagaagggcgccaagggcgagcccggcttcagaggcccccccggcccctacggcagacccggctacaagggcgagatcggcttccccggcagacccggcagacccggcatgaacggcctgaagggcgagaagggcgagcccggcgacgccagcctgggcttcggcatgagaggcatgcccggcccccccggcccccccggcccccccggcccccccggcacccccgtgtacgacagcaacgtgttcgccgagagcagcagacccggcccccccggcctgcccggcaaccagggcccccccggccccaagggcgccaagggcgaggtgggcccccccggcccccccggccagttccccttcgacttcctgcagctggaggccgagatgaagggcgagaagggcgacagaggcgacgccggccagaagggcgagagaggcgagcccggcggcggcggcttcttcggcagcagcctgcccggcccccccggcccccccggcccccccggccccagaggctaccccggcatccccggccccaagggcgagagcatcagaggccagcccggcccccccggcccccagggcccccccggcatcggctacgagggcagacagggcccccccggcccccccggcccccccggcccccccagcttccccggcccccacagacagaccatcagcgtgcccggcccccccggcccccccggcccccccggcccccccggcaccatgggcgccagcagcggcgtgagactgtgggccaccagacaggccatgctgggccaggtgcacgaggtgcccgagggctggctgatcttcgtggccgagcaggaggagctgtacgtgagagtgcagaacggcttcagaaaggtgcagctggaggccagaacccccctgcccagaggcaccgacaacgaggtggccgccctgcagccccccgtggtgcagctgcacgacagcaacccctaccccagaagagagcacccccaccccaccgccagaccctggagagccgacgacatcctggccagcccccccagactgcccgagccccagccctaccccggcgccccccaccacagcagctacgtgcacctgagacccgccagacccaccagcccccccgcccacagccacagagacttccagcccgtgctgcacctggtggccctgaacagccccctgagcggcggcatgagaggcatcagaggcgccgacttccagtgcttccagcaggccagagccgtgggcctggccggcaccttcagagccttcctgagcagcagactgcaggacctgtacagcatcgtgagaagagccgacagagccgccgtgcccatcgtgaacctgaaggacgagctgctgttccccagctgggaggccctgttcagcggcagcgagggccccctgaagcccggcgccagaatcttcagcttcgacggcaaggacgtgctgagacaccccacctggccccagaagagcgtgtggcacggcagcgaccccaacggcagaagactgaccgagagctactgcgagacctggagaaccgaggcccccagcgccaccggccaggccagcagcctgctgggcggcagactgctgggccagagcgccgccagctgccaccacgcctacatcgtgctgtgcatcgagaacagcttcatgaccgccagcaagtag

SEQ ID NO: 233796 - DNA, 6607 bp, Artificial Sequence
  derived and/or modified sequence
agctccagccgcactgccccgatggctccctacccctgtggctgccacatcctgctgctgctcttctgctgcctggcggctgcccgggccaacctgctgaacctgaactggctttggttcaataatgaggacaccagccatgcagctaccacgatccctgagccccaggggcccctgcctgtgcagcccacagcagataccaccacacacgtgaccccccggaatggttccacagagccagcgacagcccctggcagccctgagccaccctcagagctgctggaagatggccaggacacccccacttctgccgagagcccggacgcgccagaggagaacattgccggtgtcggagccgagatcctgaacgtggccaaaggcatccggagcttcgtccagctgtggaatgacactgtccccactgagagcttggccagggcggaaaccctggtcctggagactcctgtgggcccccttgccctcgctgggccttccagcaccccccaggagaatgggaccactctctggcccagccgtggcattcctagctctccgggcgcccacacaaccgaggctggcaccttgcctgcacccaccccatcgcctccctccctgggcaggccctgggcaccactcacggggccctcagtgccaccaccatcttcaggtagagcttctctctcctccttgctgggcggggcccctccctggggaagcctgcaggacccagacagccaaggactctcgcccgccgcagccgctcccagccagcagctccaacgccctgacgtccgcctgcgcacgccacttctgcaccccctggtgatgggctccctgggcaagcacgcggccccctccgccttctcctctgggctcccgggcgcactgtctcaggtcgcagtcaccactttaaccagggacagcggtgcttgggtctcccacgtggctaactctgtggggccgggtcttgctaataactctgccctgctcggggctgaccccgaggcccccgccggtcgctgcctgcccctgccaccctccctgccagtctgcggccacctgggcatctcacgcttctggctgcccaaccacctccaccacgagagcggcgagcaggtgcgggccggggcacgggcgtgggggggcctgctgcagacgcactgccaccccttcctcgcctggttcttctgcctgctgctggtccccccatgcggcagcgtcccgccgcccgccccgccaccctgctgccagttctgcgaggccctgcaggatgcgtgttggagccgcctgggcgggggccggctgcccgtcgcctgtgcctcgctcccgacccaggaggatgggtactgtgtgctcattgggccggctgcagagcgcatcagcgaggaggtggggctgctgcagctccttggggaccccccgccccagcaggtcacccagacggatgaccccgacgtcgggctggcctacgtctttgggccagatgccaacagtggccaagtggcccggtaccacttccccagcctcttcttccgtgacttctcactgctgttccacatccggccagccacagagggcccaggggtgctgttcgccatcacggactcggcgcaggccatggtcttgctgggcgtgaagctctctggggtgcaggacgggcaccaggacatctccctgctctacacagaaccaggtgcaggccagacccacacagccgccagcttccggctccccgccttcgtcggccagtggacacacttagccctcagtgtggcaggtggctttgtggccctctacgtggactgtgaggagttccagagaatgccgcttgctcggtcctcacggggcctggagctggagcctggcgccgggctcttcgtggctcaggcggggggagcggaccctgacaagttccagggggtgatcgctgagctgaaggtgcgcagggacccccaggtgagccccatgcactgcctggacgaggaaggcgatgactcagatggggcatccggagactctggcagcgggctcggggacgcccgggagcttctcagggaggagacgggcgcggccctaaaacccaggctccccgcgccaccccccgtcaccacgccacccttggctggaggcagcagcacggaagattccagaagtgaagaagtcgaggagcagaccacggtggcttcgttaggagctcagacacttcctggctcagattctgtctccacgtgggacgggagtgtccggacccctgggggccgcgtgaaagagggcggcctgaaggggcagaaaggggagccaggtgttccgggcccacctggccgggcaggccccccaggatccccatgcctacctggtcccccgggtctcccgtgcccagtgagtcccctgggtcctgcaggcccagcgttgcaaactgtccccggaccacaaggacccccagggcctccggggagggacggcacccctggaagggacggcgagccgggcgaccccggtgaagacggaaagccgggcgacaccgggccacaaggcttccccgggactccaggggacgtaggtcccaagggcgacaagggagaccctggggttggagagagagggcccccaggaccccaagggcctccagggcccccaggaccctccttcagacacgacaagctgaccttcattgacatggagggatctggcttcgggggcgatctggaggccctgcggggtcctcgaggcttccctggacctcccggaccccccggtgtcccaggcctgcccggcgagccaggccgctttggggtgaacagctccgacgtcccaggacccgccggccttcctggtgtgcctgggcgcgagggtccccccgggtttcctggcctcccgggacccccaggccctccgggaagagaggggcccccaggaaggactgggcagaaaggcagcctgggtgaagcaggcgccccaggacataaggggagcaagggagcccccggtcctgctggtgctcgtggggagagcggcctggcaggagcccccggacctgctggaccaccaggcccccctgggccccctgggcccccaggaccaggactccccgctggatttgatgacatggaaggctccggggggcccttctggtcaacagcccgaagcgctgatgggccacagggacctcccggcctgccgggacttaagggggatcctggcgtgcctgggctgccgggggcgaagggagaagttggagcagatggagtccccgggttccccggcctccctggcagagagggcattgctgggccccaggggccaaagggagacagaggcagccggggagaaaagggagatccagggaaggacggagtcgggcagccgggcctccctggcccccccggacccccgggacctgtggtctacgtgtcggagcaggacggatccgtcctgagcgtgccgggacctgagggccggccgggtttcgcaggctttcccggacctgcaggacccaagggcaacctgggctctaagggcgaacgaggctccccgggacccaagggtgagaagggtgaaccgggcagcatcttcagccccgacggcggtgccctgggccctgcccagaaaggagccaagggagagccgggcttccgaggacccccgggtccatacggacggccggggtacaagggagagattggctttcctggacggccgggtcgccccgggatgaacggattgaaaggagagaaaggggagccgggagatgccagccttggatttggcatgaggggaatgcccggccccccaggacctccagggcccccaggccctccagggactcctgtttacgacagcaatgtgtttgctgagtccagccgccccgggcctccaggattgccagggaatcagggccctccaggacccaagggcgccaaaggagaagtgggcccccccggaccaccagggcagtttccgtttgactttcttcagttggaggctgaaatgaagggggagaagggagaccgaggtgatgcaggacagaaaggcgaaaggggggagcccgggggcggcggtttcttcggctccagcctgcccggcccccccggccccccaggccccccaggcccacgtggctaccctgggattccaggtcccaagggagagagcatccggggccagcccggcccacctggacctcagggaccccccggcatcggctacgaggggcgccagggccctcccggccccccaggccccccagggcccccttcatttcctggccctcacaggcagactatcagcgttcccggccctccgggcccccctgggccccctgggccccctggaaccatgggcgcctcctcaggggtgaggctctgggctacacgccaggccatgctgggccaggtgcacgaggttcccgagggctggctcatcttcgtggccgagcaggaggagctctacgtccgcgtgcagaacgggttccggaaggtccagctggaggcccggacaccactcccacgagggacggacaatgaagtggccgccttgcagccccccgtggtgcagctgcacgacagcaacccctacccgcggcgggagcacccccaccccaccgcgcggccctggcgggcagatgacatcctggccagcccccctcgcctgcccgagccccagccctaccccggagccccgcaccacagctcctacgtgcacctgcggccggcgcgacccacaagcccacccgcccacagccaccgcgacttccagccggtgctccacctggttgcgctcaacagccccctgtcaggcggcatgcggggcatccgcggggccgacttccagtgcttccagcaggcgcgggccgtggggctggcgggcaccttccgcgccttcctgtcctcgcgcctgcaggacctgtacagcatcgtgcgccgtgccgaccgcgcagccgtgcccatcgtcaacctcaaggacgagctgctgtttcccagctgggaggctctgttctcaggctctgagggtccgctgaagcccggggcacgcatcttctcctttgacggcaaggacgtcctgaggcaccccacctggccccagaagagcgtgtggcatggctcggaccccaacgggcgcaggctgaccgagagctactgtgagacgtggcggacggaggctccctcggccacgggccaggcctcctcgctgctggggggcaggctcctggggcagagtgccgcgagctgccatcacgcctacatcgtgctctgcattgagaacagcttcatgactgcctccaagtagccaccgcctggatgcggatggccggagaggaccggcggctcggaggaagcccccaccgtgggcagggagcggccggccagcccctggccccaggacctggctgccatactttcctgtatagttcacgtttcatgtaatcctcaagaaataaaaggaagccaaagagtgtatttttttaaaagtttaaaacagaagcctgatgctgacattcacctgccccaactctcccctgacctgtgagcccagctgggtcaggcagggtgcagtatcatgccctgtgcaacctcttggcctgatcagaccacggctcgatttctccaggatttcctgctttgggaagccgtgctcgccccagcaggtgctgacttcatctcccacctagcagcaccgttctgtgcacaaaacccagacctgttagcagacaggccccgtgaggcaatgggagctgaggccacactcagcacaaggccatctgggctcctccagggtgtgtgctcgccctgcggtagatgggagggaggctcaggtccctggggctagggggagccccttctgctcagctctgggccattctccacagcaaccccaggctgaagcaggttcccaagctcagaggcgcactgtgacccccagctccggcctgtcctccaacaccaagcacagcagcctggggctggcctcccaaatgagccatgagatgatacatccaaagcagacagctccaccctggccgagtccaagctgggagattcaagggacccatgagttggggtctggcagcctcccatccagggcccccatctcatgcccctggctgggacgtggctcagccagcacttgtccagctgagcgccaggatggaacacggccacatcaaagaggctgaggctggcacaggacatgcggtagccagcacacagggcagtgagggagggctgtcatctgtgcactgcccatggacaggctggctccagatgcagggcagtcattggctgtctcctaggaaacccatatccttaccctccttgggactgaaggggaaccccggggtgcccacaggccgccctgcgggtgaacaaagcagccacgaggtgcaacaaggtcctctgtcagtcacagccacccctgagatccggcaacatcaacccgagtcattcgttctgtggagggacaagtggactcagggcagcgccaggctgaccacagcacagccaacacgcacctgcctcaggactgcgacgaaaccggtggggctggttctgtaattgtgtgtgatgtgaagccaattcagacaggcaaataaaagtgaccttttacactg

SEQ ID NO: 233797 - DNA, 6586 bp, Artificial Sequence
  derived and/or modified sequence
atggctccctacccctgtggctgccacatcctgctgctgctcttctgctgcctggcggctgcccgggccaacctgctgaacctgaactggctttggttcaataatgaggacaccagccatgcagctaccacgatccctgagccccaggggcccctgcctgtgcagcccacagcagataccaccacacacgtgaccccccggaatggttccacagagccagcgacagcccctggcagccctgagccaccctcagagctgctggaagatggccaggacacccccacttctgccgagagcccggacgcgccagaggagaacattgccggtgtcggagccgagatcctgaacgtggccaaaggcatccggagcttcgtccagctgtggaatgacactgtccccactgagagcttggccagggcggaaaccctggtcctggagactcctgtgggcccccttgccctcgctgggccttccagcaccccccaggagaatgggaccactctctggcccagccgtggcattcctagctctccgggcgcccacacaaccgaggctggcaccttgcctgcacccaccccatcgcctccctccctgggcaggccctgggcaccactcacggggccctcagtgccaccaccatcttcaggtagagcttctctctcctccttgctgggcggggcccctccctggggaagcctgcaggacccagacagccaaggactctcgcccgccgcagccgctcccagccagcagctccaacgccctgacgtccgcctgcgcacgccacttctgcaccccctggtgatgggctccctgggcaagcacgcggccccctccgccttctcctctgggctcccgggcgcactgtctcaggtcgcagtcaccactttaaccagggacagcggtgcttgggtctcccacgtggctaactctgtggggccgggtcttgctaataactctgccctgctcggggctgaccccgaggcccccgccggtcgctgcctgcccctgccaccctccctgccagtctgcggccacctgggcatctcacgcttctggctgcccaaccacctccaccacgagagcggcgagcaggtgcgggccggggcacgggcgtgggggggcctgctgcagacgcactgccaccccttcctcgcctggttcttctgcctgctgctggtccccccatgcggcagcgtcccgccgcccgccccgccaccctgctgccagttctgcgaggccctgcaggatgcgtgttggagccgcctgggcgggggccggctgcccgtcgcctgtgcctcgctcccgacccaggaggatgggtactgtgtgctcattgggccggctgcagagcgcatcagcgaggaggtggggctgctgcagctccttggggaccccccgccccagcaggtcacccagacggatgaccccgacgtcgggctggcctacgtctttgggccagatgccaacagtggccaagtggcccggtaccacttccccagcctcttcttccgtgacttctcactgctgttccacatccggccagccacagagggcccaggggtgctgttcgccatcacggactcggcgcaggccatggtcttgctgggcgtgaagctctctggggtgcaggacgggcaccaggacatctccctgctctacacagaaccaggtgcaggccagacccacacagccgccagcttccggctccccgccttcgtcggccagtggacacacttagccctcagtgtggcaggtggctttgtggccctctacgtggactgtgaggagttccagagaatgccgcttgctcggtcctcacggggcctggagctggagcctggcgccgggctcttcgtggctcaggcggggggagcggaccctgacaagttccagggggtgatcgctgagctgaaggtgcgcagggacccccaggtgagccccatgcactgcctggacgaggaaggcgatgactcagatggggcatccggagactctggcagcgggctcggggacgcccgggagcttctcagggaggagacgggcgcggccctaaaacccaggctccccgcgccaccccccgtcaccacgccacccttggctggaggcagcagcacggaagattccagaagtgaagaagtcgaggagcagaccacggtggcttcgttaggagctcagacacttcctggctcagattctgtctccacgtgggacgggagtgtccggacccctgggggccgcgtgaaagagggcggcctgaaggggcagaaaggggagccaggtgttccgggcccacctggccgggcaggccccccaggatccccatgcctacctggtcccccgggtctcccgtgcccagtgagtcccctgggtcctgcaggcccagcgttgcaaactgtccccggaccacaaggacccccagggcctccggggagggacggcacccctggaagggacggcgagccggtgagtcctcacgtccccccgagtccgggcgacaccgggccacaaggcttccccgggactccaggggacgtaggtcccaagggcgacaagggagaccctggggttggagagagagggcccccaggaccccaagggcctccagggcccccaggaccctccttcagacacgacaagctgaccttcattgacatggagggatctggcttcgggggcgatctggaggccctgcggggtcctcgaggcttccctggacctcccggaccccccggtgtcccaggcctgcccggcgagccaggccgctttggggtgaacagctccgacgtcccaggacccgccggccttcctggtgtgcctgggcgcgagggtccccccgggtttcctggcctcccgggacccccaggccctccgggaagagaggggcccccaggaaggactgggcagaaaggcagcctgcaaggagccggggccccaggcgtgcaggggagcaagggagcccccggtcctgctggtgctcgtggggagagcggcctggcaggagcccccggacctgctggaccaccaggcccccctgggccccctgggcccccaggaccaggactccccgctggatttgatgacatggaaggctccggggggcccttctggtcaacagcccgaagcgctgatgggccacagggacctcccggcctgccgggacttaagggggatcctggcgtgcctgggctgccgggggcgaagggagaagttggagcagatggagtccccgggttccccggcctccctggcagagagggcattgctgggccccaggggccaaagggagacagaggcagccggggagaaaagggagatccagggaaggacggagtcgggcagccgggcctccctggcccccccggacccccgggacctgtggtctacgtgtcggagcaggacggatccgtcctgagcgtgccgggacctgagggccggccgggtttcgcaggctttcccggacctgcaggacccaagggcaacctgggctctaagggcgaacgaggctccccgggacccaagggtgagaagggtgaaccgggcagcatcttcagccccgacggcggtgccctgggccctgcccagaaaggagccaagggagagccgggcttccgaggacccccgggtccatacggacggccggggtacaagggagagattggctttcctggacggccgggtcgccccgggatgaacggattgaaaggagagaaaggggagccgggagatgccagccttggatttggcatgaggggaatgcccggccccccaggacctccagggcccccaggccctccagggactcctgtttacgacagcaatgtgtttgctgagtccagccgccccgggcctccaggattgccagggaatcagggccctccaggacccaagggcgccaaaggagaagtgggcccccccggaccaccagggcagtttccgtttgactttcttcagttggaggctgaaatgaagggggagaagggagaccgaggtgatgcaggacagaaaggcgaaaggggggagcccgggggcggcggtttcttcggctccagcctgcccggcccccccggccccccaggccccccaggcccacgtggctaccctgggattccaggtcccaagggagagagcatccggggccagcccggcccacctggacctcagggaccccccggcatcggctacgaggggcgccagggccctcccggccccccaggccccccagggcccccttcatttcctggccctcacaggcagactatcagcgttcccggccctccgggcccccctgggccccctgggccccctggaaccatgggcgcctcctcaggggtgaggctctgggctacacgccaggccatgctgggccaggtgcacgaggttcccgagggctggctcatcttcgtggccgagcaggaggagctctacgtccgcgtgcagaacgggttccggaaggtccagctggaggcccggacaccactcccacgagggacggacaatgaagtggccgccttgcagccccccgtggtgcagctgcacgacagcaacccctacccgcggcgggagcacccccaccccaccgcgcggccctggcgggcagatgacatcctggccagcccccctcgcctgcccgagccccagccctaccccggagccccgcaccacagctcctacgtgcacctgcggccggcgcgacccacaagcccacccgcccacagccaccgcgacttccagccggtgctccacctggttgcgctcaacagccccctgtcaggcggcatgcggggcatccgcggggccgacttccagtgcttccagcaggcgcgggccgtggggctggcgggcaccttccgcgccttcctgtcctcgcgcctgcaggacctgtacagcatcgtgcgccgtgccgaccgcgcagccgtgcccatcgtcaacctcaaggacgagctgctgtttcccagctgggaggctctgttctcaggctctgagggtccgctgaagcccggggcacgcatcttctcctttgacggcaaggacgtcctgaggcaccccacctggccccagaagagcgtgtggcatggctcggaccccaacgggcgcaggctgaccgagagctactgtgagacgtggcggacggaggctccctcggccacgggccaggcctcctcgctgctggggggcaggctcctggggcagagtgccgcgagctgccatcacgcctacatcgtgctctgcattgagaacagcttcatgactgcctccaagtagccaccgcctggatgcggatggccggagaggaccggcggctcggaggaagcccccaccgtgggcagggagcggccggccagcccctggccccaggacctggctgccatactttcctgtatagttcacgtttcatgtaatcctcaagaaataaaaggaagccaaagagtgtatttttttaaaagtttaaaacagaagcctgatgctgacattcacctgccccaactctcccctgacctgtgagcccagctgggtcaggcagggtgcagtatcatgccctgtgcaacctcttggcctgatcagaccacggctcgatttctccaggatttcctgctttgggaagccgtgctcgccccagcaggtgctgacttcatctcccacctagcagcaccgttctgtgcacaaaacccagacctgttagcagacaggccccgtgaggcaatgggagctgaggccacactcagcacaaggccatctgggctcctccagggtgtgtgctcgccctgcggtagatgggagggaggctcaggtccctggggctagggggagccccttctgctcagctctgggccattctccacagcaaccccaggctgaagcaggttcccaagctcagaggcgcactgtgacccccagctccggcctgtcctccaacaccaagcacagcagcctggggctggcctcccaaatgagccatgagatgatacatccaaagcagacagctccaccctggccgagtccaagctgggagattcaagggacccatgagttggggtctggcagcctcccatccagggcccccatctcatgcccctggctgggacgtggctcagccagcacttgtccagctgagcgccaggatggaacacggccacatcaaagaggctgaggctggcacaggacatgcggtagccagcacacagggcagtgagggagggctgtcatctgtgcactgcccatggacaggctggctccagatgcagggcagtcattggctgtctcctaggaaacccatatccttaccctccttgggactgaaggggaaccccggggtgcccacaggccgccctgcgggtgaacaaagcagccacgaggtgcaacaaggtcctctgtcagtcacagccacccctgagatccggcaacatcaacccgagtcattcgttctgtggagggacaagtggactcagggcagcgccaggctgaccacagcacagccaacacgcacctgcctcaggactgcgacgaaaccggtggggctggttctgtaattgtgtgtgatgtgaagccaattcagacaggcaaataaaagtgaccttttacactg

SEQ ID NO: 233798 - DNA, 5265 bp, Artificial Sequence
  derived and/or modified sequence
atggcaccttacccctgtgggtgccacatcttgctcctgctgttttgctgcctggctgctgccagggccaatctcctcaacctgaattggctttggtttaacaatgaagacacctcccacgctgcgacaacgatccccgaacctcaggggccacttccagtgcaacccacagcagacaccactactcacgtaacacccagaaatggatctacggagccagcgacagcccccggatcgccggagccgcctagcgagctcctggaagatgggcaggatacccccactagcgcagagagccccgatgcccccgaggagaatatagctggagtgggagctgagatattgaatgtggcaaaaggtatcagaagcttcgttcaactgtggaatgatacagtacccactgagtcactggcccgggctgagacattagtactcgaaacacctgtgggaccactcgctctggctggacctagttccaccccacaggaaaatgggaccacattatggccaagtcggggaatcccatccagcccaggagctcacaccacggaggccggaacattacccgcacctactccctctcccccgtctctcggccggccctgggctccactgaccggtccgagcgtgccacccccttcgtctgggagagccagcctgagcagtctcctaggaggcgcacccccctggggctcactccaagatcctgacagccagggtctctctccagccgcagcagccccaagccagcaactgcagcgcccggatgtgagacttcgtacccctctcctgcaccctctggtgatgggctcattaggcaaacatgctgcgccatctgccttctcttccggactgcctggagcactcagtcaggttgctgtaactaccttgaccagagatagtggggcatgggtgagccatgtagccaatagcgtgggcccaggcctggccaataactccgctcttttaggcgctgaccccgaagctcccgccggcagatgcctgcctttgccccctagcctaccggtttgcggtcaccttggcatctcacggttttggcttccaaatcaccttcaccacgagtctggcgaacaagtgcgtgctggcgcgcgggcatggggcggactgctgcagacacactgccacccgttcctcgcttggtttttttgtctgctgctggtacccccctgcggatctgtgccgccgccagcccctccaccctgctgccaattttgtgaggctttacaagatgcttgttggagccggcttggtggcgggcgcctgcccgtggcatgtgcatccctgcctactcaagaggacggctattgtgtgctaatagggcctgcggccgagcgaatttccgaagaagtgggactgcttcagttgcttggggatccaccacctcagcaggtcacccagaccgacgaccctgatgtaggcctagcctatgtgtttggacctgacgcgaattccgggcaggtggcccggtaccattttccctctctcttctttagggacttctcactgcttttccacataagaccggccactgagggtcctggagtactctttgccatcacagacagtgcccaggcaatggtgctactgggcgtcaagttaagtggagtgcaggatggtcaccaagatatttctcttctgtacaccgagcccggagctggccagactcatactgcagccagttttaggttaccggcattcgtaggacagtggactcatctcgccctgtccgtggcggggggcttcgtagcactttatgtcgattgtgaggagtttcaaagaatgccacttgcacggtcttccagggggctggaattagagcccggcgccgggctcttcgtggctcaggccggaggcgcagatcccgataaattccaaggagtcatcgctgagctgaaagtacgccgagatccgcaggtcagcccaatgcactgcttggacgaggagggcgacgacagcgatggcgctagtggggattctgggtcagggctgggagacgcacgggagttacttcgcgaagagaccggggctgctctcaagccaaggctgccagcccccccgccggtcactacacctccactggcagggggctcgagtacagaagattcaaggtcggaggaagtcgaggagcagaccacggttgctagcctgggtgcacagaccctccccgggtcagattctgtcagcacgtgggatggttccgtgcgcacgccaggcggcagagtcaaggagggtggactgaaggggcagaagggtgagcctggggtgcccgggcctcctggaagagctggtccaccaggctcaccctgcctccccggtccccccgggttgccctgccccgtcagtccactgggacccgcagggccagcccttcagaccgtgcccggcccccaagggcctcctggacctcccggtcgcgatgggacacctggcagggatggggaaccaggtgatcccggtgaagacggaaagccgggcgacacagggcctcaaggctttccggggacccctggagacgtggggcctaaaggagacaagggggatccaggggtaggagagcgcggcccaccagggccccaggggccacccgggcctcccgggcccagtttccggcacgacaaactgacatttatcgatatggagggcagtggtttcggaggtgacctggaagcacttcgcggaccacgagggttcccaggccctcccggccccccaggggtgccaggtctgcccggtgagcctggtagattcggggtcaacagctctgacgtgcccggccccgcgggactgcctggtgttcctggtcgcgagggcccaccagggttcccaggacttcctggtccccccggcccccccggccgcgaaggccctccgggacggaccggccagaagggcagcctgggggaagccggcgcccctggccataaagggtccaaaggcgctccgggccccgccggtgcacgcggtgaatccgggctcgccggggccccaggtcctgccgggccgcctggaccacccggtcctcccgggccacctggtcccggactgcccgctggcttcgatgatatggagggcagcggcggacctttctggtccacagctcgctcagcagacggtccgcaaggaccaccagggctccctggcttaaagggtgatcccggagtccctggactgcctggggcaaagggcgaggtgggtgcagacggggtgccagggttccctgggcttccagggcgtgaagggatagccggaccccaagggccaaagggcgatcggggctccaggggggagaaaggggaccctggaaaggatggcgtgggtcagccaggcttaccaggacctccgggaccaccaggacccgtcgtatatgtcagcgaacaggacggaagtgttctgagcgtgccaggacccgaggggaggcctgggttcgccggctttccgggtccagcgggcccaaaaggaaatctgggttctaaaggagagcggggatcaccaggaccgaaaggagaaaagggagagccgggctctattttcagcccagatgggggggccctcggacccgctcaaaagggtgctaagggcgaaccagggttccgggggcctcctggaccatacgggagacccggatacaaaggggagattgggtttccggggaggcccggtaggcctggcatgaatggcctcaaaggcgaaaagggggaaccaggagatgcctccctcgggttcggtatgcgtggtatgcctggtccccctggtccgcctggtccgcccggtccccccggaacacccgtctatgatagcaacgtcttcgccgagtcatcccgtccaggaccaccaggccttccaggcaaccagggcccacccggtccaaaaggcgccaagggtgaggtcggccccccggggccgccgggtcaattccctttcgacttcctgcagcttgaggccgaaatgaagggtgaaaaaggggatcggggtgacgcaggccagaagggggagcgcggcgagccaggcggaggcggctttttcggttcttctcttcccgggccccctggcccaccaggtccaccgggccctaggggctatccagggattccaggacctaagggggagtctataagaggtcagccaggaccacccggccctcaggggcccccagggatcgggtacgaaggaaggcaaggaccccccggacctcccggccccccgggacctccctctttccctggtccacacagacagacaattagtgttcccggtcccccaggcccccccgggccacccggccctcccggcacaatgggtgcctctagcggagtgcgcctatgggcaaccagacaggcaatgttaggtcaggtccatgaggttccggaggggtggttgatttttgttgcagaacaggaggagctgtatgtcagggtgcagaacggctttcgcaaagtgcagctggaggcccggacgcctcttcctcgtggtactgataacgaagttgcggctcttcagccacccgtcgtacagctgcatgattctaatccatatcctagacgggagcatcctcacccgacagcgagaccctggcgagctgatgacattcttgcctctcccccaaggctgcccgaaccgcagccttacccaggcgctccccatcacagctcttacgtccatctccgcccagcgagacctaccagcccgcctgctcatagccacagggatttccagcctgtcctccatctggtcgccctgaactctcctctgtccggggggatgcgaggtatcaggggagctgattttcagtgttttcaacaggcacgtgcggtggggcttgccggtacatttcgggcatttttatcttcacgcctgcaagatctgtattctatcgtgcggcgggcggatagagcagccgtccccatcgtgaacctgaaggacgaacttctgttcccttcctgggaggcgttattttcaggctcagaggggcctcttaagccaggcgccagaatcttctccttcgacggaaaggatgtgctccgacaccccacatggccccaaaagtctgtctggcacggctctgaccctaacgggagacgtctcacagagagttactgcgagacttggcggacggaggcacctagtgccacaggccaggcgtccagcttacttggcggccgcctgttaggtcagtctgccgcctcatgtcatcacgcctatatcgttctatgcattgaaaactcttttatgactgcctcaaagtag

SEQ ID NO: 233799 - DNA, 5265 bp, Artificial Sequence
  derived and/or modified sequence
atggccccgtatccttgtgggtgtcatattctgcttctccttttttgctgtttagcggctgcacgagccaacctcctgaacctaaactggttgtggttcaacaacgaggatacctcccatgccgccacgaccatccccgagccgcagggccctctgccggtgcagcccacggccgacacgacaactcacgtgacgccccgaaacggttcgaccgaacccgctacagcgcccggctccccagagcctccctctgaactactggaagacggccaggataccccaacaagtgcagaatcgcctgacgctccagaagagaatatcgccggcgtcggcgctgaaatcttgaacgtggcgaaaggcatccgatcctttgtgcagctttggaacgatactgtgccgactgagagccttgcccgcgctgagaccctggtgctcgaaaccccggtcggtcctctcgctctagctggcccctcatcgacaccacaggagaatggcactacgctctggccaagtagaggcatcccatcatcaccaggcgcacatactaccgaggccgggactctgcctgcccccacacccagtccccctagtctgggccgcccctgggcccccctgaccggaccctctgtccctcccccctcatctggcagagcgagtctgagtagccttcttgggggcgcgccgccatggggatccctgcaggaccccgatagccagggtctctccccagctgccgcagcaccatcacagcagctgcagaggcctgacgttcggcttagaacgcctctcttgcacccgcttgtgatgggctctctcggaaagcacgcggcaccatctgcattcagcagcgggctgccgggtgccctgtcgcaggtggctgtaaccactttgacacgggactcaggcgcatgggtatctcacgttgcgaactccgtggggccagggcttgccaataattctgctctgttaggcgccgacccagaggcgccagctggacgttgtcttccgctgccacctagtctgcccgtgtgcggtcatctcggaatctctcgattctggctccccaaccacctgcaccacgaaagtggtgagcaggtgagggccggggcccgcgcgtggggcggtctgctgcaaactcactgccatccgttccttgcttggttcttttgtttgctgctcgtgccaccctgcggtagtgtacccccacctgctccacctccttgttgccagttctgtgaggcgctccaggacgcctgctggtccaggctaggcgggggtagactgcctgtcgcatgcgcgtcccttccaactcaggaagatggctactgcgtcctgattggccctgccgctgaacgaataagcgaagaggtgggtctgctccagctgctgggggatccaccccctcaacaggtgacacagacagatgatcccgacgtgggtctggcctacgtgtttggacctgacgcaaactctggccaggttgccaggtaccatttcccatccctcttttttagagactttagcctcctgttccacataagaccagccactgaaggtcctggtgtcctgtttgcaattacggatagcgctcaagctatggtgttgctgggagttaaactgagcggggtccaggatggacaccaggacattagccttctgtacacagagccgggcgccggccagacacatactgccgcttcattcaggctccctgccttcgttgggcaatggactcacctggccctgagcgtggcagggggctttgttgccctgtatgtggactgtgaggaattccagcggatgccactggctagatcaagccgaggactggagcttgaacctggagccggccttttcgtggcccaggccggaggcgcagaccccgacaaatttcagggtgtaattgcagaactcaaagtgagacgcgaccctcaggtttccccaatgcattgtctcgacgaagaaggagatgacagtgacggtgcttctggcgactccggttcaggcctgggcgacgctagggagctcctccgcgaggagaccggcgcggctctcaagcctcgactgccagcaccgcctcccgtgactactccacccctcgccggaggaagctcaacagaagatagccggtctgaggaggtggaagagcagacaactgtcgcttccctgggcgcccagacgcttccgggatctgacagcgtttcgacctgggatggctccgtgcggacccctggcggccgcgttaaggagggcgggctgaagggtcagaaaggggagcccggggtgcctgggccgcctggcagagcaggccccccgggatcaccctgcctacctggacccccggggctgccctgcccagtctccccactcgggccagcaggccctgcactccagacagtgcccggcccccaaggaccacctggaccacccggccgagacggcacccccggcagggacggagaaccagttagtccacacgttccgccttccccgggggacaccggcccccagggatttcccggaacacctggggatgtgggacctaaaggtgataagggcgacccaggtgtcggcgagagaggaccgccaggtccgcagggccctccggggccccccggaccatctttcagacatgataaattaacatttatcgacatggaaggtagtggtttcggcggtgacctcgaagcccttagaggaccccgtgggttccctgggccccctggacctcccggcgtgccaggcctgcccggtgaaccgggtcgcttcggagttaacagctccgacgtcccagggcctgccgggctacccggggtgcctggtagagagggaccccccggctttccgggtttgcccgggccaccgggaccgccagggcgggaggggccacctggccggacagggcaaaagggaagtctgcagggcgccggagccccgggcgtgcagggctccaaaggagcacctggtccagctggcgcgaggggggaatccggactggcaggagcccccggcccagccggaccaccaggtcctcccgggccacctggaccaccagggcccggcttaccagcaggctttgatgatatggagggttccgggggccctttctggtcaacagctaggtccgcagatgggccacagggtccaccaggcctcccaggactgaagggggaccctggcgtccccgggttacctggcgccaagggagaggtgggcgcagatggagttcccggtttcccaggacttcccggacgtgagggcattgcagggccccagggacccaaaggagacaggggaagtcggggagaaaaaggcgaccccggcaaggatggggtcgggcagccaggtctgcccggtcctccaggcccgccaggaccggttgtgtacgtatcagaacaagatggctcagtgctctcagtgcctgggccggagggccgccctggcttcgccggctttcctggccctgccggacctaagggtaatttgggtagcaaaggagagcgaggatctcccggccccaagggcgaaaaaggtgagcccggctcaatcttctccccagatggtggggccctgggtcctgcccaaaaaggcgcgaagggcgagccgggcttcagagggcctcccggaccttatggaagacctggatataagggcgagattggatttcccggccgacccggcaggcccgggatgaacggactgaaaggcgaaaagggagaaccaggagacgcgagtctgggattcgggatgcgggggatgcctggaccacccggaccccctgggcctcctggaccgccggggactcccgtctatgacagcaacgtcttcgccgaaagttcaaggcctgggccaccagggctgcccggaaatcagggccctcctggcccgaagggggctaagggggaggtgggacctcccgggccaccaggtcagtttccgttcgacttcctgcagttggaggcggaaatgaagggggagaagggggataggggcgatgctggacagaagggggagcggggcgagcctggaggcggcggatttttcggaagtagtcttcccggcccaccggggccccctggacctcctggcccaagagggtatccaggtatacctggccctaagggagaaagcatcagggggcagcccgggccaccggggccacaagggccccctgggatcgggtacgagggtcgccaaggccctcctggtccacccggcccgccgggtcctccttctttccctggaccccataggcagactatttccgtgcctggaccaccagggccacccggtcccccaggaccccctggcacaatgggggcctcttctggtgtcagattgtgggccactcgacaggccatgttaggccaggttcatgaggtgccagaaggctggttgatctttgttgcagagcaggaggagctgtatgttagggtgcaaaacggctttagaaaagttcaactggaggcgcggacacccttaccacgtggaacagacaacgaggtggcagccctgcaacccccggtagtacagcttcacgactctaatccgtatcccaggagagagcacccacacccgacagctaggccttggcgggcagacgacatcctagcttcaccaccaagactgccagaaccacaaccctatccaggagccccacaccattccagctacgttcaccttaggccggctagacctacatcccctccagcccatagccacagggattttcaaccagtgctgcacttggtcgctcttaattcccccttaagtgggggaatgcgcgggatccggggcgccgacttccagtgcttccaacaggcacgggctgtgggtttggccggcacctttagagcctttctgtcgtccagattgcaggacctgtattctatcgttcgaagagccgatcgtgctgccgtgcccattgtgaacctgaaggacgagctactgtttccctcctgggaagcgctcttttccggaagcgaaggccctctcaaacctggcgctcggatcttctctttcgacggcaaggatgtgctccgtcaccccacttggccccagaagtctgtatggcatggttcggatccgaacggccgcagactcacagagtcatattgcgaaacatggcgcactgaggcccctagtgctacgggccaggcttccagtttgcttggcggcagattactgggccagtcagccgcttcctgccatcacgcatacatcgtactgtgtatagaaaactcctttatgaccgcttccaaatag

SEQ ID NO: 233800 - DNA, 5265 bp, Artificial Sequence
  derived and/or modified sequence
atggccccctacccctgtggctgccacatcctgctgctgctcttctgctgcctggccgccgcccgggccaacctgctgaacctgaactggctgtggttcaacaatgaagacaccagccatgctgccaccaccatccctgagccccagggccccctgcctgtgcagcccacagctgacaccaccacccacgtgaccccaagaaatggcagcacagagcccgccacagcccctggcagccctgagccccccagcgagctgctggaggatggccaggacacccccaccagcgctgagagcccagatgccccagaagaaaatattgctggggtgggcgctgagatcctgaatgtggccaagggcatccgcagctttgtgcagctgtggaatgacacagtgcccacagagagcctggcccgggcagagaccctggtgctggagacccctgtgggccccctggccctggccggccccagcagcaccccccaggagaatggcaccaccctgtggcccagccggggcatccccagcagccctggggcccacaccacagaagctggcaccctgcctgcccccacccccagcccccccagcctgggccggccctgggcccccctgaccggccccagcgtgcccccacccagcagcggccgggccagcctgagcagcctgctgggcggggccccaccctggggcagcctgcaggaccctgacagccagggcctgagccctgctgctgctgcccccagccagcagctgcagaggccagatgtgcggctgcggacccccctgctgcaccccctggtgatgggcagcctgggcaagcacgccgcccccagcgccttcagcagcggcctgcccggggccctgagccaggtggccgtgaccaccctgacccgggacagcggggcctgggtgagccacgtggccaacagcgtgggccctggcctggccaacaacagcgccctgctgggcgctgaccctgaggccccagctggccgctgcctgcccctgccccccagcctgcctgtgtgtggccacctgggcatcagccgcttctggctgcccaaccacctgcaccacgagagcggggagcaggtgcgggccggggcccgggcctggggcggcctgctgcagacccactgccaccccttcctggcctggttcttctgcctgctgctggtgcccccctgtggctctgtgcccccaccagcccccccaccctgctgccagttctgtgaggccctgcaggatgcctgctggagccggctgggcggcggccgcctgcctgtggcctgtgccagcctgcccacccaggaggatggctactgtgtgctgattggccctgctgctgagcgcatcagcgaggaggtgggcctgctgcagctgctgggggaccccccaccccagcaggtgacccagacagatgatcctgatgtgggcctggcctacgtgtttggaccagatgccaacagcggccaggtggcccgctaccacttccccagcctcttcttccgggacttcagcctgctcttccacatccggcctgccacagagggccctggggtgctgtttgccatcacagattctgcccaggccatggtgctgctgggcgtgaagctgtctggagtgcaggacggccaccaggacatcagcctgctgtacacagagcctggagctggccagacccacacagctgccagcttccggctgcctgcctttgtgggccagtggacccacctggccctgtctgtggccggcggctttgtggccctgtatgtggactgtgaggagttccagaggatgcccctggcccggagcagccggggcctggagctggagcccggggccggcctgtttgtggcccaggccggcggcgctgaccctgacaagttccagggcgtgattgctgagctgaaggtgagaagagacccccaggtgagccccatgcactgcctggatgaggagggagatgacagtgatggagccagcggggacagcggcagcggcctgggagatgcccgggagctgctgcgggaggagactggagctgccctgaagccccggctgcctgcccctcctcctgtgaccaccccacccctggccggcggcagcagcacagaggacagccgctctgaggaggtggaggagcagaccaccgtggccagcctgggcgcccagaccctgcccggcagtgacagcgtgtccacctgggatggctctgtgaggacccctgggggccgggtgaaggagggcggcctgaagggccagaagggggagcccggggtgcccggccccccaggccgggccggccccccaggcagcccctgcctgcccggccccccaggcctgccctgccctgtgagccccctgggccctgctggccctgccctgcagacagtgcccggcccccagggccccccaggccccccaggaagagatggcaccccaggaagagatggagagcccggggaccctggagaagatggcaagccaggggacaccggcccccagggcttccctggcaccccaggagatgtgggccccaagggggacaagggggaccccggggtgggggagcggggccccccaggcccccagggccccccaggccccccaggccccagcttcagacatgacaagctgaccttcatcgacatggagggcagcggctttggaggagacctggaggccctgcggggcccccggggcttccctggccccccaggccccccaggagtgcccggcctgcctggagagcccggccgctttggagtgaacagcagtgatgtgcccggccctgctggcctgcccggggtgcccggccgggagggccccccaggcttccctggcctgcccggccccccaggccccccaggccgggagggccccccaggccgcacaggccagaagggcagcctgggggaggccggggcccctggccacaagggcagcaaaggagcccctggccctgctggggcccggggggagagcggcctggccggggcccctggccctgctggccccccaggccccccaggccccccaggccccccaggccctggcctgcctgctggctttgatgacatggagggcagcggcggccccttctggagcacagcccggtctgcagatggcccccagggccccccaggcctgcccggcctgaagggggaccccggggtgcccggcctgcccggggccaagggggaggtgggcgcagatggagtgcccggcttccctggcctgcccggccgggagggcattgctggcccccagggccccaagggggaccggggcagcagaggagagaagggggaccccgggaaggatggagtgggccagcccggcctgcccggccccccaggccccccaggccctgtggtgtatgtgtctgagcaggacggctctgtgctgtctgtgcccggccctgagggccggcccggctttgctggcttccctggccctgctggccccaagggcaacctgggcagcaaaggagagcggggcagccctggccccaagggggagaagggggagcccggcagcatcttctccccagatggaggagccctgggccctgcccagaagggggccaagggggagcccggcttccggggccccccaggcccctacggccggcccggctacaagggggagatcggcttccctggccggcccggccggcccggcatgaatggcctgaagggggagaagggggagcctggagatgccagcctgggcttcggcatgaggggcatgcctggccccccaggccccccaggccccccaggccccccaggcacccctgtgtatgacagcaatgtgtttgctgagagcagccggcccggccccccaggcctgcccggcaaccagggccccccaggccccaagggggccaagggggaggtgggccccccaggccccccaggccagttcccctttgacttcctgcagctggaggccgagatgaagggggagaagggggacagaggagatgctggccagaagggggagcggggggagcccggcggcggcggcttcttcggcagcagcctgcccggccccccaggccccccaggccccccaggcccccggggctacccaggcatccctggccccaagggggagagcatccggggccagcccggccccccaggcccccagggccccccaggcatcggctatgagggccggcagggccccccaggccccccaggccccccaggcccccccagcttccctggcccccaccggcagaccatctctgtgcccggccccccaggccccccaggccccccaggccccccaggcaccatgggcgccagcagtggagtgcggctgtgggccacccggcaggccatgctgggccaggtgcatgaggtgcctgagggctggctgatctttgtggccgagcaggaggagctgtatgtgcgggtgcagaatggcttcaggaaggtgcagctggaggcccggacccccctgccccggggcacagacaatgaggtggccgccctgcagccccctgtggtgcagctgcatgacagcaacccctacccccggcgggagcacccccaccccacagcccggccctggagggcagatgacatcctggccagccccccccggctgcctgagccccagccctacccaggggccccccaccacagcagctatgtgcacctgcggcctgcccggcccaccagccccccagcccacagccaccgggacttccagcctgtgctgcacctggtggccctgaacagccccctgagcggcggcatgaggggcatcagaggagctgacttccagtgcttccagcaggcccgggctgtgggcctggccggcaccttccgggccttcctgagcagccggctgcaggacctgtacagcatcgtgagaagagctgacagagctgctgtgcccatcgtgaacctgaaggatgagctgctcttccccagctgggaggccctcttcagcggcagcgagggccccctgaagccaggggcccgcatcttctcctttgatggcaaggatgtgctgcggcaccccacctggccccagaagtctgtgtggcacggcagtgaccccaatggaagaaggctgacagagagctactgtgagacctggaggacagaggcccccagcgccaccggccaggccagcagcctgctgggcggccgcctgctgggccagagcgctgccagctgccaccacgcctacatcgtgctgtgcatcgagaacagcttcatgacagccagcaagtag

SEQ ID NO: 233801 - DNA, 5265 bp, Artificial Sequence
  derived and/or modified sequence
atggccccctacccctgtggctgccacatcctgctgctgctcttctgctgcctggccgccgcccgggccaacctgctgaacctgaactggctgtggttcaacaatgaagacaccagccatgctgccaccaccatccctgagccccagggccccctgcctgtgcagcccacagctgacaccaccacccacgtgaccccaagaaatggcagcacagagcccgccacagcccctggcagccctgagccccccagcgagctgctggaggatggccaggacacccccaccagcgctgagagcccagatgccccagaagaaaatattgctggggtgggcgctgagatcctgaatgtggccaagggcatccgcagctttgtgcagctgtggaatgacacagtgcccacagagagcctggcccgggcagagaccctggtgctggagacccctgtgggccccctggccctggccggccccagcagcaccccccaggagaatggcaccaccctgtggcccagccggggcatccccagcagccctggggcccacaccacagaagctggcaccctgcctgcccccacccccagcccccccagcctgggccggccctgggcccccctgaccggccccagcgtgcccccacccagcagcggccgggccagcctgagcagcctgctgggcggggccccaccctggggcagcctgcaggaccctgacagccagggcctgagccctgctgctgctgcccccagccagcagctgcagaggccagatgtgcggctgcggacccccctgctgcaccccctggtgatgggcagcctgggcaagcacgccgcccccagcgccttcagcagcggcctgcccggggccctgagccaggtggccgtgaccaccctgacccgggacagcggggcctgggtgagccacgtggccaacagcgtgggccctggcctggccaacaacagcgccctgctgggcgctgaccctgaggccccagctggccgctgcctgcccctgccccccagcctgcctgtgtgtggccacctgggcatcagccgcttctggctgcccaaccacctgcaccacgagagcggggagcaggtgcgggccggggcccgggcctggggcggcctgctgcagacccactgccaccccttcctggcctggttcttctgcctgctgctggtgcccccctgtggctctgtgcccccaccagcccccccaccctgctgccagttctgtgaggccctgcaggatgcctgctggagccggctgggcggcggccgcctgcctgtggcctgtgccagcctgcccacccaggaggatggctactgtgtgctgattggccctgctgctgagcgcatcagcgaggaggtgggcctgctgcagctgctgggggaccccccaccccagcaggtgacccagacagatgatcctgatgtgggcctggcctacgtgtttggaccagatgccaacagcggccaggtggcccgctaccacttccccagcctcttcttccgggacttcagcctgctcttccacatccggcctgccacagagggccctggggtgctgtttgccatcacagattctgcccaggccatggtgctgctgggcgtgaagctgtctggagtgcaggacggccaccaggacatcagcctgctgtacacagagcctggagctggccagacccacacagctgccagcttccggctgcctgcctttgtgggccagtggacccacctggccctgtctgtggccggcggctttgtggccctgtatgtggactgtgaggagttccagaggatgcccctggcccggagcagccggggcctggagctggagcccggggccggcctgtttgtggcccaggccggcggcgctgaccctgacaagttccagggcgtgattgctgagctgaaggtgagaagagacccccaggtgagccccatgcactgcctggatgaggagggagatgacagtgatggagccagcggggacagcggcagcggcctgggagatgcccgggagctgctgcgggaggagactggagctgccctgaagccccggctgcctgcccctcctcctgtgaccaccccacccctggccggcggcagcagcacagaggacagccgctctgaggaggtggaggagcagaccaccgtggccagcctgggcgcccagaccctgcccggcagtgacagcgtgtccacctgggatggctctgtgaggacccctgggggccgggtgaaggagggcggcctgaagggccagaagggggagcccggggtgcccggccccccaggccgggccggccccccaggcagcccctgcctgcccggccccccaggcctgccctgccctgtgagccccctgggccctgctggccctgccctgcagacagtgcccggcccccagggccccccaggccccccaggaagagatggcaccccaggaagagatggagagcctgtgagcccccacgtgccccccagccctggggacaccggcccccagggcttccctggcaccccaggagatgtgggccccaagggggacaagggggaccccggggtgggggagcggggccccccaggcccccagggccccccaggccccccaggccccagcttcagacatgacaagctgaccttcatcgacatggagggcagcggctttggaggagacctggaggccctgcggggcccccggggcttccctggccccccaggccccccaggagtgcccggcctgcctggagagcccggccgctttggagtgaacagcagtgatgtgcccggccctgctggcctgcccggggtgcccggccgggagggccccccaggcttccctggcctgcccggccccccaggccccccaggccgggagggccccccaggccgcacaggccagaagggcagcctgcagggcgctggggcccctggggtgcagggcagcaaaggagcccctggccctgctggggcccggggggagagcggcctggccggggcccctggccctgctggccccccaggccccccaggccccccaggccccccaggccctggcctgcctgctggctttgatgacatggagggcagcggcggccccttctggagcacagcccggtctgcagatggcccccagggccccccaggcctgcccggcctgaagggggaccccggggtgcccggcctgcccggggccaagggggaggtgggcgcagatggagtgcccggcttccctggcctgcccggccgggagggcattgctggcccccagggccccaagggggaccggggcagcagaggagagaagggggaccccgggaaggatggagtgggccagcccggcctgcccggccccccaggccccccaggccctgtggtgtatgtgtctgagcaggacggctctgtgctgtctgtgcccggccctgagggccggcccggctttgctggcttccctggccctgctggccccaagggcaacctgggcagcaaaggagagcggggcagccctggccccaagggggagaagggggagcccggcagcatcttctccccagatggaggagccctgggccctgcccagaagggggccaagggggagcccggcttccggggccccccaggcccctacggccggcccggctacaagggggagatcggcttccctggccggcccggccggcccggcatgaatggcctgaagggggagaagggggagcctggagatgccagcctgggcttcggcatgaggggcatgcctggccccccaggccccccaggccccccaggccccccaggcacccctgtgtatgacagcaatgtgtttgctgagagcagccggcccggccccccaggcctgcccggcaaccagggccccccaggccccaagggggccaagggggaggtgggccccccaggccccccaggccagttcccctttgacttcctgcagctggaggccgagatgaagggggagaagggggacagaggagatgctggccagaagggggagcggggggagcccggcggcggcggcttcttcggcagcagcctgcccggccccccaggccccccaggccccccaggcccccggggctacccaggcatccctggccccaagggggagagcatccggggccagcccggccccccaggcccccagggccccccaggcatcggctatgagggccggcagggccccccaggccccccaggccccccaggcccccccagcttccctggcccccaccggcagaccatctctgtgcccggccccccaggccccccaggccccccaggccccccaggcaccatgggcgccagcagtggagtgcggctgtgggccacccggcaggccatgctgggccaggtgcatgaggtgcctgagggctggctgatctttgtggccgagcaggaggagctgtatgtgcgggtgcagaatggcttcaggaaggtgcagctggaggcccggacccccctgccccggggcacagacaatgaggtggccgccctgcagccccctgtggtgcagctgcatgacagcaacccctacccccggcgggagcacccccaccccacagcccggccctggagggcagatgacatcctggccagccccccccggctgcctgagccccagccctacccaggggccccccaccacagcagctatgtgcacctgcggcctgcccggcccaccagccccccagcccacagccaccgggacttccagcctgtgctgcacctggtggccctgaacagccccctgagcggcggcatgaggggcatcagaggagctgacttccagtgcttccagcaggcccgggctgtgggcctggccggcaccttccgggccttcctgagcagccggctgcaggacctgtacagcatcgtgagaagagctgacagagctgctgtgcccatcgtgaacctgaaggatgagctgctcttccccagctgggaggccctcttcagcggcagcgagggccccctgaagccaggggcccgcatcttctcctttgatggcaaggatgtgctgcggcaccccacctggccccagaagtctgtgtggcacggcagtgaccccaatggaagaaggctgacagagagctactgtgagacctggaggacagaggcccccagcgccaccggccaggccagcagcctgctgggcggccgcctgctgggccagagcgctgccagctgccaccacgcctacatcgtgctgtgcatcgagaacagcttcatgacagccagcaagtag

SEQ ID NO: 233802 - DNA, 5265 bp, Artificial Sequence
  derived and/or modified sequence
atggccccctacccctgcggctgccacatcctgctgctgctgttctgttgcctggccgctgccagagccaacctgttaaacctcaactggctttggttcaataacgaagacaccagtcacgccgcaactaccattccagaaccacaaggaccccttcctgtccaacctactgctgacactacaacccacgttacgccgagaaacggaagcacagaacccgccacagcaccaggttcccctgagccgcctagcgagctactggaggatggacaggacacgcccacgtccgccgagtctcccgacgctcccgaggaaaacattgctggcgtaggtgcagaaattctgaacgtcgccaagggcatcaggagtttcgtgcagctgtggaacgacacagtcccgacagagagcttggccagagccgagacactggttttggaaacccctgttgggccactggctcttgctggtccgtcgagcacacctcaggaaaacggcaccacattgtggccgtcacgcgggatcccgtcctccccgggcgcccatacaacagaggctggcacactgccagcccccactccatctcctcccagtctcgggagaccttgggctccgctcaccggcccttccgtgcccccgccgtctagtgggcgggcgtcattaagcagtctgctgggcggcgcaccaccttggggaagtctgcaggacccagattcgcagggtctcagccccgctgccgcagcaccttcccagcaattacagagaccagacgtaaggctgcggacacctctcctccatcccctcgtcatgggcagcttgggaaagcatgccgccccttcagccttctcatcgggtctgccgggagccctatctcaagtggccgtgacaaccttgacccgagattccggcgcctgggtgtcacacgtcgccaactctgttggccccgggctcgcaaacaacagcgcgcttctgggagccgatcctgaggcgcctgcaggacggtgcctccctctaccacccagtctgcctgtctgtggccacctcggtatatctagattctggctgccaaatcatctgcatcatgaatccggggagcaagtgcgcgctggtgcacgcgcgtggggggggctgcttcagacacattgtcacccttttctcgcctggtttttctgtctccttcttgtcccaccgtgcggaagtgtccccccgccagccccacccccgtgctgccagttttgtgaagccctgcaggatgcctgttggtccagactcggcggtgggagacttcctgtcgcctgtgcttcattgccgactcaggaggacggatactgtgtgcttatcggccccgccgcggaaaggataagtgaggaggttggcctgttgcagttgttgggagatccaccacctcagcaggtcacccagaccgacgaccccgatgttggtttggcctatgtctttggaccagatgccaactccggtcaggtcgctcgctatcactttccatcattatttttcagagactttagcctattattccatattcgtcccgctacagaaggccctggcgtgctgttcgctatcaccgacagtgcccaagctatggtactgctgggagtgaaactgagcggagtccaagacggtcatcaggacatttcactcttatataccgagcccggcgcaggccagacgcatacagctgcatctttccgcctcccggccttcgttggtcagtggactcaccttgccttgtcagtggctgggggatttgtcgctttatacgtggattgtgaggagtttcagcgaatgcctttggctcgcagctctcgcggattggaacttgaacccggggctggcctgttcgttgctcaggccggcggcgccgaccccgacaaattccaaggtgtgattgctgagctgaaggtgcggagggacccacaggtaagccccatgcactgtctggatgaagagggcgacgactcggacggtgcctcaggagatagcgggtcggggctcggcgatgcccgagaattgttgcgagaggagacaggcgctgccctcaagcccaggctccccgcgcctccacctgttacgacaccccctcttgctggcgggtcctcaacggaggactcccggtccgaagaagtagaagaacaaacgaccgtggcttctctcggggctcaaactctccctggcagcgactcagtgagcacttgggacggctcggttcggactccaggcggccgcgtgaaagagggcggtctaaaggggcaaaagggcgaacctggagttccgggaccccccggccgggcagggcccccagggtccccttgcctgcccggacccccgggcttaccttgtcccgtctcccctctgggccccgcaggacccgccctgcagaccgtcccaggtccgcaggggccccccggccccccagggagagacggcacccccggtcgcgatggcgagcccggagacccgggcgaggacgggaaaccgggtgatacaggaccccagggctttcccggcacaccaggcgacgtggggccaaaaggtgataagggcgacccaggtgttggagaacgcggccccccagggccacagggtcccccaggaccgccaggtccttccttccggcatgacaagttaacatttattgacatggaaggaagcgggtttggcggtgaccttgaagcactcagaggaccccgcggcttcccagggccacctggccctccgggagtacctggactgcccggcgaacctggccgatttggcgtgaattcgtccgatgtgcccggacctgccgggctgcccggggtaccaggaagagaaggtccaccagggttccccggactgccagggccccccggacctcctgggcgggagggcccccccggacgcaccggccaaaaaggatcccttggggaggccggtgctcctgggcacaaaggctccaaaggggcacccggtcccgcaggcgcaaggggagaaagtggtcttgctggtgctcccggcccagccggtccccctgggccaccaggacccccgggaccacccgggccaggattacctgcaggcttcgacgacatggaaggctccggtggcccattctggtccacagcccgtagcgctgatggcccgcagggcccccccggactacccggcctaaagggcgaccccggagtgcccggcctcccaggggcaaagggtgaagtcggggccgatggagtgccaggtttcccgggactgcccggcagagagggtattgccggcccccagggaccaaaaggcgatagaggttctcgcggggaaaaaggtgaccctgggaaggatggagttgggcaacctgggctgcccggccctccagggccaccaggccccgtggtatatgtatctgagcaggatgggtctgtgctaagcgttcccgggccggagggacgcccagggtttgccggttttcctggcccggcgggccctaaaggcaacctgggatccaagggtgagagaggaagcccaggcccgaaaggtgagaaaggtgagcctggctctatatttagtcccgacggtggggcactaggacccgcacagaagggcgccaagggggagcccggtttccgcgggcctcctggaccctacgggagacctggatataagggtgagattggattccctggccgacctgggcggccggggatgaatgggcttaagggcgagaaaggcgaaccaggtgacgcatccctgggatttggcatgcgcgggatgcctggcccgcccggcccaccaggtccccccggtcctccaggaacccctgtgtacgactcaaatgtcttcgcagaaagcagcaggccaggacctcctggactgccagggaaccagggtcccccaggccccaagggtgccaaaggcgaagtcggtccacctggtcctcccggacagtttccttttgacttcctccagctggaagccgaaatgaagggcgagaagggcgataggggagacgctggccagaagggagagcgcggtgagccaggaggcgggggcttcttcgggtcgtctcttccaggcccccctggaccacccggcccccctgggccacgtggatacccaggcattccgggaccaaaaggtgagagcattaggggccagcctggaccacccggaccccagggacccccgggaatcggctatgagggtcgacaggggccgcccggaccgcccggccccccggggccacccagtttcccgggaccacatcgccagactatcagcgtgcctggacccccgggacctccgggaccgcccggcccccccggaactatgggcgctagcagcggagtccggctttgggctacccggcaggcaatgctgggacaggttcacgaggtgcctgaaggctggctaatctttgtcgccgagcaagaggagctctacgtacgcgtccagaatgggtttagaaaagtgcagctggaagcgaggacccccctgcctaggggaactgataacgaggtggccgcactgcaaccgcctgtggtgcagttgcacgattccaacccgtacccacgccgcgaacacccacaccccactgcccgcccctggcgtgccgacgatatcctggccagcccaccgcggcttcctgagccacagccgtatccaggagcaccccaccactcctcatatgtgcatctgaggcccgcaagacccacatctccgccggcacacagtcatagggatttccaaccggtgctccatctggttgccttgaactctcccctgagcggcggcatgcgaggcattaggggggcggacttccagtgctttcagcaggcccgggccgttggtctggctggtacatttcgtgcattcctgagcagtcgcctccaggatctctactccatcgtgaggcgggcagatagggcagcggtgccaattgtgaatctcaaagacgagttactgtttccttcttgggaggccctgttctccggcagtgaaggaccactgaagcccggcgcgcgcatcttttcgttcgacggtaaggacgttttgcggcatccgacatggccacaaaagagcgtgtggcacggttctgaccctaacggaaggcgattaacggaatcctattgcgaaacatggaggaccgaagctcctagcgcaactggtcaggcctcatctctgctaggcgggagattgctcggacaatctgccgccagttgtcaccacgcatatattgttctatgtattgaaaacagctttatgactgcaagcaagtag

SEQ ID NO: 233803 - DNA, 5265 bp, Artificial Sequence
  derived and/or modified sequence
atggccccctacccctgcggctgccacatcctgctgctgctgttctgttgtctcgcagcagctcgagcaaatctgctaaatctgaactggttatggtttaataacgaagatacctcacacgcagcaacaaccatccccgagccacagggccccttgcctgtacaacctacagcagacactacgacacacgtgacaccccgcaacgggagtacggaacctgccacagccccaggctctcctgagccccccagcgagctgctggaagatgggcaagacacacctaccagtgctgaatcaccagacgctccagaggaaaacattgcgggagtgggtgcggagattctgaacgtggctaaaggcataagatcatttgtgcagctgtggaacgacaccgtacccaccgagtcgctggcaagggcagaaacgctcgtgcttgagacccccgtgggtcctttggcactcgccggcccaagctcaactccacaagagaatggcactactctgtggccgtctaggggaatacctagcagccctggagcccacaccaccgaggccggcaccctgccagcgccaaccccatctcctccgtccctggggcgtccctgggccccgctgacaggcccatctgtcccgccaccatcctccggcagggcaagcctatcctcactgctcggaggggcccctccttgggggagccttcaggacccagacagccaaggactgagccccgcagctgcggcgccgtcgcagcaattgcagcgacctgacgtaaggctccgcacgcctctgctccatccacttgttatgggatctctcggtaaacatgcggcacctagtgccttctccagtgggttgcccggagcactgagtcaagtggctgtgactacactgacaagggattctggtgcatgggtgtcgcatgtggcgaattccgtggggcccggactggctaataattccgccctgcttggagcggatcctgaagcaccggccggccgctgcttgccattaccacccagcctgccagtgtgcggccacctaggaatcagccggttctggctgccgaatcacctccatcacgaaagcggcgagcaggtgcgtgcaggtgcccgcgcttggggcggacttctccagacacattgtcaccccttcttggcatggttcttctgtctgctcctcgtgcctccttgtggcagtgtgccaccaccagcacctcccccgtgctgtcagttttgtgaagccctgcaggacgcctgttggagtcggttaggcggcggtcgtctcccggtggcctgtgcctctctccctacccaggaggacggctactgcgtgttaattggccctgcggcggagcgaatatcagaggaagtgggcctgttacagctgcttggcgaccccccacctcaacaggtgactcagaccgatgatccagacgtgggattggcctacgtgtttggccctgatgccaacagcggacaagtggcacggtatcactttccatccctcttcttccgcgattttagcctactctttcatatccgccctgctactgaagggcctggagtcctgttcgcgataactgattctgcgcaggcaatggttctgctcggcgttaagctttccggggtccaggacggccaccaggacatttctttactttatactgagcctggagctggacagacacacaccgcagcctctttccgcttgcccgcttttgtcggccagtggacacatcttgctctcagcgtagctgggggttttgtggctctctacgtggattgtgaggaatttcagcggatgccattggctagaagcagcagggggctggagttggaaccaggcgcagggctgttcgttgcccaggctggcggcgcagaccctgataagtttcaaggagtgatcgctgaactcaaagtcaggcgcgacccacaggtgagccccatgcactgtctggatgaagagggcgatgacagtgatggagctagcggcgattccgggtccggtcttggtgacgccagagagctcctgcgcgaagagactggcgctgcgttgaagccccggcttccagcacctccacctgtgactacacccccactagctgggggctcctctaccgaggattcaagaagcgaagaggtcgaggaacaaaccacagttgctagtctgggcgcccagactctcccaggttccgactcggtatctacttgggacggctcagtcaggacccctggaggacgagtcaaagaaggagggttgaaaggccagaaaggtgaacccggggtgccaggaccgcccggacgagcaggacctcccggaagtccctgcctgccagggccccctggattaccctgtccagtgagtcccctaggacctgcaggcccggccttacaaacagtgcctggccctcaaggccccccaggccctcccggtcgagacggtacccctggacgcgatggagaacctgtgtcacctcacgtgcccccgtcgcccggggacacaggaccacaaggttttcctggcacgccaggagacgttggtcccaagggggacaaaggcgatccgggcgttggcgagcgtggcccccctggccctcagggcccccccgggcctcccggcccaagctttagacacgacaagcttacctttattgatatggagggatcgggtttcgggggagatctagaagcccttcgtggcccacgtggattccctggcccgccgggccccccaggggtgccgggactcccaggtgaacccgggcgctttggcgtcaattcttctgatgtgcctggaccagccggtctgcctggcgtgcccggccgcgaaggcccaccgggattccccggactgcctggaccccccgggcccccgggccgggaaggaccccctggccggactggccagaaaggctcactccagggagccggtgcacctggcgtgcagggttctaaaggtgcccctggccctgcgggcgcaagaggggagagcgggctcgccggagctcccggtcctgccgggccaccaggcccacctggtcctccaggcccgccaggaccaggcctgccagcaggctttgacgacatggagggatccggaggcccattttggtcaacagcccgatccgctgacggtccacaaggaccccccggacttccaggtctgaagggcgaccccggcgtgcccgggcttcctggcgccaagggcgaggttggagctgatggcgttcccggctttcccggcctcccaggccgggagggcatcgcaggacctcagggacctaagggagatcggggctcaaggggcgagaagggagatcctggaaaggatggggttggacagccgggactgcctggtcctcccggaccccctggccctgttgtgtatgtgagtgagcaagatggcagcgtgctgtctgtgccaggccccgagggcagaccaggtttcgccggcttcccaggaccagctggcccaaagggcaatctcgggtccaagggggagcgcggcagtccggggcctaagggcgagaaaggtgaaccggggtcaatttttagcccggatggtggagcccttggaccagcccagaaaggagccaagggcgagcccggcttccggggcccaccaggcccctacggccggcccggatataagggagaaattggttttcccggacgccctgggcgtcctggaatgaacggattgaaaggtgagaaaggggagcccggagatgcctctctcggatttggcatgcggggaatgcccggaccacccggcccccccggacctcccgggcctcctgggactcccgtatacgattctaacgtttttgcagaaagcagtcggcccggacccccgggtctgcctggcaatcaaggcccacctggcccaaaaggggccaagggcgaggtggggcccccagggccccccgggcagttcccctttgacttcttgcaactggaagctgaaatgaaaggagaaaaaggcgatcgcggcgacgcaggccaaaagggcgagaggggagagccgggaggtgggggattctttggatcttccctgcctgggccccctggcccacccgggccaccgggaccccgcggctacccggggatcccgggacccaagggcgagagtattcgggggcagccaggaccaccaggtccacaaggcccccctgggataggctatgagggcagacagggcccgcctgggccaccaggacctcccggccccccatcttttcctggcccacacaggcagactatctcagtgccaggcccaccggggcctccaggtccacctggtcctccaggtactatgggcgcttcctctggggttcgtctgtgggcaaccaggcaggcaatgctgggccaagtgcacgaggtgccggagggatggctgatatttgtagcagaacaggaggagctctatgtgagagtccagaacgggttccgaaaggttcagctggaagctcgcaccccactcccacggggaacggacaacgaagtagctgctctgcagccacctgtggtgcagctccacgattccaatccctatccacgcagagaacaccctcatccaactgccagaccctggcgggctgatgatattctcgcgtcaccaccaagactgcctgaaccgcaaccttatcctggggcaccccatcactcgagctacgttcatttacggccagcgcggcccacctctcccccagcacactcccatagagatttccagcctgtcctacacctagtcgctcttaacagtccactgagcggcggcatgaggggcattagaggggccgacttccagtgcttccagcaggcgagagcagtgggactcgctggaacattccgcgcgttccttagctctcggctgcaggatctgtatagtatcgtgcgtcgcgccgaccgcgcagcagtgcctatcgtcaatctgaaagacgagctactcttcccctcatgggaggccctgtttagtggtagtgagggaccactaaagccaggagcgcgcatcttttcgttcgatgggaaagacgtgctaagacatcccacatggccccaaaagtctgtgtggcacggaagcgacccgaacgggagaaggttgactgagagctactgtgagacctggcgcactgaggccccttcggctacggggcaggcatcctcccttctgggtggacggctgcttgggcagagtgcagcctcttgccaccacgcctacatcgtcctttgcatcgaaaactcctttatgacagcttccaaatag

SEQ ID NO: 233804 - DNA, 5264 bp, Artificial Sequence
  derived and/or modified sequence
atggctccctatccctgtggctgccatatcttactgctgttgttctgttgtttagctgctgcccgagctaacctcctgaatttgaactggctgtggttcaataatgaggacacatcacatgccgctaccaccattcccgaacctcagggacccctaccagttcagccaactgcagacacaaccactcacgtaactccgagaaacggctcaacggaacctgctaccgctccaggcagtccagagccaccttctgagcttctcgaggacgggcaggacacgcccacttcggcagaatctcctgacgcccctgaggagaacattgccggagtgggagccgagattctgaatgtcgcgaagggaattagatcctttgtccagctttggaacgacacagttcccacagaaagccttgccagggctgaaaccctagtgttggagacacctgttggacctttagccctagctggcccaagctccacgcctcaggaaaatggcaccaccctctggccatcccgcggaatcccttcaagccccggagcacatacgacagaagccggtaccctgcccgcacccactcctagtcctccctcattgggaagaccttgggccccactcactgggccaagcgtgccacccccatcttccggcagggccagtctttcgtcgctactcggcggtgccccaccatggggaagcctgcaggaccccgactcgcagggcttaagccctgcagccgcagctcccagtcagcagctgcaacggccagacgtgcggctgcggacacccctacttcacccactcgtgatggggagtctgggtaaacacgccgctcccagcgcatttagcagtggacttccaggcgctctttcccaggtcgcggtcactaccctgacacgagactcaggtgcttgggtttcccatgtcgccaactcagtgggcccaggactcgctaataacagcgcactcctcggggcagacccggaggccccagcgggacgctgtctgcccttaccccctagtcttccagtctgcggccatctcggaattagccggttttggctgcccaaccacctacatcatgagagtggcgagcaggttagagctggcgctcgagcatggggaggtctgctccaaactcactgtcacccctttctggcctggttcttttgcttgttactagtccccccttgtggaagcgtcccccctcccgcacctcccccttgttgtcagttctgcgaggcactccaggacgcttgttggagccgcctgggaggaggtaggttacctgttgcgtgcgcgtcactccctactcaggaagatgggtactgcgtcttaattgggccagccgctgagcggatttcagaagaggttggcctactgcagctactgggggatccccctccccagcaggtgacacagaccgacgatcccgatgtgggccttgcttatgtgttcggccctgacgctaatagcggccaagtggcgagatatcattttccctccctgttcttccgtgactttagcctcctcttccacatccggccagctacagaagggccaggtgttttgttcgccattaccgacagtgcccaagctatggtcctgctgggtgtaaagttgagcggcgtgcaagacggccatcaggacattagcctcctgtacaccgagcccggtgctggccaaacacataccgctgcatccttcagactaccggcattcgtcggccagtggacgcatctggccctttcggttgctggaggttttgtggcactgtacgtagactgcgaggaatttcagcgcatgcccctcgcacgtagcagccggggactggagctggaacctggagccggactttttgtggcccaggcaggcggagccgaccccgacaagttccagggagtgatcgcggagctgaaagtgagaagggatccccaggtctctcctatgcactgcctggatgaggagggggatgattctgacggagcttccggagactctggctcaggtctgggcgacgctcgggagctgcttcgggaagagacgggtgctgccctgaaacctagactgccagcccctccacctgtgacaactcctcctctggctggcggaagtagtactgaagactcaagatcggaagaagtggaggagcaaacaaccgttgcgtccctgggcgctcagacgttacccggatcggatagcgtgtctacatgggacggctcagttagaacacctggcggacgggtcaaggaggggggtctgaaaggccagaagggagaacccggagttccagggccacccggtcgggctggtcctcctggcagtccgtgccttccaggccctcccggtctcccctgtcccgtgtcaccactaggccctgccggaccagctctccagaccgtgcccggtccccagggcccacctggcccacccggacgggatggcactcccggtcgcgacggagaacccggagacccgggagaggacggaaaaccaggcgatacagggccacagggattccctgggacccccggagatgtgggtccgaagggcgataaaggagatccaggtgtcggggagcggggtcctccgggtccacagggcccacccggaccccctgggccaagtttccgtcacgacaaacttacctttattgacatggaagggtctggtttcggaggtgacctcgaggccctgcggggtccccgaggcttccctgggcctccgggaccccctggtgtgccagggctgccaggggagcccggacggttcggcgttaactctagtgacgtgcccggacccgctgggctgccaggggtgcccggtagggaagggccacccggtttcccgggactccctggtccacccggaccccctgggagagaggggcctccgggtcggaccggccagaagggctcacttggcgaagcaggagcaccgggacacaagggttctaaaggagcaccagggcctgccggagcaagaggagagagcggcctggccggagctccaggtccggcaggaccacccggtccccctgggccaccgggtcctcccggacccggattaccggcagggtttgacgatatggagggcagtggcggtcccttctggagcaccgctcgctccgcggatggacctcaaggacctccaggcctccccggacttaaaggagacccaggcgttcccggactgccaggcgctaagggcgaagtcggtgctgacggagtgccagggtttccaggactcccaggccgtgaggggatcgcagggcctcagggacccaaaggcgacagaggttcgcgaggggagaagggggatccgggaaaagacggcgtggggcagccaggactccccggaccccctggccctccagggccagtcgtgtacgtttccgagcaagatggctccgtgctgtcagtgccaggacccgagggacgccctggatttgccggttttcctggccctgccggacccaaaggaaacctgggttccaaaggcgaacgcggatcccctgggccaaaaggggagaagggggagcctgggtcgatcttcagtccagatggcggtgcactgggacccgcacagaagggagcaaagggggagcccggattccggggtccacctggtccgtatggacgtcctgggtataaaggtgagatagggttccccggtcgccctgggcgaccaggcatgaacggactcaaaggcgaaaagggcgagccgggtgacgccagcctgggctttggaatgcgaggcatgcctggccctcccggtccgcctgggccacctggaccaccaggcacccccgtctacgattccaatgtcttcgccgagtcctctcgacctggtcccccaggactgcctggaaaccaggggcctccagggccaaagggcgcaaagggcgaagtcggacccccaggaccacccggacagtttcccttcgatttcctgcagttggaggccgaaatgaaaggcgagaaaggcgaccgtggagacgccggtcagaaaggagagcgcggagaacccggtgggggaggctttttcggatcttctctcccagggccacccggacctcccggaccgcctggccctagggggtacccaggaattccaggccctaaaggcgaatcaattcggggacagccagggcctcccggtcctcaagggcctcctggcattgggtacgaaggcagacagggaccccctggtcccccaggaccacctggacctccctccttccccggtcctcatcgtcagactatttctgttccaggccctccaggccctccagggccacccggtcccccaggcacaatgggagcttcatctggggtgcgcctgtgggccaccaggcaggcgatgctggggcaggtacatgaagtcccagaaggatggctgatcttcgtggcggagcaggaggagctctacgtcagggtccagaacggattcaggaaggtccagctcgaggccagaacccctttgcccagggggacagataacgaggtggccgctctgcagcctccagttgtgcagctgcatgacagcaacccctatccgagaagggagcacccccacccaaccgctcgtccctggcgggcagatgacatcttggcctcgccccctaggcttcccgagccacagccctatcccggagcaccacatcattccagttatgtccatctccgtcctgctcgtcccacttctccacccgctcattctcaccgagattttcaacccgtgttgcacctcgtcgctctaaactccccactcagtggcggtatgcgaggcattcggggagcagattttcagtgctttcaacaagcccgagccgtcggccttgcaggtacttttcgggctttcctatcaagcaggctccaggatctatattctatcgtacgaagagcagatagggctgcagtgcccattgtcaatctgaaagacgagctactgttcccatcctgggaggctctcttctctggttccgaagggcctttgaaaccaggggctcgcatattcagcttcgacgggaaggatgttctcagacatccaacttggcctcagaaaagcgtttggcacggaagtgaccctaacgggcgtcgcttgacagaatcctattgcgagacctggcggaccgaggcgccatcagcgactggccaggcatcaagtctgcttgggggtagattgctgggacagagtgccgctagctgccaccatgcatatatcgtgctctgcatcgaaaactcttttatgactgccagcaagta

SEQ ID NO: 233805 - DNA, 5264 bp, Artificial Sequence
  derived and/or modified sequence
atggctccttatccgtgtggttgtcacattctgcttctactgttctgctgcctggcggctgccagagccaacttgttgaacctcaattggctgtggtttaacaatgaagatacctctcatgctgcaacaactattcccgaacctcaaggccctcttccggtccagccgactgccgataccaccacacatgtgacccccagaaacggcagcacagaacctgcaacagcaccaggtagcccagaaccgccaagtgagctgctcgaagacggacaagacaccccgacgtcggcagagtctcccgacgcccctgaagagaacatagccggagtgggcgcagagattctgaatgtggccaaggggattcgcagtttcgtgcagctgtggaatgacacagtgcccacagaatccctcgctcgggctgagaccctggtgctagagacccccgttggaccactggctctagccggtccgtcatcaacacctcaagaaaatggtacaacgctctggccatcccgaggtataccctccagtccaggcgctcacacgaccgaagctgggactctgccagcccctactccttctcccccaagcctgggtcggccatgggcacctctcaccggcccaagcgtgcccccaccctcttctggcagagcctcattgtcatccctgcttggcggtgcgccaccctggggctcactccaggatcctgactcacagggtctgagcccagcagcagccgctccgagccagcagctccagcgcccagatgtgcgactccgcacccctttacttcacccccttgtcatggggtcccttggcaagcatgcggctcctagtgcatttagctccggacttccaggagcacttagccaggtggctgttacaactctgacacgtgacagtggcgcttgggtgagccacgtggccaatagtgtggggcctggactcgccaataactccgcactgctgggggcagatcccgaagctccagctgggagatgtctgccactgccccctagtctgcccgtatgtggtcaccttggtatctcaaggttttggctgcccaaccatctgcatcacgaaagcggagagcaggttcgcgctggagccagggcctgggggggtttactacagacccactgccacccgttcttagcttggtttttctgtctgctgctggtgccaccgtgcggatcagtaccacccccagcccctccgccttgctgccagttctgcgaggctttgcaggacgcttgctggagccgcctcgggggtggaaggctgcctgtggcttgtgctagtcttccaactcaggaggatggatactgtgttctgattggacccgctgctgagaggatcagtgaggaagtgggattattacaattgctcggcgacccgcctcctcagcaggtgacccagaccgatgatcctgatgttggcctggcgtacgtgttcggcccagatgccaattctgggcaggttgcaaggtaccatttcccgtcactcttcttcagggattttagcctgctatttcatatcagacccgctactgaaggacccggagttttgtttgcgataacagattccgcgcaagcaatggttctgctgggtgtgaagctgtctggggtgcaggatgggcaccaggacatctcactgctttatactgaacccggagctggccagacccacaccgccgcttcctttagattacctgcttttgtgggacagtggacccatctcgcgttaagcgtggccggtggcttcgtcgcactttatgttgattgtgaagagtttcaacgcatgcctcttgctcgctcatcgcggggattggaacttgagccaggcgcaggcttatttgtagctcaggcgggaggggctgatcctgataaatttcagggcgtgattgctgagctcaaagttaggagagatccccaagtgtcacccatgcattgcctcgacgaggaaggtgacgactctgacggtgcctctggcgactctggtagtggactgggcgatgcacgagaactcctgcgtgaagagacaggcgctgccctgaagcctcgcctgcccgctccaccaccagtgacaacgccgccactggccggaggatctagcacggaagatagcaggagtgaggaggtcgaagagcagactacggttgcaagcttgggtgcacagactctgcccggaagtgacagcgtgagcacttgggatggatccgtccgtaccccaggaggtcgcgtcaaggagggcggtctcaagggccagaaaggagagccaggtgtgccaggaccacctggacgagccggaccaccaggtagcccttgcctacccggaccacctggactcccttgccccgttagtcccttggggcctgccggacctgccctgcagaccgttcctggacctcaaggccctcccggtcccccagggagggatgggaccccaggccgtgatggcgagcctgtctctccgcatgtgccgccttcaccaggggataccggtccacaagggttccccggaacacctggcgatgtggggcctaagggggataagggggacccaggcgtcggcgaacgagggccacctggcccacagggcccaccgggaccgcctggcccttccttcagacacgacaagctcacctttattgatatggaaggttctggctttggaggtgatctagaggcactcaggggaccaaggggattccccggaccaccgggacctcccggagtccctgggcttccgggtgaacccggacgattcggagtcaatagtagtgatgttccaggtcctgccggtcttcccggagtcccaggacgcgaagggccacctggttttccgggtttgcccggacctccaggaccaccaggaagggaaggccctcccggacgtacagggcaaaagggatctctccaaggagccggagctccaggagtgcaaggaagtaaaggcgctccgggtcctgccggtgctaggggagagtccggcctggccggagcaccaggccctgctggtccacctggcccaccagggccaccaggccctccaggtcctggactccccgcagggttcgacgacatggaggggagcggcggaccattttggagcaccgcacgttcggcagatgggccacagggcccacccggtctgccagggcttaagggcgatcccggagtacccggactcccgggagctaagggcgaggtaggcgcagacggagtcccgggattcccaggtctaccaggcagggagggaattgccggtcctcagggtccaaaaggcgataggggcagccgcggtgagaagggagacccaggaaaagatggcgttgggcagcccggactgcccggaccacctggcccaccagggcctgtcgtgtacgtgagtgagcaggatggcagcgtcctgtccgtcccaggacccgagggcagaccaggattcgctgggttccctggcccagcaggccctaagggcaatctgggaagcaagggggaacgtggatcacccggtcctaagggtgagaagggtgaaccaggaagtattttcagccccgacggcggtgctttaggacctgcccaaaagggagcgaagggggagcccggttttcgtggccctcccggaccctacggacggcctggatacaagggagagattggcttcccaggtcgccctggtcgccctggcatgaacgggctcaagggagaaaagggggaacctggtgatgcctcgctggggttcggtatgcgcggaatgcctggaccacccggacctccgggaccgcctggcccacccggaacgcctgtgtacgacagcaacgtgttcgccgagtcttccaggcctggtccacccggtttgccaggtaatcaaggaccccctggtcccaaaggcgcaaagggtgaagttggcccacccggaccaccaggacagtttccatttgacttcctccagctggaggccgagatgaagggggagaagggcgatcggggagacgctggacagaagggggagcgtggggagccaggcggtggtggctttttcggcagtagtctgcccggaccccctgggcctccaggccctcctgggcctagaggctacccaggaattccaggtcctaagggagaaagcatccgtgggcagccaggccctcccggtccacaaggaccccctggtatagggtatgaaggaaggcagggccctccgggacctccaggtcccccaggaccgccttcattcccgggaccacacaggcagacgatttcagtgccagggccaccaggccctccaggcccacctgggcctccaggcactatgggcgctagctccggagtcaggttgtgggctaccaggcaggctatgttggggcaagtacatgaagtgcccgaaggctggcttatcttcgttgccgagcaagaggagctgtacgtgcgggtgcagaatggcttcaggaaggtgcagcttgaggcccgtaccccgctcccccgtggcaccgacaatgaagtagctgccctgcagccacccgtggtccaactccacgattctaacccctatcctagaagggaacaccctcaccccaccgccagaccgtggagagcagacgatatcctcgcatccccccctagacttcctgagccgcagccgtaccctggcgcacctcatcactcttcttacgtgcacttgagacctgccagaccaacatccccgcctgcacattcccacagagactttcagccagtacttcacctcgtagcccttaattctcccctgagcggcggtatgcgtggcatacgcggagccgactttcagtgcttccaacaggcccgagcagtgggactcgcaggcacttttagggcatttttgtcaagcagacttcaggacctgtactccatcgtgaggcgggcagaccgtgccgctgttcctattgtgaacctcaaggatgaactactcttcccaagttgggaggcactgttctccgggtcagaggggcctctgaagcccggagccaggattttcagctttgacgggaaggacgttctccgacaccccacctggcctcagaagtctgtgtggcacgggagtgatcccaatggacgcagactgacggagagttattgcgaaacgtggaggacagaagcaccttcggccacggggcaggcaagtagccttctcggtgggagattgctgggccaatcagctgcaagttgccatcatgcttacatcgtcctgtgtattgaaaacagtttcatgacagcttccaaata

SEQ ID NO: 233806 - protein, 1339 aa, Artificial Sequence
  derived and/or modified sequence
MAPRCPWPWPRRRRLLDVLAPLVLLLGVRAASAEPERISEEVGLLQLLGDPPPQQVTQTDDPDVGLAYVFGPDANSGQVARYHFPSLFFRDFSLLFHIRPATEGPGVLFAITDSAQAMVLLGVKLSGVQDGHQDISLLYTEPGAGQTHTAASFRLPAFVGQWTHLALSVAGGFVALYVDCEEFQRMPLARSSRGLELEPGAGLFVAQAGGADPDKFQGVIAELKVRRDPQVSPMHCLDEEGDDSDGASGDSGSGLGDARELLREETGAALKPRLPAPPPVTTPPLAGGSSTEDSRSEEVEEQTTVASLGAQTLPGSDSVSTWDGSVRTPGGRVKEGGLKGQKGEPGVPGPPGRAGPPGSPCLPGPPGLPCPVSPLGPAGPALQTVPGPQGPPGPPGRDGTPGRDGEPGDPGEDGKPGDTGPQGFPGTPGDVGPKGDKGDPGVGERGPPGPQGPPGPPGPSFRHDKLTFIDMEGSGFGGDLEALRGPRGFPGPPGPPGVPGLPGEPGRFGVNSSDVPGPAGLPGVPGREGPPGFPGLPGPPGPPGREGPPGRTGQKGSLGEAGAPGHKGSKGAPGPAGARGESGLAGAPGPAGPPGPPGPPGPPGPGLPAGFDDMEGSGGPFWSTARSADGPQGPPGLPGLKGDPGVPGLPGAKGEVGADGVPGFPGLPGREGIAGPQGPKGDRGSRGEKGDPGKDGVGQPGLPGPPGPPGPVVYVSEQDGSVLSVPGPEGRPGFAGFPGPAGPKGNLGSKGERGSPGPKGEKGEPGSIFSPDGGALGPAQKGAKGEPGFRGPPGPYGRPGYKGEIGFPGRPGRPGMNGLKGEKGEPGDASLGFGMRGMPGPPGPPGPPGPPGTPVYDSNVFAESSRPGPPGLPGNQGPPGPKGAKGEVGPPGPPGQFPFDFLQLEAEMKGEKGDRGDAGQKGERGEPGGGGFFGSSLPGPPGPPGPPGPRGYPGIPGPKGESIRGQPGPPGPQGPPGIGYEGRQGPPGPPGPPGPPSFPGPHRQTISVPGPPGPPGPPGPPGTMGASSGVRLWATRQAMLGQVHEVPEGWLIFVAEQEELYVRVQNGFRKVQLEARTPLPRGTDNEVAALQPPVVQLHDSNPYPRREHPHPTARPWRADDILASPPRLPEPQPYPGAPHHSSYVHLRPARPTSPPAHSHRDFQPVLHLVALNSPLSGGMRGIRGADFQCFQQARAVGLAGTFRAFLSSRLQDLYSIVRRADRAAVPIVNLKDELLFPSWEALFSGSEGPLKPGARIFSFDGKDVLRHPTWPQKSVWHGSDPNGRRLTESYCETWRTEAPSATGQASSLLGGRLLGQSAASCHHAYIVLCIENSFMTASK

SEQ ID NO: 233807 - protein, 1339 aa, Artificial Sequence
  derived and/or modified sequence
MAPRCPWPWPRRRRLLDVLAPLVLLLGVRAASAEPERISEEVGLLQLLGDPPPQQVTQTDDPDVGLAYVFGPDANSGQVARYHFPSLFFRDFSLLFHIRPATEGPGVLFAITDSAQAMVLLGVKLSGVQDGHQDISLLYTEPGAGQTHTAASFRLPAFVGQWTHLALSVAGGFVALYVDCEEFQRMPLARSSRGLELEPGAGLFVAQAGGADPDKFQGVIAELKVRRDPQVSPMHCLDEEGDDSDGASGDSGSGLGDARELLREETGAALKPRLPAPPPVTTPPLAGGSSTEDSRSEEVEEQTTVASLGAQTLPGSDSVSTWDGSVRTPGGRVKEGGLKGQKGEPGVPGPPGRAGPPGSPCLPGPPGLPCPVSPLGPAGPALQTVPGPQGPPGPPGRDGTPGRDGEPVSPHVPPSPGDTGPQGFPGTPGDVGPKGDKGDPGVGERGPPGPQGPPGPPGPSFRHDKLTFIDMEGSGFGGDLEALRGPRGFPGPPGPPGVPGLPGEPGRFGVNSSDVPGPAGLPGVPGREGPPGFPGLPGPPGPPGREGPPGRTGQKGSLQGAGAPGVQGSKGAPGPAGARGESGLAGAPGPAGPPGPPGPPGPPGPGLPAGFDDMEGSGGPFWSTARSADGPQEPPALHGIGGDPGVPGLPGAKGEVGADGVPGFPGLPGREGIAGPQGPKGDRGSRGEKGDPGKDGVGQPGLPGPPGPPGPVVYVSEQDGSVLSVPGPEGRPGFAGFPGPAGPKGNLGSKGERGSPGPKGEKGEPGSIFSPDGGALGPAQKGAKGEPGFRGPPGPYGRPGYKGEIGFPGRPGRPGMNGLKGEKGEPGDASLGFGMRGMPGPPGPPGPPGPPGTPVYDSNVFAESSRPGPPGLPGNQGPPGPKGAKGEVGPPGPPGQFPFDFLQLEAEMKGEKGDRGDAGQKGERGEPGGGGFFGSSLPGPPGPPGPPGPRGYPGIPGPKGESIRGQPGPPGPQGPPGIGYEGRQGPPGPPGPPGPPSFPGPHRQTISVPGPPGPPGPPGPPGTMGASSGVRLWATRQAMLGQVHEVPEGWLIFVAEQEELYVRVQNGFRKVQLEARTPLPRGTDNEVAALQPPVVQLHDSNPYPRREHPHPTARPWRADDILASPPRLPEPQPYPGAPHHSSYVHLRPARPTSPPAHSHRDFQPVLHLVALNSPLSGGMRGIRGADFQCFQQARAVGLAGTFRAFLSSRLQDLYSIVRRADRAAVPIVNLKDELLFPSWEALFSGSEGPLKPGARIFSFDGKDVLRHPTWPQKSVWHGSDPNGRRLTESYCETWRTEAPSATGQASSLLGGRLLGQSAASCHHAYIVLCIENSFMTASK

SEQ ID NO: 233808 - DNA, 4020 bp, Artificial Sequence
  derived and/or modified sequence
atggcccccagatgcccctggccctggcccagaagaagaagactgctggacgtgctggcccccctggtgctgctgctgggcgtgagagccgccagcgccgagcccgagagaatcagcgaggaggtgggcctgctgcagctgctgggcgacccccccccccagcaggtgacccagaccgacgaccccgacgtgggcctggcctacgtgttcggccccgacgccaacagcggccaggtggccagataccacttccccagcctgttcttcagagacttcagcctgctgttccacatcagacccgccaccgagggccccggcgtgctgttcgccatcaccgacagcgcccaggccatggtgctgctgggcgtgaagctgagcggcgtgcaggacggccaccaggacatcagcctgctgtacaccgagcccggcgccggccagacccacaccgccgccagcttcagactgcccgccttcgtgggccagtggacccacctggccctgagcgtggccggcggcttcgtggccctgtacgtggactgcgaggagttccagagaatgcccctggccagaagcagcagaggcctggagctggagcccggcgccggcctgttcgtggcccaggccggcggcgccgaccccgacaagttccagggcgtgatcgccgagctgaaggtgagaagagacccccaggtgagccccatgcactgcctggacgaggagggcgacgacagcgacggcgccagcggcgacagcggcagcggcctgggcgacgccagagagctgctgagagaggagaccggcgccgccctgaagcccagactgcccgcccccccccccgtgaccaccccccccctggccggcggcagcagcaccgaggacagcagaagcgaggaggtggaggagcagaccaccgtggccagcctgggcgcccagaccctgcccggcagcgacagcgtgagcacctgggacggcagcgtgagaacccccggcggcagagtgaaggagggcggcctgaagggccagaagggcgagcccggcgtgcccggcccccccggcagagccggcccccccggcagcccctgcctgcccggcccccccggcctgccctgccccgtgagccccctgggccccgccggccccgccctgcagaccgtgcccggcccccagggcccccccggcccccccggcagagacggcacccccggcagagacggcgagcccggcgaccccggcgaggacggcaagcccggcgacaccggcccccagggcttccccggcacccccggcgacgtgggccccaagggcgacaagggcgaccccggcgtgggcgagagaggcccccccggcccccagggcccccccggcccccccggccccagcttcagacacgacaagctgaccttcatcgacatggagggcagcggcttcggcggcgacctggaggccctgagaggccccagaggcttccccggcccccccggcccccccggcgtgcccggcctgcccggcgagcccggcagattcggcgtgaacagcagcgacgtgcccggccccgccggcctgcccggcgtgcccggcagagagggcccccccggcttccccggcctgcccggcccccccggcccccccggcagagagggcccccccggcagaaccggccagaagggcagcctgggcgaggccggcgcccccggccacaagggcagcaagggcgcccccggccccgccggcgccagaggcgagagcggcctggccggcgcccccggccccgccggcccccccggcccccccggcccccccggcccccccggccccggcctgcccgccggcttcgacgacatggagggcagcggcggccccttctggagcaccgccagaagcgccgacggcccccagggcccccccggcctgcccggcctgaagggcgaccccggcgtgcccggcctgcccggcgccaagggcgaggtgggcgccgacggcgtgcccggcttccccggcctgcccggcagagagggcatcgccggcccccagggccccaagggcgacagaggcagcagaggcgagaagggcgaccccggcaaggacggcgtgggccagcccggcctgcccggcccccccggcccccccggccccgtggtgtacgtgagcgagcaggacggcagcgtgctgagcgtgcccggccccgagggcagacccggcttcgccggcttccccggccccgccggccccaagggcaacctgggcagcaagggcgagagaggcagccccggccccaagggcgagaagggcgagcccggcagcatcttcagccccgacggcggcgccctgggccccgcccagaagggcgccaagggcgagcccggcttcagaggcccccccggcccctacggcagacccggctacaagggcgagatcggcttccccggcagacccggcagacccggcatgaacggcctgaagggcgagaagggcgagcccggcgacgccagcctgggcttcggcatgagaggcatgcccggcccccccggcccccccggcccccccggcccccccggcacccccgtgtacgacagcaacgtgttcgccgagagcagcagacccggcccccccggcctgcccggcaaccagggcccccccggccccaagggcgccaagggcgaggtgggcccccccggcccccccggccagttccccttcgacttcctgcagctggaggccgagatgaagggcgagaagggcgacagaggcgacgccggccagaagggcgagagaggcgagcccggcggcggcggcttcttcggcagcagcctgcccggcccccccggcccccccggcccccccggccccagaggctaccccggcatccccggccccaagggcgagagcatcagaggccagcccggcccccccggcccccagggcccccccggcatcggctacgagggcagacagggcccccccggcccccccggcccccccggcccccccagcttccccggcccccacagacagaccatcagcgtgcccggcccccccggcccccccggcccccccggcccccccggcaccatgggcgccagcagcggcgtgagactgtgggccaccagacaggccatgctgggccaggtgcacgaggtgcccgagggctggctgatcttcgtggccgagcaggaggagctgtacgtgagagtgcagaacggcttcagaaaggtgcagctggaggccagaacccccctgcccagaggcaccgacaacgaggtggccgccctgcagccccccgtggtgcagctgcacgacagcaacccctaccccagaagagagcacccccaccccaccgccagaccctggagagccgacgacatcctggccagcccccccagactgcccgagccccagccctaccccggcgccccccaccacagcagctacgtgcacctgagacccgccagacccaccagcccccccgcccacagccacagagacttccagcccgtgctgcacctggtggccctgaacagccccctgagcggcggcatgagaggcatcagaggcgccgacttccagtgcttccagcaggccagagccgtgggcctggccggcaccttcagagccttcctgagcagcagactgcaggacctgtacagcatcgtgagaagagccgacagagccgccgtgcccatcgtgaacctgaaggacgagctgctgttccccagctgggaggccctgttcagcggcagcgagggccccctgaagcccggcgccagaatcttcagcttcgacggcaaggacgtgctgagacaccccacctggccccagaagagcgtgtggcacggcagcgaccccaacggcagaagactgaccgagagctactgcgagacctggagaaccgaggcccccagcgccaccggccaggccagcagcctgctgggcggcagactgctgggccagagcgccgccagctgccaccacgcctacatcgtgctgtgcatcgagaacagcttcatgaccgccagcaagtag

SEQ ID NO: 233809 - DNA, 4020 bp, Artificial Sequence
  derived and/or modified sequence
atggcccccagatgcccctggccctggcccagaagaagaagactgctggacgtgctggcccccctggtgctgctgctgggcgtgagagccgccagcgccgagcccgagagaatcagcgaggaggtgggcctgctgcagctgctgggcgacccccccccccagcaggtgacccagaccgacgaccccgacgtgggcctggcctacgtgttcggccccgacgccaacagcggccaggtggccagataccacttccccagcctgttcttcagagacttcagcctgctgttccacatcagacccgccaccgagggccccggcgtgctgttcgccatcaccgacagcgcccaggccatggtgctgctgggcgtgaagctgagcggcgtgcaggacggccaccaggacatcagcctgctgtacaccgagcccggcgccggccagacccacaccgccgccagcttcagactgcccgccttcgtgggccagtggacccacctggccctgagcgtggccggcggcttcgtggccctgtacgtggactgcgaggagttccagagaatgcccctggccagaagcagcagaggcctggagctggagcccggcgccggcctgttcgtggcccaggccggcggcgccgaccccgacaagttccagggcgtgatcgccgagctgaaggtgagaagagacccccaggtgagccccatgcactgcctggacgaggagggcgacgacagcgacggcgccagcggcgacagcggcagcggcctgggcgacgccagagagctgctgagagaggagaccggcgccgccctgaagcccagactgcccgcccccccccccgtgaccaccccccccctggccggcggcagcagcaccgaggacagcagaagcgaggaggtggaggagcagaccaccgtggccagcctgggcgcccagaccctgcccggcagcgacagcgtgagcacctgggacggcagcgtgagaacccccggcggcagagtgaaggagggcggcctgaagggccagaagggcgagcccggcgtgcccggcccccccggcagagccggcccccccggcagcccctgcctgcccggcccccccggcctgccctgccccgtgagccccctgggccccgccggccccgccctgcagaccgtgcccggcccccagggcccccccggcccccccggcagagacggcacccccggcagagacggcgagcccgtgagcccccacgtgccccccagccccggcgacaccggcccccagggcttccccggcacccccggcgacgtgggccccaagggcgacaagggcgaccccggcgtgggcgagagaggcccccccggcccccagggcccccccggcccccccggccccagcttcagacacgacaagctgaccttcatcgacatggagggcagcggcttcggcggcgacctggaggccctgagaggccccagaggcttccccggcccccccggcccccccggcgtgcccggcctgcccggcgagcccggcagattcggcgtgaacagcagcgacgtgcccggccccgccggcctgcccggcgtgcccggcagagagggcccccccggcttccccggcctgcccggcccccccggcccccccggcagagagggcccccccggcagaaccggccagaagggcagcctgcagggcgccggcgcccccggcgtgcagggcagcaagggcgcccccggccccgccggcgccagaggcgagagcggcctggccggcgcccccggccccgccggcccccccggcccccccggcccccccggcccccccggccccggcctgcccgccggcttcgacgacatggagggcagcggcggccccttctggagcaccgccagaagcgccgacggcccccaggagccccccgccctgcacggcatcggcggcgaccccggcgtgcccggcctgcccggcgccaagggcgaggtgggcgccgacggcgtgcccggcttccccggcctgcccggcagagagggcatcgccggcccccagggccccaagggcgacagaggcagcagaggcgagaagggcgaccccggcaaggacggcgtgggccagcccggcctgcccggcccccccggcccccccggccccgtggtgtacgtgagcgagcaggacggcagcgtgctgagcgtgcccggccccgagggcagacccggcttcgccggcttccccggccccgccggccccaagggcaacctgggcagcaagggcgagagaggcagccccggccccaagggcgagaagggcgagcccggcagcatcttcagccccgacggcggcgccctgggccccgcccagaagggcgccaagggcgagcccggcttcagaggcccccccggcccctacggcagacccggctacaagggcgagatcggcttccccggcagacccggcagacccggcatgaacggcctgaagggcgagaagggcgagcccggcgacgccagcctgggcttcggcatgagaggcatgcccggcccccccggcccccccggcccccccggcccccccggcacccccgtgtacgacagcaacgtgttcgccgagagcagcagacccggcccccccggcctgcccggcaaccagggcccccccggccccaagggcgccaagggcgaggtgggcccccccggcccccccggccagttccccttcgacttcctgcagctggaggccgagatgaagggcgagaagggcgacagaggcgacgccggccagaagggcgagagaggcgagcccggcggcggcggcttcttcggcagcagcctgcccggcccccccggcccccccggcccccccggccccagaggctaccccggcatccccggccccaagggcgagagcatcagaggccagcccggcccccccggcccccagggcccccccggcatcggctacgagggcagacagggcccccccggcccccccggcccccccggcccccccagcttccccggcccccacagacagaccatcagcgtgcccggcccccccggcccccccggcccccccggcccccccggcaccatgggcgccagcagcggcgtgagactgtgggccaccagacaggccatgctgggccaggtgcacgaggtgcccgagggctggctgatcttcgtggccgagcaggaggagctgtacgtgagagtgcagaacggcttcagaaaggtgcagctggaggccagaacccccctgcccagaggcaccgacaacgaggtggccgccctgcagccccccgtggtgcagctgcacgacagcaacccctaccccagaagagagcacccccaccccaccgccagaccctggagagccgacgacatcctggccagcccccccagactgcccgagccccagccctaccccggcgccccccaccacagcagctacgtgcacctgagacccgccagacccaccagcccccccgcccacagccacagagacttccagcccgtgctgcacctggtggccctgaacagccccctgagcggcggcatgagaggcatcagaggcgccgacttccagtgcttccagcaggccagagccgtgggcctggccggcaccttcagagccttcctgagcagcagactgcaggacctgtacagcatcgtgagaagagccgacagagccgccgtgcccatcgtgaacctgaaggacgagctgctgttccccagctgggaggccctgttcagcggcagcgagggccccctgaagcccggcgccagaatcttcagcttcgacggcaaggacgtgctgagacaccccacctggccccagaagagcgtgtggcacggcagcgaccccaacggcagaagactgaccgagagctactgcgagacctggagaaccgaggcccccagcgccaccggccaggccagcagcctgctgggcggcagactgctgggccagagcgccgccagctgccaccacgcctacatcgtgctgtgcatcgagaacagcttcatgaccgccagcaagtag

SEQ ID NO: 233810 - DNA, 5436 bp, Artificial Sequence
  derived and/or modified sequence
ctcccagcggcggcggctgcagcgcggcggtccgagcgggtgcaccgcggcggaggaggcagcatcccgcggcgctgacggtcctggggagagcatggcgccgaggtgcccctggccatggccgcggcggcggcgcctcctggacgtgctcgcgcccctggtcctgctgctcggggtccgcgcggcctccgcggagccagagcgcatcagcgaggaggtggggctgctgcagctccttggggaccccccgccccagcaggtcacccagacggatgaccccgacgtcgggctggcctacgtctttgggccagatgccaacagtggccaagtggcccggtaccacttccccagcctcttcttccgtgacttctcactgctgttccacatccggccagccacagagggcccaggggtgctgttcgccatcacggactcggcgcaggccatggtcttgctgggcgtgaagctctctggggtgcaggacgggcaccaggacatctccctgctctacacagaaccaggtgcaggccagacccacacagccgccagcttccggctccccgccttcgtcggccagtggacacacttagccctcagtgtggcaggtggctttgtggccctctacgtggactgtgaggagttccagagaatgccgcttgctcggtcctcacggggcctggagctggagcctggcgccgggctcttcgtggctcaggcggggggagcggaccctgacaagttccagggggtgatcgctgagctgaaggtgcgcagggacccccaggtgagccccatgcactgcctggacgaggaaggcgatgactcagatggggcatccggagactctggcagcgggctcggggacgcccgggagcttctcagggaggagacgggcgcggccctaaaacccaggctccccgcgccaccccccgtcaccacgccacccttggctggaggcagcagcacggaagattccagaagtgaagaagtcgaggagcagaccacggtggcttcgttaggagctcagacacttcctggctcagattctgtctccacgtgggacgggagtgtccggacccctgggggccgcgtgaaagagggcggcctgaaggggcagaaaggggagccaggtgttccgggcccacctggccgggcaggccccccaggatccccatgcctacctggtcccccgggtctcccgtgcccagtgagtcccctgggtcctgcaggcccagcgttgcaaactgtccccggaccacaaggacccccagggcctccggggagggacggcacccctggaagggacggcgagccgggcgaccccggtgaagacggaaagccgggcgacaccgggccacaaggcttccccgggactccaggggacgtaggtcccaagggcgacaagggagaccctggggttggagagagagggcccccaggaccccaagggcctccagggcccccaggaccctccttcagacacgacaagctgaccttcattgacatggagggatctggcttcgggggcgatctggaggccctgcggggtcctcgaggcttccctggacctcccggaccccccggtgtcccaggcctgcccggcgagccaggccgctttggggtgaacagctccgacgtcccaggacccgccggccttcctggtgtgcctgggcgcgagggtccccccgggtttcctggcctcccgggacccccaggccctccgggaagagaggggcccccaggaaggactgggcagaaaggcagcctgggtgaagcaggcgccccaggacataaggggagcaagggagcccccggtcctgctggtgctcgtggggagagcggcctggcaggagcccccggacctgctggaccaccaggcccccctgggccccctgggcccccaggaccaggactccccgctggatttgatgacatggaaggctccggggggcccttctggtcaacagcccgaagcgctgatgggccacagggacctcccggcctgccgggacttaagggggatcctggcgtgcctgggctgccgggggcgaagggagaagttggagcagatggagtccccgggttccccggcctccctggcagagagggcattgctgggccccaggggccaaagggagacagaggcagccggggagaaaagggagatccagggaaggacggagtcgggcagccgggcctccctggcccccccggacccccgggacctgtggtctacgtgtcggagcaggacggatccgtcctgagcgtgccgggacctgagggccggccgggtttcgcaggctttcccggacctgcaggacccaagggcaacctgggctctaagggcgaacgaggctccccgggacccaagggtgagaagggtgaaccgggcagcatcttcagccccgacggcggtgccctgggccctgcccagaaaggagccaagggagagccgggcttccgaggacccccgggtccatacggacggccggggtacaagggagagattggctttcctggacggccgggtcgccccgggatgaacggattgaaaggagagaaaggggagccgggagatgccagccttggatttggcatgaggggaatgcccggccccccaggacctccagggcccccaggccctccagggactcctgtttacgacagcaatgtgtttgctgagtccagccgccccgggcctccaggattgccagggaatcagggccctccaggacccaagggcgccaaaggagaagtgggcccccccggaccaccagggcagtttccgtttgactttcttcagttggaggctgaaatgaagggggagaagggagaccgaggtgatgcaggacagaaaggcgaaaggggggagcccgggggcggcggtttcttcggctccagcctgcccggcccccccggccccccaggccccccaggcccacgtggctaccctgggattccaggtcccaagggagagagcatccggggccagcccggcccacctggacctcagggaccccccggcatcggctacgaggggcgccagggccctcccggccccccaggccccccagggcccccttcatttcctggccctcacaggcagactatcagcgttcccggccctccgggcccccctgggccccctgggccccctggaaccatgggcgcctcctcaggggtgaggctctgggctacacgccaggccatgctgggccaggtgcacgaggttcccgagggctggctcatcttcgtggccgagcaggaggagctctacgtccgcgtgcagaacgggttccggaaggtccagctggaggcccggacaccactcccacgagggacggacaatgaagtggccgccttgcagccccccgtggtgcagctgcacgacagcaacccctacccgcggcgggagcacccccaccccaccgcgcggccctggcgggcagatgacatcctggccagcccccctcgcctgcccgagccccagccctaccccggagccccgcaccacagctcctacgtgcacctgcggccggcgcgacccacaagcccacccgcccacagccaccgcgacttccagccggtgctccacctggttgcgctcaacagccccctgtcaggcggcatgcggggcatccgcggggccgacttccagtgcttccagcaggcgcgggccgtggggctggcgggcaccttccgcgccttcctgtcctcgcgcctgcaggacctgtacagcatcgtgcgccgtgccgaccgcgcagccgtgcccatcgtcaacctcaaggacgagctgctgtttcccagctgggaggctctgttctcaggctctgagggtccgctgaagcccggggcacgcatcttctcctttgacggcaaggacgtcctgaggcaccccacctggccccagaagagcgtgtggcatggctcggaccccaacgggcgcaggctgaccgagagctactgtgagacgtggcggacggaggctccctcggccacgggccaggcctcctcgctgctggggggcaggctcctggggcagagtgccgcgagctgccatcacgcctacatcgtgctctgcattgagaacagcttcatgactgcctccaagtagccaccgcctggatgcggatggccggagaggaccggcggctcggaggaagcccccaccgtgggcagggagcggccggccagcccctggccccaggacctggctgccatactttcctgtatagttcacgtttcatgtaatcctcaagaaataaaaggaagccaaagagtgtatttttttaaaagtttaaaacagaagcctgatgctgacattcacctgccccaactctcccctgacctgtgagcccagctgggtcaggcagggtgcagtatcatgccctgtgcaacctcttggcctgatcagaccacggctcgatttctccaggatttcctgctttgggaagccgtgctcgccccagcaggtgctgacttcatctcccacctagcagcaccgttctgtgcacaaaacccagacctgttagcagacaggccccgtgaggcaatgggagctgaggccacactcagcacaaggccatctgggctcctccagggtgtgtgctcgccctgcggtagatgggagggaggctcaggtccctggggctagggggagccccttctgctcagctctgggccattctccacagcaaccccaggctgaagcaggttcccaagctcagaggcgcactgtgacccccagctccggcctgtcctccaacaccaagcacagcagcctggggctggcctcccaaatgagccatgagatgatacatccaaagcagacagctccaccctggccgagtccaagctgggagattcaagggacccatgagttggggtctggcagcctcccatccagggcccccatctcatgcccctggctgggacgtggctcagccagcacttgtccagctgagcgccaggatggaacacggccacatcaaagaggctgaggctggcacaggacatgcggtagccagcacacagggcagtgagggagggctgtcatctgtgcactgcccatggacaggctggctccagatgcagggcagtcattggctgtctcctaggaaacccatatccttaccctccttgggactgaaggggaaccccggggtgcccacaggccgccctgcgggtgaacaaagcagccacgaggtgcaacaaggtcctctgtcagtcacagccacccctgagatccggcaacatcaacccgagtcattcgttctgtggagggacaagtggactcagggcagcgccaggctgaccacagcacagccaacacgcacctgcctcaggactgcgacgaaaccggtggggctggttctgtaattgtgtgtgatgtgaagccaattcagacaggcaaataaaagtgaccttttacactga

SEQ ID NO: 233811 - DNA, 5399 bp, Artificial Sequence
  derived and/or modified sequence
cgggtgcaccgcggcggaggaggcagcatcccgcggcgctgacggtcctggggagagcatggcgccgaggtgcccctggccatggccgcggcggcggcgcctcctggacgtgctcgcgcccctggtcctgctgctcggggtccgcgcggcctccgcggagccagagcgcatcagcgaggaggtggggctgctgcagctccttggggaccccccgccccagcaggtcacccagacggatgaccccgacgtcgggctggcctacgtctttgggccagatgccaacagtggccaagtggcccggtaccacttccccagcctcttcttccgtgacttctcactgctgttccacatccggccagccacagagggcccaggggtgctgttcgccatcacggactcggcgcaggccatggtcttgctgggcgtgaagctctctggggtgcaggacgggcaccaggacatctccctgctctacacagaaccaggtgcaggccagacccacacagccgccagcttccggctccccgccttcgtcggccagtggacacacttagccctcagtgtggcaggtggctttgtggccctctacgtggactgtgaggagttccagagaatgccgcttgctcggtcctcacggggcctggagctggagcctggcgccgggctcttcgtggctcaggcggggggagcggaccctgacaagttccagggggtgatcgctgagctgaaggtgcgcagggacccccaggtgagccccatgcactgcctggacgaggaaggcgatgactcagatggggcatccggagactctggcagcgggctcggggacgcccgggagcttctcagggaggagacgggcgcggccctaaaacccaggctccccgcgccaccccccgtcaccacgccacccttggctggaggcagcagcacggaagattccagaagtgaagaagtcgaggagcagaccacggtggcttcgttaggagctcagacacttcctggctcagattctgtctccacgtgggacgggagtgtccggacccctgggggccgcgtgaaagagggcggcctgaaggggcagaaaggggagccaggtgttccgggcccacctggccgggcaggccccccaggatccccatgcctacctggtcccccgggtctcccgtgcccagtgagtcccctgggtcctgcaggcccagcgttgcaaactgtccccggaccacaaggacccccagggcctccggggagggacggcacccctggaagggacggcgagccggtgagtcctcacgtccccccgagtccgggcgacaccgggccacaaggcttccccgggactccaggggacgtaggtcccaagggcgacaagggagaccctggggttggagagagagggcccccaggaccccaagggcctccagggcccccaggaccctccttcagacacgacaagctgaccttcattgacatggagggatctggcttcgggggcgatctggaggccctgcggggtcctcgaggcttccctggacctcccggaccccccggtgtcccaggcctgcccggcgagccaggccgctttggggtgaacagctccgacgtcccaggacccgccggccttcctggtgtgcctgggcgcgagggtccccccgggtttcctggcctcccgggacccccaggccctccgggaagagaggggcccccaggaaggactgggcagaaaggcagcctgcaaggagccggggccccaggcgtgcaggggagcaagggagcccccggtcctgctggtgctcgtggggagagcggcctggcaggagcccccggacctgctggaccaccaggcccccctgggccccctgggcccccaggaccaggactccccgctggatttgatgacatggaaggctccggggggcccttctggtcaacagcccgaagcgctgatgggccacaggagccaccggccttgcatgggatcggaggggatcctggcgtgcctgggctgccgggggcgaagggagaagttggagcagatggagtccccgggttccccggcctccctggcagagagggcattgctgggccccaggggccaaagggagacagaggcagccggggagaaaagggagatccagggaaggacggagtcgggcagccgggcctccctggcccccccggacccccgggacctgtggtctacgtgtcggagcaggacggatccgtcctgagcgtgccgggacctgagggccggccgggtttcgcaggctttcccggacctgcaggacccaagggcaacctgggctctaagggcgaacgaggctccccgggacccaagggtgagaagggtgaaccgggcagcatcttcagccccgacggcggtgccctgggccctgcccagaaaggagccaagggagagccgggcttccgaggacccccgggtccatacggacggccggggtacaagggagagattggctttcctggacggccgggtcgccccgggatgaacggattgaaaggagagaaaggggagccgggagatgccagccttggatttggcatgaggggaatgcccggccccccaggacctccagggcccccaggccctccagggactcctgtttacgacagcaatgtgtttgctgagtccagccgccccgggcctccaggattgccagggaatcagggccctccaggacccaagggcgccaaaggagaagtgggcccccccggaccaccagggcagtttccgtttgactttcttcagttggaggctgaaatgaagggggagaagggagaccgaggtgatgcaggacagaaaggcgaaaggggggagcccgggggcggcggtttcttcggctccagcctgcccggcccccccggccccccaggccccccaggcccacgtggctaccctgggattccaggtcccaagggagagagcatccggggccagcccggcccacctggacctcagggaccccccggcatcggctacgaggggcgccagggccctcccggccccccaggccccccagggcccccttcatttcctggccctcacaggcagactatcagcgttcccggccctccgggcccccctgggccccctgggccccctggaaccatgggcgcctcctcaggggtgaggctctgggctacacgccaggccatgctgggccaggtgcacgaggttcccgagggctggctcatcttcgtggccgagcaggaggagctctacgtccgcgtgcagaacgggttccggaaggtccagctggaggcccggacaccactcccacgagggacggacaatgaagtggccgccttgcagccccccgtggtgcagctgcacgacagcaacccctacccgcggcgggagcacccccaccccaccgcgcggccctggcgggcagatgacatcctggccagcccccctcgcctgcccgagccccagccctaccccggagccccgcaccacagctcctacgtgcacctgcggccggcgcgacccacaagcccacccgcccacagccaccgcgacttccagccggtgctccacctggttgcgctcaacagccccctgtcaggcggcatgcggggcatccgcggggccgacttccagtgcttccagcaggcgcgggccgtggggctggcgggcaccttccgcgccttcctgtcctcgcgcctgcaggacctgtacagcatcgtgcgccgtgccgaccgcgcagccgtgcccatcgtcaacctcaaggacgagctgctgtttcccagctgggaggctctgttctcaggctctgagggtccgctgaagcccggggcacgcatcttctcctttgacggcaaggacgtcctgaggcaccccacctggccccagaagagcgtgtggcatggctcggaccccaacgggcgcaggctgaccgagagctactgtgagacgtggcggacggaggctccctcggccacgggccaggcctcctcgctgctggggggcaggctcctggggcagagtgccgcgagctgccatcacgcctacatcgtgctctgcattgagaacagcttcatgactgcctccaagtagccaccgcctggatgcggatggccggagaggaccggcggctcggaggaagcccccaccgtgggcagggagcggccggccagcccctggccccaggacctggctgccatactttcctgtatagttcacgtttcatgtaatcctcaagaaataaaaggaagccaaagagtgtatttttttaaaagtttaaaacagaagcctgatgctgacattcacctgccccaactctcccctgacctgtgagcccagctgggtcaggcagggtgcagtatcatgccctgtgcaacctcttggcctgatcagaccacggctcgatttctccaggatttcctgctttgggaagccgtgctcgccccagcaggtgctgacttcatctcccacctagcagcaccgttctgtgcacaaaacccagacctgttagcagacaggccccgtgaggcaatgggagctgaggccacactcagcacaaggccatctgggctcctccagggtgtgtgctcgccctgcggtagatgggagggaggctcaggtccctggggctagggggagccccttctgctcagctctgggccattctccacagcaaccccaggctgaagcaggttcccaagctcagaggcgcactgtgacccccagctccggcctgtcctccaacaccaagcacagcagcctggggctggcctcccaaatgagccatgagatgatacatccaaagcagacagctccaccctggccgagtccaagctgggagattcaagggacccatgagttggggtctggcagcctcccatccagggcccccatctcatgcccctggctgggacgtggctcagccagcacttgtccagctgagcgccaggatggaacacggccacatcaaagaggctgaggctggcacaggacatgcggtagccagcacacagggcagtgagggagggctgtcatctgtgcactgcccatggacaggctggctccagatgcagggcagtcattggctgtctcctaggaaacccatatccttaccctccttgggactgaaggggaaccccggggtgcccacaggccgccctgcgggtgaacaaagcagccacgaggtgcaacaaggtcctctgtcagtcacagccacccctgagatccggcaacatcaacccgagtcattcgttctgtggagggacaagtggactcagggcagcgccaggctgaccacagcacagccaacacgcacctgcctcaggactgcgacgaaaccggtggggctggttctgtaattgtgtgtgatgtgaagccaattcagacaggcaaataaaagtgaccttttacactg

SEQ ID NO: 233812 - DNA, 4020 bp, Artificial Sequence
  derived and/or modified sequence
atggcccccagatgtccatggccttggccccgtaggaggaggctcctggacgtgctagcacccctggtacttttgctcggcgtccgtgcagccagcgcagaaccagaaaggatatcggaagaggtagggcttctacagcttctgggtgacccacccccacaacaggtgacccagacagacgaccctgacgtaggacttgcttacgtgttcggcccagacgccaattccgggcaggtggcccgctatcattttcctagcctcttcttcagggacttttccctgctgttccacattcgacccgcgacggaaggccccggagtactgttcgccatcaccgacagcgctcaggcaatggtgctgttgggcgtcaagctttccggggtgcaggacggccatcaggacattagccttctgtacactgagcctggcgccggacagacgcacacagccgccagctttcggctcccggcttttgttggccagtggactcacctggctttatcggttgccggggggttcgttgctctttatgtggattgtgaggagttccagcggatgccactcgctagatcttcgcgcgggctggagctggagccaggcgccggcctttttgtagcccaagccgggggggccgatcctgacaaattccagggcgtcattgcggagctgaaagtccggcgcgacccacaggtaagtcccatgcactgtctggacgaggagggcgacgactcagatggtgccagcggcgacagtggaagtggcctcggagatgcccgagaactgctgagagaggagactggtgcagcactgaagccaaggctgccagctccacctcccgtgactaccccaccactggcgggggggtcaagcaccgaggactcacggtccgaggaggtggaagagcagacaactgtggcttcgcttggggctcagacattacctggatctgatagtgtctccacatgggatgggtctgtgagaacgcccggcgggcgcgtgaaggaaggcggtttaaagggtcagaaaggagagccaggcgttcccgggcccccaggacgcgctggaccgcccgggagcccatgtctgcccgggccacctggcctgccctgtcctgtgagtccgctgggacccgcggggcccgccctccagaccgtccccgggcctcagggtccccctggtcccccaggacgggacggcaccccaggcagggacggagaaccgggcgatcccggggaagacgggaaacctggtgatactggaccccaggggttccccggaacacccggggatgtgggtcctaagggggataaaggggatcctggggtcggtgaacggggccccccagggccgcaaggtcccccaggcccacctggcccctcgtttcgccatgacaaattgaccttcatcgacatggaagggtcgggcttcggaggcgacctggaggccttgcgtggacccaggggctttccgggcccacccgggccacccggagtcccaggtctcccgggtgagcctggtcgctttggggtcaatagttccgacgttccaggacccgccggattgccaggggttccaggaagggagggcccgccagggttccccggcctccctggaccccctgggccaccagggagggagggacctccgggaagaacgggtcagaaaggatcattgggcgaggctggcgcccccggacacaagggcagcaagggagcgcccggccccgctggggctcggggagaaagcggtttagctggcgcccccggtcctgccggcccccccggcccccccgggcctcccggacctccagggccgggactgcccgctgggtttgacgacatggagggctccggcgggccattctggtccactgctaggtccgcagacggcccacagggaccacccgggttacccggactgaagggcgatcccggagtcccaggactccctggagccaaaggtgaagtgggagccgacggagtgccaggatttccaggcctcccaggaagagagggaattgcaggccctcaggggccaaaaggggataggggctcaagaggtgaaaaaggcgaccctggcaaagatggcgtgggacagcccggccttccgggcccaccgggtccaccaggaccggtggtatatgtgtctgaacaggacggatcagtgttgtccgtacccggcccagaaggtagaccaggctttgccggctttcctggaccggccggacccaaggggaacttgggatctaagggagagcgaggatcaccaggccccaaaggagaaaaaggggagcccggctccatcttttcacctgacggtggtgcccttggcccagctcagaagggagctaagggagaacccggctttcggggaccaccaggcccttacggccggccagggtataaaggtgagatcgggttccccggcaggcctggcaggccgggcatgaacgggttaaaaggcgagaagggggaacccggtgatgcctccctgggctttgggatgcggggaatgcctggaccccccggcccgccaggacccccaggaccccccgggacaccagtgtacgactctaatgtgtttgcagagtcgtcccgtcctggtcccccaggcctgccgggtaatcaggggccccctggacccaaaggggccaaaggcgaagttggtcctcccggcccaccggggcagttcccttttgacttcctgcagctggaggccgaaatgaagggagaaaaaggggacagaggcgacgctggacagaagggagagaggggcgagccagggggcggcgggttctttggctcgtccctcccaggccccccgggccctcccggcccccctggacccaggggttaccctggcattcctggccccaaaggtgagtctatccgcggtcaaccgggccctcccggaccccagggccctccagggatcggttatgagggaaggcaggggccacctggacccccaggacctccaggccccccttcatttcccggaccgcatcgacagacaatctccgtgccaggccctcctgggccacctggacccccgggcccacccggcactatgggggcctcctctggcgtgcgcttatgggccacaagacaggcgatgcttggccaagtgcatgaggtgcctgaaggctggcttatattcgtcgcagagcaggaggagctgtatgttagagtccagaatggattccgcaaagtccaactggaagcaagaacccctctgccacgaggcacagataacgaggttgcagctttgcagcctcctgtggtccagctccatgacagcaacccatacccgagaagagagcaccctcacccaaccgcccgtccttggcgcgcggacgatatcctggcaagcccaccccggcttccggaacctcagccttatccaggggcccctcatcacagcagctacgtacatctgagacccgccagacccacttcccctcccgctcacagccaccgggactttcagcctgtgctccacctcgtggcgctcaatagtccattaagtggcggaatgcggggcatcagaggtgcggattttcaatgcttccagcaggctcgggctgtaggattggccggcacttttagggcctttctctcttccaggctgcaggatttatatagcatcgtgcgcagagccgatcgcgcggctgtaccaatcgttaatctgaaagatgaactgctgtttcccagctgggaagccctgttctcaggttccgaggggcctctgaagcctggcgcgagaatattctcatttgatggtaaagacgtgctgcgacatcccacttggccacagaaaagcgtatggcatggtagtgatcccaacggccgcagactgacagaatcttattgtgagacgtggcgaaccgaagcaccaagcgctacgggccaagcgtcatctttacttgggggacgcctcctggggcagtcagcggcaagttgccaccacgcctacatcgttctctgcatcgagaatagtttcatgaccgcctccaaatag

SEQ ID NO: 233813 - DNA, 4020 bp, Artificial Sequence
  derived and/or modified sequence
atggcaccccggtgtccctggccatggcctcggcgtcgaagactgctagacgttctggctccactggttcttctgctgggcgtgagggccgcctctgctgagcccgaaagaatcagcgaggaggtcggactgctccaattgttgggggacccccccccgcagcaggtgacccaaaccgatgatccagatgtcggcctggcgtacgtgttcggacctgatgctaacagcggacaagtggcaagatatcattttcctagtctcttctttagagatttctcgcttttgttccatataagaccagccaccgagggtcctggggtcctcttcgcaattacagatagcgctcaggcgatggtgctcctgggagtgaagctgagcggtgtccaggatggtcaccaggatattagtttgctgtacactgagccaggtgcaggtcagacacataccgccgccagtttccgcttacccgcctttgtcggccagtggactcacctagctctgagtgttgctgggggatttgtggccctctacgtcgattgtgaggagttccaaaggatgccgctcgcaagaagtagcaggggcctggagctggaacctggagcgggtctgtttgtagcccaagcaggaggtgctgacccggataagttccagggcgttattgccgaactgaaggtgcgccgcgatcctcaggttagtcccatgcactgcctagacgaggagggcgatgactctgatggtgcaagcggcgattcaggctccggactcggggacgctagagagctgttgcgtgaagaaacaggcgctgccctcaagccccggctgccggctccgcctccagttactactcctcccctcgccgggggatcgagtacagaggattcccggagtgaggaagtggaagagcagaccaccgtagccagtctgggagcccagaccctaccaggcagcgatagcgttagcacatgggatggaagcgttaggactccaggcggtagggtgaaggaaggtggactgaaaggccagaagggggaacccggagtccccggaccaccaggtagagccggaccgcccggatctccttgccttcctggccctcctgggctcccttgtccagtgtctcctctgggccccgcagggccagcactgcagaccgttcctggtccccaagggccccccggtccccctggccgggatggaactcccggcagagatggagagcccgtctcaccccatgtcccaccatctccaggagataccggaccacaaggttttcctgggacgccaggggacgtcggccctaagggcgataagggggatcccggggttggggagagggggcctcccggaccacagggtcctcctggccctcccgggccatcttttcgacatgacaaacttacttttatcgacatggagggcagtggctttgggggcgacctggaggccctacgcggtccacgaggttttccaggccctcctggtcccccaggagtcccagggcttcccggagagcctggacgtttcggtgtgaactccagtgacgtgcctgggccagcaggcctccccggcgtaccaggacgcgagggcccccccggcttccctggcctcccaggcccccccgggcctcctgggcgggagggccctcctggcaggacaggacagaaaggcagtttgcagggagccggagccccaggagttcagggcagtaaaggagctcctgggcccgcaggagcccgcggcgaatccggcctggccggcgccccgggacctgccggaccaccggggcccccagggccccccggcccaccgggtcccggacttccagcaggatttgatgacatggagggctccggagggccattttggagcacagcacgaagtgcggacggaccccaggaaccaccagctctgcacgggattggcggcgatcctggcgtgccagggctcccaggtgctaagggagaggtgggggcagacggagttcccggtttcccaggactacccgggcgggagggcattgctggcccccagggcccgaaaggtgacaggggcagccgcggagagaagggagaccccggcaaggacggcgtgggacagccgggcctgcctggacctcccggccctccagggccagtggtatacgtgagcgagcaggacgggtcagtgttgtctgtgcccgggccagagggccgacccggttttgcgggcttccccggacctgctggccccaaaggtaacctgggctccaaaggcgaacggggaagcccaggcccaaaaggcgagaagggtgagcccggtagtatcttttcacctgacggaggcgcgctgggtcctgcccaaaaaggcgcaaaaggggagcctggattcaggggacctccaggcccgtatggccgccccggctacaaaggtgagatcgggtttccaggcagacccggacggccgggaatgaacggtttgaagggagagaagggagaacctggcgacgcctctctgggcttcggtatgcgcgggatgccggggcccccgggcccgcccggtcctccgggccccccagggactccagtgtatgattcaaatgtgttcgccgaaagcagccgcccaggccctcctggactaccaggcaaccagggcccacctggccccaagggagcaaagggtgaggtgggccctccaggcccccccgggcaattcccatttgacttcctgcagcttgaggccgaaatgaagggagaaaagggagatcgtggcgacgccggtcagaagggagaaaggggtgagccagggggtgggggattcttcgggtcatcccttcccggcccccccggccctcctggaccacccggcccccgggggtaccctggcatacccggcccgaaaggggagagcatcaggggtcagcccgggcctcctggcccccagggccctcctggtatcggctacgagggacggcagggacctccgggacctcctggacctcccggtccccccagcttccctggacctcatcgacagaccatcagcgttcccggcccccccggcccacccggcccgcccggtccaccgggcacaatgggtgcgtcatcaggtgtaaggctttgggccacccgacaagcaatgctaggtcaggttcacgaggtaccagaggggtggctgatttttgtggctgagcaggaggaactgtatgtacgtgtccagaacgggtttcgtaaggttcagcttgaagcccgaacacctctgccaaggggtacagataatgaagttgctgccctccagccacccgtggtgcagctgcatgacagcaatccatacccccgccgagagcacccccaccctactgcccggccatggcgcgcggacgacatcctggccagcccaccgcgactgccggaaccgcaaccctacccaggggcaccccaccattcatcctacgtgcacctaaggccagcgaggcccacctcacctcccgcccactcacaccgcgactttcagcccgtgttacatctggttgccttgaatagtccattatctgggggcatgaggggtatccgaggcgcagacttccagtgctttcagcaagccagggccgtgggcctggctgggacatttcgggcttttctgagcagccggctgcaggatctttactccatcgtccggagagcggatcgcgccgcggtcccaattgtgaatctaaaagacgagctcctgtttcccagctgggaggctctcttcagtggctcagaggggcctctcaagcccggagctagaatcttttctttcgatggcaaggacgtgttgaggcaccccacttggccccagaagagcgtgtggcatggcagcgatcctaatggtcgccggctgaccgagtcatactgcgaaacatggcggaccgaagctccatccgcgaccggacaggcttccagccttctgggtggccgcttgctcggacaatcagctgcatcttgtcaccacgcctacatagtgctgtgcatagagaattcttttatgacggcctccaaatag

SEQ ID NO: 233814 - DNA, 4020 bp, Artificial Sequence
  derived and/or modified sequence
atggccccccgctgcccctggccctggcccaggagaagaaggctgctggatgtgctggcccccctggtgctgctgctgggcgtgcgggccgccagcgctgagcctgagcgcatcagcgaggaggtgggcctgctgcagctgctgggggaccccccaccccagcaggtgacccagacagatgatcctgatgtgggcctggcctacgtgtttggaccagatgccaacagcggccaggtggcccgctaccacttccccagcctcttcttccgggacttcagcctgctcttccacatccggcctgccacagagggccctggggtgctgtttgccatcacagacagcgcccaggccatggtgctgctgggcgtgaagctgagcggcgtgcaggacggccaccaggacatcagcctgctgtacacagagcccggggccggccagacccacacagctgccagcttccggctgcctgcctttgtgggccagtggacccacctggccctgtctgtggccggcggctttgtggccctgtatgtggactgtgaggagttccagaggatgcccctggcccggagcagccggggcctggagctggagcctggagctggcctgtttgtggcccaggccggcggcgctgaccctgacaagttccagggcgtgattgctgagctgaaggtgcggcgggacccccaggtgagccccatgcactgcctggatgaggagggagatgacagtgatggagccagcggggacagcggcagcggcctgggagatgcccgggagctgctgcgggaggagaccggggccgccctgaagccccggctgcctgcccctcctcctgtgaccaccccacccctggccggcggcagcagcacagaggacagccgctctgaggaggtggaggagcagaccaccgtggccagcctgggcgcccagaccctgcccggcagtgacagcgtgtccacctgggatggctctgtgaggaccccaggcggccgggtgaaggagggcggcctgaagggccagaagggggagcccggggtgcccggccccccaggccgggccggccccccaggcagcccctgcctgcccggccccccaggcctgccctgccctgtgagccccctgggccctgctggccctgccctgcagacagtgcccggcccccagggccccccaggccccccaggaagagatggcaccccaggaagagatggagagcccggggaccccggggaggatggcaagccaggggacaccggcccccagggcttccctggcaccccaggagatgtgggccccaagggggacaagggggaccccggggtgggggagcggggccccccaggcccccagggccccccaggccccccaggccccagcttcagacatgacaagctgaccttcatcgacatggagggcagcggctttggaggagacctggaggccctgcggggcccccggggcttccctggccccccaggccccccaggagtgcccggcctgcccggggagcccggccgcttcggcgtgaacagcagtgatgtgcccggccctgctggcctgcccggggtgcccggccgggagggccccccaggcttccctggcctgcccggccccccaggccccccaggccgggagggccccccaggccgcacaggccagaagggcagcctgggggaggccggggcccctggccacaagggcagcaagggggcccctggccctgctggggcccggggggagagcggcctggccggggcccctggccctgctggccccccaggccccccaggccccccaggccccccaggccctggcctgcctgctggctttgatgacatggagggcagcggcggccccttctggagcacagcccggtctgcagatggcccccagggccccccaggcctgcccggcctgaagggggaccccggggtgcccggcctgcccggggccaagggggaggtgggcgcagatggagtgcccggcttccctggcctgcccggccgggagggcattgctggcccccagggccccaagggggaccggggcagcagaggagagaagggggaccccgggaaggatggagtgggccagcccggcctgcccggccccccaggccccccaggccctgtggtgtatgtgtctgagcaggacggctctgtgctgtctgtgcccggccctgagggccggcccggctttgctggcttccctggccctgctggccccaagggcaacctgggcagcaagggggagcggggcagccctggccccaagggggagaagggggagcccggcagcatcttctccccagatggaggagccctgggccctgcccagaagggggccaagggggagcccggcttccggggccccccaggcccctacggccggcccggctacaagggggagatcggcttccctggccggcccggccggcccggcatgaatggcctgaagggggagaagggggagcctggagatgccagcctgggcttcggcatgaggggcatgcctggccccccaggccccccaggccccccaggccccccaggcacccctgtgtatgacagcaatgtgtttgctgagagcagcaggcctggccccccaggcctgcccggcaaccagggccccccaggccccaagggggccaagggggaggtgggccccccaggccccccaggccagttcccctttgacttcctgcagctggaggccgagatgaagggggagaagggggacagaggagatgctggccagaagggggagcggggggagcccggcggcggcggcttcttcggcagcagcctgcccggccccccaggccccccaggccccccaggcccccggggctacccaggcatccctggccccaagggggagagcatccggggccagcccggccccccaggcccccagggccccccaggcatcggctatgagggccggcagggccccccaggccccccaggccccccaggccccccatccttccctggcccccaccggcagaccatctctgtgcccggccccccaggccccccaggccccccaggccccccaggcaccatgggcgccagcagcggcgtgcggctgtgggccacccggcaggccatgctgggccaggtgcatgaggtgcctgagggctggctgatctttgtggccgagcaggaggagctgtatgtgcgggtgcagaatggcttcaggaaggtgcagctggaggcccggacccccctgccccggggcacagacaatgaggtggccgccctgcagccccctgtggtgcagctgcatgacagcaacccctacccccggcgggagcacccccaccccacagcccggccctggagggcagatgacatcctggccagccccccccggctgcctgagccccagccctacccaggggccccccaccacagcagctatgtgcacctgcggcctgcccggcccaccagccccccagcccacagccaccgggacttccagcctgtgctgcacctggtggccctgaacagccccctgagcggcggcatgaggggcatcagaggagctgacttccagtgcttccagcaggcccgggctgtgggcctggccggcaccttccgggccttcctgagcagccggctgcaggacctgtacagcatcgtgcggcgggctgacagagctgctgtgcccatcgtgaacctgaaggatgagctgctcttccccagctgggaggccctcttcagcggcagcgagggccccctgaagccaggggcccgcatcttctcctttgatggcaaggatgtgctgcggcaccccacctggccccagaagtctgtgtggcacggcagtgaccccaacggccggcggctgacagagagctactgtgagacctggaggacagaggcccccagcgccaccggccaggccagcagcctgctgggcggccgcctgctgggccagagcgctgccagctgccaccacgcctacatcgtgctgtgcattgaaaattccttcatgacagccagcaagtag

SEQ ID NO: 233815 - DNA, 4020 bp, Artificial Sequence
  derived and/or modified sequence
atggccccccgctgcccctggccctggcccaggagaagaaggctgctggatgtgctggcccccctggtgctgctgctgggcgtgcgggccgccagcgctgagcctgagcgcatcagcgaggaggtgggcctgctgcagctgctgggggaccccccaccccagcaggtgacccagacagatgatcctgatgtgggcctggcctacgtgtttggaccagatgccaacagcggccaggtggcccgctaccacttccccagcctcttcttccgggacttcagcctgctcttccacatccggcctgccacagagggccctggggtgctgtttgccatcacagacagcgcccaggccatggtgctgctgggcgtgaagctgagcggcgtgcaggacggccaccaggacatcagcctgctgtacacagagcccggggccggccagacccacacagctgccagcttccggctgcctgcctttgtgggccagtggacccacctggccctgtctgtggccggcggctttgtggccctgtatgtggactgtgaggagttccagaggatgcccctggcccggagcagccggggcctggagctggagcctggagctggcctgtttgtggcccaggccggcggcgctgaccctgacaagttccagggcgtgattgctgagctgaaggtgcggcgggacccccaggtgagccccatgcactgcctggatgaggagggagatgacagtgatggagccagcggggacagcggcagcggcctgggagatgcccgggagctgctgcgggaggagaccggggccgccctgaagccccggctgcctgcccctcctcctgtgaccaccccacccctggccggcggcagcagcacagaggacagccgctctgaggaggtggaggagcagaccaccgtggccagcctgggcgcccagaccctgcccggcagtgacagcgtgtccacctgggatggctctgtgaggaccccaggcggccgggtgaaggagggcggcctgaagggccagaagggggagcccggggtgcccggccccccaggccgggccggccccccaggcagcccctgcctgcccggccccccaggcctgccctgccctgtgagccccctgggccctgctggccctgccctgcagacagtgcccggcccccagggccccccaggccccccaggaagagatggcaccccaggaagagatggagagcctgtgagcccccacgtgccccccagccctggggacaccggcccccagggcttccctggcaccccaggagatgtgggccccaagggggacaagggggaccccggggtgggggagcggggccccccaggcccccagggccccccaggccccccaggccccagcttcagacatgacaagctgaccttcatcgacatggagggcagcggctttggaggagacctggaggccctgcggggcccccggggcttccctggccccccaggccccccaggagtgcccggcctgcccggggagcccggccgcttcggcgtgaacagcagtgatgtgcccggccctgctggcctgcccggggtgcccggccgggagggccccccaggcttccctggcctgcccggccccccaggccccccaggccgggagggccccccaggccgcacaggccagaagggcagcctgcagggcgctggggcccctggggtgcagggcagcaagggggcccctggccctgctggggcccggggggagagcggcctggccggggcccctggccctgctggccccccaggccccccaggccccccaggccccccaggccctggcctgcctgctggctttgatgacatggagggcagcggcggccccttctggagcacagcccggtctgcagatggcccccaggagcccccagccctgcacggcatcggcggggaccccggggtgcccggcctgcccggggccaagggggaggtgggcgcagatggagtgcccggcttccctggcctgcccggccgggagggcattgctggcccccagggccccaagggggaccggggcagcagaggagagaagggggaccccgggaaggatggagtgggccagcccggcctgcccggccccccaggccccccaggccctgtggtgtatgtgtctgagcaggacggctctgtgctgtctgtgcccggccctgagggccggcccggctttgctggcttccctggccctgctggccccaagggcaacctgggcagcaagggggagcggggcagccctggccccaagggggagaagggggagcccggcagcatcttctccccagatggaggagccctgggccctgcccagaagggggccaagggggagcccggcttccggggccccccaggcccctacggccggcccggctacaagggggagatcggcttccctggccggcccggccggcccggcatgaatggcctgaagggggagaagggggagcctggagatgccagcctgggcttcggcatgaggggcatgcctggccccccaggccccccaggccccccaggccccccaggcacccctgtgtatgacagcaatgtgtttgctgagagcagcaggcctggccccccaggcctgcccggcaaccagggccccccaggccccaagggggccaagggggaggtgggccccccaggccccccaggccagttcccctttgacttcctgcagctggaggccgagatgaagggggagaagggggacagaggagatgctggccagaagggggagcggggggagcccggcggcggcggcttcttcggcagcagcctgcccggccccccaggccccccaggccccccaggcccccggggctacccaggcatccctggccccaagggggagagcatccggggccagcccggccccccaggcccccagggccccccaggcatcggctatgagggccggcagggccccccaggccccccaggccccccaggccccccatccttccctggcccccaccggcagaccatctctgtgcccggccccccaggccccccaggccccccaggccccccaggcaccatgggcgccagcagcggcgtgcggctgtgggccacccggcaggccatgctgggccaggtgcatgaggtgcctgagggctggctgatctttgtggccgagcaggaggagctgtatgtgcgggtgcagaatggcttcaggaaggtgcagctggaggcccggacccccctgccccggggcacagacaatgaggtggccgccctgcagccccctgtggtgcagctgcatgacagcaacccctacccccggcgggagcacccccaccccacagcccggccctggagggcagatgacatcctggccagccccccccggctgcctgagccccagccctacccaggggccccccaccacagcagctatgtgcacctgcggcctgcccggcccaccagccccccagcccacagccaccgggacttccagcctgtgctgcacctggtggccctgaacagccccctgagcggcggcatgaggggcatcagaggagctgacttccagtgcttccagcaggcccgggctgtgggcctggccggcaccttccgggccttcctgagcagccggctgcaggacctgtacagcatcgtgcggcgggctgacagagctgctgtgcccatcgtgaacctgaaggatgagctgctcttccccagctgggaggccctcttcagcggcagcgagggccccctgaagccaggggcccgcatcttctcctttgatggcaaggatgtgctgcggcaccccacctggccccagaagtctgtgtggcacggcagtgaccccaacggccggcggctgacagagagctactgtgagacctggaggacagaggcccccagcgccaccggccaggccagcagcctgctgggcggccgcctgctgggccagagcgctgccagctgccaccacgcctacatcgtgctgtgcattgaaaattccttcatgacagccagcaagtag

SEQ ID NO: 233816 - DNA, 4020 bp, Artificial Sequence
  derived and/or modified sequence
atggccccccggtgcccctggccctggccccggcggcggcggctgttggacgtactggctccactcgtgctcctgctgggggtccgggcagcctctgccgagcctgaacgcatatccgaggaagtaggtctactccagctgctcggagacccacccccccagcaggtgacccagactgacgatccagatgtgggtctggcatatgtattcggaccagacgccaactctggccaggtggccaggtatcactttccctctttattctttagagacttctctttgctgttccacattagacctgcaactgagggtccaggcgtcctctttgctataaccgacagcgcccaagccatggtgctgttgggggtgaagctttccggtgtacaggacggtcaccaggacatatctttgctttataccgagcccggtgcgggccaaactcataccgcagcgtcctttagacttcccgcattcgtaggtcagtggacccatctggcacttagcgtcgccggaggattcgtagctctatacgtggattgcgaggaatttcagcgaatgcctctggcgcgtagttccagagggctggaactggaacccggagctggtctgtttgtcgcccaggccggtggtgcggatccggataaattccagggagtgattgccgagttgaaggtgagacgagaccctcaggtgtccccaatgcactgcctcgatgaagagggcgacgactccgatggcgcctcgggcgatagcggctctggattaggcgatgctagagagctgttgagagaggaaactggggccgcgctgaaaccaagactgcccgcaccaccacccgttaccacacccccactggccggcgggtcctctactgaggattcaagatcagaggaggttgaagagcaaactaccgtggcttctttgggcgcgcagacactcccaggtagcgactcggtgtccacctgggatggtagcgtccgcacccccggcggacgcgtaaaagagggaggcctgaagggccaaaagggtgagcctggagtaccggggccccctggccgagccggcccacctggtagcccgtgtctgcctggacctcccgggctgccctgtcccgtttccccgctcggaccagcagggcccgctctacagaccgtcccaggcccccagggcccgcctgggcccccaggccgggatggcacacccggacgggacggcgagccaggcgacccgggcgaagacggcaagcctggcgataccggcccacagggctttccaggaaccccaggggatgtcggccctaagggggataagggcgaccccggcgtaggagagcggggccccccaggcccacaaggtcctccaggtccacccgggccctcattccgccacgataagttgacttttatcgacatggaggggagtggcttcggcggcgacttggaggctctccgtgggcctcgcgggttccctggcccaccagggcccccaggggttccaggcctgcctggggagccgggacgttttggtgtcaactcatccgatgtgccagggccggcaggactccctggagtgcccggcagggaaggaccaccaggatttcccggcctgccaggtccacctgggccgcccggaagagaaggtcctcctgggcgcaccggacagaagggctccctgggcgaggctggtgcgccaggtcacaaggggagcaagggtgctcctggtcctgctggcgccagaggcgaatctggcttggcgggcgcccctggtccggcggggccaccaggtccccctggaccccctggaccgccagggccggggctgccggctggctttgatgacatggaagggtctgggggaccattctggagtacggcgaggagcgctgatggcccccaaggtccccctggcttgccgggtctgaaaggggatcctggagtaccaggtctaccaggcgcaaagggcgaggtgggggctgacggggttcctgggtttcccggacttccaggcagggagggcatcgccggaccccaaggcccaaaaggggaccgaggtagcagaggagagaagggagaccccggtaaggacggggtcgggcaacccgggcttccaggtccaccgggcccacctggccctgtcgtgtacgtcagtgaacaagatggatctgtcctgtctgtgcccggccccgaagggcgccccggctttgccggattcccaggacccgccggtcctaaaggcaatctgggcagcaagggagagagaggctcaccaggacctaaaggagagaaaggagagcccggatcaatcttctcccctgacggcggagccctcgggccagcacagaagggggcaaagggggaaccgggattccgtggccctcctggcccctatggcaggcccgggtataaaggggagataggctttcctggcagacccggacgccctggcatgaatggcctcaaaggcgagaaaggagagcctggcgatgcttctcttggcttcggcatgagaggaatgcccggtccaccaggccctccagggcctccaggcccaccgggtacccctgtgtacgatagcaacgtcttcgctgagtcctcccggccagggccccccggcctgcccggcaatcagggaccacccgggcccaagggggctaagggtgaagttggtccccctggaccccccggacagtttcccttcgatttcctccagctagaggccgaaatgaagggggaaaaaggcgatcgcggcgatgctgggcagaaaggggagaggggcgagcctggcggcggcggcttcttcggcagcagtctgcctgggccacccggtcccccaggaccccccggacccagagggtaccccggaatccccggccccaagggtgaaagtattcgaggccagcctggacctcctggaccccagggtcccccggggatcggttatgaaggacggcagggcccccccggcccaccaggcccgcccggacctccttcctttcctggacctcaccggcagaccatttctgtgcctggcccccctggccctcccggaccacccggcccccctggaaccatgggagccagctccggagtccggctttgggccacccggcaggctatgctgggtcaggttcacgaggtgccagagggctggctaattttcgtggcagagcaagaagaactatatgttcgagtgcagaatggatttcggaaagtccagcttgaggcacgcactcctctgcctcgaggaacagataacgaggtggcagccctgcagccacctgtagtccagcttcatgactccaatccttatcctcgcagagaacacccacaccctaccgcgcgaccatggcgagctgatgacattctagcttcccccccacggttaccagaacctcagccctaccctggggctccacaccattcctcttacgtacacctcagaccggcccggcctacatctcccccagcacattctcatagggacttccaacctgtgctgcaccttgtggcactgaatagtccactgagtgggggtatgagaggtatacgcggtgcagacttccagtgttttcagcaggcccgggccgtgggcttagccggtacctttcgcgcctttctgagtagtcgattacaggatctgtattcgatagtacgcagggcggatagggcagcagtacctatcgtgaatcttaaggatgaactcctgttcccttcttgggaggctctgttctctgggtcagagggccctctgaaacccggagcaaggatttttagtttcgatggcaaggacgttctgcgtcaccccacttggcctcagaagagtgtgtggcatgggagtgaccctaacgggaggagactcacagagtcttactgtgaaacctggcgaacagaggcaccatccgcaactggccaggcgtcctctttactcggaggccgactgcttgggcaaagtgctgcctcatgccaccatgcgtatattgtgctctgcattgagaactcctttatgaccgctagcaaatag

SEQ ID NO: 233817 - DNA, 4020 bp, Artificial Sequence
  derived and/or modified sequence
atggccccccggtgcccctggccctggccccggcggcggcggctgctcgacgtgcttgctcccctggtgctgctgttgggagtcagagctgcttctgccgagcccgaaagaatttctgaagaagtgggcctgcttcagctgttaggggacccgccaccacagcaggtcacacaaactgatgaccccgatgtaggtctggcatacgtcttcggtcccgacgccaactctgggcaggtggcccgatatcacttcccatctctcttttttcgggatttctccttgcttttccacatccgtccagccacagaagggcctggtgtcctgtttgctatcaccgactctgcacaggcaatggtgctgctcggcgtcaaattgagcggagtccaggatggacaccaggacatctccctactctacaccgagcctggagcagggcagacacacactgctgcgagctttaggctacccgccttcgtggggcagtggacacatctggctctcagcgttgccggaggcttcgtggcgctgtacgtggattgcgaggagttccagcgcatgcccctggcacgatcgagtagaggactggaactagaacctggagctggcttgttcgtggcccaggccggcggggccgatcctgataagttccagggggtcattgccgagttgaaggtgagacgagaccctcaggtgagcccaatgcactgtctggacgaagagggcgatgactctgatggagccagcggagattcaggatcagggctgggcgacgcacgggagctcttgagggaggagacaggcgccgcccttaagcctcggctgccagcgcccccgcctgtgacgacccccccgctggctgggggctcatcaacagaggactccaggtccgaagaagtggaggaacagacaacagtagcgtctctcggagcccaaacactccccgggagcgatagtgtatcgacctgggatggaagtgtgaggacaccagggggcagagtgaaggaagggggactcaagggacagaagggtgagcctggagtgccggggcctccaggtcgcgctggcccccccgggtcaccctgcctccctggcccccctggcttaccatgtccggtgtccccgctgggaccagctggacccgccctccaaaccgtcccgggcccccagggcccccctggtccgccaggccgcgacgggacccctggtagagatggggaacctgtgagtccccacgtaccaccttctccaggcgacacgggccctcaaggatttcccgggacccccggcgatgtgggccctaagggcgataagggcgaccctggtgtgggagaaaggggccccccagggccccagggacctccaggacctcccggaccgagttttcggcacgacaagctgacattcattgacatggagggtagtggttttggtggagacctggaagccctgagaggaccgcgcggattcccgggacccccaggtcctccgggggtgcccggccttcctggcgaaccgggtaggttcggcgtcaattcttctgatgtccccggacctgcaggactgcccggggtccccggtcgagaaggtccacccgggttccccggcctaccagggccccccggaccacccgggcgcgaaggacctcccggaagaacaggccaaaaggggtcgctgcagggcgcaggcgctccaggagtccaggggagcaaaggcgcccctggaccggcgggagctcgcggagagagcggactggcgggggctccggggcctgccggcccgcccggaccgccaggcccaccgggcccccctggaccgggtcttcccgcaggcttcgacgatatggagggcagtggcgggcctttctggtcgacagcccggtcagctgacgggccccaagagccacccgcactgcacggaattggcggcgatcctggtgtaccaggactcccaggagctaagggcgaggtgggagctgacggcgtgcctggattccccggacttccaggtcgcgaagggatcgccggcccgcaaggccccaagggggaccggggcagcagaggggagaagggggacccagggaaggacggtgtcggccagccgggtctgcccggcccgccaggaccccctggccctgtagtgtacgtaagtgaacaggacggctctgtgctgtctgtgccagggcccgaggggcggccaggctttgccggattcccgggacccgcaggccctaaaggcaacctcggatccaagggggagagaggaagtcctggtccaaagggtgagaagggtgaacccggttcaatctttagtccagacgggggggcgctcggccctgcccaaaagggcgctaagggcgagcccgggtttcgaggcccccccggcccctacgggaggcctgggtacaagggggagatcggattcccaggtcggccgggccgccccggcatgaacggcttgaagggtgagaagggtgagcctggtgatgcctcactcggatttggaatgaggggaatgcccggacctccaggccctcctggtccaccaggcccacccggcacgccagtatatgatagcaacgtattcgcggaatctagccggcctggccctcccggccttcccggaaatcagggaccacctggtccaaaaggagctaagggcgaggtcggtcccccgggtcccccgggacagttcccatttgacttcctgcagctagaggcagaaatgaaaggggagaagggcgaccggggagatgccgggcagaagggcgagaggggggaacctggcggtgggggattcttcggatcctcactccctggaccccctggtcctcctggcccccccggacctcgcggatacccgggcatccccggtcccaagggcgagtctattagggggcagcctggaccccccggtcctcaggggccacccggaatcgggtacgagggcaggcaggggcctcctggtcctcctggaccgccgggcccgccatcctttcccgggccacatcgacagaccatttctgtgcccggacctcctggaccccccggacccccagggcctccgggcacaatgggggcctcatctggggtccggctgtgggctactaggcaggctatgctcggccaagtgcatgaagtgcctgaaggctggctaatcttcgtggctgagcaagaggaactgtatgtccgcgttcagaacggatttagaaaagtccagctagaggccaggacccctctgccacggggaaccgataatgaagtggcagccctccagcccccagtggtgcagctgcacgacagcaatccataccccaggcgggagcatccacacccaactgcaagaccttggcgagctgacgatattctcgcaagtcctccacggctcccagagccacaaccatatcccggcgcaccccatcattcctcatacgtccacctccgccctgcccgacccacatcccccccagcccacagtcacagggatttccagcctgtgttacacctggtcgcactcaacagccccctgagtggcggcatgagggggatcaggggtgccgatttccagtgtttccaacaagcccgagcggtgggccttgcaggaacctttcgggcatttttgagttcacgcctgcaggacctctactctattgttcgccgcgccgaccgggcagcagtgcccatcgtgaacctgaaggatgagctcctgtttccctcatgggaggccctcttcagcgggtccgagggtcctctcaaaccaggggcaaggatatttagtttcgacggcaaagatgtgcttagacaccctacatggccgcagaaaagcgtctggcatggatctgaccctaacggacggcggctcacagagagttactgtgagacctggcgtactgaggcaccaagtgcaacgggtcaggcaagttcactgcttggaggcaggctcctgggacagagcgccgcaagctgccatcacgcatatatcgtactctgtatcgagaatagttttatgaccgccagcaaatag

SEQ ID NO: 233818 - DNA, 4020 bp, Artificial Sequence
  derived and/or modified sequence
atggcacctcgttgtccctggccttggcctagacgtcggagattattggatgtgctggccccactcgttctcctgctcggcgtccgggctgcctccgccgaacccgagcggatttccgaggaagtgggactcttacagcttctcggagatccacccccacagcaggtgacccagacagacgaccctgacgtaggacttgcctatgtcttcggcccagatgcaaactcaggtcaagtggccaggtatcacttcccaagcttgttttttagggacttcagccttctcttccacatcagacccgctaccgagggccctggcgtcctcttcgctataacagattctgcgcaagcaatggtcttactcggggtgaaattaagtggagtgcaggatggacatcaagatatatcgctgctgtatacagaacctggagcaggccaaacacatacggctgccagtttcagacttcctgccttcgtgggacagtggacacatctggccctgtccgtggcgggtggtttcgtggcgctgtacgtggattgcgaggagttccaaagaatgccactcgcgcgtagctctagaggcctggaattggagccaggagctggtctcttcgtagcacaggcaggaggcgcagaccccgacaaatttcagggggtcatagctgaactcaaagtccggagggacccacaggtatcccctatgcactgcttagacgaagagggggacgactcggacggcgcttccggagactccggctctggtctcggagacgcccgagaacttttaagggaagaaaccggagccgcactgaagccacgactgccagcaccaccgccagtgactactccacccctggcgggaggctcgagcacagaagactccaggagcgaggaagtggaggagcaaaccaccgtggctagtctgggagcacagaccctgcccggttcagacagcgttagtacgtgggacggctccgtaagaacacctggcggtcgagtcaaagagggtgggctgaaaggtcaaaagggcgaacccggagtgcccggaccccctggccgagctggccctcctgggtcgccgtgcctcccaggaccaccgggacttccctgccctgtctctccattggggcctgcgggtcctgcgttgcaaaccgtgccaggcccacaaggaccaccgggtccccctggacgggacggcacacctgggagagatggcgaaccaggtgatcccggagaggacgggaagccaggggataccggccctcaggggttccccggtacccctggggacgtaggtcctaagggtgacaagggcgatccgggagtcggggagcgagggcctcccggtccccagggacctcctggcccacctggtccatcattcaggcacgataaactcacttttatcgatatggaaggatccggatttggaggcgacctggaggctctccggggaccgagaggcttccctggcccacctggaccccctggcgtgccagggcttcccggagagcccggaagatttggggtcaatagtagtgacgtgccgggtcccgcagggcttcccggagttccaggtagggaggggccacccggtttcccgggacttcccggaccacctggcccaccagggcgtgagggccctcctggcagaacgggtcagaagggcagcctgggagaagccggtgctcctggacacaaggggtccaaaggtgctcccggacctgctggcgcacggggtgagtccggccttgcaggggctccaggtcctgcgggtcccccaggcccacccggacctccgggtcctccgggtccagggcttcccgctggattcgacgacatggaggggtccgggggacctttttggagcactgcccgttccgcggatggccctcaagggcctcccggtttaccagggctgaagggggaccccggagttccaggcctacccggagccaagggtgaagtcggggcagatggcgttccgggtttccccggtctcccgggacgggagggaattgccggaccgcaagggcctaagggcgatagggggagccggggagaaaagggggatcctggcaaagatggcgtcgggcagcccggactgcccggtccccctgggcctccaggtcccgttgtatatgtttcagagcaggacgggagcgtgctgagtgttccgggacctgaagggaggccaggctttgctggatttcccggaccggcaggccctaaaggcaatcttggcagcaaaggggagagaggttcgccgggacccaaaggggagaaaggagaaccaggatctattttttcccccgatggcggagccctgggcccagctcagaaaggcgcaaaaggggaacctggcttcaggggcccacctggtccctacggccgaccagggtacaagggggagatcggattcccaggccgtcctggcagaccaggtatgaacggtctaaaaggggaaaagggggagccaggtgacgccagcctggggtttggaatgaggggcatgcccggtccccctggccctcctggcccacctggtcctcccggaacacctgtatacgatagcaacgtattcgcagagagcagcagacctggcccacctggattgcctggcaaccagggacctccagggcctaagggcgcaaagggagaggtggggcctcccggacctcctggccagttccctttcgacttccttcaactcgaggccgagatgaaaggcgagaaaggcgatcgcggtgacgccggacaaaaaggggagagaggtgaacctggaggtggaggatttttcggctcatctctgccaggccctcctggtccaccaggaccacctggcccaagggggtatccagggattcctggacccaaaggcgagtccattagaggacagcctggcccaccaggcccacagggcccacctggcatcgggtatgagggcaggcaggggccacctgggccacccggtccccctggaccaccttccttccctggcccacacaggcaaacgatatccgtgccaggccctccgggtcctcccggtcccccaggtccccctgggaccatgggcgcaagcagcggcgtgcgactgtgggccacgagacaagccatgctcggacaagttcacgaagtcccggagggctggctgatctttgtggcggaacaagaggaactgtatgtccgcgtgcagaatggatttcgtaaggttcagttagaggctagaaccccactcccgcgaggaacagataatgaagtggccgctcttcagcctcctgtggtccaactccatgactcgaacccctatcccagaagagagcatcctcatcctaccgccaggccgtggagagccgacgacatactcgcctcccctccgaggctgccggaacctcaaccctaccctggcgctccccaccactcctcctacgtacacctcaggccggcacgtcctacatcccctccggcacactcccaccgcgacttccaaccagttctgcatctcgtggccctgaacagccccctcagtgggggaatgcgcggtattcggggtgcagattttcagtgcttccaacaagccagggcggttggactggcgggaacatttcgtgcttttttatccagcaggctccaggatctgtactctatagttcgcagagctgaccgggcagcagtgcccatcgtgaatctgaaggatgagctcctcttcccctcctgggaggctctgttcagcgggtcagaggggcctttaaagcctggggcacggattttcagctttgacggtaaggacgtgctgagacaccctacgtggccgcagaagtccgtgtggcatgggagcgatcccaatggccgaagactgacagagagctactgcgagacctggcggacagaagccccatcagcaactggccaagccagctcactcttgggcggtaggctgcttggacagagcgccgctagttgtcatcacgcgtacatagtgctgtgcatagagaatagcttcatgacagctagcaagtag

SEQ ID NO: 233819 - DNA, 4020 bp, Artificial Sequence
  derived and/or modified sequence
atggcacctaggtgcccttggccttggcccaggagacgcagactgctcgatgtcctcgcacccctggtcttgctccttggggtacgggcagcttctgctgaaccagagagaattagtgaggaagtgggactgctccagcttcttggagacccgccaccacagcaggtaacccagaccgatgatcctgacgtgggtctggcttacgtcttcggcccagacgctaattcagggcaggtggcaaggtatcatttcccctccctgttttttcgggatttttcccttctgtttcatatcaggccagccaccgaaggccctggcgttctgttcgcaatcaccgatagcgcacaagctatggtgctgcttggcgtgaaactcagtggagtccaagacggccaccaggacattagtcttttatacacagaacccggagccggacagacacacaccgctgcctcttttaggctcccggctttcgttggccaatggacccacctggcactgtctgtggccggaggcttcgtggcactttacgtcgattgtgaggaattccagcggatgcccctggccaggtctagtaggggccttgaactggagcccggtgcgggactctttgtcgcacaggctgggggagcagatccggacaaattccagggcgtgattgctgagttgaaggtgcgtcgtgatcctcaggtgtcaccaatgcattgcttggacgaagagggcgacgactcagacggggctagcggagactccggctctggtctgggcgatgccagggagctgctccgggaggaaactggcgctgctctgaaaccgaggcttcccgctcctccccctgttacgacaccccctctagctggaggttctagcaccgaggactcccgcagcgaagaggtagaagaacagacaaccgtggccagtttgggagcccaaacacttcccggatctgactccgtctcaacctgggacggatccgtaagaactccgggtggcagagtaaaggaaggcggattgaaaggccagaagggtgaacctggagtgcctggaccgccagggcgtgctggccctcctggttccccctgtctaccaggtccacccggtctgccgtgtcctgttagccctttgggaccagccggaccagccctgcagaccgtccctggaccccagggtccgccagggcctcccggacgggacggcactcccggtagggacggggagccggtgagtccccatgtgccgccatcaccaggtgacactggaccacaggggttcccgggaacaccgggagacgtgggcccaaaaggtgataagggagatccaggagtcggagaacgcggacctcccggtccacagggtccgccaggtcctcctggaccttcattcaggcacgacaagctaacttttatcgacatggaggggagtgggtttggaggcgatctggaagcccttcgtggcccacgcggttttccaggacctccgggacccccaggcgtacctgggctgcctggcgagccaggacgcttcggcgtgaacagctcagatgtccccggtccagccggtctgccaggggtcccaggcagggagggtccccctggatttcctggtctgccaggacccccagggcctcccggacgggaaggccctcccggtaggacaggtcaaaaaggctctctacagggagcgggtgctcctggcgtgcaggggtcaaaaggggctccgggacccgctggcgcaagaggggaaagtggactagccggagctcctggtcctgctgggccacctggtccacccggacccccaggacctcccggaccaggactccccgcaggcttcgatgacatggagggcagcgggggtcctttttggagtactgccagatctgccgatggaccccaggaaccacccgcactccacgggattggaggcgaccctggtgttcccggtttaccgggagctaagggagaggtgggcgctgacggcgtccctggtttcccagggctacctggtcgcgaaggtatagccggacctcaggggccaaaaggtgaccggggaagtagaggcgagaagggagatcccggtaaggacggcgtgggccagccaggattgcctggacctcccggtcctcccggaccagtggtctacgtgagcgagcaggatggctcagtcctcagcgtcccgggtccagaggggagaccgggatttgccggttttcccggacctgctgggccaaagggtaacctgggctcaaaaggagagcgcggttccccaggacccaaaggtgaaaaaggggagcctggaagtatcttctcgccagatggcggagccctgggaccagcacagaaaggcgctaagggcgaacctgggttcagagggcctcccggaccctacggtcgacctggttataagggcgagatcggctttcctggacggccaggaagacctgggatgaacgggttgaagggagaaaaaggcgaacctggggacgctagtctaggctttggaatgcgagggatgcccggaccaccaggccctcctggccctccaggacccccaggtacaccggtctacgactcaaacgtgtttgctgaaagctcccgacccggacctcctggtctgcccggaaatcaaggccctcctgggccaaagggtgcaaagggcgaagtgggcccacctggccctccagggcagttcccttttgatttcttacaacttgaagctgagatgaaaggcgaaaaaggtgacagaggcgatgctgggcagaagggcgaacggggagagcccggaggcggaggcttctttgggagctctctcccgggacccccaggaccccctggaccaccgggacctcgcggttatcctgggatccccggaccgaagggcgagagtataagaggccagcctggcccacccggacctcaggggcctccagggatcggatacgaaggacggcagggccctccgggtcctcctgggcctcctggaccaccttcttttcctgggcctcatcgccagacaatcagtgtgccaggtccccctggaccccctggacctccagggccaccgggaactatgggcgcaagtagcggcgtacgcctctgggcaacccggcaggcaatgcttggtcaagtgcatgaggtccctgagggctggctgatctttgtggccgagcaggaagaactgtatgtcagagtccagaacgggtttaggaaagtgcaattagaggccagaaccccactacctagaggtacagataacgaggtcgcggctctacagcccccagtcgtccagctccatgattcgaacccctatccgaggcgagagcatccccaccccacagccaggccttggcgggcagacgatatcctcgcctccccacccaggttacccgaacctcagccttatcctggcgcaccccatcacagttcctatgtgcacttacgcccagcacggcctacatctccccctgcgcacagccatcgcgactttcagcccgtgctccacctggtggcactgaacagtcctctcagcggcggaatgagggggattcggggagccgatttccaatgctttcagcaggccagggctgtgggtctagccggaacattccgcgcattcctctcatcaaggctgcaagacctgtacagcattgtaagacgagcggaccgggctgccgtgccaatcgtgaatctcaaagatgagctgttgtttccatcgtgggaggcactgttctctggtagtgagggcccactgaaacccggagcacgaattttctcctttgacggaaaagatgtgcttagacatcctacatggcctcaaaagagtgtttggcacggatccgatccaaacggacggcgacttacggagtcttactgtgagacgtggcgcacagaggcaccatctgccactggccaggcaagctcactgctagggggtcggctcctcggccaatctgcggcttcctgccatcacgcctatatagtgctttgcatcgagaacagcttcatgaccgccagcaagtag

SEQ ID NO: 233820 - protein, 621 aa, Artificial Sequence
  derived and/or modified sequence
MLMAGQRGAWTMGDVVEKSLEGPLAPSTDEPSQKTGDLVEILNGEKVKFDDAGLSLILQNGLETLRMENALTDVILCVDIQEFSCHRVVLAAASNYFRAMFCNDLKEKYEKRIIIKGVDAETMHTLLDYTYTSKALITKQNVQRVLEAANLFQFLRMVDACASFLTEALNPENCVGILRLADTHSLDSLKKQVQSYIIQNFVQILNSEEFLDLPVDTLHHILKSDDLYVTEEAQVFETVMSWVRHKPSERLCLLPYVLENVRLPLLDPWYFVETVEADPLIRQCPEVFPLLQEARMYHLSGNEIISERTKPRMHEFQSEVFMIIGGCTKDERFVAEVTCLDPLRRSRLEVAKLPLTEHELESENKKWVEFACVTLKNEVYISGGKETQHDVWKYNSSINKWIQIEYLNIGRWRHKMVVLGGKVYVIGGFDGLQRINNVETYDPFHNCWSEAAPLLVHVSSFAATSHKKKLYVIGGGPNGKLATDKTQCYDPSTNKWSLKAAMPVEAKCINAVSFRDRIYVVGGAMRALYAYSPLEDSWCLVTQLSHERASCGIAPCNNRLYITGGRDEKNEVIATVLCWDPEAQKLTEECVLPRGVSHHGSVTIRKSYTHIRRIVPGAVSV

SEQ ID NO: 233821 - DNA, 6320 bp, Artificial Sequence
  derived and/or modified sequence
aatccgctcagctcctgcaatggggcctgcctgacacttgggcgctccttcagtctcgatgttgatggcaggacaaaggggcgcctggaccatgggtgatgtggtcgagaagagtttggaagggcccctggcaccttctacagatgagccctcccagaaaacaggagacttggtcgagatcttaaatggggaaaaggtcaaatttgacgacgcgggactctccttaattcttcagaatggcctggaaaccctgcgaatggaaaacgctctgacagatgtcatcttgtgtgtggacattcaggaattctcctgccaccgcgtggtgcttgccgcagccagcaactatttcagggccatgttctgcaacgatttaaaggaaaagtatgagaaaaggatcattattaaaggggttgatgctgagaccatgcacactctgttggactacacgtacaccagcaaggcgctgatcaccaagcagaatgtccagcgggtcctggaggctgctaacctcttccagttcctgcggatggtggatgcctgtgccagcttcctcactgaagccttgaacccagaaaactgcgttggaatactgaggctggctgacacacactcgctggacagtctaaagaagcaggttcagagttacatcattcaaaactttgtgcagattctgaactctgaggagtttcttgacctgcccgtggacactctgcaccacatcttgaagagtgatgacctttacgtgaccgaggaggctcaggtgtttgagaccgtgatgagctgggtccggcacaagccatcagaacgactctgcttactcccctatgtcctcgagaacgtgcgcttaccgcttctggacccgtggtactttgtggagacggtggaagcagatcctctcatcaggcagtgcccagaggtcttcccgctgctccaggaagccaggatgtaccacctttctggcaatgagatcatttcggaacgcaccaagcccaggatgcatgagttccagtctgaggtgttcatgatcattggcggctgcacgaaggatgaacggtttgtggcagaggtgacctgcctggaccccctgaggcgcagccgcctggaggtggccaagctcccgctaacagagcatgagctggagagtgagaataagaagtgggtggagtttgcatgcgtgacattgaaaaatgaggtctacatctcaggtggcaaagaaacacagcatgatgtttggaaatataattcttcgatcaacaagtggattcagattgagtatttaaacataggccgctggaggcataagatggtggtgttgggtggcaaggtctatgtgatcggaggctttgacggcttacagagaatcaacaatgtggagacctacgacccctttcacaactgctggtcagaggccgcacccctccttgtccatgtcagttcctttgcagccaccagccataagaagaagctgtatgtgatcgggggagggcccaatgggaaactggccacagacaagactcagtgttatgacccttccaccaacaagtggagtttgaaggcggccatgcccgtggaggctaaatgcatcaatgcagtgagtttccgggaccgcatctatgtcgttggtggggccatgagagcgctgtacgcctacagcccgctggaagacagctggtgcctggtgacccagctcagccacgagcgggccagctgcggtatcgcgccctgcaacaaccggctctacatcaccggcgggcgggacgagaagaacgaggttatcgccacggtgctgtgctgggaccccgaggcccagaaactgacagaggagtgcgtcctgccccggggcgtgtcgcaccacggcagcgtcaccatcaggaagtcgtacacccacatccgcaggatcgtgcccggagcagtgtctgtctgacggcaggatggggagctggagagcccccccgaccctcagcgtacccgcctcacctctcaccctcctccagtcccacttcaggcagcaggctcgagtttgaggccatacatcaggggatccccttgactcactttgggggaaccttggaagtcacagtttggggtcacttgagaccggccaggaatgtttgcatgacctacctcaggaggggaggcgaggaagagtaatatttagcattcaggacccacccaccctatgccggcttctgtgccaggcacttccttttatcggttcatttaacctggtgactggctcttatcacttctagtttacaggtgagggaaccaagtttcacagaggctaagtggcgtgcccctgatcactcagatagcaagtagctaccccaggagtctaaaatccaggtctttcatctccgaagtcaatgctctttccaccatgctgcctatctcagagcaggaaaaacaaacaaaaaacaacaacaaaacctggctcttgctgggcgtggcggctcacgcctgtaatcccagccctatgggaggctgaggcgggcggatgacctgaggtcaggagttcaagaccagcctggccaacatggtgagaccgccccgtctctactaaaaatacaaaaattagccgcgtgcagtggcaggcgcctgtaattccagctactcaggaggctgaggcaggaggatcacttgaacttgggaggtggaggttgcagtgagccgagatcgccacactgcactgcagcccgggaaacaaaagtgaagctctgtcttcaaaacaaaaacaaaaacaaaaacaaaaacaaagaaacctggctcatttcttgtttcggcaagtctgctaaaagattcactcagcacagcagggaaataaaggtgtttcctgctttctttccttttctttcttattctgcatcctccctcgtccccgccctttaccaatatttaaaccaaggagtcatttgggctccttgccaagaacatctcataggttcttccacttgaaaggtctgggggatgggcttgggaaggcctgtttgctttgaaagagatgaaatacttgtgttctgtcctcctcccattgaaaccctcttttttttttttttgagatgaagtcgcccaggctggagtgcagtggcatgatctcggctcactgcaacctctgtcaccctggttcaagtgattttcctgcctcagcctcctgagtagctgggattacaggcacctgccaccgcgcctggctaatttttgtagttttagtagagacggggtttcaccatcttggccaggctggtcttgaacgcctgaccttgtgatctgcccgcctcggcctcccgaagtgctgggattacaggtgtgagccactgggcccggtctttttttttttaaatgatcataagatggcccattttggaccggaactgtcattgccagacagaattgtacctttagcacattctggtgccctggcctcttagtgttcaccagttgtactgcaatatagacaagatgtctctagagactcaaactactgttttattaaaaaagtaaacacctgagcacagctggcctacacaggagcgacagattctccttgatggtacactttctagtttttacacagtgatttaggtccacgttcctgataccccatcctcctgaagccttcgttttcaagacttttaaaaagcacttctacttggttttttgatcagtgtagctcaattgtgacttaaagaacagaatctgtccttcactgtaagagctacagctttcaaatgagctcactggaaattcattctaatccccaagctggagaaacaggttaagagatcctgtttcatatgctgtatttaaaaagcaacaatgataacaacatagtaactgcgttacccaatggactttattttcatcatatgatttcaattctctttatagagttttatttcatatccggtgtggcttgttcttttcagcagtttgggaagttagttattagagttgatagtgaattgaattttcattaaacagtcacggttagaagaagctaatatttgaaacagattttaaaaacttgaaaaattacaggtgagatttctgtttatgccagattattgaagataaatataaatgtatgttggtgtgtgaaatgctctgtgccttagaagcgtgacagttcagctctctgctgtggaaagtaacacagggcaatagaaacatatttgtggaattttagaacaaactattgctgactcatgagcactataataaccatcaggaagctcccaactgaagcaatgtaacagtgtaatctagttcaattcagcaaacattcatggagttcttcatgtctgtcaagccttgaggacacccacgaatggcaaatctccacgctagacactcaatacaggtaaataggccaccagttaatattcttgtttttattttcttcaagttagctaaaaatgagatgcgtatgaagtgaggaggctggatccaagtcttgattgcctttcagggggtcaaggtggtaagctgtgcagtgaagtcaaccagtggccatggcttacatgtttgtctctttgagatcgccaccagaaccatttgtgaactgatttgtgaaggaaaagtcagtcttactccaaagactattgcagggaggaacttccagagaggaaatccaatgacaatggtactggcatacacagggagcctcccttcaaaaagacagcgcccctagtcagggaggggatggcggtcctttgataagacccataggcaaacttcgagcccatcagcaggtcaaccctatgctgggaaagtgaggatttgggatttctgtgctataaacctgattctaaatgtaggacccaagtttctggactacttcagaatacctaaatgaatcatggaaacactctttatgattttttacaacaccagatatgcaggtgaattgtggaaaatgtcatgtagctgacactcaagaaatagggattcctaataatggcatgggtagggaacagatacacctggttagaaggtctagggttctgtatatgaagctgccagtctgtagctcttcgagaaagaaagttcaagtcatttgggggaaacttaagaatagtcatcagggttttagcttctaggcaccagccaaggatgagaacttctaaaatctaaaatccatttcaagaaataaagacgaacacatttgcaggaaggtaactgttataacccacaccatcagcagggggaaagccaagctgagaataaacccagagacaaagaaccctcggactcaggcaggacatggcaggatgttctggcacagcagactggagactgaggcagggcctgtgagtggacagagcacccctggctgggaagaagaagatggggtaggaggaggtcaggttccaaggatgcaggtctggaaaatgatatcggaggccctggagtttgtgagcttggctctagtcccaagaagggtgagggagaataagggtaagggagtattctaggcaaggaactaaggaaggaatccccttcttagagcagaggcacaagttagagcaggcccagcatttgggccaacttactgtggggcctctgagctgctcagctgggtctcctgtcctagagggaaggtggcccagagtctttggtggagcggaatctgtagatgaggttaagggactccagttgccaaggttgatctgaaacaggcagggagctaagctcatcagaacaccaacagattcatgttctcgtcttagctttcatctattctggtctcaatggcttcgggaaacacacatatacacatacaccatgcccttgaactcaaagcaaactacgctctcagggaaatacaaatatcacgttcttatagctgtaaagtatagcttagctatttatagaagactatgaggtactgttgtgagttatttgcttatcctgttttattctgaaaaatgaaagtgctcaatagaatttttaacgttggcaacaccataaggatttcttatgttaagtcccaacttggggttgcaaaatcattttttcccttaatacctgggtgttgtattagatctcataatttgacaagttaaccttttagaaatccacatatatctcaaatctggctactgcaaaaccagttttgacaggtcagattttcatatgtataggtataaatagccaacactcagtgaacaaaatcctttaagcattttggttacataaagttgtatgttttaagtgatcaaactaagaatattgtttataggttttaaaaaccaaaccaataaaatttttatttattcaataaaatatgcacagaacagatgcaaatgtgttatatacaa

SEQ ID NO: 233822 - DNA, 1866 bp, Artificial Sequence
  derived and/or modified sequence
atgttgatggcggggcagcggggagcttggaccatgggggacgtcgtggagaagtccctggaggggcccctggcaccctctactgacgagcccagtcagaaaaccggagatctggttgagatacttaacggagaaaaagtgaaatttgacgacgcaggcctgtctttgattttgcagaacgggctcgaaacgctacgcatggagaacgccctcacagatgtaatcctttgcgttgacatccaggagttctcttgtcatcgcgtggtgcttgccgccgcatccaactactttcgggctatgttctgcaacgatctgaaggagaaatatgaaaagcgtatcattattaaaggagtggatgctgaaacaatgcacacactgctcgactacacatacacttccaaggcgctcatcaccaagcagaacgttcagagggttctggaagcggctaaccttttccagttcctgcgaatggtggatgcctgtgctagctttctaactgaggcccttaaccccgaaaactgtgtgggaattctgcggttggccgacacacatagcttggattcccttaaaaagcaagtgcagagctatatcattcagaattttgtgcagattctgaactcagaggaattcctcgatctgcctgtggatacccttcaccatatcctgaagtccgacgatttgtacgtgaccgaagaggcacaggtatttgaaactgtgatgtcctgggtgcggcacaagccttccgagagactgtgtcttttgccttacgtgctagagaatgtgaggctcccgttgctcgatccctggtattttgtggagacagttgaggctgaccccctgatccgacaatgtcctgaggtgtttcccctgcttcaggaggcgcgcatgtatcacctgagcggaaatgagattatctccgaacgtaccaaaccccgcatgcatgagtttcaaagtgaagtctttatgatcatcggcggctgcaccaaggacgagcggttcgtcgcggaagtgacttgcctggaccccctgagacggtcgaggttagaggtggcaaagctccccctgacagagcacgaactggagtccgaaaacaagaagtgggtggagtttgcatgcgtgacgcttaagaatgaggtgtacattagcgggggaaaggagacacaacacgacgtttggaaatataattcttccattaataagtggatccagattgaatatctcaacatcggtagatggagacacaagatggtggtccttggggggaaggtatatgtgataggtgggtttgacggtctgcagagaataaataatgtggaaacatacgatcccttccacaactgctggtcagaggccgcccccctgctagtgcatgtgtctagttttgctgccacctcccataagaagaaactgtacgtgatcggcggcggtcctaacggaaagctggctacagacaaaacacagtgttacgatccatctaccaacaaatggtccttaaaggctgctatgcctgtcgaggctaagtgtattaatgcagtgtccttcagagatagaatatacgtggttggtggcgcaatgcgcgccctgtacgcttattctcccctggaggacagctggtgtctggtgacccagctctctcacgagagggctagctgtggcatagccccatgtaataaccgcttgtacattaccggcggccgtgacgagaaaaacgaagtgatcgctaccgtgttatgttgggatccggaggcacagaaactgaccgaagagtgcgtgctgcctcgcggcgttagccaccatggcagcgttaccatacggaaatcctacacacacatccgccgcatcgtgcctggggcggtcagtgtttag

SEQ ID NO: 233823 - DNA, 6298 bp, Artificial Sequence
  derived and/or modified sequence
gggcctgcctgacacttgggcgctccttcagtctcgatgttgatggcaggacaaaggggcgcctggaccatgggtgatgtggtcgagaagagtttggaagggcccctggcaccttctacagatgagccctcccagaaaacaggagacttggtcgagatcttaaatggggaaaaggtcaaatttgacgacgcgggactctccttaattcttcagaatggcctggaaaccctgcgaatggaaaacgctctgacagatgtcatcttgtgtgtggacattcaggaattctcctgccaccgcgtggtgcttgccgcagccagcaactatttcagggccatgttctgcaacgatttaaaggaaaagtatgagaaaaggatcattattaaaggggttgatgctgagaccatgcacactctgttggactacacgtacaccagcaaggcgctgatcaccaagcagaatgtccagcgggtcctggaggctgctaacctcttccagttcctgcggatggtggatgcctgtgccagcttcctcactgaagccttgaacccagaaaactgcgttggaatactgaggctggctgacacacactcgctggacagtctaaagaagcaggttcagagttacatcattcaaaactttgtgcagattctgaactctgaggagtttcttgacctgcccgtggacactctgcaccacatcttgaagagtgatgacctttacgtgaccgaggaggctcaggtgtttgagaccgtgatgagctgggtccggcacaagccatcagaacgactctgcttactcccctatgtcctcgagaacgtgcgcttaccgcttctggacccgtggtactttgtggagacggtggaagcagatcctctcatcaggcagtgcccagaggtcttcccgctgctccaggaagccaggatgtaccacctttctggcaatgagatcatttcggaacgcaccaagcccaggatgcatgagttccagtctgaggtgttcatgatcattggcggctgcacgaaggatgaacggtttgtggcagaggtgacctgcctggaccccctgaggcgcagccgcctggaggtggccaagctcccgctaacagagcatgagctggagagtgagaataagaagtgggtggagtttgcatgcgtgacattgaaaaatgaggtctacatctcaggtggcaaagaaacacagcatgatgtttggaaatataattcttcgatcaacaagtggattcagattgagtatttaaacataggccgctggaggcataagatggtggtgttgggtggcaaggtctatgtgatcggaggctttgacggcttacagagaatcaacaatgtggagacctacgacccctttcacaactgctggtcagaggccgcacccctccttgtccatgtcagttcctttgcagccaccagccataagaagaagctgtatgtgatcgggggagggcccaatgggaaactggccacagacaagactcagtgttatgacccttccaccaacaagtggagtttgaaggcggccatgcccgtggaggctaaatgcatcaatgcagtgagtttccgggaccgcatctatgtcgttggtggggccatgagagcgctgtacgcctacagcccgctggaagacagctggtgcctggtgacccagctcagccacgagcgggccagctgcggtatcgcgccctgcaacaaccggctctacatcaccggcgggcgggacgagaagaacgaggttatcgccacggtgctgtgctgggaccccgaggcccagaaactgacagaggagtgcgtcctgccccggggcgtgtcgcaccacggcagcgtcaccatcaggaagtcgtacacccacatccgcaggatcgtgcccggagcagtgtctgtctgacggcaggatggggagctggagagcccccccgaccctcagcgtacccgcctcacctctcaccctcctccagtcccacttcaggcagcaggctcgagtttgaggccatacatcaggggatccccttgactcactttgggggaaccttggaagtcacagtttggggtcacttgagaccggccaggaatgtttgcatgacctacctcaggaggggaggcgaggaagagtaatatttagcattcaggacccacccaccctatgccggcttctgtgccaggcacttccttttatcggttcatttaacctggtgactggctcttatcacttctagtttacaggtgagggaaccaagtttcacagaggctaagtggcgtgcccctgatcactcagatagcaagtagctaccccaggagtctaaaatccaggtctttcatctccgaagtcaatgctctttccaccatgctgcctatctcagagcaggaaaaacaaacaaaaaacaacaacaaaacctggctcttgctgggcgtggcggctcacgcctgtaatcccagccctatgggaggctgaggcgggcggatgacctgaggtcaggagttcaagaccagcctggccaacatggtgagaccgccccgtctctactaaaaatacaaaaattagccgcgtgcagtggcaggcgcctgtaattccagctactcaggaggctgaggcaggaggatcacttgaacttgggaggtggaggttgcagtgagccgagatcgccacactgcactgcagcccgggaaacaaaagtgaagctctgtcttcaaaacaaaaacaaaaacaaaaacaaaaacaaagaaacctggctcatttcttgtttcggcaagtctgctaaaagattcactcagcacagcagggaaataaaggtgtttcctgctttctttccttttctttcttattctgcatcctccctcgtccccgccctttaccaatatttaaaccaaggagtcatttgggctccttgccaagaacatctcataggttcttccacttgaaaggtctgggggatgggcttgggaaggcctgtttgctttgaaagagatgaaatacttgtgttctgtcctcctcccattgaaaccctcttttttttttttttgagatgaagtcgcccaggctggagtgcagtggcatgatctcggctcactgcaacctctgtcaccctggttcaagtgattttcctgcctcagcctcctgagtagctgggattacaggcacctgccaccgcgcctggctaatttttgtagttttagtagagacggggtttcaccatcttggccaggctggtcttgaacgcctgaccttgtgatctgcccgcctcggcctcccgaagtgctgggattacaggtgtgagccactgggcccggtctttttttttttaaatgatcataagatggcccattttggaccggaactgtcattgccagacagaattgtacctttagcacattctggtgccctggcctcttagtgttcaccagttgtactgcaatatagacaagatgtctctagagactcaaactactgttttattaaaaaagtaaacacctgagcacagctggcctacacaggagcgacagattctccttgatggtacactttctagtttttacacagtgatttaggtccacgttcctgataccccatcctcctgaagccttcgttttcaagacttttaaaaagcacttctacttggttttttgatcagtgtagctcaattgtgacttaaagaacagaatctgtccttcactgtaagagctacagctttcaaatgagctcactggaaattcattctaatccccaagctggagaaacaggttaagagatcctgtttcatatgctgtatttaaaaagcaacaatgataacaacatagtaactgcgttacccaatggactttattttcatcatatgatttcaattctctttatagagttttatttcatatccggtgtggcttgttcttttcagcagtttgggaagttagttattagagttgatagtgaattgaattttcattaaacagtcacggttagaagaagctaatatttgaaacagattttaaaaacttgaaaaattacaggtgagatttctgtttatgccagattattgaagataaatataaatgtatgttggtgtgtgaaatgctctgtgccttagaagcgtgacagttcagctctctgctgtggaaagtaacacagggcaatagaaacatatttgtggaattttagaacaaactattgctgactcatgagcactataataaccatcaggaagctcccaactgaagcaatgtaacagtgtaatctagttcaattcagcaaacattcatggagttcttcatgtctgtcaagccttgaggacacccacgaatggcaaatctccacgctagacactcaatacaggtaaataggccaccagttaatattcttgtttttattttcttcaagttagctaaaaatgagatgcgtatgaagtgaggaggctggatccaagtcttgattgcctttcagggggtcaaggtggtaagctgtgcagtgaagtcaaccagtggccatggcttacatgtttgtctctttgagatcgccaccagaaccatttgtgaactgatttgtgaaggaaaagtcagtcttactccaaagactattgcagggaggaacttccagagaggaaatccaatgacaatggtactggcatacacagggagcctcccttcaaaaagacagcgcccctagtcagggaggggatggcggtcctttgataagacccataggcaaacttcgagcccatcagcaggtcaaccctatgctgggaaagtgaggatttgggatttctgtgctataaacctgattctaaatgtaggacccaagtttctggactacttcagaatacctaaatgaatcatggaaacactctttatgattttttacaacaccagatatgcaggtgaattgtggaaaatgtcatgtagctgacactcaagaaatagggattcctaataatggcatgggtagggaacagatacacctggttagaaggtctagggttctgtatatgaagctgccagtctgtagctcttcgagaaagaaagttcaagtcatttgggggaaacttaagaatagtcatcagggttttagcttctaggcaccagccaaggatgagaacttctaaaatctaaaatccatttcaagaaataaagacgaacacatttgcaggaaggtaactgttataacccacaccatcagcagggggaaagccaagctgagaataaacccagagacaaagaaccctcggactcaggcaggacatggcaggatgttctggcacagcagactggagactgaggcagggcctgtgagtggacagagcacccctggctgggaagaagaagatggggtaggaggaggtcaggttccaaggatgcaggtctggaaaatgatatcggaggccctggagtttgtgagcttggctctagtcccaagaagggtgagggagaataagggtaagggagtattctaggcaaggaactaaggaaggaatccccttcttagagcagaggcacaagttagagcaggcccagcatttgggccaacttactgtggggcctctgagctgctcagctgggtctcctgtcctagagggaaggtggcccagagtctttggtggagcggaatctgtagatgaggttaagggactccagttgccaaggttgatctgaaacaggcagggagctaagctcatcagaacaccaacagattcatgttctcgtcttagctttcatctattctggtctcaatggcttcgggaaacacacatatacacatacaccatgcccttgaactcaaagcaaactacgctctcagggaaatacaaatatcacgttcttatagctgtaaagtatagcttagctatttatagaagactatgaggtactgttgtgagttatttgcttatcctgttttattctgaaaaatgaaagtgctcaatagaatttttaacgttggcaacaccataaggatttcttatgttaagtcccaacttggggttgcaaaatcattttttcccttaatacctgggtgttgtattagatctcataatttgacaagttaaccttttagaaatccacatatatctcaaatctggctactgcaaaaccagttttgacaggtcagattttcatatgtataggtataaatagccaacactcagtgaacaaaatcctttaagcattttggttacataaagttgtatgttttaagtgatcaaactaagaatattgtttataggttttaaaaaccaaaccaataaaatttttatttattcaataaaatatgcacagaacagatgcaaatgtgttatatacaa

SEQ ID NO: 233824 - DNA, 1866 bp, Artificial Sequence
  derived and/or modified sequence
atgctgatggccggccagagaggagcctggaccatgggagatgtggtggagaagagcctggagggccccctggcccccagcacagatgagcccagccagaagacaggagacctggtggagatcctgaatggagagaaggtgaagtttgatgatgctggcctgagcctcatcctgcagaatggcctggagaccctgaggatggagaatgccctgacagatgtgatcctgtgtgtggacatccaggagttcagctgccaccgggtggtgctggccgccgccagcaactacttccgggccatgttctgcaatgacctgaaggagaagtatgagaagaggatcatcatcaagggcgtggatgctgagaccatgcacaccctgctggactacacctacaccagcaaggccctgatcaccaagcagaatgtgcagagggtgctggaggccgccaacctcttccagttcctgaggatggtggatgcctgtgccagcttcctgacagaggccctgaaccctgagaactgtgtgggcatcctgcggctggccgacacccacagcctggacagcctgaagaagcaggtgcagagctacatcatccagaactttgtgcagatcctgaacagcgaggagttcctggacctgcctgtggacaccctgcaccacatcctgaagagtgatgacctgtatgtgacagaggaggcccaggtgtttgagaccgtgatgtcctgggtgcgccacaagcccagcgagcggctgtgcctgctgccctacgtgctggagaatgtgcggctgcccctgctggacccctggtactttgtggagaccgtggaggccgaccccctcatccggcagtgcccagaggtgttccccctgctgcaggaggccaggatgtaccacctgtctggaaatgagatcatcagcgagaggaccaagcccaggatgcatgagttccagagcgaggtgttcatgatcatcggcggctgcaccaaggatgaaagatttgtggccgaggtgacctgcctggaccccctgcggcgcagccggctggaggtggccaagctgcccctgacagagcacgagctggagagcgagaacaagaagtgggtggagtttgcctgtgtgaccctgaagaatgaggtgtacatcagcggcggcaaggagacccagcatgatgtgtggaagtacaacagcagcatcaacaagtggatccagatcgagtacctgaacatcggccgctggaggcacaagatggtggtgctgggcggcaaggtgtatgtgattggaggctttgatggcctgcagaggatcaacaacgtggagacctatgaccccttccacaactgctggagcgaggccgcccccctgctggtgcacgtgagcagctttgctgccaccagccacaagaagaagctgtatgtgattggaggcggccccaacgggaagctggccacagacaagacccagtgctatgaccccagcaccaacaagtggagcctgaaggccgccatgcctgtggaggccaagtgcatcaatgctgtgtccttccgggaccgcatctacgtggtgggcggggccatgagggccctgtatgcctacagccccctggaggacagctggtgcctggtgacccagctgagccatgagcgggccagctgtggcatcgccccctgcaacaaccggctgtacatcactggaggaagagatgagaagaatgaggtgattgccaccgtgctgtgctgggaccctgaggcccagaagctgacagaagaatgtgtgctgccccggggcgtgagccaccacggctctgtgaccatcaggaagagctacacccacatccgccgcatcgtgcctggagctgtgtctgtgtag

SEQ ID NO: 233825 - DNA, 1866 bp, Artificial Sequence
  derived and/or modified sequence
atgctgatggccggccagcggggcgcctggaccatgggcgacgtggtggagaaatctttggagggtcctcttgcccctagcacagatgaaccttctcagaagaccggagatttagttgaaatccttaacggggaaaaagtgaaattcgacgatgccgggctttccctgatcctgcagaatggcctggagactttgcgcatggaaaatgccttaacagatgtcatcctgtgcgtcgacatccaggagttttcatgccatcgcgtagtactagccgcagccagcaattactttagagccatgttctgtaacgatcttaaggagaagtacgaaaaacggatcataatcaagggagtggatgcagaaaccatgcacacccttcttgattacacctacacttcgaaggcgcttatcaccaagcagaacgttcagcgcgttctggaggctgctaatctgttccagttcctgcggatggttgacgcctgtgcaagcttcctgaccgaagcattaaatccagagaattgtgtgggcatactccgtctcgcagacacgcactcccttgacagtttgaaaaaacaagtccaaagctacatcatccaaaatttcgtgcagattttaaacagcgaggagtttttggacctaccagtggatactctgcaccacatcttaaagagcgacgacttgtacgtgacagaagaggcacaggtgtttgaaactgtcatgagctgggtgcgacacaaaccatccgagcggctgtgcttgctgccttatgtactggagaacgtgagactgcctctccttgacccatggtactttgtggagaccgtggaggctgaccctctgatcagacaatgccctgaggtattccccctcctgcaggaggcccggatgtatcacctgagcgggaacgagattattagcgagagaacgaagccacgaatgcatgaatttcaatcagaagtcttcatgatcatcggaggatgtacaaaggacgagaggtttgtagcagaggtgacatgcctggacccattgcgccgttctcggttagaagtggctaaactcccattaaccgagcatgagctcgaatctgaaaataaaaaatgggtggagtttgcctgtgtgaccctgaaaaatgaagtctatatctctggcggaaaggagacacaacacgatgtgtggaaatataattcctccatcaataaatggattcagatagagtatctgaacattgggaggtggagacacaagatggtcgttctgggcggcaaggtgtacgtaatcgggggatttgacgggctccagcggataaacaatgttgagacctatgacccattccataattgttggtctgaggcggctccccttctagtgcacgtatcgtctttcgctgccacttcacacaagaagaaactttatgtgataggaggcggccccaatggcaagctggcgactgacaaaacccagtgctacgatccatctactaacaaatggagtcttaaggccgcaatgcccgtggaagcaaaatgcatcaatgccgtgagcttcagggataggatatacgtggtaggcggtgccatgcgagcgctgtacgcctatagtcctttggaggactcatggtgtctcgtgacccagcttagccacgaaagagcatcatgcggaatcgcaccctgcaataaccgcctgtatattacaggtggaagagacgaaaagaacgaggtgatcgctacggtcctgtgttgggacccagaagctcaaaagcttaccgaagagtgtgtcctgcctcggggggtgagccaccatggcagcgtcaccattagaaagtcatacacccacatcagaagaatagttcctggggccgtgtcagtgtag

SEQ ID NO: 233826 - DNA, 1866 bp, Artificial Sequence
  derived and/or modified sequence
atgttaatggccggacagagaggcgcatggaccatgggggacgtagtagagaagtcactggagggacccctcgctccgtcaacagatgagccatcacagaaaacaggagatctggtagaaatcctcaatggagagaaggttaagtttgacgacgccggtctcagcctcatactacagaatgggctagagactctaagaatggagaacgctttgaccgatgttatcctctgtgtcgatatacaagaattctcttgccatcgcgtggtgctggccgctgcctccaattacttccgcgcaatgttttgtaatgatctgaaagaaaaatatgagaagcgaattatcattaaaggtgtggatgctgagacaatgcatacattgctcgactacacgtatacatcgaaagctctgatcactaagcagaatgtgcagcgggttctagaagccgctaatctcttccagttcctgcggatggttgatgcatgcgcgagctttctcaccgaagccctcaatcccgagaattgcgtgggcatcctgcgcctcgccgacacacactcattggattctcttaagaagcaggtgcagtcctacataattcaaaattttgtgcagattctgaactccgaagagttcctggatctgccggtcgataccttgcatcacattctgaagtctgacgacctgtatgttacggaagaggcacaggttttcgagactgtgatgagctgggtgaggcacaaaccaagcgaaaggttgtgtctgttaccatacgttctggagaatgtgcgactgcctctgttggacccctggtactttgtggagaccgtggaggccgaccctcttatccggcagtgccctgaagtattccctttgctacaggaggctcgcatgtaccatctcagcggtaacgagatcattagtgagcgcacgaaacctaggatgcacgagttccaaagtgaggtttttatgatcattggtggatgtactaaagacgagaggtttgtggcagaagtgacttgcctggacccactcaggagatctagactggaggttgcgaaactccctttgaccgagcatgagctggaatccgagaacaagaagtgggtggagttcgcctgcgtgactctcaaaaacgaggtctacatatctggaggaaaagagacccagcacgatgtgtggaagtataattccagcataaacaaatggatccaaatcgagtacctgaacattggcaggtggcgacataagatggttgtattgggcggaaaggtctacgtgatagggggattcgacgggctgcagcgcattaacaatgttgagacttacgacccatttcacaattgctggtctgaagcggctcctcttctggtccacgtgtcctccttcgccgctactagccataagaaaaagctgtatgtgatcggcggaggtcctaatggaaagctggccacagataaaacccaatgctatgacccctctacaaataaatggagtctcaaagcagccatgcctgtagaggccaaatgcatcaacgcagtttcatttcgcgataggatttatgtcgtcggaggagctatgcgggcactctacgcctatagccccttagaggactcttggtgtctggtcacacagctgtctcacgaacgggcatcctgcggaatcgctccttgtaataataggttgtacatcaccggcggacgggatgagaagaacgaggtgattgccacggtactttgttgggatcctgaagcccaaaagctaaccgaggaatgcgttctcccccgaggggttagccaccacggttctgtgactattcgtaaatcttatactcacattcggcgtatcgttccgggagcagtttctgtatag

SEQ ID NO: 233827 - DNA, 1866 bp, Artificial Sequence
  derived and/or modified sequence
atgctgatggccggccagagaggcgcctggaccatgggcgacgtggtggagaagagcctggagggccccctggcccccagcaccgacgagcccagccagaagaccggcgacctggtggagatcctgaacggcgagaaggtgaagttcgacgacgccggcctgagcctgatcctgcagaacggcctggagaccctgagaatggagaacgccctgaccgacgtgatcctgtgcgtggacatccaggagttcagctgccacagagtggtgctggccgccgccagcaactacttcagagccatgttctgcaacgacctgaaggagaagtacgagaagagaatcatcatcaagggcgtggacgccgagaccatgcacaccctgctggactacacctacaccagcaaggccctgatcaccaagcagaacgtgcagagagtgctggaggccgccaacctgttccagttcctgagaatggtggacgcctgcgccagcttcctgaccgaggccctgaaccccgagaactgcgtgggcatcctgagactggccgacacccacagcctggacagcctgaagaagcaggtgcagagctacatcatccagaacttcgtgcagatcctgaacagcgaggagttcctggacctgcccgtggacaccctgcaccacatcctgaagagcgacgacctgtacgtgaccgaggaggcccaggtgttcgagaccgtgatgagctgggtgagacacaagcccagcgagagactgtgcctgctgccctacgtgctggagaacgtgagactgcccctgctggacccctggtacttcgtggagaccgtggaggccgaccccctgatcagacagtgccccgaggtgttccccctgctgcaggaggccagaatgtaccacctgagcggcaacgagatcatcagcgagagaaccaagcccagaatgcacgagttccagagcgaggtgttcatgatcatcggcggctgcaccaaggacgagagattcgtggccgaggtgacctgcctggaccccctgagaagaagcagactggaggtggccaagctgcccctgaccgagcacgagctggagagcgagaacaagaagtgggtggagttcgcctgcgtgaccctgaagaacgaggtgtacatcagcggcggcaaggagacccagcacgacgtgtggaagtacaacagcagcatcaacaagtggatccagatcgagtacctgaacatcggcagatggagacacaagatggtggtgctgggcggcaaggtgtacgtgatcggcggcttcgacggcctgcagagaatcaacaacgtggagacctacgaccccttccacaactgctggagcgaggccgcccccctgctggtgcacgtgagcagcttcgccgccaccagccacaagaagaagctgtacgtgatcggcggcggccccaacggcaagctggccaccgacaagacccagtgctacgaccccagcaccaacaagtggagcctgaaggccgccatgcccgtggaggccaagtgcatcaacgccgtgagcttcagagacagaatctacgtggtgggcggcgccatgagagccctgtacgcctacagccccctggaggacagctggtgcctggtgacccagctgagccacgagagagccagctgcggcatcgccccctgcaacaacagactgtacatcaccggcggcagagacgagaagaacgaggtgatcgccaccgtgctgtgctgggaccccgaggcccagaagctgaccgaggagtgcgtgctgcccagaggcgtgagccaccacggcagcgtgaccatcagaaagagctacacccacatcagaagaatcgtgcccggcgccgtgagcgtgtag

SEQ ID NO: 233828 - protein, 253 aa, Artificial Sequence
  derived and/or modified sequence
MAAATRGCRPWGSLLGLLGLVSAAAAAWDLASLRCTLGAFCECDFRPDLPGLECDLAQHLAGQHLAKALVVKALKAFVRDPAPTKPLVLSLHGWTGTGKSYVSSLLAHYLFQGGLRSPRVHHFSPVLHFPHPSHIERYKKDLKSWVQGNLTACGRSLFLFDEMDKMPPGLMEVLRPFLGSSWVVYGTNYRKAIFIFIRWGPALQWAQWGGHFSEVQLYSLSLCSQQNPVPHGLSWAFPVPSATLRDDIVIPPG

SEQ ID NO: 233829 - DNA, 762 bp, Artificial Sequence
  derived and/or modified sequence
atggccgctgcaacaaggggctgtaggccctggggctccctgcttggactgctgggccttgtcagcgcagccgcagctgcctgggacttggcctccctgaggtgcaccctgggggcattttgtgagtgtgactttaggcccgacttaccagggctcgaatgcgacctcgcccagcatctcgcgggtcagcacttagctaaagcactggtagttaaagccttgaaagctttcgtgagggaccctgctcccacaaaacctctcgtactgagcctgcatggttggactggcacgggaaagtcctatgtgtctagtttactggcgcactacctgtttcaaggtggactccggtctcctcgagtccaccacttctcccccgtgctgcactttcctcaccctagccatatagaaaggtataaaaaagatctcaaatcctgggtgcagggaaatcttacagcatgtggccgatccctcttccttttcgatgagatggacaagatgccacctggcctcatggaggtcctccgtccattcttgggcagtagctgggtcgtctacggcaccaactacagaaaagccatcttcattttcatccgatggggcccagctctccagtgggctcagtggggcggtcacttctccgaagtgcagctgtatagtctctctctgtgttcccagcagaacccagtcccacacggtttgtcctgggctttcccagtaccctctgctacattgagagatgatattgtgattcccccaggctag

SEQ ID NO: 233830 - DNA, 762 bp, Artificial Sequence
  derived and/or modified sequence
atggcagccgcaacgagaggttgtcgcccatggggaagtctgttgggcttgctcggccttgtgagcgctgctgcagccgcttgggatttggcaagtctcaggtgcacattgggcgcgttctgtgagtgtgacttcagacccgacctcccagggctggaatgcgatctcgcccagcaccttgctggacagcatctcgctaaagctttggtcgtgaaggctctaaaagcatttgttagagacccagctcctaccaagcccttagtgcttagcctccatgggtggacaggcaccggcaaaagctacgtaagctctctgttggctcactaccttttccaaggagggttgagaagcccacgcgtccatcatttctcacccgtcttacacttcccccatccctcacacatcgaaagatacaaaaaagatctgaagagttgggtccaaggcaacctcactgcctgtggtagatcattatttctgttcgatgaaatggacaagatgccacctggtttgatggaagttctgaggccctttctcggttcgtcatgggtagtttatggaacgaattaccgcaaagctattttcatcttcatccgctggggcccagccctgcagtgggcacagtggggcggacatttttccgaggttcagctgtactcactgagtctatgtagccagcagaatcctgtgccccacggcctaagttgggccttcccagtgcccagcgctaccttacgggacgatatcgtgattcccccaggttag

SEQ ID NO: 233831 - DNA, 762 bp, Artificial Sequence
  derived and/or modified sequence
atggctgcagcaactagaggttgtaggccgtggggctctctcctgggactactggggctggtatctgctgctgccgctgcatgggacttagcttcactccgctgtacgctcggggccttttgtgaatgtgactttcgccctgatcttccaggcctggaatgtgatcttgcacagcatttagcgggacagcatcttgctaaggcactggtggttaaagcgttgaaagctttcgtcagggaccctgcgcccacgaagcccctagttttatcacttcacggttggacaggaacaggtaagagctatgtcagctctttattggcccactacttgttccaaggcggattgaggtctccccgagtgcaccatttctcccctgttctccatttccctcacccctcacatattgagcgatataagaaagacctaaaatcttgggtgcaaggtaacctgaccgcctgtggccgctctttgtttctgtttgacgagatggataagatgccccctgggctgatggaagtgctacgtccgtttttggggtcatcctgggtcgtgtatgggactaactatcgcaaggcaatattcattttcattcgttggggtcctgctctccagtgggcacagtggggagggcacttcagcgaagttcagttatattccctaagtttatgctcccagcaaaaccctgtgcctcacggcctttcctgggctttccccgttccatcagcaactctgcgcgacgacatagtgattcctccaggctag

SEQ ID NO: 233832 - DNA, 2240 bp, Artificial Sequence
  derived and/or modified sequence
gcagttcccgggcgaggcagttgactgccccacaacgagctcgggcctcacccggatggcggctgcgacgcgcggctgccggccctggggctcgctcctcgggctgctcgggctggtctcggccgcggccgccgcctgggacctggcttccctgcgctgcaccttgggcgccttttgcgaatgcgacttccggcccgacttgccggaaggatctgaagagctgggtccaagggaacctcactgcctgtggccgctccctcttcctcttcgatgagatggacaagatgcccccaggcctgatggaagtcctgcggcctttcctgggctcctcctgggtggtatacgggaccaattaccgcaaagccatcttcatcttcatcaggtggggcccggctttgcagtgggcacagtgggggggccacttctcagaggttcagctctacagccttagcctgtgctcccagcagaatccagttccccatgggcttagctgggctttcccagtgccctccgccactctcagagatgacattgtcattccgcctggttgatttccctttggacattctcagcaaattctgggctcagtctttttgatcgccacttctttgtggaagccctgccaggtcaagaagttttccctcttttgtggtgaggaggacacaggcctgggaaaaataggaacagagttcttgtcctttagtcccagctctcagaatcctcgctgtgtttcctcaggcagcatggctccgcctctctgagcctctgtctctgcttctgaacagcggggccaataatgatgccccgatgccttcctggaagttcagtgagggaaagtcagttgagggacacaaaagtgttttgtaaactataaagtacgtggcatgtgtaggtgaattacaggggccatggatgtggacaccatggagggggaagtggagcgttttcagtggagttggctcctccccgcactgagccatgttcctatgtcaggtggcagcggggaagcgagggtccaatcctgccctgcgctagtcctcatctgagtctcagcctgggtcccccatggttttagcaacacgggtggcaagcagatcaaccaggtggcattggaggcgtggcgcagccggcgggaccgcgaggagatcctcctgcaggagctggagccggtcatctcccgcgcggtgctggacaacccgcaccgtgagtctggctcagcagccccctcccgggcagcttcaccccacacccaggggccaggctctcccggggtctcatgctttgcccactgacccggcagttctgagcctggctttggcactcccagctttgtgactttgggtgagccttacagcccctgagtcctacacccagaaggcggctgagggaactgaggccagcatttttcctcctgcccctgggggtttggggccggcttctcccctcttgtgaagcacaaagtcccctccccacctacccttcctgcagatggcttctcaaactcgggcatcatggaagagcgcctcctagacgcagtggtgcccttcctcccgctccagcggcaccacgtccggcactgcgtgctcaacgagctggcccagctgggcctggagccaagggatgaggttgtccaggctgtgctggacagcaccaccttcttccctgaagacgagcagctcttctcctccaacggctgcaagaccgtggcctcccgaatcgccttcttcctctgactctctgagtggtgtcctcggcccccctgatggccaggccatgcaggaaaggccaggggcctctgtcacaggaacccagagcaccaagtgagatgaacggagtgtcggctaggccacgggacagatggccaggaagggccctggcctctaaactggctcgagagcatcttggccccggccaccttccccagggaaacccctggtcaccccagaacctcactgagccttgacctccccctgcagcctgagccttcttactgtgaattataactcagggactgtggctcgtggcggtgctccctcctcagtctgccacccttgccccttgcctccttggtcgggcaccatacctcctcccctccaccccacaccctgtgtccatatcaagccaggtggagccttctcagtttccagaaatggagggactcaagctgccacttgggcctggttttagatgtttttaattttgtaaaagaaaacaagtataataaactcagctgtgggacc

SEQ ID NO: 233833 - DNA, 762 bp, Artificial Sequence
  derived and/or modified sequence
atggccgccgccaccagaggctgcagaccctggggcagcctgctgggcctgctgggcctggtgagcgccgccgccgccgcctgggacctggccagcctgagatgcaccctgggcgccttctgcgagtgcgacttcagacccgacctgcccggcctggagtgcgacctggcccagcacctggccggccagcacctggccaaggccctggtggtgaaggccctgaaggccttcgtgagagaccccgcccccaccaagcccctggtgctgagcctgcacggctggaccggcaccggcaagagctacgtgagcagcctgctggcccactacctgttccagggcggcctgagaagccccagagtgcaccacttcagccccgtgctgcacttcccccaccccagccacatcgagagatacaagaaggacctgaagagctgggtgcagggcaacctgaccgcctgcggcagaagcctgttcctgttcgacgagatggacaagatgccccccggcctgatggaggtgctgagacccttcctgggcagcagctgggtggtgtacggcaccaactacagaaaggccatcttcatcttcatcagatggggccccgccctgcagtgggcccagtggggcggccacttcagcgaggtgcagctgtacagcctgagcctgtgcagccagcagaaccccgtgccccacggcctgagctgggccttccccgtgcccagcgccaccctgagagacgacatcgtgatcccccccggctag

SEQ ID NO: 233834 - DNA, 762 bp, Artificial Sequence
  derived and/or modified sequence
atggccgctgctacccgaggttgcagaccctggggtagtctgttgggcctgctcgggctcgtctcggctgcagcagcagcttgggatttagcgtctctccgttgcaccttgggcgctttctgtgagtgcgatttcaggcccgatctacctggtcttgagtgtgatctcgcccagcacctggcagggcagcacctagcgaaagcacttgtggtaaaggctcttaaagcttttgttcgggacccggccccaacgaaaccccttgtactgtccctgcatggatggactggcactggaaaaagttacgtgtcaagtctgctcgctcactaccttttccagggtggcctgagatcaccccgcgtgcatcacttttcaccagtgctgcacttcccgcacccttcccacatcgaacggtataagaaggacctcaagagctgggtgcagggcaatctgactgcttgcggccggtccctgtttctttttgacgagatggacaaaatgcccccagggcttatggaggtcctgcgccccttcctagggtcctcatgggtggtctatggtaccaactaccggaaggcaatatttattttcatcagatggggtccagcactgcagtgggctcagtggggtggacatttttccgaagtccagctttatagtctgtccctgtgttctcagcagaaccctgtaccacacgggctcagttgggccttccctgtgccctctgctaccctccgggacgacattgttatcccgcccggctag

SEQ ID NO: 233835 - DNA, 762 bp, Artificial Sequence
  derived and/or modified sequence
atggctgctgccacccggggctgccggccctggggcagcctgctgggcctgctgggcctggtgtctgctgctgctgctgcctgggacctggccagcctgcgctgcaccctgggcgccttctgtgaatgtgacttccggccagacctgcccggcctggagtgtgacctggcccagcacctggccggccagcacctggccaaggccctggtggtgaaggccctgaaggcctttgtgcgggaccctgcccccaccaagcccctggtgctgagcctgcacggctggacaggaacaggcaagagctatgtgagcagcctgctggcccactacctgttccagggcggcctgcggagcccccgggtgcaccacttcagccctgtgctgcacttcccccaccccagccacatcgagcgctacaagaaggacctgaagtcctgggtgcagggcaacctgacagcctgtggccgcagcctcttcctgtttgatgagatggacaagatgcctcctggcctgatggaggtgctgcggcccttcctgggcagctcctgggtggtgtatggcaccaactacaggaaggccatcttcatcttcatccgctggggccctgccctgcagtgggcccagtggggcggccacttcagcgaggtgcagctgtacagcctgagcctgtgcagccagcagaaccctgtgccccacggcctgtcctgggccttccctgtgcccagcgccaccctgagagatgacatcgtcatccccccaggatag

SEQ ID NO: 233836 - DNA, 2477 bp, Artificial Sequence
  derived and/or modified sequence
acaacgagctcgggcctcacccggatggcggctgcgacgcgcggctgccggccctggggctcgctcctcgggctgctcgggctggtctcggccgcggccgccgcctgggacctggcttccctgcgctgcaccttgggcgccttttgcgaatgcgacttccggcccgacttgccgggtctggagtgtgacctggctcagcacctggccggccagcatctggccaaggcgctggtggtgaaggcgctgaaggcctttgtgcgggacccagcccccaccaagccgctggtcctctccctgcacggctggaccggcaccggcaaatcctatgtcagctccctgctggcgcactacctcttccagggcggcctccgcagcccccgcgtgcaccacttttctcccgtcctccacttcccccaccccagccacatcgagcgctacaagaaggatctgaagagctgggtccaagggaacctcactgcctgtggccgctccctcttcctcttcgatgagatggacaagatgcccccaggcctgatggaagtcctgcggcctttcctgggctcctcctgggtggtatacgggaccaattaccgcaaagccatcttcatcttcatcaggtggggcccggctttgcagtgggcacagtgggggggccacttctcagaggttcagctctacagccttagcctgtgctcccagcagaatccagttccccatgggcttagctgggctttcccagtgccctccgccactctcagagatgacattgtcattccgcctggttgatttccctttggacattctcagcaaattctgggctcagtctttttgatcgccacttctttgtggaagccctgccaggtcaagaagttttccctcttttgtggtgaggaggacacaggcctgggaaaaataggaacagagttcttgtcctttagtcccagctctcagaatcctcgctgtgtttcctcaggcagcatggctccgcctctctgagcctctgtctctgcttctgaacagcggggccaataatgatgccccgatgccttcctggaagttcagtgagggaaagtcagttgagggacacaaaagtgttttgtaaactataaagtacgtggcatgtgtaggtgaattacaggggccatggatgtggacaccatggagggggaagtggagcgttttcagtggagttggctcctccccgcactgagccatgttcctatgtcaggtggcagcggggaagcgagggtccaatcctgccctgcgctagtcctcatctgagtctcagcctgggtcccccatggttttagcaacacgggtggcaagcagatcaaccaggtggcattggaggcgtggcgcagccggcgggaccgcgaggagatcctcctgcaggagctggagccggtcatctcccgcgcggtgctggacaacccgcaccgtgagtctggctcagcagccccctcccgggcagcttcaccccacacccaggggccaggctctcccggggtctcatgctttgcccactgacccggcagttctgagcctggctttggcactcccagctttgtgactttgggtgagccttacagcccctgagtcctacacccagaaggcggctgagggaactgaggccagcatttttcctcctgcccctgggggtttggggccggcttctcccctcttgtgaagcacaaagtcccctccccacctacccttcctgcagatggcttctcaaactcgggcatcatggaagagcgcctcctagacgcagtggtgcccttcctcccgctccagcggcaccacgtccggcactgcgtgctcaacgagctggcccagctgggcctggagccaagggatgaggttgtccaggctgtgctggacagcaccaccttcttccctgaagacgagcagctcttctcctccaacggctgcaagaccgtggcctcccgaatcgccttcttcctctgactctctgagtggtgtcctcggcccccctgatggccaggccatgcaggaaaggccaggggcctctgtcacaggaacccagagcaccaagtgagatgaacggagtgtcggctaggccacgggacagatggccaggaagggccctggcctctaaactggctcgagagcatcttggccccggccaccttccccagggaaacccctggtcaccccagaacctcactgagccttgacctccccctgcagcctgagccttcttactgtgaattataactcagggactgtggctcgtggcggtgctccctcctcagtctgccacccttgccccttgcctccttggtcgggcaccatacctcctcccctccaccccacaccctgtgtccatatcaagccaggtggagccttctcagtttccagaaatggagggactcaagctgccacttgggcctggttttagatgtttttaattttgtaaaagaaaacaagtataataaactcagctgtgggaccag

SEQ ID NO: 233837 - DNA, 762 bp, Artificial Sequence
  derived and/or modified sequence
atggccgccgccacccggggctgccggccctggggcagcctgctgggcttacttgggctggtgagcgcagccgctgccgcttgggacctcgcctcccttcgttgcactctgggcgccttctgcgaatgcgattttcgacccgacctgccaggactggagtgcgaccttgcacaacacctcgccggtcagcacctggctaaggctcttgtcgtgaaggccctgaaagccttcgtgagggaccccgcacctacgaagcccctggtgctgtcacttcatggctggacaggtacaggtaaatcttatgtctcctccttgttggcccattacctgttccaaggcggattgaggtctccaagagtccatcatttttctcccgtgctccatttcccccacccaagccatatcgaacgctacaagaaagatctgaaatcctgggttcaaggcaatctaacagcatgtggcagatcattatttttatttgacgaaatggacaaaatgcctcccgggctcatggaggtgctaaggcctttcctgggcagttcatgggttgtctatgggaccaattatagaaaagccatcttcatcttcatcaggtggggcccggctctacagtgggcccaatggggaggccatttcagcgaagtacagctgtattccctgagcctctgctctcagcagaaccccgtcccccacgggcttagctgggcattcccagtgccctccgccaccttacgtgacgatatcgtaattccgcctggatag

SEQ ID NO: 233838 - RNA, 762 nt, Artificial Sequence
  derived and/or modified sequence
auggcagccgcaacgagagguugucgcccauggggaagucuguugggcuugcucggccuugugagcgcugcugcagccgcuugggauuuggcaagucucaggugcacauugggcgcguucugugagugugacuucagacccgaccucccagggcuggaaugcgaucucgcccagcaccuugcuggacagcaucucgcuaaagcuuuggucgugaaggcucuaaaagcauuuguuagagacccagcuccuaccaagcccuuagugcuuagccuccauggguggacaggcaccggcaaaagcuacguaagcucucuguuggcucacuaccuuuuccaaggaggguugagaagcccacgcguccaucauuucucacccgucuuacacuucccccaucccucacacaucgaaagauacaaaaaagaucugaagaguuggguccaaggcaaccucacugccugugguagaucauuauuucuguucgaugaaauggacaagaugccaccugguuugauggaaguucugaggcccuuucucgguucgucauggguaguuuauggaacgaauuaccgcaaagcuauuuucaucuucauccgcuggggcccagcccugcagugggcacaguggggcggacauuuuuccgagguucagcuguacucacugagucuauguagccagcagaauccugugccccacggccuaaguugggccuucccagugcccagcgcuaccuuacgggacgauaucgugauucccccagguuag

SEQ ID NO: 233839 - RNA, 762 nt, Artificial Sequence
  derived and/or modified sequence
auggcugcagcaacuagagguuguaggccguggggcucucuccugggacuacuggggcugguaucugcugcugccgcugcaugggacuuagcuucacuccgcuguacgcucggggccuuuugugaaugugacuuucgcccugaucuuccaggccuggaaugugaucuugcacagcauuuagcgggacagcaucuugcuaaggcacuggugguuaaagcguugaaagcuuucgucagggacccugcgcccacgaagccccuaguuuuaucacuucacgguuggacaggaacagguaagagcuaugucagcucuuuauuggcccacuacuuguuccaaggcggauugaggucuccccgagugcaccauuucuccccuguucuccauuucccucaccccucacauauugagcgauauaagaaagaccuaaaaucuugggugcaagguaaccugaccgccuguggccgcucuuuguuucuguuugacgagauggauaagaugcccccugggcugauggaagugcuacguccguuuuuggggucauccugggucguguaugggacuaacuaucgcaaggcaauauucauuuucauucguugggguccugcucuccagugggcacaguggggagggcacuucagcgaaguucaguuauauucccuaaguuuaugcucccagcaaaacccugugccucacggccuuuccugggcuuuccccguuccaucagcaacucugcgcgacgacauagugauuccuccaggcuag

SEQ ID NO: 233840 - protein, 118 aa, Artificial Sequence
  derived and/or modified sequence
MASQSQGIQQLLQAEKRAAEKVADARKRKARRLKQAKEEAQMEVEQYRREREHEFQSKQQAAMGSQGNLSAEVEQATRRQVQGMQSSQQRNRERVLAQLLGMVCDVRPQVHPNYRISA

SEQ ID NO: 233841 - protein, 158 aa, Artificial Sequence
  derived and/or modified sequence
GGQQHAVPCPHGGPGGQGQPRAEAAGTGQGHRGGHRPGAVVGAAQHLHRGLGVAGGGPGPGPAVLQTRKARRLKQAKEEAQMEVEQYRREREHEFQSKQQAAMGSQGNLSAEVEQATRRQVQGMQSSQQRNRERVLAQLLGMVCDVRPQVHPNYRISA

SEQ ID NO: 233842 - protein, 77 aa, Artificial Sequence
  derived and/or modified sequence
MEVEQYRREREHEFQSKQQAAMGSQGNLSAEVEQATRRQVQGMQSSQQRNRERVLAQLLGMVCDVRPQVHPNYRISA

SEQ ID NO: 233843 - protein, 115 aa, Artificial Sequence
  derived and/or modified sequence
VEPGIQQLLQAEKRAAEKVADARKRKARRLKQAKEEAQMEVEQYRREREHEFQSKQQAAMGSQGNLSAEVEQATRRQVQGMQSSQQRNRERVLAQLLGMVCDVRPQVHPNYRISA

SEQ ID NO: 233844 - DNA, 357 bp, Artificial Sequence
  derived and/or modified sequence
atggcaagccagtctcaagggattcagcagctcctccaagccgaaaagcgagccgcagagaaggtagccgacgctcgcaagaggaaggccagaaggctcaaacaagccaaggaggaagcgcagatggaggtcgaacagtatcggcgagagagagagcatgagttccaatctaaacaacaggccgccatgggatcgcagggaaacctgtccgctgaggtggagcaggctactaggcgccaggtgcagggcatgcagtcttctcagcaacgaaatcgcgaaagggttctggcccaactgctgggaatggtctgcgacgtccgacctcaggtccatcccaattacaggatctccgcatag

SEQ ID NO: 233845 - DNA, 357 bp, Artificial Sequence
  derived and/or modified sequence
atggcctctcagagccagggcatccaacagttactgcaggcagagaaaagggccgctgaaaaagtcgctgatgcacgaaagcgaaaagctcgccgactgaagcaggctaaggaagaggcacagatggaggtggaacagtacagacgcgagagagagcatgagtttcaatcgaagcagcaggcagctatggggagtcagggcaatctctctgccgaggtggagcaggccacgagacgccaggtgcagggaatgcagtctagtcagcaaagaaatcgggagcgggtgttagcccaactcctgggcatggtttgcgacgttaggccccaggttcaccctaattatcgaatttccgcctag

SEQ ID NO: 233846 - DNA, 477 bp, Artificial Sequence
  derived and/or modified sequence
ggtgggcaacagcatgcggtaccatgccctcatggcggccctggagggcagggacagccccgggcagaagccgccgggaccggccagggacatcgagggggccataggcctggcgctgtcgtgggtgcggcacagcacctgcatagaggcctcggagtggctggaggtggacctggaccagggccggccgttctccagactaggaaggcacggcggcttaaacaggcaaaggaagaggcacagatggaggtggagcagtatagaagggaaagagagcatgaatttcaaagtaagcaacaggccgccatggggagtcagggcaacctttctgctgaggtcgaacaggccacaaggaggcaagtccagggcatgcagtctagccaacaaagaaacagggaacgggtactggcgcagcttctgggcatggtttgcgacgtgagaccgcaggttcaccccaactatcgaattagtgcatag

SEQ ID NO: 233847 - DNA, 357 bp, Artificial Sequence
  derived and/or modified sequence
atggcgtcccagtcccagggtattcagcagctgctccaagcagaaaaaagggctgcagaaaaggtggctgacgcaaggaaaaggaaagcaaggcggttgaagcaggcaaaggaggaggctcaaatggaagtggaacagtaccgacgagagagagaacacgaattccaatccaagcaacaggcggccatgggttcgcagggaaatttgagcgccgaggtggagcaggcaaccagacgccaggtgcaaggaatgcagtcttcacagcagcgaaacagggaacgggttctggcgcagctgctgggcatggtctgtgacgtgaggccgcaggtccaccctaactaccgcatcagcgcctag

SEQ ID NO: 233848 - DNA, 357 bp, Artificial Sequence
  derived and/or modified sequence
atggcaagtcagagccagggcattcaacagctgcttcaggccgagaaaagggctgcagaaaaagtggctgacgccaggaagaggaaggccaggagactgaagcaggctaaagaagaggcccagatggaggtggaacagtatcggagggaacgagagcatgaatttcagtcaaaacaacaggccgcgatgggatcccaggggaacctgagtgctgaggtcgagcaggcaacacgccgtcaggtgcaaggtatgcaatcatctcagcagaggaacagggaaagggttctcgctcagttgctaggcatggtttgtgacgtgagaccacaggtgcaccctaattaccggattagtgcctag

SEQ ID NO: 233849 - DNA, 357 bp, Artificial Sequence
  derived and/or modified sequence
atggcttcccaaagtcagggcattcagcagctgctgcaagccgaaaaaagagcagccgagaaggtggccgatgctagaaagcgtaaagcgcgtcggctaaagcaggccaaggaggaagctcagatggaagttgaacagtacagaagggagagggagcacgaattccagagcaagcagcaagcggcaatggggtcccaggggaatctgagtgctgaagtcgagcaggctacccgccggcaggtgcagggtatgcagagcagccaacaacgaaacagggaacgagttcttgcccagctgctgggaatggtgtgtgacgtgaggccccaggtgcatcctaactatcgcatttctgcctag

SEQ ID NO: 233850 - DNA, 357 bp, Artificial Sequence
  derived and/or modified sequence
atggcaagtcagagccaagggatacaacagcttctgcaggcagagaagagggcggccgagaaagtggcagatgcacgaaagcgtaaagcaagaagactcaagcaggccaaggaggaggcccagatggaggttgaacaatatcggagagaacgcgaacatgaattccagagtaaacagcaggcagccatggggtctcagggtaacctgtctgcagaggtggaacaggccacacgccgacaggtccaagggatgcagtcatcacagcagaggaatagagaaagagtgctggcacaactgttgggcatggtctgcgacgtgagaccgcaggttcatcccaactaccgcatttcagcgtag

SEQ ID NO: 233851 - DNA, 357 bp, Artificial Sequence
  derived and/or modified sequence
atggcttcacagtctcagggtatccaacagctccttcaggccgagaagcgggctgccgagaaagtagcggatgcgcggaagcggaaagcccgccgtttaaagcaggcaaaagaggaagcacagatggaggttgagcagtatcgccgagaaagagagcatgaattccaaagtaaacaacaggctgctatgggctctcagggcaacctatctgcagaagtcgaacaggcaactaggagacaggtccagggcatgcagagctcgcagcagcgcaaccgcgagagggtgcttgcacagctcctgggaatggtgtgcgatgtgcggccccaagttcaccctaattaccgcataagcgcatag

SEQ ID NO: 233852 - DNA, 348 bp, Artificial Sequence
  derived and/or modified sequence
gtggagcctggaatccagcagcttttgcaggctgaaaagcgagccgctgagaaggtggcggatgctcgcaagaggaaggctcgcagactcaagcaagcaaaagaggaggctcagatggaggtcgagcaatatcggcgtgagcgggagcacgagttccagtctaagcaacaggctgctatgggatctcaaggaaatctgtctgcggaagtggagcaggctacccgaaggcaggtgcagggtatgcagagtagccagcaaaggaatagggaaagggttctggctcagctgctgggaatggtgtgtgacgtcagaccacaggtccacccaaactaccgcatttctgcctag

SEQ ID NO: 233853 - DNA, 357 bp, Artificial Sequence
  derived and/or modified sequence
atggccagccagagccagggcatccagcagctgctgcaggccgagaagagagctgctgagaaggtggctgatgccaggaagaggaaggcccggcggctgaagcaggccaaggaggaggcccagatggaggtggagcagtaccgccgggagcgggagcacgagttccagagcaagcagcaggccgccatgggcagccagggcaacctgtctgctgaggtggagcaggccacccggcggcaggtgcagggcatgcagagcagccagcagaggaaccgggagcgggtgctggcccagctgctgggcatggtgtgtgatgtgcggccccaggtgcaccccaactaccgcatcagcgcctag

SEQ ID NO: 233854 - DNA, 477 bp, Artificial Sequence
  derived and/or modified sequence
gggggccagcagcacgctgtgccctgcccccatggaggccctgggggccagggccagcccagggctgaggccgccggcaccggccagggccacagaggaggccacaggcctggagctgtggtgggcgccgcccagcacctgcaccggggcctgggcgtggccggcggcggccctggccctggccctgctgtgctgcagaccaggaaggcccggcggctgaagcaggccaaggaggaggcccagatggaggtggagcagtaccgccgggagcgggagcacgagttccagagcaagcagcaggccgccatgggcagccagggcaacctgtctgctgaggtggagcaggccacccggcggcaggtgcagggcatgcagagcagccagcagaggaaccgggagcgggtgctggcccagctgctgggcatggtgtgtgatgtgcggccccaggtgcaccccaactaccgcatcagcgcctag

SEQ ID NO: 233855 - DNA, 348 bp, Artificial Sequence
  derived and/or modified sequence
gtggagcccggcatccagcagctgctgcaggccgagaagagagctgctgagaaggtggctgatgccaggaagaggaaggcccggcggctgaagcaggccaaggaggaggcccagatggaggtggagcagtacagaagagagcgggagcacgagttccagagcaagcagcaggccgccatgggcagccagggcaacctgtctgctgaggtggagcaggccacccggcggcaggtgcagggcatgcagagcagccagcagaggaaccgggagcgggtgctggcccagctgctgggcatggtgtgtgatgtgcggccccaggtgcaccccaactaccgcatcagcgcctag

SEQ ID NO: 233856 - DNA, 357 bp, Artificial Sequence
  derived and/or modified sequence
atggccagccagagccagggcatccagcagctgctgcaggccgagaaacgagcagccgaaaaggtggccgatgctaggaagcgcaaagctaggcggctcaaacaggcaaaggaagaggcccagatggaagttgagcagtaccgtagggaaagggagcacgagttccaatccaaacagcaggccgctatgggaagccagggcaatttatccgcggaagtggaacaggcgacccggcgccaggtccaagggatgcaaagttctcagcaacgcaatagggaaagagtgctcgctcagttactgggaatggtctgcgatgttagacctcaggtccatccaaactacagaatcagtgcttag

SEQ ID NO: 233857 - DNA, 357 bp, Artificial Sequence
  derived and/or modified sequence
atggccagccagagccagggcatccagcagctgctgcaggccgagaaacgggctgctgaaaaggtcgccgacgctaggaagcgcaaggctagaagattgaaacaagccaaggaggaggcgcagatggaggtagagcaataccgacgggagagagagcacgagtttcaaagcaaacagcaggcggcaatgggcagccaaggcaacctttctgccgaggttgagcaggctaccagaagacaggtgcaggggatgcagagttcgcagcagcggaaccgtgaaagagtcctagcccagctcctgggaatggtgtgtgacgtccggccccaagtgcatccaaactatagaattagtgcgtag

SEQ ID NO: 233858 - DNA, 477 bp, Artificial Sequence
  derived and/or modified sequence
ggcggccagcagcacgccgtgccctgcccccacggcggccccggcggccaggggcagccgagggccgaagctgctggcacaggacagggccaccgcgggggtcacagacccggtgccgtggtcggggctgctcagcatttgcacagaggcttaggggtagccggcgggggcccagggcccggcccagctgtgctgcagactagaaaagcccgaaggcttaagcaggccaaggaggaagctcagatggaagtagaacagtatcgacgggagcgagagcacgagtttcagtcaaaacagcaagctgcgatggggagtcaggggaacctgtcagccgaagtcgaacaggctacacgtcgccaggtgcaaggcatgcaaagcagtcaacagagaaatcgggagcgcgtattagcgcagctgcttgggatggtgtgtgatgtgagaccccaggtccaccccaattaccggatctccgcgtag

SEQ ID NO: 233859 - DNA, 357 bp, Artificial Sequence
  derived and/or modified sequence
atggccagccagagccagggcatccagcagctgctgcaggccgagaaaagagcagcagaaaaggtagccgacgcccgcaagcgcaaagctcgacgtctcaagcaggccaaggaggaagcccagatggaagtggaacagtataggcgggaaagagaacacgaattccagtcaaaacagcaagccgctatgggttcacagggaaatttgtccgctgaggtcgagcaggcaacacgacggcaggttcagggaatgcagtcatcacagcagaggaaccgggagagggtccttgctcagctcttggggatggtgtgcgatgtgcgtccacaggtgcatcccaattaccggatctcagcctag

SEQ ID NO: 233860 - DNA, 357 bp, Artificial Sequence
  derived and/or modified sequence
atggccagccagagccagggcatccagcagctgctgcaggccgagaaaagggcagcggagaaagtggctgacgcccgcaaacggaaggctcgcaggctaaagcaagccaaggaggaggcccaaatggaggtggaacagtaccggagagaacgggaacacgaattccagtctaaacagcaggcagccatgggcagccagggtaacctgagtgcagaagtcgaacaggctacgaggcgacaggttcagggtatgcagagtagccagcagagaaatcgggagcgtgtcctagcccaactactcgggatggtatgcgatgtgcggcctcaagtccacccaaattacaggatatcagcttag

SEQ ID NO: 233861 - DNA, 357 bp, Artificial Sequence
  derived and/or modified sequence
atggccagccagagccagggcatccagcagctgctgcaggccgagaaaagggccgccgagaaagtagctgatgctcgaaagagaaaagcccgacggctgaagcaggccaaagaagaggcccagatggaggtggagcagtatagacgcgagcgggagcatgaatttcagagtaagcagcaggcggctatgggctctcagggaaacctgagcgcagaagtggagcaggccacccgacgacaagttcagggtatgcagtcatctcagcagcgaaatcgtgagcgcgtcttagcacaactgctgggcatggtctgcgacgtgcgtcctcaagtacacccaaactataggataagtgcctag

SEQ ID NO: 233862 - DNA, 357 bp, Artificial Sequence
  derived and/or modified sequence
atggccagccagagccagggcatccagcagctgctgcaggccgagaagagagctgctgagaaggtcgctgatgcaaggaaacggaaggcacgcagactgaagcaagcaaaggaggaagcacagatggaagtcgagcagtatcgaagggagagggagcacgaatttcagtctaagcaacaagctgctatggggagccagggtaacctgagtgcagaagtagaacaggcaaccaggcggcaggtccagggcatgcaatccagccagcagcggaatagggagcgggtgctggcccagctgcttggaatggtttgtgatgtgaggcctcaggtgcatccaaactaccgaatttccgcttag

SEQ ID NO: 233863 - DNA, 357 bp, Artificial Sequence
  derived and/or modified sequence
atggccagccagagccagggcatccagcagctgctgcaggccgagaagcgagcggctgagaaggtggcggacgcccgtaagcgaaaggctaggaggctgaagcaggccaaggaggaagcacagatggaagtcgagcagtaccggagagagagagagcatgagtttcagagcaagcagcaggcagccatgggctcccagggcaacctgtccgcagaggttgaacaggctactagacgacaggtacaggggatgcagagctcgcagcaacgtaaccgggagcgggtgttggcacagttgttagggatggtctgtgacgtccgcccccaggtacatcctaactatcggatttccgcatag

SEQ ID NO: 233864 - DNA, 348 bp, Artificial Sequence
  derived and/or modified sequence
gtggagcccggcatccagcagctgctgcaggccgagaagcgggccgcagaaaaggtggcggacgctagaaagaggaaagcccgccggctgaaacaggcaaaggaagaggcccagatggaggtcgagcagtatcgccgcgagcgtgagcatgaatttcaatccaagcagcaagctgctatgggatcacagggaaacctgagcgccgaagttgagcaggccacgcgccgtcaggtccaggggatgcagagtagccagcagagaaatagagagagagtactggcacaattgttgggcatggtttgcgatgtgaggccccaggtgcaccccaactatcggatctctgcctag

SEQ ID NO: 233865 - DNA, 357 bp, Artificial Sequence
  derived and/or modified sequence
atggcctctcagtcccaggggatccaacagctgcttcaggccgagaagagggccgcagaaaaggtggcagacgcaaggaagcgcaaggccaggcgactcaaacaggccaaagaagaagcccaaatggaagttgaacagtatcggagggagcgcgaacacgagtttcaaagtaaacagcaggcggcaatgggctcccaaggaaatttgagtgccgaagtcgaacaggccactcgcagacaagtgcagggcatgcaatcgtcacaacagaggaatcgagaacgagtgctcgcgcaactcctcggaatggtgtgtgatgtgagaccacaggtccatccaaactaccgcatctcagcctag

SEQ ID NO: 233866 - DNA, 357 bp, Artificial Sequence
  derived and/or modified sequence
atggcatcccagtcacaggggatccaacagttactgcaggcagaaaaacgcgcagccgaaaaggtggccgatgccaggaaacgtaaagccagaaggttaaagcaggccaaggaagaggctcagatggaggtcgagcagtacagaagggagcgcgaacacgagttccaatcgaaacagcaggctgccatgggaagccaaggtaatctgtcagcagaggtggagcaggcaacgcgacggcaagtccagggaatgcaatctagtcagcagcgtaatagagagagggtcctggcccaactactcggtatggtgtgcgacgtgcgtccacaggtccacccgaattatagaatctcagcctag

SEQ ID NO: 233867 - DNA, 477 bp, Artificial Sequence
  derived and/or modified sequence
ggaggccaacagcacgcggtgccatgtccgcatggcggaccaggtggtcaggggcagcctagggcagaggccgctggcacaggacagggccatcggggaggacatcggcctggagctgtggtaggggctgcccaacatctccaccgaggtctaggagtagccggaggcggacccggaccgggaccggcagtgctgcagactaggaaggcccgtaggctcaagcaggcaaaggaggaggcacaaatggaggtggaacagtaccgtagggaacgggaacatgagttccagtctaagcagcaggcagcaatgggcagccaaggtaatctgtccgctgaagtagaacaagccactaggagacaggttcaagggatgcagtccagccagcagcgaaatcgagagcgagtgctggcacagcttctcggcatggtgtgtgatgttagaccacaggttcaccccaactaccgcatctcagcctag

SEQ ID NO: 233868 - DNA, 357 bp, Artificial Sequence
  derived and/or modified sequence
atggcctcccagtctcaaggaatccagcagctccttcaggccgagaaaagagccgctgagaaggtggccgatgcgaggaagcgcaaagccagacgcctcaagcaggcaaaggaggaggcccagatggaggtcgagcagtatcgacgggagagggagcacgaatttcagagcaaacaacaagcagcgatggggtctcaggggaatctatctgccgaagtggagcaagcgacacgcagacaggtacagggcatgcaatcctctcagcagaggaaccgcgagagggtgttagcacagctgctgggtatggtgtgtgacgtgcggcctcaagtacatcccaactatcggatctctgcctag

SEQ ID NO: 233869 - DNA, 357 bp, Artificial Sequence
  derived and/or modified sequence
atggctagccagtctcaggggatacagcaactgttacaggcagaaaagagagccgcagagaaagttgctgacgcccgaaaacggaaagcacggcgactcaaacaggccaaagaagaggcccagatggaggtcgaacagtatagaagggagcgtgaacacgaattccaaagtaagcagcaagccgctatggggagccagggcaacctgtcagccgaagtggaacaagcaaccaggcgccaggtgcaggggatgcaaagctcacagcagcgaaatcgggaaagagtgttggctcagctcttgggcatggtgtgcgacgtccgaccacaggtgcaccctaactacagaatcagcgcgtag

SEQ ID NO: 233870 - DNA, 357 bp, Artificial Sequence
  derived and/or modified sequence
atggcgtctcagtcacagggaatccaacagctgctccaagccgaaaaacgcgctgccgagaaggtcgccgatgcgaggaagcgaaaagctagacggctgaagcaggccaaggaggaagcacagatggaggtggaacagtatagacgcgaacgggagcatgagttccagagtaagcagcaagcagccatgggctcccaaggaaacctttctgccgaagttgaacaggcaactagacgtcaggttcagggaatgcaaagctcacaacagagaaatcgggaacgcgtcctcgcccaactgctgggaatggtgtgcgatgtgaggcctcaggtccaccccaattaccgcattagcgcttag

SEQ ID NO: 233871 - DNA, 357 bp, Artificial Sequence
  derived and/or modified sequence
atggcctcccagtcccagggaattcaacagttattgcaagcagaaaaaagagctgctgagaaagtggccgatgctagaaaaaggaaggctagacgcctcaaacaagccaaggaagaagcacagatggaggttgagcagtacagaagggagagagagcacgaattccagtcaaaacagcaggcagccatgggaagccaaggcaacctcagcgccgaagttgaacaggcaacaagacgacaggttcaggggatgcaaagtagccagcaaagaaatagggaaagagtccttgcacagctgcttgggatggtgtgcgacgtcaggccgcaggtgcatccgaactacagaatctctgcatag

SEQ ID NO: 233872 - DNA, 357 bp, Artificial Sequence
  derived and/or modified sequence
atggctagccagtcccagggaatccagcagctgctgcaggccgagaaacgtgcagcagagaaggtagcagatgccagaaagcgcaaagcacgaagactcaaacaggctaaggaagaggctcagatggaggttgagcagtaccggagggagcgagagcatgagtttcagtccaagcagcaagctgctatgggttcccaggggaatctctcagccgaggtggagcaggctactaggcgccaggtgcagggtatgcagtcatcacagcagcgcaatcgggaacgtgtgcttgctcagcttctcgggatggtgtgtgacgtccggccacaggtgcatcctaattatcgtattagcgcctag

SEQ ID NO: 233873 - DNA, 348 bp, Artificial Sequence
  derived and/or modified sequence
gtcgagccagggatccagcagctcctgcaggcggaaaaacgagcagctgagaaggtggcagacgcccgtaaaaggaaggcaaggagactgaagcaagcgaaagaggaggctcagatggaggttgagcaatataggcgcgaaagggagcatgagttccagtctaagcaacaggcagctatgggatcacaaggaaacctttcagccgaggtggaacaggcaacccgccgacaggtgcaagggatgcaaagcagccagcaacggaaccgcgaacgtgtactggctcagcttctaggaatggtatgtgatgtcaggcctcaggtccaccccaattacagaatctccgcatag

SEQ ID NO: 233874 - DNA, 1588 bp, Artificial Sequence
  derived and/or modified sequence
cctgttgtaagcccgcagctttgggcctggtctctgctgctcccaggcggcccctttgggtactgcctgagcaagaagtgctggagaggaggaccagtcatcaataggaggatgagattgggagagacactcggtgcaggaggctgagtgagcaggggagcactaagacccaggggtagtggaggactgcagcaacgagctggaggaggagaagtaagcggtggggggtgggagccatctggtactttgacagcattcaaaacagcatcggccataacaacagaaatggccagtcagtcccaaggtatccagcagcttctgcaagctgagaagcgggcagctgagaaggtggcagatgccagaaagaggaaggcccggcgactgaagcaggcaaaggaggaggcacagatggaggtggagcaataccgcagagagcgagagcacgaattccagagcaagcagcaggcggccatgggctcccaggggaacctgtctgctgaggtggagcaggctacaaggcgccaggtgcagggcatgcagagctcccagcagagaaaccgagagcgtgtcctggcccagcttcttggcatggtctgcgacgtcaggccccaggtccaccccaactaccggatttctgcctagggccaccgtagggcctgactccttctgccagttccctccctcaaagaaatcctccaatcaaaatcacctcccaccataatccctgtcttctttccatcccctagaaatcctgggaggcaggatccaataattttcctgtgacacttataaatatcctgctcacatctgaatctccttgttgttctttaaccctcactgggactttgtaaacttccaagtcattctcacctaaaccctctgtgaaatttgtaatatggggaagtaggaatgtggaaaacatcctgacttcagtgtctggccgatgtgggtccctctcttgaccctgtcacttgctggctgtgaaaccaggacaagctacttaacttggtagcctcgatgtcctcctctgtgaaactgggatgataataatgcctaccttgtgagggttgcttcaatgattaggaatcattctgtaaagtctagcacagttccttgcatgttgtagcagtgattcagtaagtagcaaccctgtgatactattaccaccacctgctcactggtcaaaacctacacagctgtttcctcacgtccatcactggctctctaattccacttgttcattctgtgaccctagttattttctgaaaaattggttcttctcttttcccagagaccttctgatctccaaaaagaggagatgactacatttagcccctctcttataattccaggtagataactgcattttgtagcctctctttgtttttcttttgctgatctttgtctttattagattttcctcctttcctatttccccaaagacttatcagatgctcattgctttctaagatctaaaatgatactgtgttccctcatatgcatgcccttcctttctatatccttgacaccttactttcccattgtaacaataaaaaaagtatcaataaaataattattggcaaataaa

SEQ ID NO: 233875 - DNA, 1351 bp, Artificial Sequence
  derived and/or modified sequence
tctggtactttgacagcattcaaaacagcatcggccataacaacagaaatggccagtcagtcccaaggtatccagcagcttctgcaagctgagaagcgggcagctgagaaggtggcagatgccagaaagaggaaggcccggcgactgaagcaggcaaaggaggaggcacagatggaggtggagcaataccgcagagagcgagagcacgaattccagagcaagcagcaggcggccatgggctcccaggggaacctgtctgctgaggtggagcaggctacaaggcgccaggtgcagggcatgcagagctcccagcagagaaaccgagagcgtgtcctggcccagcttcttggcatggtctgcgacgtcaggccccaggtccaccccaactaccggatttctgcctagggccaccgtagggcctgactccttctgccagttccctccctcaaagaaatcctccaatcaaaatcacctcccaccataatccctgtcttctttccatcccctagaaatcctgggaggcaggatccaataattttcctgtgacacttataaatatcctgctcacatctgaatctccttgttgttctttaaccctcactgggactttgtaaacttccaagtcattctcacctaaaccctctgtgaaatttgtaatatggggaagtaggaatgtggaaaacatcctgacttcagtgtctggccgatgtgggtccctctcttgaccctgtcacttgctggctgtgaaaccaggacaagctacttaacttggtagcctcgatgtcctcctctgtgaaactgggatgataataatgcctaccttgtgagggttgcttcaatgattaggaatcattctgtaaagtctagcacagttccttgcatgttgtagcagtgattcagtaagtagcaaccctgtgatactattaccaccacctgctcactggtcaaaacctacacagctgtttcctcacgtccatcactggctctctaattccacttgttcattctgtgaccctagttattttctgaaaaattggttcttctcttttcccagagaccttctgatctccaaaaagaggagatgactacatttagcccctctcttataattccaggtagataactgcattttgtagcctctctttgtttttcttttgctgatctttgtctttattagattttcctcctttcctatttccccaaagacttatcagatgctcattgctttctaagatctaaaatgatactgtgttccctcatatgcatgcccttcctttctatatccttgacaccttactttcccattgtaacaataaaaaaagtatcaataaaataattattggcaaataaa

SEQ ID NO: 233876 - DNA, 609 bp, Artificial Sequence
  derived and/or modified sequence
ggcgggcagcagcatgcagtgccgtgtccccatggcggtcctggtgggcagggtcagccccgagccgaagcagcaggcacagggcaggggcatcgtggcgggcacaggcccggtgcagtggtgggggctgcccagcatctacatcgaggcctgggtgtcgctggaggagggcctgggcccggaccagccgtcctgcagacaaggaaggcccggcgactgaagcaggcaaaggaggaggcacagatggaggtggagcaataccgcagagagcgagagcacgaattccagagcaagcagcaggcggccatgggctcccaggggaacctgtctgctgaggtggagcaggctacaaggcgccaggtgcagggcatgcagagctcccagcagagaaaccgagagcgtgtcctggcccagcttcttggcatggtctgcgacgtcaggccccaggtccaccccaactaccggatttctgcctagggccaccgtagggcctgactccttctgccagttccctccctcaaagaaatcctccaatcaaaatcacctcccaccataatccctgtcttctttccatcccctagaaatcctgggaggcaggatccaataatt

SEQ ID NO: 233877 - DNA, 1351 bp, Artificial Sequence
  derived and/or modified sequence
tctggtactttgacagcattcaaaacagcatcggccataacaacagaaatggccagtcagtcccaaggtatccagcagcttctgcaagctgagaagcgggcagctgagaaggtggcagatgccagaaagaggaaggcccggcgactgaagcaggcaaaggaggaggcacagatggaggtggagcaataccgcagagagcgagagcacgaattccagagcaagcagcaggcggccatgggctcccaggggaacctgtctgctgaggtggagcaggctacaaggcgccaggtgcagggcatgcagagctcccagcagagaaaccgagagcgtgtcctggcccagcttcttggcatggtctgcgacgtcaggccccaggtccaccccaactaccggatttctgcctagggccaccgtagggcctgactccttctgccagttccctccctcaaagaaatcctccaatcaaaatcacctcccaccataatccctgtcttctttccatcccctagaaatcctgggaggcaggatccaataattttcctgtgacacttataaatatcctgctcacatctgaatctccttgttgttctttaaccctcactgggactttgtaaacttccaagtcattctcacctaaaccctctgtgaaatttgtaatatggggaagtaggaatgtggaaaacatcctgacttcagtgtctggccgatgtgggtccctctcttgaccctgtcacttgctggctgtgaaaccaggacaagctacttaacttggtagcctcgatgtcctcctctgtgaaactgggatgataataatgcctaccttgtgagggttgcttcaatgattaggaatcattctgtaaagtctagcagagttccttgcatgttgtagcagtgattcagtaagtagcaaccctgtgatactattaccaccacctgctcactggtcaaaacctacacagctgtttcctcacgtccatcactggctctctaattccacttgttcattctgtgaccctagttattttctgaaaaattggttcttctcttttcccagagaccttctgatctccaaaaagaggagatgactacatttagcccctctcttataattccaggtagataactgcattttgtagcctctctttgtttttcttttgctgatctttgtctttattagattttcctcctttcctatttccccaaagacttatcagatgctcattgctttctaagatctaaaatgatactgtgttccctcatatgcatgcccttcctttctatatccttgacaccttactttcccattgtaacaataaaaaaagtatcaataaaataattattggcaaataaa

SEQ ID NO: 233878 - DNA, 662 bp, Artificial Sequence
  derived and/or modified sequence
ctaacctgttgtaagcccgcagctttgggcctggtctctgctgctcccaggcggcccctttgggtactgcctgagcaagaagtgctggagaggaggaccagtcatcaataggaggatgagattgggagagacactcggtgcaggaggctgagtgagcaggggagcactaagacccaggggtagtggaggactgcagcaacgagctggaggaggagaaggaaggcccggcgactgaagcaggcaaaggaggaggcacagatggaggtggagcaataccgcagagagcgagagcacgaattccagagcaagcagcaggcggccatgggctcccaggggaacctgtctgctgaggtggagcaggctacaaggcgccaggtgcagggcatgcagagctcccagcagagaaaccgagagcgtgtcctggcccagcttcttggcatggtctgcgacgtcaggccccaggtccaccccaactaccggatttctgcctagggccaccgtagggcctgactccttctgccagttccctccctcaaagaaatcctccaatcaaaatcacctcccaccataatccctgtcttctttccatcccctagaaatcctgggaggcaggatccaataattttcctgtgacacttataaatatcctgctcacatctgaa

SEQ ID NO: 233879 - DNA, 1294 bp, Artificial Sequence
  derived and/or modified sequence
gtggaaccaggtatccagcagcttctgcaagctgagaagcgggcagctgagaaggtggcagatgccagaaagaggaaggcccggcgactgaagcaggcaaaggaggaggcacagatggaggtggagcaataccgcagagagcgagagcacgaattccagagcaagcagcaggcggccatgggctcccaggggaacctgtctgctgaggtggagcaggctacaaggcgccaggtgcagggcatgcagagctcccagcagagaaaccgagagcgtgtcctggcccagcttcttggcatggtctgcgacgtcaggccccaggtccaccccaactaccggatttctgcctagggccaccgtagggcctgactccttctgccagttccctccctcaaagaaatcctccaatcaaaatcacctcccaccataatccctgtcttctttccatcccctagaaatcctgggaggcaggatccaataattttcctgtgacacttataaatatcctgctcacatctgaatctccttgttgttctttaaccctcactgggactttgtaaacttccaagtcattctcacctaaaccctctgtgaaatttgtaatatggggaagtaggaatgtggaaaacatcctgacttcagtgtctggccgatgtgggtccctctcttgaccctgtcacttgctggctgtgaaaccaggacaagctacttaacttggtagcctcgatgtcctcctctgtgaaactgggatgataataatgcctaccttgtgagggttgcttcaatgattaggaatcattctgtaaagtctagcacagttccttgcatgttgtagcagtgattcagtaagtagcaaccctgtgatactattaccaccacctgctcactggtcaaaacctacacagctgtttcctcacgtccatcactggctctctaattccacttgttcattctgtgaccctagttattttctgaaaaattggttcttctcttttcccagagaccttctgatctccaaaaagaggagatgactacatttagcccctctcttataattccaggtagataactgcattttgtagcctctctttgtttttcttttgctgatctttgtctttattagattttcctcctttcctatttccccaaagacttatcagatgctcattgctttctaagatctaaaatgatactgtgttccctcatatgcatgcccttcctttctatatccttgacaccttactttcccattgtaacaataaaaaaagtatcaataaaataattattggcaaataaa

SEQ ID NO: 233880 - DNA, 357 bp, Artificial Sequence
  derived and/or modified sequence
atggccagccagagccagggcatccagcagctgctgcaggccgagaagagagccgccgagaaggtggccgacgccagaaagagaaaggccagaagactgaagcaggccaaggaggaggcccagatggaggtggagcagtacagaagagagagagagcacgagttccagagcaagcagcaggccgccatgggcagccagggcaacctgagcgccgaggtggagcaggccaccagaagacaggtgcagggcatgcagagcagccagcagagaaacagagagagagtgctggcccagctgctgggcatggtgtgcgacgtgagaccccaggtgcaccccaactacagaatcagcgcctag

SEQ ID NO: 233881 - DNA, 477 bp, Artificial Sequence
  derived and/or modified sequence
ggcggccagcagcacgccgtgccctgcccccacggcggccccggcggccagggccagcccagagccgaggccgccggcaccggccagggccacagaggcggccacagacccggcgccgtggtgggcgccgcccagcacctgcacagaggcctgggcgtggccggcggcggccccggccccggccccgccgtgctgcagaccagaaaggccagaagactgaagcaggccaaggaggaggcccagatggaggtggagcagtacagaagagagagagagcacgagttccagagcaagcagcaggccgccatgggcagccagggcaacctgagcgccgaggtggagcaggccaccagaagacaggtgcagggcatgcagagcagccagcagagaaacagagagagagtgctggcccagctgctgggcatggtgtgcgacgtgagaccccaggtgcaccccaactacagaatcagcgcctag

SEQ ID NO: 233882 - DNA, 348 bp, Artificial Sequence
  derived and/or modified sequence
gtggagcccggcatccagcagctgctgcaggccgagaagagagccgccgagaaggtggccgacgccagaaagagaaaggccagaagactgaagcaggccaaggaggaggcccagatggaggtggagcagtacagaagagagagagagcacgagttccagagcaagcagcaggccgccatgggcagccagggcaacctgagcgccgaggtggagcaggccaccagaagacaggtgcagggcatgcagagcagccagcagagaaacagagagagagtgctggcccagctgctgggcatggtgtgcgacgtgagaccccaggtgcaccccaactacagaatcagcgcctag

SEQ ID NO: 233883 - protein, 1068 aa, Artificial Sequence
  derived and/or modified sequence
MFTLSQTSRAWFIDRARQAREERLVQKERERAAVVIQAHVRSFLCRSRLQRDIRREIDDFFKADDPESTKRSALCIFKIARKLLFLFRIKEDNERFEKLCRSILSSMDAENEPKVWYVSLACSKDLTLLWIQQIKNILWYCCDFLKQLKPEILQDSRLITLYLTMLVTFTDTSTWKILRGKGESLRPAMNHICANIMGHLNQHGFYSVLQILLTRGLARPRPCLSKGTLTAAFSLALRPVIAAQFSDNLIRPFLIHIMSVPALVTHLSTVTPERLTVLESHDMLRKFIIFLRDQDRCRDVCESLEGCHTLCLMGNLLHLGSLSPRVLEEETDGFVSLLTQTLCYCRKYVSQKKSNLTHWHPVLGWFSQSVDYGLNESMHLITKQLQFLWGVPLIRIFFCDILSKKLLESQEPAHAQPASPQNVLPVKSLLKRAFQKSASVRNILRPVGGKRVDSAEVQKVCNICVLYQTSLTTLTQIRLQILTGLTYLDDLLPKLWAFICELGPHGGLKLFLECLNNDTEESKQLLAMLMLFCDCSRHLITILDDIEVYEEQISFKLEELVTISSFLNSFVFKMIWDGIVENAKGETLELFQSVHGWLMVLYERDCRRRFTPEDHWLRKDLKPSVLFQELDRDRKRAQLILQYIPHVIPHKNRVLLFRTMVTKEKEKLGLVETSSASPHVTHITIRRSRMLEDGYEQLRQLSQHAMKGVIRVKFVNDLGVDEAGIDQDGVFKEFLEEIIKRVFDPALNLFKTTSGDERLYPSPTSYIHENYLQLFEFVGKMLGKAVYEGIVVDVPFASFFLSQLLGHHHSVFYSSVDELPSLDSEFYKNLTSIKRYDGDITDLGLTLSYDEDVMGQLVCHELIPGGKTIPVTNENKISYIHLMAHFRMHTQIKNQTAALISGFRSIIKPEWIRMFSTPELQRLISGDNAEIDLEDLKKHTVYYGGFHGSHRVIIWLWDILASDFTPDERAMFLKFVTSCSRPPLLGFAYLKPPFSIRCVEVSDDQDTGDTLGSVLRGFFTIRKREPGGRLPTSSTCFNLLKLPNYSKKSVLREKLRYAISMNTGFELS

SEQ ID NO: 233884 - protein, 872 aa, Artificial Sequence
  derived and/or modified sequence
MFTLSQTSRAWFIDRARQAREERLVQKERERAAVVIQAHVRSFLCRSRLQRDIRREIDDFFKADDPESTKRSALCIFKIARKLLFLFRIKEDNERFEKLCRSILSSMDAENEPKVWYVSLACSKDLTLLWIQQIKNILWYCCDFLKQLKPEILQDSRLITLYLTMLVTFTDTSTWKILRGKGESLRPAMNHICANIMGHLNQHGFYSVLQILLTRGLARPRPCLSKGTLTAAFSLALRPVIAAQFSDNLIRPFLIHIMSVPALVTHLSTVTPERLTVLESHDMLRKFIIFLRDQDRCRDVCESLEGCHTLCLMGNLLHLGSLSPRVLEEETDGFVSLLTQTLCYCRKYVSQKKSNLTHWHPVLGWFSQSVDYGLNESMHLITKQLQFLWGVPLIRIFFCDILSKKLLESQEPAHAQPASPQNVLPVKSLLKRAFQKSASVRNILRPVGGKRVDSAEVQKVCNICVLYQTSLTTLTQIRLQILTGLTYLDDLLPKLWAFICELGPHGGLKLFLECLNNDTEESKQLLAMLMLFCDCSRHLITILDDIEVYEEQISFKLEELVTISSFLNSFVFKMIWDGIVENAKGETLELFQSVHGWLMVLYERDCRRRFTPEDHWLRKDLKPSVLFQELDRDRKRAQLILQYIPHVIPHKNRVLLFRTMVTKEKEKLGLVETSSASPHVTHITIRRSRMLEDGYEQLRQLSQHAMKGVIRVKFVNDLGVDEAGIDQDGVFKEFLEEIIKRVFDPALNLFKTTSGDERLYPSPTSYIHENYLQLFEFVGKMLGKAVYEGIVVDVPFASFFLSQLLGHHHSVFYSSVDELPSLDSEFYKNLTSIKRYDGDITDLGLTLSYDEDVMGQLVCHELIPGGKTIPVT

SEQ ID NO: 233885 - DNA, 2127 bp, Artificial Sequence
  derived and/or modified sequence
atgttcaccctgagccagaccagcagagcctggttcatcgacagagccagacaggccagagaggagagactggtgcagaaggagagagagagagccgccgtggtgatccaggcccacgtgagaagcttcctgtgcagaagcagactgcagagagacatcagaagagagatcgacgacttcttcaaggccgacgaccccgagagcaccaagagaagcgccctgtgcatcttcaagatcgccagaaagctgctgttcctgttcagaatcaaggaggacaacgagagattcgagaagctgtgcagaagcatcctgagcagcatggacgccgagaacgagcccaaggtgtggtacgtgagcctggcctgcagcaaggacctgaccctgctgtggatccagcagatcaagaacatcctgtggtactgctgcgacttcctgaagcagctgaagcccgagatcctgcaggacagcagactgatcaccctgtacctgaccatgctggtgaccttcaccgacaccagcacctggaagatcctgagaggcaagggcgagagcctgagacccgccatgaaccacatctgcgccaacatcatgggccacctgaaccagcacggcttctacagcgtgctgcagatcctgctgaccagaggcctggccagacccagaccctgcctgagcaagggcaccctgaccgccgccttcagcctggccctgagacccgtgatcgccgcccagttcagcgacaacctgatcagacccttcctgatccacatcatgagcgtgcccgccctggtgacccacctgagcaccgtgacccccgagagactgaccgtgctggagagccacgacatgctgagaaagttcatcatcttcctgagagaccaggacagatgcagagacgtgtgcgagagcctggagggctgccacaccctgtgcctgatgggcaacctgctgcacctgggcagcctgagccccagagtgctggaggaggagaccgacggcttcgtgagcctgctgacccagaccctgtgctactgcagaaagtacgtgagccagaagaagagcaacctgacccactggcaccccgtgctgggctggttcagccagagcgtggactacggcctgaacgagagcatgcacctgatcaccaagcagctgcagttcctgtggggcgtgcccctgatcagaatcttcttctgcgacatcctgagcaagaagctgctggagagccaggagcccgcccacgcccagcccgccagcccccagaacgtgctgcccgtgaagagcctgctgaagagagccttccagaagagcgccagcgtgagaaacatcctgagacccgtgggcggcaagagagtggacagcgccgaggtgcagaaggtgtgcaacatctgcgtgctgtaccagaccagcctgaccaccctgacccagatcagactgcagatcctgaccggcctgacctacctggacgacctgctgcccaagctgtgggccttcatctgcgagctgggcccccacggcggcctgaagctgttcctggagtgcctgaacaacgacaccgaggagagcaagcagctgctggccatgctgatgctgttctgcgactgcagcagacacctgatcaccatcctggacgacatcgaggtgtacgaggagcagatcagcttcaagctggaggagctggtgaccatcagcagcttcctgaacagcttcgtgttcaagatgatctgggacggcatcgtggagaacgccaagggcgagaccctggagctgttccagagcgtgcacggctggctgatggtgctgtacgagagagactgcagaagaagattcacccccgaggaccactggctgagaaaggacctgaagcccagcgtgctgttccaggagctggacagagacagaaagagagcccagctgatcctgcagtacatcccccacgtgatcccccacaagaacagagtgctgctgttcagaaccatggtgaccaaggagaaggagaagctgggcctggtggagaccagcagcgccagcccccacgtgacccacatcaccatcagaagaagcagaatgctggagagcctgttcgagtgcccctggcccctggtgatcaacgccgagagctgctag

SEQ ID NO: 233886 - DNA, 3207 bp, Artificial Sequence
  derived and/or modified sequence
atgttcaccctgagccagaccagcagagcctggttcatcgacagagccagacaggccagagaggagagactggtgcagaaggagagagagagagccgccgtggtgatccaggcccacgtgagaagcttcctgtgcagaagcagactgcagagagacatcagaagagagatcgacgacttcttcaaggccgacgaccccgagagcaccaagagaagcgccctgtgcatcttcaagatcgccagaaagctgctgttcctgttcagaatcaaggaggacaacgagagattcgagaagctgtgcagaagcatcctgagcagcatggacgccgagaacgagcccaaggtgtggtacgtgagcctggcctgcagcaaggacctgaccctgctgtggatccagcagatcaagaacatcctgtggtactgctgcgacttcctgaagcagctgaagcccgagatcctgcaggacagcagactgatcaccctgtacctgaccatgctggtgaccttcaccgacaccagcacctggaagatcctgagaggcaagggcgagagcctgagacccgccatgaaccacatctgcgccaacatcatgggccacctgaaccagcacggcttctacagcgtgctgcagatcctgctgaccagaggcctggccagacccagaccctgcctgagcaagggcaccctgaccgccgccttcagcctggccctgagacccgtgatcgccgcccagttcagcgacaacctgatcagacccttcctgatccacatcatgagcgtgcccgccctggtgacccacctgagcaccgtgacccccgagagactgaccgtgctggagagccacgacatgctgagaaagttcatcatcttcctgagagaccaggacagatgcagagacgtgtgcgagagcctggagggctgccacaccctgtgcctgatgggcaacctgctgcacctgggcagcctgagccccagagtgctggaggaggagaccgacggcttcgtgagcctgctgacccagaccctgtgctactgcagaaagtacgtgagccagaagaagagcaacctgacccactggcaccccgtgctgggctggttcagccagagcgtggactacggcctgaacgagagcatgcacctgatcaccaagcagctgcagttcctgtggggcgtgcccctgatcagaatcttcttctgcgacatcctgagcaagaagctgctggagagccaggagcccgcccacgcccagcccgccagcccccagaacgtgctgcccgtgaagagcctgctgaagagagccttccagaagagcgccagcgtgagaaacatcctgagacccgtgggcggcaagagagtggacagcgccgaggtgcagaaggtgtgcaacatctgcgtgctgtaccagaccagcctgaccaccctgacccagatcagactgcagatcctgaccggcctgacctacctggacgacctgctgcccaagctgtgggccttcatctgcgagctgggcccccacggcggcctgaagctgttcctggagtgcctgaacaacgacaccgaggagagcaagcagctgctggccatgctgatgctgttctgcgactgcagcagacacctgatcaccatcctggacgacatcgaggtgtacgaggagcagatcagcttcaagctggaggagctggtgaccatcagcagcttcctgaacagcttcgtgttcaagatgatctgggacggcatcgtggagaacgccaagggcgagaccctggagctgttccagagcgtgcacggctggctgatggtgctgtacgagagagactgcagaagaagattcacccccgaggaccactggctgagaaaggacctgaagcccagcgtgctgttccaggagctggacagagacagaaagagagcccagctgatcctgcagtacatcccccacgtgatcccccacaagaacagagtgctgctgttcagaaccatggtgaccaaggagaaggagaagctgggcctggtggagaccagcagcgccagcccccacgtgacccacatcaccatcagaagaagcagaatgctggaggacggctacgagcagctgagacagctgagccagcacgccatgaagggcgtgatcagagtgaagttcgtgaacgacctgggcgtggacgaggccggcatcgaccaggacggcgtgttcaaggagttcctggaggagatcatcaagagagtgttcgaccccgccctgaacctgttcaagaccaccagcggcgacgagagactgtaccccagccccaccagctacatccacgagaactacctgcagctgttcgagttcgtgggcaagatgctgggcaaggccgtgtacgagggcatcgtggtggacgtgcccttcgccagcttcttcctgagccagctgctgggccaccaccacagcgtgttctacagcagcgtggacgagctgcccagcctggacagcgagttctacaagaacctgaccagcatcaagagatacgacggcgacatcaccgacctgggcctgaccctgagctacgacgaggacgtgatgggccagctggtgtgccacgagctgatccccggcggcaagaccatccccgtgaccaacgagaacaagatcagctacatccacctgatggcccacttcagaatgcacacccagatcaagaaccagaccgccgccctgatcagcggcttcagaagcatcatcaagcccgagtggatcagaatgttcagcacccccgagctgcagagactgatcagcggcgacaacgccgagatcgacctggaggacctgaagaagcacaccgtgtactacggcggcttccacggcagccacagagtgatcatctggctgtgggacatcctggccagcgacttcacccccgacgagagagccatgttcctgaagttcgtgaccagctgcagcagaccccccctgctgggcttcgcctacctgaagccccccttcagcatcagatgcgtggaggtgagcgacgaccaggacaccggcgacaccctgggcagcgtgctgagaggcttcttcaccatcagaaagagagagcccggcggcagactgcccaccagcagcacctgcttcaacctgctgaagctgcccaactacagcaagaagagcgtgctgagagagaagctgagatacgccatcagcatgaacaccggcttcgagctgagctag

SEQ ID NO: 233887 - DNA, 2619 bp, Artificial Sequence
  derived and/or modified sequence
atgttcaccctgagccagaccagcagagcctggttcatcgacagagccagacaggccagagaggagagactggtgcagaaggagagagagagagccgccgtggtgatccaggcccacgtgagaagcttcctgtgcagaagcagactgcagagagacatcagaagagagatcgacgacttcttcaaggccgacgaccccgagagcaccaagagaagcgccctgtgcatcttcaagatcgccagaaagctgctgttcctgttcagaatcaaggaggacaacgagagattcgagaagctgtgcagaagcatcctgagcagcatggacgccgagaacgagcccaaggtgtggtacgtgagcctggcctgcagcaaggacctgaccctgctgtggatccagcagatcaagaacatcctgtggtactgctgcgacttcctgaagcagctgaagcccgagatcctgcaggacagcagactgatcaccctgtacctgaccatgctggtgaccttcaccgacaccagcacctggaagatcctgagaggcaagggcgagagcctgagacccgccatgaaccacatctgcgccaacatcatgggccacctgaaccagcacggcttctacagcgtgctgcagatcctgctgaccagaggcctggccagacccagaccctgcctgagcaagggcaccctgaccgccgccttcagcctggccctgagacccgtgatcgccgcccagttcagcgacaacctgatcagacccttcctgatccacatcatgagcgtgcccgccctggtgacccacctgagcaccgtgacccccgagagactgaccgtgctggagagccacgacatgctgagaaagttcatcatcttcctgagagaccaggacagatgcagagacgtgtgcgagagcctggagggctgccacaccctgtgcctgatgggcaacctgctgcacctgggcagcctgagccccagagtgctggaggaggagaccgacggcttcgtgagcctgctgacccagaccctgtgctactgcagaaagtacgtgagccagaagaagagcaacctgacccactggcaccccgtgctgggctggttcagccagagcgtggactacggcctgaacgagagcatgcacctgatcaccaagcagctgcagttcctgtggggcgtgcccctgatcagaatcttcttctgcgacatcctgagcaagaagctgctggagagccaggagcccgcccacgcccagcccgccagcccccagaacgtgctgcccgtgaagagcctgctgaagagagccttccagaagagcgccagcgtgagaaacatcctgagacccgtgggcggcaagagagtggacagcgccgaggtgcagaaggtgtgcaacatctgcgtgctgtaccagaccagcctgaccaccctgacccagatcagactgcagatcctgaccggcctgacctacctggacgacctgctgcccaagctgtgggccttcatctgcgagctgggcccccacggcggcctgaagctgttcctggagtgcctgaacaacgacaccgaggagagcaagcagctgctggccatgctgatgctgttctgcgactgcagcagacacctgatcaccatcctggacgacatcgaggtgtacgaggagcagatcagcttcaagctggaggagctggtgaccatcagcagcttcctgaacagcttcgtgttcaagatgatctgggacggcatcgtggagaacgccaagggcgagaccctggagctgttccagagcgtgcacggctggctgatggtgctgtacgagagagactgcagaagaagattcacccccgaggaccactggctgagaaaggacctgaagcccagcgtgctgttccaggagctggacagagacagaaagagagcccagctgatcctgcagtacatcccccacgtgatcccccacaagaacagagtgctgctgttcagaaccatggtgaccaaggagaaggagaagctgggcctggtggagaccagcagcgccagcccccacgtgacccacatcaccatcagaagaagcagaatgctggaggacggctacgagcagctgagacagctgagccagcacgccatgaagggcgtgatcagagtgaagttcgtgaacgacctgggcgtggacgaggccggcatcgaccaggacggcgtgttcaaggagttcctggaggagatcatcaagagagtgttcgaccccgccctgaacctgttcaagaccaccagcggcgacgagagactgtaccccagccccaccagctacatccacgagaactacctgcagctgttcgagttcgtgggcaagatgctgggcaaggccgtgtacgagggcatcgtggtggacgtgcccttcgccagcttcttcctgagccagctgctgggccaccaccacagcgtgttctacagcagcgtggacgagctgcccagcctggacagcgagttctacaagaacctgaccagcatcaagagatacgacggcgacatcaccgacctgggcctgaccctgagctacgacgaggacgtgatgggccagctggtgtgccacgagctgatccccggcggcaagaccatccccgtgacctag

SEQ ID NO: 233888 - DNA, 2127 bp, Artificial Sequence
  derived and/or modified sequence
atgttcacactatctcaaacaagtcgggcttggttcattgacagggcacgccaggcccgggaggagcgtctcgtgcagaaagagcgcgaacgagctgcagtggtgatccaagctcacgtgcgctccttcctttgcagatctaggctgcagagggatatccgccgcgaaatagacgatttttttaaggctgacgatccagagtccacaaagcgttccgccttatgtatttttaaaatcgctcggaagctgctgtttttgtttcgcattaaagaagacaatgaaaggttcgaaaagttgtgcaggtccatcctctccagcatggacgctgagaatgagcctaaagtctggtacgtgtcattggcctgcagtaaggacctgacactgctgtggatacaacagattaagaacatactgtggtattgctgtgatttcctcaagcaactgaaacctgagatccttcaggattcgaggttgattaccctctacctgacaatgctcgtcacttttacggacacaagtacatggaaaattcttcggggcaaaggcgaaagcctcagaccggctatgaatcatatttgcgccaacataatgggacatcttaatcagcacggattttatagcgtgcttcagatactcctgaccagaggacttgcccgtccccgcccatgcctaagtaagggcacattaacagcggccttttccttggccctccggcctgtgatagcagcacagttctccgataacttaatccgtccgttcctcattcacataatgtcagtgcccgcccttgtcactcacctgtccactgtaacccctgaaaggctgaccgtgctggagtcccacgatatgctgaggaaatttatcatcttcctgcgcgatcaagacagatgtcgagacgtttgcgagtctcttgaggggtgccacaccctgtgcttgatggggaatttactgcatctgggcagtctgtctcccagggtgttagaagaggagaccgacggattcgtgtccctcctgacccagactctgtgttattgtcgaaagtatgtgtcccaaaaaaagtccaatctgacacattggcaccccgtcctgggctggttttcccaatctgtcgactacgggctaaacgagagtatgcatctaattacaaaacagctccagttcctctggggggtgccgctgattagaatttttttctgcgatattctatccaaaaagctacttgagagtcaggagccagctcacgcccagcctgccagtcctcagaacgtcctcccagtgaaatcattgcttaagcgggcctttcagaagtctgcatctgtgagaaatatcttaaggccagtaggcggaaaacgggtggatagtgccgaagttcaaaaggtctgtaacatttgcgtgctgtaccagacttcgctgacaacccttacacagattcgactgcagatactgaccgggctgacttacctggatgacctgctgcccaaactgtgggcttttatctgtgagctcggacctcatgggggactgaaactgttcctggagtgtctgaataacgacactgaagaatcaaagcagctgctggccatgttaatgctcttttgtgattgcagtaggcacttaatcacaatactggatgacatcgaagtgtacgaggagcagatctccttcaagctcgaagaactggttaccatctctagctttctgaattcattcgtctttaagatgatctgggatggcatcgtagaaaacgcaaaaggcgaaacgctggaacttttccagtccgtgcatggatggctgatggttctctacgaaagggattgcagaagacggttcactccagaggaccactggctgagaaaggacctgaagccctcagtattattccaggagctcgaccgcgatcggaagcgtgcccagcttattctgcagtatatcccgcatgtgatcccccacaaaaatagagtgctgctgttcagaaccatggtgacgaaagaaaaagaaaaattgggattagtagagacctcatcagcttcaccacacgttacccacattacaatccgccgctcccggatgctcgaatctctgttcgagtgcccctggcccttggtcatcaatgctgagtcttgttag

SEQ ID NO: 233889 - DNA, 3207 bp, Artificial Sequence
  derived and/or modified sequence
atgttcactcttagtcaaacttccagggcctggtttatcgatcgggcccgccaggctagagaggaaagactggtgcagaaagaacgagagagggccgcagtcgtgatccaggctcatgtgagaagttttctctgcaggtccaggctgcaacgggacattcggcgcgaaatagacgatttttttaaggccgatgaccccgaaagtactaagcggagtgccctgtgtatcttcaagatagcccgaaagctcctgtttctatttaggatcaaggaagacaatgagaggttcgagaaactatgtcgctccattctgtcgtccatggatgccgagaacgaaccaaaggtgtggtacgtgtcgttagcatgctctaaagatttgactctgctatggattcagcagatcaagaacattttgtggtattgctgcgattttctcaaacagttgaagcccgaaatcctgcaggacagtagactgatcacattatacctcaccatgctcgtcaccttcactgacacaagcacttggaaaatacttcgagggaagggcgaaagcctaaggcccgcaatgaatcatatctgcgctaacattatgggacatcttaatcagcacgggttctatagcgttctccagattctcctcaccagggggctcgcacgcccccgaccctgtctctctaaaggtacgctgactgcagcatttagcttggcactaagaccggtcattgctgcacaattttccgataacctgatccggcctttcctgattcacatcatgtccgtgccagctctggtgacccacctgtcaactgtcactccagaaaggctcacagtacttgagagccacgatatgctgcgcaagttcatcatctttctaagggaccaggacaggtgccgagacgtatgcgagagtctggagggatgtcacacactgtgcctgatgggtaacctcctccacttgggatcattatcacctagagtccttgaggaggaaactgacgggtttgtcagcttactgacacagactctgtgctattgccggaagtacgtgtctcagaagaaaagcaacctgacgcactggcacccagtactcggatggttctcacagtcagtggactacggactgaatgaaagcatgcacctaatcactaagcagctgcagtttctgtggggcgtgcctctaatccggattttcttctgcgatatcctgtctaagaagctcctcgaaagccaagagccagcccatgcacagcccgccagcccacagaatgttctccctgtgaagtcccttctgaagcgtgcctttcaaaagagcgctagtgtacgtaatattcttagacccgtgggtggtaaacgggtggatagcgcagaagtgcagaaagtttgtaacatctgtgtgctctaccaaacatctttgactacattaactcaaattaggctccagatccttactggactcacttacctggatgacctccttccgaaactctgggccttcatctgtgagctcgggccccatggtggactgaaactgttcctggaatgcctaaataacgataccgaagagtctaagcaactcctcgctatgttgatgttgttctgcgactgtagccggcatctgataaccattctggatgatatcgaagtatatgaggaacaaataagtttcaagctggaggagctggtaaccatatcttcttttttaaatagctttgtattcaaaatgatatgggacgggatcgtggagaatgcaaaaggtgagacattggagctgttccagagcgtgcatggatggcttatggtactgtacgagcgggactgccgacgtagatttactcctgaagaccattggttgcgcaaggatctgaagccatcggtgctctttcaggaactggatcgagacagaaagagagctcagctgatccttcagtacatcccccacgtcattcctcacaagaatcgggtgttactatttcgtaccatggtcaccaaagaaaaagaaaagctgggcttggtcgagaccagctccgcttcaccacatgttacccacattaccatcaggcgctcccgcatgctggaggacgggtatgagcaactgcgacagctttcacagcacgctatgaagggggtgatacgggtgaaattcgtaaacgaccttggagtcgatgaggcaggaatcgatcaggatggggtgtttaaggagttcctggaagagattattaaaagggtgttcgaccctgcactcaacttatttaagacaacgagtggggacgaacggctgtacccttcacccacatcttacatacatgaaaactatcttcagctgttcgaatttgtaggaaagatgcttggcaaagctgtctacgaaggcattgtggtagatgtacctttcgccagctttttcctgtcccagcttctcggccaccaccatagcgttttttattcctctgtggatgaactgccctctttggactcagaattctataagaatttgacatcaattaaaagatacgacggggatataacagacttgggtttaactctaagttacgatgaagatgtgatggggcagttggtctgccatgaactgatcccggggggcaagacaataccagttactaacgaaaataagatttcttatatccatctgatggctcattttcggatgcatacgcaaattaaaaaccagactgctgccctgatcagcggattccggtccattatcaagccagagtggatcaggatgttctcaacacccgagctgcaacgcctaatctccggagacaatgcggagatcgacctcgaggatctcaagaaacacactgtgtactacggaggctttcacggttcacatcgggttattatctggctgtgggacattctagcctctgatttcacaccagacgaaagagcaatgttcctcaagttcgtgacctcatgtagtagacctcctttgttaggatttgcttatctgaagcctccgttcagcatccgctgcgtggaagtctccgatgatcaggataccggagacactcttggctctgtactcagaggcttttttactatcagaaagcgcgaacccgggggaagactgcctacatcatcaacttgtttcaatctgttaaagctgccgaactattctaagaaatctgttctgagggagaagttacggtacgccatttctatgaacacaggctttgaactttcctag

SEQ ID NO: 233890 - DNA, 3207 bp, Artificial Sequence
  derived and/or modified sequence
atgttcacgctctcacagacgagccgggcctggttcattgaccgcgcacgccaggcaagagaggagagactcgtccagaaagaacgcgagagggcagccgtggtgatccaggcacatgttcgtagcttcttgtgcaggtccagactccagagagatattagaagggagattgatgactttttcaaagctgatgatccagaatcaacaaaacgaagcgcactgtgcatcttcaagatcgccagaaaactgctctttctgttcaggattaaagaggataacgaacgcttcgaaaagctttgcagaagcatcctgtcttcaatggacgctgagaacgagcccaaggtgtggtatgtttctttggcctgcagtaaggacttaactctcctatggatccagcagattaaaaatattctctggtactgctgcgactttctcaagcaattgaaaccagagattctgcaagactcccggctgatcactctctatctgactatgctggttacgtttacagataccagcacctggaagatcctgcggggaaagggggaatctcttagacctgctatgaatcatatctgtgccaacataatgggacatttaaatcaacatggcttttatagtgtgctgcagatcctcctgaccagaggcctggcgagacctaggccctgtctcagtaaaggaaccctgaccgctgcctttagtttagctctgagaccagttatcgcggcacaattttcagacaacctgatccgcccctttctgatccacattatgtctgtccccgccctcgtgactcacctatctacagttaccccggagagactgacagtgctcgaatctcatgacatgttgaggaagttcatcatcttcctgcgtgatcaagacagatgccgcgatgtatgcgaatctcttgaaggctgccatacactgtgtctaatgggcaacttactccatctcggatctctgtcaccacgtgtacttgaagaggaaactgacggctttgtgtcactgctgacccagaccctgtgttattgtaggaagtacgtttctcaaaaaaagtccaatctaacccactggcatcctgtgctggggtggttcagtcaaagcgtggattatggattgaacgaaagtatgcatctaataaccaaacagctccagtttctgtggggagtccccttgatacgcatattcttctgcgatatactttccaagaagttactggagtcacaggagccggcccatgcacaaccagcttctccccagaatgttctccccgtaaaatcccttttgaagagggcctttcagaagtctgcttccgtgagaaatatacttcgccctgtgggcggcaagagggtggactcagccgaggttcagaaggtttgcaatatctgcgtgctctaccagacatccctcaccacactgactcagatccggcttcagatcttaactggcttgacttacctcgatgatctactgcctaagctgtgggccttcatatgcgaactcggccctcacggcggactgaaactgttcctggagtgtctgaacaatgacacggaggagagtaagcagctcctggcgatgttgatgctgttttgtgattgtagcagacacctgatcacaattctggatgacatcgaagtgtacgaagaacaaatcagcttcaaactggaggagttggtaacaatttcctcttttctgaactcctttgtgttcaagatgatttgggacggtattgtcgaaaacgcaaagggagagacgctagagctttttcagagcgtccatggatggctgatggtcctctacgaaagggattgcaggaggaggtttacccccgaagatcactggctccgaaaggacctaaagccgtcggtcctgttccaggagctggacagagaccggaaaagagcccagctgattctgcaatatatcccccatgtcatcccccacaaaaaccgcgtgttgttgtttaggactatggtgacgaaagagaaggagaagttgggactggtggagacatcttcagcttctccccacgtgactcacatcaccatccggcggagtaggatgctggaagacggctacgaacagctccggcagctgtcacaacatgccatgaaaggtgtcattagagtcaaatttgttaacgatctgggggttgacgaggccgggatcgatcaggatggagtgtttaaggagttccttgaggaaatcataaagcgagtgtttgatcctgcactgaatctttttaaaacaacgagtggcgatgagagactctaccccagccccacctcctacattcacgagaattatcttcaattgtttgagttcgtgggaaaaatgctcgggaaggccgtgtacgagggcattgtggtggatgtgcccttcgcctcctttttcctgagccaactcctgggccaccaccatagtgtcttctactcctctgtggatgaactcccctccctggacagcgagttctataagaatttgacttctatcaaaagatacgatggagacatcactgatcttggcctgacgctgagctacgatgaagatgttatggggcagcttgtgtgccacgagttaatcccgggaggcaaaacaatcccagtaacgaatgagaataaaatttcctacatacatcttatggcccacttcagaatgcatacacaaatcaaaaaccagacagctgctctgatctccggatttcggtccattatcaaacccgagtggatccgcatgttcagtacccccgagctgcagcgtctgatctcaggcgacaacgctgagattgacttggaagacttgaagaaacataccgtttactatggggggttccacggatcccaccgcgtgattatctggctttgggacattctcgcctccgattttacgccagacgagagggctatgttcttaaaattcgtcactagttgtagtaggccccccctgctcgggtttgcatacctgaagccccctttttctattagatgtgtggaggtttctgatgaccaggatacaggtgacacactgggttccgtgcttcgtggcttttttactatacgcaaacgtgagcccggtggaagactgcccacctcatccacatgcttcaacctcctgaagctgccaaactacagcaaaaagagtgtcctccgcgaaaaactgcgttacgccatttctatgaatacagggtttgagctttcctag

SEQ ID NO: 233891 - DNA, 2619 bp, Artificial Sequence
  derived and/or modified sequence
atgttcacgttatcccagactagcagagcttggtttattgaccgggcaagacaggcgagagaagaacgacttgtgcagaaggaacgcgaacgcgctgcagtcgtgattcaggcccatgtgagatcctttctatgcaggtcccgcctgcaaagagacattcgtcgggaaatcgatgatttttttaaggccgacgaccccgagtcgaccaagcgcagcgctttatgcatctttaaaatcgctcgcaaattactgtttctgttccggataaaagaggataacgaacggttcgagaagctgtgtcggagtattctgtcgtccatggatgcggagaacgagcctaaggtatggtatgtgtctctggcttgcagtaaagatttgaccctgctttggattcagcagataaagaacattctgtggtattgttgcgattttttaaaacagctgaaacccgagattctgcaggatagtcgactgataaccttgtacctcacaatgctagtcacctttactgatacgtccacatggaaaattctgagaggcaagggcgagtctctcagaccggcaatgaaccacatctgcgctaacataatggggcatctgaaccagcatggcttttacagcgtgctacagatccttctgacaagaggtctggcccgccctcgcccatgcctttccaagggcaccttgactgcggccttttcactggccctccggcccgtgattgcagcacagttcagtgataatttaattagaccctttctgatacatatcatgtccgtgccagcacttgtgacccacctgagcaccgtgacacccgagcgcctgactgttctcgagtcccatgacatgctgaggaagtttatcatattcctccgggatcaggacaggtgccgcgacgtttgcgagtctctggagggttgccatacactgtgtctgatgggcaaccttctgcaccttgggtctctgagccctagggtactggaggaggaaaccgacggattcgtgagcttattgacccagaccctctgctactgtcgtaagtatgtttcgcagaagaagagtaaccttacacactggcaccctgtgctgggctggttctcccagtcagttgattatggactcaatgagtcaatgcatctcattaccaaacaacttcagttcctctggggagtgccacttatcaggatcttcttttgcgatatcctgtctaagaaactcctagagagtcaggaacctgcacatgctcagcctgcgtccccacagaacgtcctgcccgtgaagtccctcctgaagcgggccttccagaagagtgcctccgtgaggaacatactccgcccagtaggaggaaagcgagtggactctgcagaggtccagaaagtgtgtaatatttgcgtgttgtaccagactagtctgaccacattgacgcagattcggctacagatattaacaggtttgacctacctcgacgatctgctgcccaaattgtgggcatttatctgtgaacttggaccccatgggggcctgaaactattcctcgagtgtcttaataacgacaccgaagagagtaagcaactgctcgccatgttaatgctgttctgtgactgctccaggcacctaataaccatcctagatgatatcgaggtgtacgaagagcaaatcagtttcaagctggaagagctggttacgatctccagttttttaaatagctttgtctttaaaatgatttgggatggcatcgtcgagaatgctaagggcgagaccctggagctgttccagtccgttcacgggtggctcatggtgttatatgagagagattgcaggcgaagatttactcccgaagatcattggcttaggaaggacctgaaaccctcagtactctttcaggagctcgatcgcgatcggaaaagggcccagctcatcttgcaatacatcccgcacgtgattcctcataaaaacagggtcttgttgttccgcaccatggtgactaaagagaaagaaaaactgggcctggtagagacttccagcgcaagcccacacgtaacccacatcacgatcagacgttcccggatgctggaagacggttatgaacagttgcgacagctctcacagcacgccatgaaaggagtgattcgagtcaaatttgtaaacgacttgggggtggacgaagctggaatcgaccaagacggtgtttttaaggagttcctcgaggagataatcaagagggtctttgatcctgccctgaacctgttcaagactactagtggagacgaacggctttatcctagcccaacgagttacatccatgagaattacctccagttgttcgagtttgttgggaagatgttaggaaaggcagtgtacgaaggaatcgtggtggacgtgccgttcgctagtttctttctttcgcagctgcttggccaccatcacagcgtgttctactctagcgttgatgagctgcctagtctcgacagtgagttctataagaatttgacctcaattaagagatatgacggggacattactgaccttggattgaccctgtcctatgatgaagatgtgatgggtcagctggtgtgccacgaattgattccggggggaaaaaccattcccgtgacatag

SEQ ID NO: 233892 - DNA, 2127 bp, Artificial Sequence
  derived and/or modified sequence
atgttcaccctgagccagaccagccgggcctggttcatcgaccgggcccggcaggcccgggaggagcggctggtgcagaaggagcgggagagagctgctgtggtgatccaggcccacgtgcgctccttcctgtgccgcagccggctgcagagggacatccggcgggagattgatgacttcttcaaggcagatgatcctgagagcaccaagaggtctgccctgtgcatcttcaagatcgccaggaagctgctcttcctgttccgcatcaaggaggacaatgaaagatttgagaagctgtgccgcagcatcctgagctccatggatgctgaaaatgagcccaaggtgtggtacgtgtccctggcctgcagcaaggacctgaccctgctgtggatccagcagatcaagaacatcctgtggtactgctgtgacttcctgaagcagctgaagccagagatcctgcaggacagccgcctcatcaccctgtacctgaccatgctggtgaccttcacagacaccagcacctggaagatcctgcggggcaaaggagagagcctgcggcctgccatgaaccacatctgtgccaacatcatgggccacctgaaccagcacggcttctacagcgtgctgcagatcctgctgacccggggcctggcccggccccggccctgcctgagcaagggcaccctgacagctgccttcagcctggccctgcggcctgtgattgctgcccagttcagtgacaacctgatccggcccttcctgatccacatcatgtctgtgcctgccctggtgacccacctgagcacagtgaccccagagcggctgactgtgctggagagccatgacatgctgaggaagttcatcatcttcctgcgggaccaggaccgctgcagagatgtgtgtgagagcctggagggctgccacaccctgtgcctgatgggcaacctgctgcacctgggcagcctgagcccccgggtgctggaggaggagacagatggctttgtgtccctgctgacccagaccctgtgctactgcaggaaatatgtgtcccagaagaagagcaacctgacccactggcaccctgtgctgggctggttcagccagagcgtggactatggcctgaatgaatccatgcacctgatcaccaagcagctgcagttcctgtggggcgtgcccctcatccgcatcttcttctgtgacatcctgagcaagaagctgctggagagccaggagcccgcccacgcccagcctgccagcccccagaatgtgctgcctgtgaagagcctgctgaagagggccttccagaagagcgcctctgtgaggaacatcctgcggcctgtgggcggcaagagggtggacagcgctgaggtgcagaaggtgtgcaacatctgtgtgctgtaccagaccagcctgaccaccctgacccagatccggctgcagatcctgaccggcctgacctacctggatgacctgctgcccaagctgtgggccttcatctgtgagctgggcccccatggaggcctgaagctgttcctggagtgcctgaacaatgacacagaggagagcaagcagctgctggccatgctgatgctgttctgtgactgcagccgccacctgatcaccatcctggatgacatcgaggtgtatgaggagcagatctccttcaagctggaggagctggtgaccatcagcagcttcctgaacagctttgtgttcaagatgatctgggatggcatcgtggagaatgccaagggggagaccctggagctgttccagagcgtgcacggctggctgatggtgctgtatgaaagagactgcagaagacgcttcaccccagaggaccactggctgaggaaggacctgaagcccagcgtgctcttccaggagctggaccgggacaggaagagggcccagctgatcctgcagtacatcccccacgtgatcccccacaagaacagagtgctgctcttccgcaccatggtgaccaaggagaaggagaagctgggcctggtggagaccagcagcgccagcccccacgtgacccacatcaccatccgccgcagcaggatgctggagagcctgtttgagtgcccctggcccctggtgatcaatgctgagagctgctag

SEQ ID NO: 233893 - DNA, 3207 bp, Artificial Sequence
  derived and/or modified sequence
atgttcaccctgagccagaccagccgggcctggttcatcgaccgggcccggcaggcccgggaggagcggctggtgcagaaggagcgggagagagctgctgtggtgatccaggcccacgtgcgctccttcctgtgccgcagccggctgcagagggacatccggcgggagattgatgacttcttcaaggcagatgatcctgagagcaccaagaggtctgccctgtgcatcttcaagatcgccaggaagctgctcttcctgttccgcatcaaggaggacaatgaaagatttgagaagctgtgccgcagcatcctgagctccatggatgctgaaaatgagcccaaggtgtggtacgtgtccctggcctgcagcaaggacctgaccctgctgtggatccagcagatcaagaacatcctgtggtactgctgtgacttcctgaagcagctgaagccagagatcctgcaggacagccgcctcatcaccctgtacctgaccatgctggtgaccttcacagacaccagcacctggaagatcctgcggggcaaaggagagagcctgcggcctgccatgaaccacatctgtgccaacatcatgggccacctgaaccagcacggcttctacagcgtgctgcagatcctgctgacccggggcctggcccggccccggccctgcctgagcaagggcaccctgacagctgccttcagcctggccctgcggcctgtgattgctgcccagttcagtgacaacctgatccggcccttcctgatccacatcatgtctgtgcctgccctggtgacccacctgagcacagtgaccccagagcggctgactgtgctggagagccatgacatgctgaggaagttcatcatcttcctgcgggaccaggaccgctgcagagatgtgtgtgagagcctggagggctgccacaccctgtgcctgatgggcaacctgctgcacctgggcagcctgagcccccgggtgctggaggaggagacagatggctttgtgtccctgctgacccagaccctgtgctactgcaggaaatatgtgtcccagaagaagagcaacctgacccactggcaccctgtgctgggctggttcagccagagcgtggactatggcctgaatgaatccatgcacctgatcaccaagcagctgcagttcctgtggggcgtgcccctcatccgcatcttcttctgtgacatcctgagcaagaagctgctggagagccaggagcccgcccacgcccagcctgccagcccccagaatgtgctgcctgtgaagagcctgctgaagagggccttccagaagagcgcctctgtgaggaacatcctgcggcctgtgggcggcaagagggtggacagcgctgaggtgcagaaggtgtgcaacatctgtgtgctgtaccagaccagcctgaccaccctgacccagatccggctgcagatcctgaccggcctgacctacctggatgacctgctgcccaagctgtgggccttcatctgtgagctgggcccccatggaggcctgaagctgttcctggagtgcctgaacaatgacacagaggagagcaagcagctgctggccatgctgatgctgttctgtgactgcagccgccacctgatcaccatcctggatgacatcgaggtgtatgaggagcagatctccttcaagctggaggagctggtgaccatcagcagcttcctgaacagctttgtgttcaagatgatctgggatggcatcgtggagaatgccaagggggagaccctggagctgttccagagcgtgcacggctggctgatggtgctgtatgaaagagactgcagaagacgcttcaccccagaggaccactggctgaggaaggacctgaagcccagcgtgctcttccaggagctggaccgggacaggaagagggcccagctgatcctgcagtacatcccccacgtgatcccccacaagaacagagtgctgctcttccgcaccatggtgaccaaggagaaggagaagctgggcctggtggagaccagcagcgccagcccccacgtgacccacatcaccatccgccgcagcaggatgctggaggatggctatgagcagctgcggcagctgagccagcacgccatgaagggcgtcatccgggtgaagtttgtgaatgacctgggcgtggatgaagctggcatcgaccaggatggagtcttcaaggagttcctggaggagatcatcaagagggtgtttgatcctgccctgaacctcttcaagaccaccagcggagatgagcggctgtaccccagccccaccagctacatccacgagaactacctgcagctgtttgaatttgtgggcaagatgctgggcaaggctgtgtatgagggcatcgtggtggatgtgccctttgccagcttcttcctgagccagctgctgggccaccaccacagcgtcttctacagctctgtggatgagctgcccagcctggacagcgagttctacaagaacctgaccagcatcaagagatatgatggagacatcacagacctgggcctgaccctgtcctatgatgaagatgtgatgggccagctggtgtgccacgagctgatccctgggggcaagaccatccctgtgaccaatgaaaacaagatctcctacatccacctgatggcccacttcaggatgcacacccagatcaagaaccagacagctgccctgatcagcggcttccgcagcatcatcaagccagagtggatccgcatgttcagcaccccagagctgcagaggctcatcagcggggacaatgctgagattgacctggaggacctgaagaagcacacagtgtactatggaggcttccacggcagccacagggtcatcatctggctgtgggacatcctggccagtgacttcaccccagatgagcgggccatgttcctgaagtttgtgaccagctgcagccggccccccctgctgggctttgcctacctgaagccacccttcagcatccgctgtgtggaggtgtctgatgaccaggacacaggagacaccctgggctctgtgctgcggggcttcttcaccatcaggaagcgggagcccggcggccgcctgcccaccagcagcacctgcttcaacctgctgaagctgcccaactacagcaagaagtctgtgctgcgggagaagctgcgctatgccatctccatgaacacaggctttgagctgtcctag

SEQ ID NO: 233894 - DNA, 2619 bp, Artificial Sequence
  derived and/or modified sequence
atgttcaccctgagccagaccagccgggcctggttcatcgaccgggcccggcaggcccgggaggagcggctggtgcagaaggagcgggagagagctgctgtggtgatccaggcccacgtgcgctccttcctgtgccgcagccggctgcagagggacatccggcgggagattgatgacttcttcaaggcagatgatcctgagagcaccaagaggtctgccctgtgcatcttcaagatcgccaggaagctgctcttcctgttccgcatcaaggaggacaatgaaagatttgagaagctgtgccgcagcatcctgagctccatggatgctgaaaatgagcccaaggtgtggtacgtgtccctggcctgcagcaaggacctgaccctgctgtggatccagcagatcaagaacatcctgtggtactgctgtgacttcctgaagcagctgaagccagagatcctgcaggacagccgcctcatcaccctgtacctgaccatgctggtgaccttcacagacaccagcacctggaagatcctgcggggcaaaggagagagcctgcggcctgccatgaaccacatctgtgccaacatcatgggccacctgaaccagcacggcttctacagcgtgctgcagatcctgctgacccggggcctggcccggccccggccctgcctgagcaagggcaccctgacagctgccttcagcctggccctgcggcctgtgattgctgcccagttcagtgacaacctgatccggcccttcctgatccacatcatgtctgtgcctgccctggtgacccacctgagcacagtgaccccagagcggctgactgtgctggagagccatgacatgctgaggaagttcatcatcttcctgcgggaccaggaccgctgcagagatgtgtgtgagagcctggagggctgccacaccctgtgcctgatgggcaacctgctgcacctgggcagcctgagcccccgggtgctggaggaggagacagatggctttgtgtccctgctgacccagaccctgtgctactgcaggaaatatgtgtcccagaagaagagcaacctgacccactggcaccctgtgctgggctggttcagccagagcgtggactatggcctgaatgaatccatgcacctgatcaccaagcagctgcagttcctgtggggcgtgcccctcatccgcatcttcttctgtgacatcctgagcaagaagctgctggagagccaggagcccgcccacgcccagcctgccagcccccagaatgtgctgcctgtgaagagcctgctgaagagggccttccagaagagcgcctctgtgaggaacatcctgcggcctgtgggcggcaagagggtggacagcgctgaggtgcagaaggtgtgcaacatctgtgtgctgtaccagaccagcctgaccaccctgacccagatccggctgcagatcctgaccggcctgacctacctggatgacctgctgcccaagctgtgggccttcatctgtgagctgggcccccatggaggcctgaagctgttcctggagtgcctgaacaatgacacagaggagagcaagcagctgctggccatgctgatgctgttctgtgactgcagccgccacctgatcaccatcctggatgacatcgaggtgtatgaggagcagatctccttcaagctggaggagctggtgaccatcagcagcttcctgaacagctttgtgttcaagatgatctgggatggcatcgtggagaatgccaagggggagaccctggagctgttccagagcgtgcacggctggctgatggtgctgtatgaaagagactgcagaagacgcttcaccccagaggaccactggctgaggaaggacctgaagcccagcgtgctcttccaggagctggaccgggacaggaagagggcccagctgatcctgcagtacatcccccacgtgatcccccacaagaacagagtgctgctcttccgcaccatggtgaccaaggagaaggagaagctgggcctggtggagaccagcagcgccagcccccacgtgacccacatcaccatccgccgcagcaggatgctggaggatggctatgagcagctgcggcagctgagccagcacgccatgaagggcgtcatccgggtgaagtttgtgaatgacctgggcgtggatgaagctggcatcgaccaggatggagtcttcaaggagttcctggaggagatcatcaagagggtgtttgatcctgccctgaacctcttcaagaccaccagcggagatgagcggctgtaccccagccccaccagctacatccacgagaactacctgcagctgtttgaatttgtgggcaagatgctgggcaaggctgtgtatgagggcatcgtggtggatgtgccctttgccagcttcttcctgagccagctgctgggccaccaccacagcgtcttctacagctctgtggatgagctgcccagcctggacagcgagttctacaagaacctgaccagcatcaagagatatgatggagacatcacagacctgggcctgaccctgtcctatgatgaagatgtgatgggccagctggtgtgccacgagctgatccctgggggcaagaccatccctgtgacctag

SEQ ID NO: 233895 - DNA, 2127 bp, Artificial Sequence
  derived and/or modified sequence
atgttcaccctgagccagaccagccgggcctggttcatcgaccgggctaggcaggcacgcgaagaacgcctcgtccagaaagagcgcgagcgggccgccgtcgtcatccaggcccacgtacgctcctttctctgtagatcccgcttgcagagggacatcagacgcgagattgatgatttttttaaagccgacgaccctgagagcactaagagaagtgcgctgtgcatttttaagattgccagaaagctgctgtttctgttcagaattaaggaggacaacgaaaggttcgagaagctctgcagaagcatcctctcctccatggatgcagaaaacgaacccaaagtgtggtacgtgagcctggcctgtagcaaagatctcacgttactgtggatacaacagataaagaacatcctctggtactgctgcgatttcctgaagcagctcaaaccagaaatactgcaagattcccggttaatcaccttgtacctcaccatgttagtaacatttaccgacacatctacttggaagatacttagaggcaagggtgaatcccttaggccagctatgaatcatatctgtgccaacatcatgggtcatttaaaccagcacgggttctattcagtgctgcaaatcctgttaacccgcggtctggcccgcccaagaccttgtctctctaaagggacactcaccgccgctttctcgttggccctccgccctgtcatcgccgctcaattttccgacaacctcattagaccctttcttatccacattatgagcgttcccgcattggttacacatcttagtaccgtcacacctgaacgcctgacagttctggaaagtcacgacatgctgcgaaaattcattattttccttcgggaccaggaccggtgcagagatgtctgtgagagccttgaaggatgccacacactctgtctcatggggaatcttctgcacctgggctccctgagcccacgggtgctagaagaggagactgacgggttcgtgtctttgctaactcagacactttgttattgcagaaaatacgtttcccagaaaaaatctaaccttacacactggcatccagttctgggctggttcagccagtctgtagactatgggctgaatgaaagtatgcaccttataactaaacagttgcagttcctctggggagttccgctcatcaggatttttttttgcgacattctgtccaaaaagctgctggagtctcaggaaccggctcacgcccagccagcatctcctcagaatgttctacccgtcaagagcttattgaaacgggcattccagaagagtgctagcgtaaggaacatactgaggcccgttgggggaaaacgggtggattcagctgaagttcagaaagtgtgtaatatttgcgtgctctatcagactagcctgactactctaacccagatccgcttgcagattctcactggcctgacgtacctggatgacctcttgcccaagctatgggccttcatttgcgaactgggtccacacggagggctgaagctgttcttagaatgcctaaataacgacacagaggagagcaagcaactgctggccatgctgatgctcttttgtgattgctcccggcacttgatcactatcctggatgatattgaggtctacgaggagcagatctcatttaagctggaagagctggtaacgatatcaagttttcttaattcgtttgtgttcaaaatgatctgggatggaattgttgaaaatgccaagggagagacactggaactctttcaaagcgtgcacggttggttgatggttctatacgagagggattgtcggaggcgtttcactcctgaagatcattggctgagaaaggatctgaagccgagcgtgttgtttcaggaactggatagagataggaagcgcgcacagctgatcctgcaatacattcctcacgtgattccacacaagaaccgcgtgttgttattccgcaccatggtgacaaaagaaaaagagaagctggggctcgtcgaaacttcaagtgcttccccccacgtgacccacatcactatccgccgctcccgcatgctcgaatcactgtttgaatgtccttggcctttggtaatcaatgctgaatcctgttag

SEQ ID NO: 233896 - DNA, 3207 bp, Artificial Sequence
  derived and/or modified sequence
atgttcaccctgagccagaccagccgggcctggttcatcgaccgggcccgccaagctcgtgaagaacgcctagtacaaaaggagagagagagggctgctgtggttattcaggcccatgtgaggagctttttgtgcaggtctcggctgcagagggacattcggagggagatagatgacttcttcaaggcggacgacccggaatctacaaagcgcagtgcactttgcattttcaaaatcgctagaaagctcctgttcctgttccgtataaaagaggacaatgagcgttttgaaaaactgtgtagatccattctgagttctatggacgcagaaaacgagccaaaagtgtggtacgtttccctggcttgctcaaaggatttgactctgctgtggatccagcagatcaaaaacatactatggtactgctgtgattttcttaagcagcttaaacctgagatcctccaggactccagactgatcacactatatttgacgatgctagtgaccttcaccgacacctctacttggaaaattctccggggaaagggagaatctttgagacctgctatgaaccatatctgcgctaacatcatgggacacctcaaccaacatggtttttactccgtgctccagatattgctaacacgcggattggcgaggcccaggccatgtttatccaaaggaaccctgacagccgccttctccttggccctgcgcccagtcatcgctgcacagttttctgataatcttatcagaccattcttgatccacatcatgtccgttcccgccctcgtgacacacctgagtaccgttacacccgagcggttgactgtgcttgaatcgcatgatatgttacggaagtttatcatattcctgagggaccaggatcggtgtagagacgtgtgcgagagcctagagggttgccacactctctgtctgatgggaaatctgttacaccttggttctctctcacctcgggtactggaagaggagacagatggtttcgtgtctttgctgacacaaactttgtgttactgccgtaaatatgtatctcagaaaaaaagcaaccttacccattggcatccagtgctgggctggttttcccaatccgttgactatggtctcaacgagtcaatgcatttaataactaaacagctgcagtttctgtggggggtccctctaattcgaatcttcttttgtgatattctctcaaaaaagctcctggagtcccaggagccagcacacgcacagcctgcaagtcctcagaatgttttgccagtgaaatcccttctcaaaagggcctttcagaagagcgcctccgtccggaatatactgcgaccagttggtggaaagcgggtggactcggccgaggtccagaaagtttgcaatatatgcgtcctttaccagaccagccttacaacacttacacagatcagacttcaaatactgacagggctgacatacctggatgatctgctgcccaagttatgggcatttatctgcgagctgggccctcacggaggacttaagctgtttcttgagtgccttaacaatgacactgaggaaagcaagcagctgctggcaatgctgatgctgttttgtgactgctcacgtcatcttatcacgattttagacgacatcgaggtctatgaagagcagatcagttttaagctcgaggaactggtgaccatatcatccttcctcaatagtttcgtcttcaagatgatttgggacggcatcgtggagaatgcgaaaggcgaaaccctggaactcttccagagcgttcacggatggctgatggttctgtacgaaagagactgcaggagaagattcaccccagaggatcattggctgcggaaagaccttaaaccctccgttctgtttcaggagctcgaccgcgacagaaagcgagcccagctgatccttcagtatatccctcatgtgattccacacaaaaatagggtactgttgtttcgcaccatggtgacaaaggaaaaagaaaaactgggattagtggagacatcaagcgcctcaccacacgtaacgcacattaccatccgcaggtctcgtatgctggaagatggctatgagcagctgcgacagctctctcagcacgcaatgaaaggagttattcgcgtgaagtttgttaacgacttgggggtcgatgaggccggaattgaccaggatggcgtgttcaaggagttccttgaggaaatcattaagcgtgtttttgatcctgctttgaatctgtttaagaccacgtctggagatgaacgtctatacccatcaccaacatcttacattcacgaaaactacctgcagttgttcgaatttgtgggcaaaatgctagggaaggcagtctacgagggtattgtggtagatgtccccttcgcttcgtttttcctgtcgcaattattaggccaccaccatagcgtgttttacagttccgtcgatgaactcccctcactcgactcggaattctacaagaatctgacctccatcaagcgttacgacggcgatatcaccgatctggggttaactctgagttacgacgaggatgtgatgggccagctggtgtgccacgaactgattcctggcggcaagaccatccccgtcacaaatgaaaacaagattagttatatccacctgatggctcatttcaggatgcacacccagatcaagaatcagacagccgcccttatatccggattcaggtccatcattaagcctgagtggatcagaatgtttagcactcccgaactgcagcgcctcattagcggagacaatgctgaaatagatctagaggacctgaaaaagcacactgtgtactatggcggattccatggctcacaccgagtgattatctggttgtgggacatactcgcatctgattttacccccgacgaacgcgctatgttcctgaaattcgtgacaagctgtagtcggccccctttactcggctttgcttacctgaagccccccttctccattaggtgcgtcgaggtctctgacgaccaggatacaggcgatacgctgggaagcgtcttgagaggattttttactatcagaaagcgcgagccaggcggccggcttcctacctcttccacctgttttaacttgctcaagctacctaactattccaaaaagagcgtcctgcgcgagaaacttcgctatgcaatcagtatgaataccggttttgaactctcatag

SEQ ID NO: 233897 - DNA, 3207 bp, Artificial Sequence
  derived and/or modified sequence
atgttcaccctgagccagaccagccgggcctggttcatcgaccgggcaagacaggctagggaggagcgcttggtgcagaaagaaagagagcgtgctgcagtcgtgatccaggcacatgtccgcagctttctttgtcggtcacggctgcagagggatattcgacgggaaattgacgatttcttcaaagccgacgatcccgaaagtacaaagcgatctgcgttgtgcatttttaagatcgccaggaagttgctgtttctgttccgcatcaaggaagacaatgagaggtttgagaaactctgccgcagcatcctgtcctccatggacgctgaaaacgagcctaaggtgtggtacgtcagcctggcctgctcaaaagatctgaccctgctttggattcagcagatcaagaatatattatggtactgctgcgattttctcaagcagttaaagccggaaatccttcaggatagcaggttaatcaccctatatctcaccatgctcgtaaccttcacagacacgagtacctggaaaattcttcgaggaaagggcgagtcactgaggccggccatgaaccacatatgtgctaacatcatggggcatctcaaccaacacgggttctattccgtactacagattctcctgacaagaggactggcacgaccccgcccttgcttaagtaaaggcactttgacagctgccttttcgctagccctcaggccggtaatcgccgcacagttctcagataatctgattagaccgttcctgatccacataatgagcgtccccgcccttgtcacgcacctgagcactgttacacctgagagattgacagtgcttgaaagccacgacatgttgcgaaaatttatcattttcctgagagatcaagaccgctgtagagatgtgtgcgagtcactggagggctgtcatactttatgccttatgggaaacctgctccacctggggagcctcagcccacgagtcttggaagaggaaacagatggattcgtgagtctgctgactcagacactctgctactgccggaagtatgtgtcacagaaaaaatccaacctgacccactggcatcccgtcctgggatggtttagtcagagtgtggactacgggctaaacgaatccatgcatcttatcacaaagcagttacagttcttatggggtgtaccgctgattcggattttcttctgcgatattttgtctaaaaaactgctggaatcccaggaacctgctcatgctcagcccgcttcaccccagaatgtcctgcccgtgaaatctctcctgaagcgtgcgttccagaagagtgctagtgtgcgcaacattctcaggccagtcggaggtaaaagggttgattcagctgaggtgcagaaggtttgtaacatttgcgtgctctaccagacctcactgaccacattgacacaaattcggctgcaaatcctgaccggcctgacttacctcgacgatttactgcccaaactgtgggcattcatctgtgagctcggaccacatggtggtctgaagttattcctggaatgcctgaataatgatactgaggagtctaagcagctgctagcaatgctgatgcttttctgcgactgcagtaggcacctgatcactattctggatgacatcgaagtgtatgaagaacagattagcttcaagctggaggaactggtgaccatcagcagcttcttgaatagcttcgtgtttaaaatgatatgggacgggattgtggagaacgccaagggggagacactggagctttttcagtcggtgcacggatggcttatggtgctgtatgaacgagactgtcgcaggagatttacccctgaagaccattggctgagaaaggacctgaagccctccgtactttttcaggaactggaccgcgataggaagcgcgcccagctcatcctgcagtacattccccatgtgatcccacacaaaaacagggtcctgttgttccggacaatggtgactaaggagaaggagaagcttggccttgtggagacctccagcgctagtccccatgtcacccacattaccattcgtagaagccgaatgttggaggacggttatgaacagttacggcagctcagccagcatgccatgaagggagtcatccgggttaagttcgtcaacgacctgggtgtggacgaggctggcattgaccaagatggcgtatttaaagaatttctggaggaaattatcaaacgcgttttcgatcctgccttgaacctattcaagaccaccagcggggacgagcggctgtatccgtcgccaacatcttatatccacgagaactatttgcagctctttgagttcgtggggaagatgttgggaaaggccgtttacgagggcattgttgtggacgttccttttgccagttttttcttaagtcaattgctgggccatcatcattccgtgttctactccagcgtggatgaactaccatccctggactccgagttctacaagaacctgacaagtataaagcgctacgacggcgacattacagacttaggcctgaccctaagctacgacgaggacgtgatgggtcaacttgtttgccatgagctgatccccggaggaaaaacaatccctgtcaccaatgagaataaaattagctatatccacttaatggcccactttcgcatgcatacgcagatcaagaatcagacggccgctctgatctcaggctttagaagcattattaagccagaatggattcgcatgtttagtaccccagaattgcagagactgatctccggagataacgcagagatcgatctggaggacctcaagaagcacaccgtgtattacggcgggtttcatggcagccaccgggttattatatggctctgggatatcctagctagcgattttacgcctgacgagcgcgccatgtttctcaagttcgtgaccagttgttcccgtccacctctattgggcttcgcttacttgaaaccccccttctccatacgatgtgtcgaggtcagcgatgaccaggacaccggagacaccctgggctcagtgctgcgcggctttttcactatcagaaaacgcgagccaggcgggagattgcccacatcaagcacatgctttaacctgctgaagctgcctaactacagcaaaaagtctgttttgagagaaaagctccgatacgctattagtatgaacactggatttgagctcagttag

SEQ ID NO: 233898 - DNA, 2619 bp, Artificial Sequence
  derived and/or modified sequence
atgttcaccctgagccagaccagccgggcctggttcatcgaccgggctcgtcaggctcgtgaagaacgcctggtccagaaggaaagggaacgggctgctgtcgtgattcaggcccatgtgcggtctttcctgtgccggagtcgcctgcagcgggacattcgccgcgagatcgacgacttcttcaaagctgacgacccagagtctaccaagaggagtgcgctgtgcatcttcaagatagcccgcaagcttctgttcctgttcaggattaaggaggataacgagcgtttcgaaaagctgtgtcgtagtatattgtcttccatggacgccgaaaatgaacctaaagtctggtatgtgtctttggcctgctctaaagaccttaccctactgtggatacagcagatcaaaaacattctgtggtattgttgtgatttcttaaagcagctcaagcccgagatactgcaagactcaagactgattacactgtacctgactatgttggtaacctttaccgacactagcacctggaagatccttcggggtaaaggtgagtctctccgacctgccatgaaccacatctgcgccaacatcatggggcatctgaatcagcacggcttctactctgttctgcagatcctgctgacaaggggccttgcccgtcccaggccctgcctgagcaaagggaccctgacagcggccttttcactggcattgagacccgtgatcgccgcccagtttagcgacaatctgatacgtcctttcctgattcatatcatgagtgttcccgctcttgttacacacttgtcaacggtgactccggaaagactcacagtgctggagagtcacgacatgctcaggaagttcatcatctttcttagggatcaagatcgttgcagggacgtgtgtgagagtttggaaggatgccacacactgtgtctgatgggcaatctgctgcatctaggcagcctgagtccacgcgtactggaggaagagacagatggtttcgtctctttactgactcagactttatgctattgccgaaagtatgtttctcagaagaaatccaatcttacacattggcatcccgtcctggggtggttctctcagtccgtggactacgggctaaacgaaagcatgcatttgattacgaaacaactccaatttctctggggcgttcctttaattcgcatctttttttgtgacatactcagcaaaaaactgctcgaatctcaagagccagcgcacgctcaaccagcatccccgcaaaacgtacttccagtgaagtctctgctcaaacgcgccttccagaagtctgccagtgtgcgcaatatcctccgacctgtgggcggaaagagagtcgattccgctgaggtgcagaaagtgtgtaacatctgtgttttgtaccaaacgagcctaactacactgacacagatccgcctgcaaatcttgactgggctgacgtatctggacgatctgctgcccaagttgtgggcctttatttgcgaacttggcccacacgggggtctgaaactgtttttggagtgtctgaacaatgataccgaggaaagcaaacaactgttggcaatgctgatgctgttttgcgactgctcccgacacctgatcaccattctggatgacatcgaggtttatgaagaacagatctccttcaagctagaggagctggtgaccatttcttcattcctgaattccttcgtgttcaaaatgatctgggatggtattgttgaaaatgcaaaaggcgaaaccctcgagctcttccaaagcgtccacgggtggctaatggtgttatacgagcgcgactgccgaaggcgcttcacccctgaagaccactggctccggaaggatctcaagccttcagtgctattccaggaactggacagagatcgtaagcgggcccagctgatcctgcagtacatccctcacgtgattccccacaagaacagggttctcctatttcgaacaatggtcactaaagagaaagaaaaattaggtttagtagagacgagttctgcctcaccacatgtcacacacatcaccatcaggcggtcaaggatgctggaggacgggtacgagcagctgagacagctgtcgcagcacgccatgaaaggggtgatccgggtgaagttcgtgaatgatttaggggtggacgaagctgggattgaccaagatggtgtgttcaaggaattccttgaagaaataatcaagcgggtctttgatcctgcattgaatctgtttaagaccacgtctggcgacgagagactgtacccgagccccaccagctatattcatgagaactaccttcagctgttcgaattcgttggtaaaatgctggggaaggccgtgtacgagggtatcgtggttgatgtgcctttcgcgtctttttttttgtctcagctgttggggcatcaccattccgtgttctacagctccgttgatgaacttcctagtctcgattccgaattttataagaatctcacaagtatcaagcgatacgatggcgacatcacagacctgggattgacgctctcatacgacgaagatgttatgggccagctggtgtgccacgaactgattcccggcggaaagacaatcccggtgacttag

SEQ ID NO: 233899 - DNA, 2127 bp, Artificial Sequence
  derived and/or modified sequence
atgttcactctgtcccaaacatccagagcctggtttatagaccgcgctagacaggccagagaggaacgtctggtccagaaggagagagagagagctgctgtcgtgatccaggcacacgtgagaagcttcctttgtcggtcccgacttcagcgagatataagacgggaaattgacgacttctttaaggctgatgatcccgagtccacgaagcgctcggcactctgcattttcaagatcgccaggaaactattgttcctgttccggattaaagaggataatgaacgctttgagaaattgtgcagatctatcctgtctagcatggacgcagaaaacgagcctaaggtgtggtatgtttctctcgcgtgtagcaaagatctaacattactgtggatccaacagattaaaaacatactctggtactgttgtgatttcttaaagcaattaaaaccagaaattctgcaggatagtaggctcattaccctctatctgaccatgcttgttaccttcacagatacttctacttggaagattctgagaggcaagggggaatcactgaggcctgccatgaaccacatctgcgctaatataatggggcacctcaatcaacatgggttctattccgtcctgcagatcctgttgacacgcggtctggccagaccacgtccatgcctgtctaaaggaacgctgaccgccgcattttcgctggccttaagacccgtcattgctgcccagttctccgacaacctcatccggccatttcttattcacataatgtcagttcctgctctcgtaacgcatctttctaccgtgacacccgaacggttaaccgtcttggagtctcatgacatgttgaggaaattcatcatttttttaagagatcaggataggtgccgagacgtctgtgagtcgctggaggggtgtcataccctatgcctcatgggcaatctgttacacttgggtagcctgagtcctagagtacttgaggaggaaaccgacggtttcgtgagtcttctcactcaaactctctgttactgtaggaaatacgttagccagaagaagtccaacctgacacactggcacccggttctcgggtggttcagtcagtccgtagattatggactgaacgaatctatgcacctaattacgaagcaactgcagttcttatggggagtgcctctgatcaggattttcttctgcgacatcctcagtaaaaagcttctcgagagtcaggagcccgcacatgcacagccggcttcccctcagaacgtattgcctgtgaagtccttgctgaagcgggctttccaaaagagcgcatccgtgcgcaatatcctgagacccgtcgggggaaagagagtggatagcgctgaggtccaaaaagtttgtaacatttgtgtgctctatcagacttcacttaccactctgactcagattcgcttgcagatcctcactggcctcacatatctggatgacctgttgccaaaactttgggcgtttatctgcgaattgggtcctcacggtggcctgaaattgtttttggagtgtctaaataacgataccgaagaaagtaaacagctgctggccatgctgatgctcttttgtgactgcagcagacacctcattacgatcctggatgatattgaggtatacgaagaacaaattagcttcaagctcgaagagctggtaaccatttcttcgtttcttaacagcttcgttttcaaaatgatctgggacggaatcgtcgagaatgctaaaggagaaactttagaactgttccagtctgttcatggctggttgatggtgctctatgaaagagactgtcgtcggagattcactccggaggatcactggctgaggaaggacctgaaaccgagtgttctctttcaagagcttgaccgcgatagaaagcgagcccaactgatactgcagtatatccctcatgtaattccacacaaaaatagagtgctcctgttccgtactatggtaaccaaggagaaggagaaactggggcttgtggagacgagttcagcgagcccccacgttacacatattactatccggcgatcccggatgctcgaatccctttttgagtgcccctggcctctcgtaattaacgccgaaagctgttag

SEQ ID NO: 233900 - DNA, 3207 bp, Artificial Sequence
  derived and/or modified sequence
atgttcactctgagccagactagcagggcctggtttattgatagggctagacaagcccgagaagaaagactcgtgcagaaagaacgcgagcgtgctgccgtcgttatccaggcgcacgtgaggagtttcctctgtcgctcacggctgcagagggatattagacgtgagatcgatgatttttttaaagcggatgaccctgagagtaccaaaagatcagcactgtgtatcttcaaaatcgctaggaagctgctgttcctttttcgcattaaagaagataacgaacgtttcgagaaactttgtaggagcatcctgagctccatggacgctgagaacgagcccaaagtgtggtacgtcagtttggcgtgttccaaagacctgactctgctgtggatacagcagatcaagaacatcctgtggtactgctgtgacttcctgaaacagttaaaacctgaaatacttcaggactccaggctgattacactatatcttactatgttggtgactttcaccgacacatcaacctggaaaatactgcgcggtaaaggcgaatcactaagacctgcaatgaaccacatttgcgcgaacatcatgggacaccttaaccagcacggcttctactcggtactgcaaattttacttactcggggactggctagaccacggccatgtctgtctaaaggtacactgacggctgcctttagcttggcactgcggcctgtgattgctgctcagttttcggacaacctcattaggccctttttgattcacatcatgtccgtgccagccttggtcacgcatcttagcactgtcactcccgagagattgaccgttcttgagagccacgatatgctaaggaaattcattatctttctgcgcgaccaggacagatgtcgggacgtctgcgaatccctggaaggctgccacaccctttgcttgatgggcaatttactccacttaggctccctgagccctagagtgctcgaagaggagactgatggctttgtatcactgctcacgcagaccttgtgctattgtcgcaaatatgtgtcccaaaagaagtcaaatctcacacactggcaccctgtgctcggatggttttcccagtctgttgattatggcttaaacgagagcatgcatctgatcaccaagcagttgcagtttttgtggggggttcccctaattaggatcttcttttgtgatattttgagtaaaaagctgctcgaatcccaggaacccgctcacgcacaaccagctagccctcagaatgtgctgccggtcaaatcactattgaagagggccttccagaaatcggcctccgttcgcaacatacttcgcccagtggggggaaaacgtgtcgattccgccgaagttcaaaaggtttgcaacatttgcgtcctgtatcagacttccctcaccactctcacccagattcgactacaaattctgaccggactgacatacctggatgatctcctacccaaattatgggccttcatatgcgaactgggcccacatggcggtttgaaactttttttagaatgcctgaataacgacaccgaggaaagcaaacagctgctggctatgctaatgctcttctgcgattgttcgcggcacttaattacaatcttagatgatattgaggtgtacgaggagcaaattagtttcaagctggaagaacttgtgactattagtagcttcttaaactcctttgtgtttaagatgatctgggacgggatcgtggaaaatgctaaaggtgagacactggaactctttcagagcgtccacggctggctgatggtgctttacgagagagactgtaggaggcgtttcacacctgaggatcactggttaagaaaggatcttaagccatctgttctgtttcaggagctggaccgcgaccgtaagagagcacagctcatcctgcaatatatcccccatgtgattccccacaaaaaccgcgtgctccttttccgcactatggtgacgaaggagaaggagaagctgggtcttgtagagacaagctccgcatcacctcacgttactcacattactatccgacgaagtagaatgcttgaggatggctacgaacaactcagacaactttcacagcacgccatgaaaggtgtgataagggtcaaattcgtgaatgacttgggggtagacgaggccggaattgaccaagatggagtctttaaggaatttctggaagagatcatcaagcgcgttttcgatccggcacttaacctgttcaagacaacatccggcgacgagcgactttacccaagccctactagctatatacatgaaaattacctgcagctcttcgagtttgtgggcaagatgctaggcaaagccgtgtatgaaggtatcgtggtggacgtaccctttgcttcatttttcctgagtcagctgctcggccaccatcatagcgtcttttattcaagtgttgatgagctcccctcgttggacagtgagttctataagaatctcacaagcatcaagcgctatgacggggacatcactgacctagggctgacattatcatatgatgaggacgtaatggggcagctggtctgccacgagctcatccccggtggaaagaccatacctgtgacaaacgagaataaaattagctacatacatctcatggcgcactttcgtatgcacactcagatcaaaaatcagaccgctgcgctgatatccgggttcagatctatcatcaaaccagagtggattaggatgtttagcacccccgagctgcagcggctcatcagtggtgataacgcagaaatcgacctcgaggatctgaagaagcacaccgtttactatggaggctttcatggttcccacagggtgatcatctggctttgggatattctggcttctgatttcacgcctgatgaaagagccatgttccttaagtttgtcacctcttgtagcaggccccctttgcttggattcgcttacctgaaacccccttttagcatccgatgtgttgaggtgtccgacgaccaggacaccggcgacactctgggttctgtcctgcgcggatttttcaccatccggaagcgggagcccggtgggaggctccccaccagcagcacctgcttcaacctactgaagttacccaactactctaaaaagtctgtcctgagagaaaaacttcggtacgccatctctatgaacactgggttcgaactgagctag

SEQ ID NO: 233901 - DNA, 3207 bp, Artificial Sequence
  derived and/or modified sequence
atgtttactctaagtcagacttctcgggcatggtttatagatagagcacggcaggctagggaggagcgcctcgtacaaaaggagagggagcgggctgccgttgttattcaagcacatgtgcgctcctttctctgtcgtagccgactacaacgggacattcgcagggaaattgatgactttttcaaagcagatgacccagagtcaactaagcgctcagcactctgtatctttaagatcgcaaggaaactgttgttcctcttcagaataaaagaggacaatgagcgatttgagaaactgtgtcgcagcatcctctcgtccatggacgctgaaaatgagccaaaggtgtggtacgtctcccttgcctgctctaaggacctgacactcctatggatccaacaaataaagaatatcttgtggtattgctgcgatttcttaaaacaactcaagcctgagatccttcaggatagtagactcattaccctgtatctaacgatgctcgtgaccttcacagatactagtacctggaagattctgcgaggcaagggggagagtctgcgtccggctatgaaccatatctgcgcaaacataatgggacatcttaaccagcacggcttttatagtgtgttgcagattctgctgacacggggactggcccgacctcgcccatgcctttccaaagggactctcacagccgcttttagccttgctctgcgccctgtcatagctgcccagtttagcgataatctcattcgcccattcttaatccacatcatgtctgtgcccgcactggtgacacacctctctacggtgacccccgaacgtttaaccgtgcttgaaagtcacgacatgctgcgcaagttcattatatttctgagggatcaggacaggtgccgggacgtatgtgaatctctcgagggctgccacacactctgcttgatgggcaatctgctccacctgggttcattatccccacgagtgcttgaggaggagaccgacggctttgtcagtctcctgacccagacactgtgttactgcaggaaatacgtgtctcagaagaaaagtaatctgacacactggcatcccgtgcttggatggttttcacagagcgtggactatggactcaacgaatcgatgcaccttattaccaaacagctgcagttcttatggggcgtgcccctgattagaattttcttttgcgacatcctaagcaagaagctgctcgaatcccaggagcccgcacacgcccaacccgctagcccacagaacgtgctacccgtgaagagtctccttaagcgggcatttcaaaagagcgcctcggtgcggaacatcttgcgacccgttgggggtaaacgggtagactccgcagaggttcagaaggtgtgtaacatctgcgtcctgtaccagacctctctgaccaccctgacacaaattaggctgcagatcctgactggactgacttacctggatgacctgctccccaaattgtgggcattcatctgtgaactgggaccgcatgggggacttaaactgttcctggagtgcctgaataacgacaccgaggaaagcaaacagttgctggccatgctgatgttgttctgtgactgcagcagacacctgatcaccatcttggacgacattgaagtctacgaagaacagattagttttaaactggaggagctcgtaacaataagcagtttccttaattcgtttgtatttaagatgatttgggacggcatcgtcgagaacgctaaaggggaaaccttggagctgtttcagagtgttcatggttggttgatggtgctctatgagagggattgtaggcgcagattcacccctgaggaccactggctgcggaaggacctgaaaccatcagtgttgtttcaggaactggatcgtgatagaaagagagcccagcttatcctacagtatataccccacgtgattcctcacaagaacagagtgctcctgttccggacaatggtcacaaaagagaaagagaaactgggcctagtggagacgtcgtctgcaagtcctcacgtcacgcacataacgattagacgttccaggatgttggaggatggctacgagcagctgcggcagctgagccagcacgctatgaagggagtgatacgcgtgaagttcgtgaatgatttgggtgtagacgaggcaggcattgaccaagacggagttttcaaagagtttctggaggagatcattaagagggttttcgatcccgcactgaacctgttcaagacgactagcggtgatgaacgcctgtacccatcccccacctcttatatccacgaaaattatctgcaactgttcgaatttgtcggaaaaatgctcggaaaagctgtgtatgagggcatcgtcgtggacgtgcctttcgcatctttcttcctgtcccagctgttaggacatcaccacagtgtcttctattcttcagttgacgagctgccatccttagacagtgaattttacaagaacctgacttccatcaaaagatacgatggcgacatcactgaccttgggttaacgctgtcctatgatgaggacgtgatggggcagttggtttgccacgagttaatccccggtgggaagactataccagtcaccaacgaaaataagatatcttacattcacctaatggctcatttccggatgcatacccagatcaaaaatcaaacagccgcactgattagcgggtttcgctcaattatcaaacccgaatggattagaatgttttccacccccgaactccaacgacttatatctggagataatgccgaaattgatcttgaggatctaaagaaacacacggtgtattatggtggatttcacggttcacaccgcgttattatctggctgtgggacatcctcgccagcgacttcacacccgacgaaagagccatgttcctgaaattcgtgacgtcttgctcccgaccgcctctgctgggctttgcctaccttaagccacccttctccattcgctgcgttgaagtctccgacgatcaagatacaggagatacactcggtagtgtactccgcggattttttaccatcagaaagcgggaacctggtggcagactgcccacttctagcacgtgctttaatctgctgaagctgcctaactacagcaagaaatctgttcttagagagaaactgcgatatgccatcagcatgaatactggctttgaactatcatag

SEQ ID NO: 233902 - DNA, 2619 bp, Artificial Sequence
  derived and/or modified sequence
atgtttacacttagccagaccagccgggcttggtttattgatcgtgctcgacaggccagggaggaaaggctcgtgcagaaagaaagagaacgcgcagctgttgtgatccaggctcatgtgaggtcttttttatgccgctccagattacagagggatatacggagagagattgatgacttttttaaagccgatgatccggagagtactaagcgctcagcgctgtgtatttttaagattgccagaaagctgctcttcctgttccgcattaaagaagataatgagagatttgaaaaactctgccgcagcattctttccagtatggacgcagaaaacgagccaaaagtgtggtatgtctccctggcctgcagcaaagatctgacactgctgtggatccaacaaattaagaatatcctgtggtactgttgtgattttctgaaacagctgaagcccgaaattctccaggactctcgtcttatcacgctgtaccttactatgctggtgacctttacggatacttcgacgtggaaaatactgcggggaaaaggagagtctctgcgccctgctatgaaccacatctgcgcaaatattatggggcatttaaatcagcacggattctactccgtgctgcagatcctgctgacgaggggactagctagaccacgaccatgtttaagtaaggggaccctcactgccgcattctccctggcgctgaggcccgtgattgcagctcagttttctgataacctgattcggccatttctgattcacatcatgtccgtgcctgctctggtgacgcacttgagcaccgtgacacccgaacgactcacggtcctggagtcacatgatatgctacgcaaatttatcattttcttacgcgaccaggacaggtgcagagacgtttgcgaatccctcgaagggtgtcacacactgtgtctcatgggcaatcttttacaccttggaagtctctcgcctcgggtgctggaagaggagaccgacggattcgtctctctgttgacccagacactctgttattgtaggaaatatgttagtcagaaaaagtctaatttgacccattggcacccagtgctggggtggttttctcaaagcgtggactatggactgaacgaaagcatgcacctcatcacaaaacagctgcagtttctgtggggggttccactgatacgcattttcttctgtgacatcctgagcaaaaagctcctagagagccaagagcctgcgcatgcacagcctgcaagcccacagaacgtactgccagtcaaatctctgctgaagagggcctttcagaaaagtgcttctgtgcgcaacatcctaaggccagtggggggtaagagagtggacagtgcagaggtccagaaagtgtgtaatatatgcgtgctgtatcaaacatcgcttaccacgctgacccagatccgccttcaaatcttgaccgggttaacctacctagatgacctgctgcccaaactgtgggcatttatttgcgaactcgggcctcatgggggtctgaaactgtttctggaatgtctgaacaatgacactgaggaatcgaagcagctgctggccatgctgatgctgttttgtgattgctctcggcatctcatcacaatcctggatgacatcgaagtttacgaggagcagatttcatttaaactagaggagctcgtaacaatcagctccttcctgaacagctttgtgtttaagatgatttgggatggtatagtagaaaacgcaaaaggcgaaactctcgagctgttccaatcagtgcatggatggctgatggtcctgtatgagagggactgcagacgacgatttacacctgaggaccactggttacgcaaagatctcaagcccagtgtgctcttccaggaactggatcgtgatcggaaaagagcacagcttatcttgcaatacatcccacatgtgatcccacataagaatcgcgtgttactgttccgaacgatggtcacaaaggaaaaggagaaactggggctagtggagacaagctctgcttcccctcacgtgacccacatcacaatcagacgcagcagaatgctcgaagatggatacgagcagctgcggcagctgtctcagcacgctatgaagggcgtgattcgagtgaaatttgtcaacgacctgggcgtggatgaagccggtatagaccaggacggggtcttcaaggagttcttagaggaaataattaagcgcgttttcgacccggcactcaatctgttcaaaacaacttcaggagatgaaaggctatatccttcgcctacgtcctacatccatgagaactacctgcaactgtttgagttcgtgggtaaaatgctcggaaaggctgtttatgaggggattgtagtcgacgtgccgttcgccagtttctttctgtcccagctgcttgggcaccaccacagtgttttctatagctctgtcgatgagttaccctcactcgatagcgagttctacaagaacctgaccagtatcaagagatacgatggagatattaccgacttgggcttaaccctgtcttacgatgaggacgtgatgggacagcttgtgtgtcacgaactgattcccggagggaaaacgattccagtcacatag

SEQ ID NO: 233903 - DNA, 2730 bp, Artificial Sequence
  derived and/or modified sequence
gaacaccgcggggcaagatggcggtagtgcgtcggctgctgccccgggtctggcagaactcgggtgttttgggctgagacagtggcagctgcggccccgaccccaagtgcggggacctccggcgaataaaggtcggcctgcgggtaggccggtagggcctgcggtccggcctgcgggagaactgggtcgtcagtcctccgagtggtggggctggggactttgagggagttggctctagggcacagtccctgcctggccaggtcggaggaacaagtgctgggatctggcgtgtgtgctccaggggctctttccgcggccctttccacctcttttcactttggggacggtaggcctttataaacggactaatgctgggtgatttgttcctgtggttgttgatgccgaggaaagactctgggccccaggactcacctaaactggagttcgaatactgttcgctcgctgtgtgaccttggaaaaaataacaagcttttctgaagtgagaagctgttctcagccacgagtcctgtgcaagatcactaatgattacctggcatttctgcgacacaggcaggtcctcagggtttgtgcaagtttgcaaacatgttcaccctgtctcagacctcgagagcatggttcatcgatagagcccgtcaggcacgagaagaaaggcttgtgcagaaggaacgggagcgggcagctgttgtgatccaggcccatgtccggagttttctctgtcggagtcgactgcagagagatatcaggagagagattgatgacttttttaaagcagatgaccctgagtccactaaaagaagtgcactttgtattttcaagattgccaggaaactgctgttcctattcagaatcaaagaggataatgagagatttgagaagttgtgtcgcagcatcctgagcagcatggatgctgagaatgagcctaaggtgtggtatgtgtccctggcttgttctaaggacctcaccctcctttggattcaacagatcaagaacattttgtggtactgctgtgattttctcaagcagctcaagcctgaaatcctgcaggactcccgactcatcaccctgtacctcacgatgcttgtcaccttcacagacacttcaacgtggaaaattcttcggggaaaaggtgaaagtcttcgaccagcgatgaaccacatttgtgcaaatataatgggacatctcaaccagcatggattttattctgtgctgcagatattgttaacccgtggcctggcaagaccccgtccttgtctatccaaaggcactttaacagcagctttttctctagcgttacgccctgtgattgctgcacagttctcagacaatctgattcggccgttcctcatccacatcatgtctgtgcctgctctggtgactcatctcagcacagtgacccctgagcgcctcactgttttagaatcccatgacatgcttcgtaaattcatcatatttttaagagaccaagatcgatgccgtgatgtatgtgaaagtttagaaggatgccatacgctttgtctaatgggcaacctcctacacttgggctccctcagccccagagtgttagaggaggagacagatgggttcgtgagtttgctcacccagacgctgtgctactgtcggaagtatgtgtctcagaagaagtccaacctgacccactggcatcctgtccttggctggttctcccaatctgtggattatggccttaacgagtcaatgcacttgatcaccaaacagctgcagttcttgtggggggtgcctctgatccggatcttcttctgtgacatcctgagcaagaagctactggagagccaggagccagcccacgcacagccagcatcccctcagaatgtgctcccagtgaagagtctcctaaagcgtgcttttcaaaagtcggcatcagtccggaatattctcaggcctgtcgggggtaaacgggtcgactctgcagaagtccagaaggtttgcaacatctgtgtcctctaccagacctcgctgacaactctcacacagattcggctgcagatactcacaggtctcacttaccttgatgacctgcttcccaaactgtgggcatttatctgtgagctcgggccccacggagggttaaagctcttcttggaatgcctgaacaatgacactgaagagtccaagcaactcttggccatgctgatgctgttctgtgactgttcgcggcacctcatcacaatccttgatgacattgaagtttatgaagaacagatttcattcaaactggaagagctggtcactatctcctctttcctgaattcttttgtgtttaagatgatctgggatggaattgtagagaacgccaagggtgagaccttggagctgttccagtctgtccacgggtggcttatggtgctgtacgagcgggactgccggcggcgcttcacccccgaggaccactggctgcgaaaggatctcaaacctagcgtgctcttccaagaactcgacagggacagaaaacgggcacagttgatcctgcagtacatcccacatgtcatccctcacaaaaacagagttctactgtttcgaaccatggttaccaaggagaaggagaaactggggctggtggaaaccagctctgcctccccgcatgtcactcacatcaccatccgccggtccaggatgctggagagcttgtttgagtgcccctggccactggtgatcaatgccgagagctgctag

SEQ ID NO: 233904 - DNA, 5722 bp, Artificial Sequence
  derived and/or modified sequence
cggggcaagatggcggtagtgcgtcggctgctgccccgggtctggcagaactcgggtgttttgggctgagacagtggcagctgcggccccgaccccaagtgcggggacctccggcgaataaaggtcggcctgcgggtaggccggtagggcctgcggtccggcctgcgggagaactgggtcgtcagtcctccgagtggtggggctggggactttgagggagttggctctagggcacagtccctgcctggccaggtcggaggaacaagtgctgggatctggcgtgtgtgctccaggggctctttccgcggccctttccacctcttttcactttggggacggtaggcctttataaacggactaatgctgggtgatttgttcctgtggttgttgatgccgaggaaagactctgggccccaggactcacctaaactggagttcgaatactgttcgctcgctgtgtgaccttggaaaaaataacaagcttttctgaagtgagaagctgttctcagccacgagtcctgtgcaagatcactaatgattacctggcatttctgcgacacaggcaggtcctcagggtttgtgcaagtttgcaaacatgttcaccctgtctcagacctcgagagcatggttcatcgatagagcccgtcaggcacgagaagaaaggcttgtgcagaaggaacgggagcgggcagctgttgtgatccaggcccatgtccggagttttctctgtcggagtcgactgcagagagatatcaggagagagattgatgacttttttaaagcagatgaccctgagtccactaaaagaagtgcactttgtattttcaagattgccaggaaactgctgttcctattcagaatcaaagaggataatgagagatttgagaagttgtgtcgcagcatcctgagcagcatggatgctgagaatgagcctaaggtgtggtatgtgtccctggcttgttctaaggacctcaccctcctttggattcaacagatcaagaacattttgtggtactgctgtgattttctcaagcagctcaagcctgaaatcctgcaggactcccgactcatcaccctgtacctcacgatgcttgtcaccttcacagacacttcaacgtggaaaattcttcggggaaaaggtgaaagtcttcgaccagcgatgaaccacatttgtgcaaatataatgggacatctcaaccagcatggattttattctgtgctgcagatattgttaacccgtggcctggcaagaccccgtccttgtctatccaaaggcactttaacagcagctttttctctagcgttacgccctgtgattgctgcacagttctcagacaatctgattcggccgttcctcatccacatcatgtctgtgcctgctctggtgactcatctcagcacagtgacccctgagcgcctcactgttttagaatcccatgacatgcttcgtaaattcatcatatttttaagagaccaagatcgatgccgtgatgtatgtgaaagtttagaaggatgccatacgctttgtctaatgggcaacctcctacacttgggctccctcagccccagagtgttagaggaggagacagatgggttcgtgagtttgctcacccagacgctgtgctactgtcggaagtatgtgtctcagaagaagtccaacctgacccactggcatcctgtccttggctggttctcccaatctgtggattatggccttaacgagtcaatgcacttgatcaccaaacagctgcagttcttgtggggggtgcctctgatccggatcttcttctgtgacatcctgagcaagaagctactggagagccaggagccagcccacgcacagccagcatcccctcagaatgtgctcccagtgaagagtctcctaaagcgtgcttttcaaaagtcggcatcagtccggaatattctcaggcctgtcgggggtaaacgggtcgactctgcagaagtccagaaggtttgcaacatctgtgtcctctaccagacctcgctgacaactctcacacagattcggctgcagatactcacaggtctcacttaccttgatgacctgcttcccaaactgtgggcatttatctgtgagctcgggccccacggagggttaaagctcttcttggaatgcctgaacaatgacactgaagagtccaagcaactcttggccatgctgatgctgttctgtgactgttcgcggcacctcatcacaatccttgatgacattgaagtttatgaagaacagatttcattcaaactggaagagctggtcactatctcctctttcctgaattcttttgtgtttaagatgatctgggatggaattgtagagaacgccaagggtgagaccttggagctgttccagtctgtccacgggtggcttatggtgctgtacgagcgggactgccggcggcgcttcacccccgaggaccactggctgcgaaaggatctcaaacctagcgtgctcttccaagaactcgacagggacagaaaacgggcacagttgatcctgcagtacatcccacatgtcatccctcacaaaaacagagttctactgtttcgaaccatggttaccaaggagaaggagaaactggggctggtggaaaccagctctgcctccccgcatgtcactcacatcaccatccgccggtccaggatgctggaggacggctacgagcagcttaggcagctctcccagcacgccatgaagggggtcatccgtgtgaagtttgtcaatgacctcggggtggacgaagcagggattgatcaagacggtgtttttaaggagttcttggaagagatcatcaagagagtttttgacccagcactcaatctgttcaagacaaccagtggggatgagaggctgtacccctcacccacatcctacatccatgagaattacctgcagctcttcgagtttgtggggaagatgctggggaaggctgtgtatgagggaattgtggtggacgtgccatttgcatccttcttcctgagccaactgcttgggcaccaccacagcgtcttctatagctcggtggatgaactgccttctctggactccgagttctataaaaacctcacctccatcaagcgctatgatggggacatcactgacctgggcctgacgctgtcttacgacgaggacgtcatgggtcagcttgtttgccatgaactgattcctggagggaagaccattcctgttacaaatgaaaataaaattagctacatccatctgatggcacattttcgaatgcacactcaaataaaaaaccaaacagctgccctcattagcggattccgttccattatcaaacccgagtggatccgaatgttctcaactcctgaactgcagcgtctcatctctggcgacaatgctgagattgatctggaagatttaaagaagcacacagtctactacggtggtttccatggaagtcacagagtcatcatctggctctgggatattctggcctccgacttcacaccggatgagagagctatgtttctgaagttcgtgaccagctgctccagacccccgctcctgggattcgcctacctcaagcctccattctccatccgctgcgtggaggtgtcggacgatcaggacaccggggacactctgggcagcgtcctccggggcttcttcaccatccgcaagcgggagccaggcggccgcctgcccacctcctccacctgcttcaacctgctcaagctgcccaactacagcaagaagagcgtcctccgcgagaagctgcgctacgccatcagcatgaacacgggctttgaactctcctagctcctgtcccagccctgcctccagggctcctgggctgccagggaccttcagctcccagaggcagtgtggtcctgggaatgtgaccaacatgccaggtgacattggcccctagaccctctctatagccatgagactccttgtggcctcaagaaatttagacgcccacgacagcactacacagcatctccaggtgatgcccaaggcacagggctgcagaaaataaacctccagattccaccaacacgggtccattcttcctggtgatggcagaggggcttcttttagctagtttgatcttttgggagtctgtctttccttagccgtctgagtgagctgtgtatgaacaagtcccaggagttccaagagtctagagtggtttttgcagcatgggttgagtgtacaaagcctactgtgcgtgagatcctctccttccgtttctgaaatctcttactcaggtaaggcctcgccaagcctctatgcaccccacaaagtttctgcctccatgccgtccacagcgcctcttcccagacagccaggcccatctgctgcccagggaagcgcaggcgcctgctagggacgctatggacaccgtgagtccaaggcgctgctcctgccttgaagccacgcgctccacgccgcggccctcccattttctgcgtcctcagcgggctgagctgccagagagtcttcccggacctattcccgtcctatgcattcacattggcatcctggtttgggggaagaaaaacaacggcccttagcagcagccccgtttccagaatgtgctgcctgttccccaaagcctgcttgtcccgcggaggacggctgcctttgaccctgcttatttgtctcactggttatctaatgaggaacaaacactaacctaaggtacacatcccatctgggcggtggcttcactcctgagtctgcaaaatcccaggaaacttgggtcttgctgcccatccttcctcagcacagggaacccggaagcccgttgcactgacagaggctcacaccctctgggttttttgttttttttttaaacttcatttctcttccaacccattgtgttcctctgccctcattctttacctttgttgtaagaactttagctccagggaactgaggcagaggccctgtttgtggtctgtgttgacagccacccaccctctcccacctcatgctcctgcacctgcaccaccaaggttgatgccggattcgaagccaggaaggcccagtccctcctctgctctcctcaaagacgcaaaacattttccaacaagagctgtcacagtggcagcaaagcaggggccacccgtctccacagtccttcagagtttcagctgcatcctggtgtcccacccaggtcgagcccccaggcttctggaaaagagtgtgtgctctactttgatggaaacatggcaaggaatttaaagacaggaatgtattaatattattgaaggtgtgttcgtaacctctgattctgtggacttgccactttctccaaacgctcggttcctttgaagatttcttctgaacgtgtgtgcgcacgctgggcgggttcgtgcatacatgcggggaccccagactgtcagcacagggaagatggatcccatcctaatttttatcacctgaaggttggaaccagtgagggactgggagagagtgatttataagcaccaatatcaacttcatgtggatttttgacaaggaggggtagtttgtaatttcatttaaattcttttcagcagctggaaatattgcactatctgaaacactgaatctccttttgtaactggtgttcactgacaccttgatggctcttgatggctctaaaaagttgtaggattttttgtttttgtagctaacttatggattgagatgtgatcaaaggctttattaaatttgtacttcagcata

SEQ ID NO: 233905 - DNA, 5617 bp, Artificial Sequence
  derived and/or modified sequence
aacgtcttaagccgtccgttgtgcgcctaggggccagttttctttccagcctccccggccggagtgggttccagcttttctcggctggggagggcatttatcccacctccgctatttcagctgccagaggggaggcaaggtgtggggaagttttccttcccgggcgaagaagctctgcggaactgtcattttccggaactggatgcttgcttcctggcggggttctgaaagcgaacaccgcggggcaagatggcggtagtgcgtcggctgctgccccgggtctggcagaactcgggtgttttgggctgagacagtggcagctgcggccccgaccccaagtgcggggacctccggcgaataaagaaaaaataacaagcttttctgaagtgagaagctgttctcagccacgagtcctgtgcaagatcactaatgattacctggcatttctgcgacacaggcaggtcctcagggtttgtgcaagtttgcaaacatgttcaccctgtctcagacctcgagagcatggttcatcgatagagcccgtcaggcacgagaagaaaggcttgtgcagaaggaacgggagcgggcagctgttgtgatccaggcccatgtccggagttttctctgtcggagtcgactgcagagagatatcaggagagagattgatgacttttttaaagcagatgaccctgagtccactaaaagaagtgcactttgtattttcaagattgccaggaaactgctgttcctattcagaatcaaagaggataatgagagatttgagaagttgtgtcgcagcatcctgagcagcatggatgctgagaatgagcctaaggtgtggtatgtgtccctggcttgttctaaggacctcaccctcctttggattcaacagatcaagaacattttgtggtactgctgtgattttctcaagcagctcaagcctgaaatcctgcaggactcccgactcatcaccctgtacctcacgatgcttgtcaccttcacagacacttcaacgtggaaaattcttcggggaaaaggtgaaagtcttcgaccagcgatgaaccacatttgtgcaaatataatgggacatctcaaccagcatggattttattctgtgctgcagatattgttaacccgtggcctggcaagaccccgtccttgtctatccaaaggcactttaacagcagctttttctctagcgttacgccctgtgattgctgcacagttctcagacaatctgattcggccgttcctcatccacatcatgtctgtgcctgctctggtgactcatctcagcacagtgacccctgagcgcctcactgttttagaatcccatgacatgcttcgtaaattcatcatatttttaagagaccaagatcgatgccgtgatgtatgtgaaagtttagaaggatgccatacgctttgtctaatgggcaacctcctacacttgggctccctcagccccagagtgttagaggaggagacagatgggttcgtgagtttgctcacccagacgctgtgctactgtcggaagtatgtgtctcagaagaagtccaacctgacccactggcatcctgtccttggctggttctcccaatctgtggattatggccttaacgagtcaatgcacttgatcaccaaacagctgcagttcttgtggggggtgcctctgatccggatcttcttctgtgacatcctgagcaagaagctactggagagccaggagccagcccacgcacagccagcatcccctcagaatgtgctcccagtgaagagtctcctaaagcgtgcttttcaaaagtcggcatcagtccggaatattctcaggcctgtcgggggtaaacgggtcgactctgcagaagtccagaaggtttgcaacatctgtgtcctctaccagacctcgctgacaactctcacacagattcggctgcagatactcacaggtctcacttaccttgatgacctgcttcccaaactgtgggcatttatctgtgagctcgggccccacggagggttaaagctcttcttggaatgcctgaacaatgacactgaagagtccaagcaactcttggccatgctgatgctgttctgtgactgttcgcggcacctcatcacaatccttgatgacattgaagtttatgaagaacagatttcattcaaactggaagagctggtcactatctcctctttcctgaattcttttgtgtttaagatgatctgggatggaattgtagagaacgccaagggtgagaccttggagctgttccagtctgtccacgggtggcttatggtgctgtacgagcgggactgccggcggcgcttcacccccgaggaccactggctgcgaaaggatctcaaacctagcgtgctcttccaagaactcgacagggacagaaaacgggcacagttgatcctgcagtacatcccacatgtcatccctcacaaaaacagagttctactgtttcgaaccatggttaccaaggagaaggagaaactggggctggtggaaaccagctctgcctccccgcatgtcactcacatcaccatccgccggtccaggatgctggaggacggctacgagcagcttaggcagctctcccagcacgccatgaagggggtcatccgtgtgaagtttgtcaatgacctcggggtggacgaagcagggattgatcaagacggtgtttttaaggagttcttggaagagatcatcaagagagtttttgacccagcactcaatctgttcaagacaaccagtggggatgagaggctgtacccctcacccacatcctacatccatgagaattacctgcagctcttcgagtttgtggggaagatgctggggaaggctgtgtatgagggaattgtggtggacgtgccatttgcatccttcttcctgagccaactgcttgggcaccaccacagcgtcttctatagctcggtggatgaactgccttctctggactccgagttctataaaaacctcacctccatcaagcgctatgatggggacatcactgacctgggcctgacgctgtcttacgacgaggacgtcatgggtcagcttgtttgccatgaactgattcctggagggaagaccattcctgttacaaatgaaaataaaattagctacatccatctgatggcacattttcgaatgcacactcaaataaaaaaccaaacagctgccctcattagcggattccgttccattatcaaacccgagtggatccgaatgttctcaactcctgaactgcagcgtctcatctctggcgacaatgctgagattgatctggaagatttaaagaagcacacagtctactacggtggtttccatggaagtcacagagtcatcatctggctctgggatattctggcctccgacttcacaccggatgagagagctatgtttctgaagttcgtgaccagctgctccagacccccgctcctgggattcgcctacctcaagcctccattctccatccgctgcgtggaggtgtcggacgatcaggacaccggggacactctgggcagcgtcctccggggcttcttcaccatccgcaagcgggagccaggcggccgcctgcccacctcctccacctgcttcaacctgctcaagctgcccaactacagcaagaagagcgtcctccgcgagaagctgcgctacgccatcagcatgaacacgggctttgaactctcctagctcctgtcccagccctgcctccagggctcctgggctgccagggaccttcagctcccagaggcagtgtggtcctgggaatgtgaccaacatgccaggtgacattggcccctagaccctctctatagccatgagactccttgtggcctcaagaaatttagacgcccacgacagcactacacagcatctccaggtgatgcccaaggcacagggctgcagaaaataaacctccagattccaccaacacgggtccattcttcctggtgatggcagaggggcttcttttagctagtttgatcttttgggagtctgtctttccttagccgtctgagtgagctgtgtatgaacaagtcccaggagttccaagagtctagagtggtttttgcagcatgggttgagtgtacaaagcctactgtgcgtgagatcctctccttccgtttctgaaatctcttactcaggtaaggcctcgccaagcctctatgcaccccacaaagtttctgcctccatgccgtccacagcgcctcttcccagacagccaggcccatctgctgcccagggaagcgcaggcgcctgctagggacgctatggacaccgtgagtccaaggcgctgctcctgccttgaagccacgcgctccacgccgcggccctcccattttctgcgtcctcagcgggctgagctgccagagagtcttcccggacctattcccgtcctatgcattcacattggcatcctggtttgggggaagaaaaacaacggcccttagcagcagccccgtttccagaatgtgctgcctgttccccaaagcctgcttgtcccgcggaggacggctgcctttgaccctgcttatttgtctcactggttatctaatgaggaacaaacactaacctaaggtacacatcccatctgggcggtggcttcactcctgagtctgcaaaatcccaggaaacttgggtcttgctgcccatccttcctcagcacagggaacccggaagcccgttgcactgacagaggctcacaccctctgggttttttgttttttttttaaacttcatttctcttccaacccattgtgttcctctgccctcattctttacctttgttgtaagaactttagctccagggaactgaggcagaggccctgtttgtggtctgtgttgacagccacccaccctctcccacctcatgctcctgcacctgcaccaccaaggttgatgccggattcgaagccaggaaggcccagtccctcctctgctctcctcaaagacgcaaaacattttccaacaagagctgtcacagtggcagcaaagcaggggccacccgtctccacagtccttcagagtttcagctgcatcctggtgtcccacccaggtcgagcccccaggcttctggaaaagagtgtgtgctctactttgatggaaacatggcaaggaatttaaagacaggaatgtattaatattattgaaggtgtgttcgtaacctctgattctgtggacttgccactttctccaaacgctcggttcctttgaagatttcttctgaacgtgtgtgcgcacgctgggcgggttcgtgcatacatgcggggaccccagactgtcagcacagggaagatggatcccatcctaatttttatcacctgaaggttggaaccagtgagggactgggagagagtgatttataagcaccaatatcaacttcatgtggatttttgacaaggaggggtagtttgtaatttcatttaaattcttttcagcagctggaaatattgcactatctgaaacactgaatctccttttgtaactggtgttcactgacaccttgatggctcttgatggctctaaaaagttgtaggattttttgtttttgtagctaacttatggattgagatgtgatcaaaggctttattaaatttgtacttcagcata

SEQ ID NO: 233906 - DNA, 2763 bp, Artificial Sequence
  derived and/or modified sequence
accgcggggcaagatggcggtagtgcgtcggctgctgccccgggtctggcagaactcgggtgttttgggctgagacagtggcagctgcggccccgaccccaagtgcggggacctccggcgaataaagggtttgtgcaagtttgcaaacatgttcaccctgtctcagacctcgagagcatggttcatcgatagagcccgtcaggcacgagaagaaaggcttgtgcagaaggaacgggagcgggcagctgttgtgatccaggcccatgtccggagttttctctgtcggagtcgactgcagagagatatcaggagagagattgatgacttttttaaagcagatgaccctgagtccactaaaagaagtgcactttgtattttcaagattgccaggaaactgctgttcctattcagaatcaaagaggataatgagagatttgagaagttgtgtcgcagcatcctgagcagcatggatgctgagaatgagcctaaggtgtggtatgtgtccctggcttgttctaaggacctcaccctcctttggattcaacagatcaagaacattttgtggtactgctgtgattttctcaagcagctcaagcctgaaatcctgcaggactcccgactcatcaccctgtacctcacgatgcttgtcaccttcacagacacttcaacgtggaaaattcttcggggaaaaggtgaaagtcttcgaccagcgatgaaccacatttgtgcaaatataatgggacatctcaaccagcatggattttattctgtgctgcagatattgttaacccgtggcctggcaagaccccgtccttgtctatccaaaggcactttaacagcagctttttctctagcgttacgccctgtgattgctgcacagttctcagacaatctgattcggccgttcctcatccacatcatgtctgtgcctgctctggtgactcatctcagcacagtgacccctgagcgcctcactgttttagaatcccatgacatgcttcgtaaattcatcatatttttaagagaccaagatcgatgccgtgatgtatgtgaaagtttagaaggatgccatacgctttgtctaatgggcaacctcctacacttgggctccctcagccccagagtgttagaggaggagacagatgggttcgtgagtttgctcacccagacgctgtgctactgtcggaagtatgtgtctcagaagaagtccaacctgacccactggcatcctgtccttggctggttctcccaatctgtggattatggccttaacgagtcaatgcacttgatcaccaaacagctgcagttcttgtggggggtgcctctgatccggatcttcttctgtgacatcctgagcaagaagctactggagagccaggagccagcccacgcacagccagcatcccctcagaatgtgctcccagtgaagagtctcctaaagcgtgcttttcaaaagtcggcatcagtccggaatattctcaggcctgtcgggggtaaacgggtcgactctgcagaagtccagaaggtttgcaacatctgtgtcctctaccagacctcgctgacaactctcacacagattcggctgcagatactcacaggtctcacttaccttgatgacctgcttcccaaactgtgggcatttatctgtgagctcgggccccacggagggttaaagctcttcttggaatgcctgaacaatgacactgaagagtccaagcaactcttggccatgctgatgctgttctgtgactgttcgcggcacctcatcacaatccttgatgacattgaagtttatgaagaacagatttcattcaaactggaagagctggtcactatctcctctttcctgaattcttttgtgtttaagatgatctgggatggaattgtagagaacgccaagggtgagaccttggagctgttccagtctgtccacgggtggcttatggtgctgtacgagcgggactgccggcggcgcttcacccccgaggaccactggctgcgaaaggatctcaaacctagcgtgctcttccaagaactcgacagggacagaaaacgggcacagttgatcctgcagtacatcccacatgtcatccctcacaaaaacagagttctactgtttcgaaccatggttaccaaggagaaggagaaactggggctggtggaaaccagctctgcctccccgcatgtcactcacatcaccatccgccggtccaggatgctggaggacggctacgagcagcttaggcagctctcccagcacgccatgaagggggtcatccgtgtgaagtttgtcaatgacctcggggtggacgaagcagggattgatcaagacggtgtttttaaggagttcttggaagagatcatcaagagagtttttgacccagcactcaatctgttcaagacaaccagtggggatgagaggctgtacccctcacccacatcctacatccatgagaattacctgcagctcttcgagtttgtggggaagatgctggggaaggctgtgtatgagggaattgtggtggacgtgccatttgcatccttcttcctgagccaactgcttgggcaccaccacagcgtcttctatagctcggtggatgaactgccttctctggactccgagttctataaaaacctcacctccatcaagcgctatgatggggacatcactgacctgggcctgacgctgtcttacgacgaggacgtcatgggtcagcttgtttgccatgaactgattcctggagggaagaccattcctgttac

SEQ ID NO: 233907 - protein, 130 aa, Artificial Sequence
  derived and/or modified sequence
MQAPWAGNRGWAGTREEVRDMSEHVTRSQSSERGNDQESSQPVGPVIVQQPTEEKRQEEEPPTDNQGIAPSGEIKNEGAPAVQGTDVEAFQQELALLKIEDAPGDGPDVREGTLPTFDPTKVLEAGEGQL

SEQ ID NO: 233908 - protein, 93 aa, Artificial Sequence
  derived and/or modified sequence
MSEHVTRSQSSERGNDQESSQPVGPVIVQQPTEEKRQEEEPPTDNQGTDVEAFQQELALLKIEDAPGDGPDVREGTLPTFDPTKVLEAGEGQL

SEQ ID NO: 233909 - protein, 110 aa, Artificial Sequence
  derived and/or modified sequence
MSEHVTRSQSSERGNDQESSQPVGPVIVQQPTEEKRQEEEPPTDNQGIAPSGEIKNEGAPAVQGTDVEAFQQELALLKIEDAPGDGPDVREGTLPTFDPTKVLEAGEGQL

SEQ ID NO: 233910 - DNA, 393 bp, Artificial Sequence
  derived and/or modified sequence
atgcaggccccctgggccggcaacagaggctgggccggcaccagagaggaggtgagagacatgagcgagcacgtgaccagaagccagagcagcgagagaggcaacgaccaggagagcagccagcccgtgggccccgtgatcgtgcagcagcccaccgaggagaagagacaggaggaggagccccccaccgacaaccagggcatcgcccccagcggcgagatcaagaacgagggcgcccccgccgtgcagggcaccgacgtggaggccttccagcaggagctggccctgctgaagatcgaggacgcccccggcgacggccccgacgtgagagagggcaccctgcccaccttcgaccccaccaaggtgctggaggccggcgagggccagctgtag

SEQ ID NO: 233911 - DNA, 393 bp, Artificial Sequence
  derived and/or modified sequence
atgcaggctccttgggctggaaatcgcggctgggcgggcaccagggaagaagtgcgcgacatgagtgaacacgttactagaagtcaaagctccgaacgagggaatgatcaagagagcagccagcccgtgggccctgttatcgttcagcagccgacagaggagaagagacaagaagaggaaccgccaaccgacaaccagggcatagcccctagcggggaaatcaagaacgagggtgccccggcagtgcagggtacagacgttgaggctttccaacaggagttggccctactgaagattgaggacgcaccgggtgacggtcctgatgtgcgagaaggaacactccctaccttcgaccccactaaagttttggaggcaggtgagggacagttgtag

SEQ ID NO: 233912 - DNA, 393 bp, Artificial Sequence
  derived and/or modified sequence
atgcaggccccctgggccggcaacagaggctgggccggcacccgggaggaggtgcgggacatgtctgagcacgtgaccaggagccagagcagcgagagaggaaatgaccaggagagcagccagcctgtgggccctgtgattgtgcagcagcccacagaggagaagaggcaggaggaggagcccccaacagacaaccagggcatcgcccccagcggggagatcaagaatgaaggagccccagctgtgcagggcacagatgtggaggccttccagcaggagctggccctgctgaagattgaagatgcccctggagatggcccagatgtgcgggagggcaccctgcccacctttgaccccaccaaggtgctggaggccggggagggccagctgtag

SEQ ID NO: 233913 - DNA, 393 bp, Artificial Sequence
  derived and/or modified sequence
atgcaggccccctgggccggcaaccggggctgggccggcacccgggaagaggtgagagacatgtctgagcacgtcactaggagtcagagtagtgagcggggaaatgaccaggagtcttcacagccggtcgggccagtgatcgtgcagcaaccaactgaggaaaaacggcaggaggaggaacctccgacggataatcaagggatcgcccctagcggcgaaattaaaaatgaaggagctcccgctgtacagggaacagatgtggaggcgttccagcaagaactggccctcctcaaaatcgaagatgcccctggcgatggaccagatgttagagagggaaccctgccgacattcgacccaaccaaggtcttagaggccggcgaagggcagctgtag

SEQ ID NO: 233914 - DNA, 741 bp, Artificial Sequence
  derived and/or modified sequence
aggcagagctctgcaaggagaggttgtgtcttcgttctttccgccatcttcgttctttccaacatcttcgttctttctcactgaccgagactcagccggtaggtctgcagagtggtcttcctggtaatttagttgtgagtgaatgtgtggaggagccagcgggcttaggacaggtcccgtggcacagtccgtggctttgagggaaaagggcctcgcggtggtcctccgccttcccccaggtcctgatgcaggcgccatgggccggtaatcgtggctgggctggaacgagggaggaagtgagagatatgagtgagcatgtaacaagatcccaatcctcagaaagaggaaatgaccaagagtcttcccagccagttggacctgtgattgtccagcagcccactgaggaaaaacgtcaagaagaggaaccaccaactgataatcagggtattgcacctagtggggagatcaaaaatgaaggagcacctgctgttcaagggactgatgtggaagcttttcaacaggaactggctctgcttaagatagaggatgcacctggagatggtcctgatgtcagggaggggactctgcccacttttgatcccactaaagtgctggaagcaggtgaagggcaactataggtttaaaccaagacaaatgaagactgaaaccaagaatattgttcttatgctggaaatttgactgctaacattctcttaataaagttttacagttttctgcaaa

SEQ ID NO: 233915 - DNA, 428 bp, Artificial Sequence
  derived and/or modified sequence
cttcgttctttctcactgaccgagactcagccgtgagagatatgagtgagcatgtaacaagatcccaatcctcagaaagaggaaatgaccaagagtcttcccagccagttggacctgtgattgtccagcagcccactgaggaaaaacgtcaagaagaggaaccaccaactgataatcaggggactgatgtggaagcttttcaacaggaactggctctgcttaagatagaggatgcacctggagatggtcctgatgtcagggaggggactctgcccacttttgatcccactaaagtgctggaagcaggtgaagggcaactataggtttaaaccaagacaaatgaagactgaaaccaagaatattgttcttatgctggaaatttgactgctaacattctcttaataaagttttacagttttctgcaaaga

SEQ ID NO: 233916 - DNA, 540 bp, Artificial Sequence
  derived and/or modified sequence
gcagagctctgcaaggagaggttgtgtcttcgttctttccgccatcttcgttctttccaacatcttcgttctttctcactgaccgagactcagccgtgagagatatgagtgagcatgtaacaagatcccaatcctcagaaagaggaaatgaccaagagtcttcccagccagttggacctgtgattgtccagcagcccactgaggaaaaacgtcaagaagaggaaccaccaactgataatcagggtattgcacctagtggggagatcaaaaatgaaggagcacctgctgttcaagggactgatgtggaagcttttcaacaggaactggctctgcttaagatagaggatgcacctggagatggtcctgatgtcagggaggggactctgcccacttttgatcccactaaagtgctggaagcaggtgaagggcaactataggtttaaaccaagacaaatgaagactgaaaccaagaatattgttcttatgctggaaatttgactgctaacattctcttaataaagttttacagttttctgcaaa

SEQ ID NO: 233917 - DNA, 393 bp, Artificial Sequence
  derived and/or modified sequence
atgcaagccccttgggcaggcaatcggggttgggccggaactcgggaagaagtaagggatatgagcgaacacgtcactcgatcccagtcatccgagcgagggaatgaccaggaatccagccagccagtcgggccagtcattgttcagcaacctacagaggaaaaacgccaggaggaggagccaccgaccgacaatcaggggattgcgccaagcggcgaaatcaagaatgaaggcgctcccgctgtccaggggaccgatgtggaggcgttccagcaggagctggctctgttgaagattgaggacgcccctggcgacggtcccgacgttcgcgagggtacactgcctacattcgatcctaccaaggtgcttgaggcaggcgaaggacagctgtag

SEQ ID NO: 233918 - protein, 376 aa, Artificial Sequence
  derived and/or modified sequence
MFPRPLTPLAAPNGAEPLGRALRRAPLGRARAGLGGPPLLLPSMLMFAVIVASSGLLLMIERGILAEMKPLPLHPPGREGTAWRGKAPKPGGLSLRAGDADLQVRQDVRNRTLRAVCGQPGMPRDPWDLPVGQRRTLLRHILVSDRYRFLYCYVPKVACSNWKRVMKVLAGVLDSVDVRLKMDHRSDLVFLADLRPEEIRYRLQHYFKFLFVREPLERLLSAYRNKFGEIREYQQRYGAEIVRRYRAGAGPSPAGDDVTFPEFLRYLVDEDPERMNEHWMPVYHLCQPCAVHYDFVGSYERLEADANQVLEWVRAPPHVRFPARQAWYRPASPESLHYHLCSAPRALLQDVLPKYILDFSLFAYPLPNVTKEACQQ

SEQ ID NO: 233919 - DNA, 795 bp, Artificial Sequence
  derived and/or modified sequence
atgccccggagcctgaagcgggcccagctgcggagcctgctgcccaggcctccggccgtgagccatactcaaccttggtacagggccgcccacccaacaacgagtcctacggctgcaagtcgagacgtacacccagctagcggagccgtaccagggccgtggctggtggaaggcacagccgttagagaaggaccacagctacaagacgcagtgccccagagacctactagaccgtctaaagccctgtggccagctcagatgagcgcagctcccgctattcggctgggccagatggtgccaggcgacacaagaggtctgtggggacctcagggcaccctactgacctggacttatcggggcggccaaggggggaggtggactagaagggcagaggggccgcgcgaagggacctttgccgagcagcgcccccactttcagtctagcggagcccagcaagaatcacgcctggccatggggccacccccattgggccttggtgatgcggctggcgacggacgaggccagacaggccaggagaaggggcgcgcagagggtcggcaagcgagaaagagcgcctgtaaatgcccccgcaaggggcccaacccaggaccgtggacgcgcgccgctgcctggtggggacggctggagggcgcaaaggcaagcgctaagggagagcaggttagggaccctggcgggcacttgtgggaacagggccacgtgtccccctgcgccaggttcaaccagggccattcatgtgggagcccgaaggtaagccatactacatgggtttcatag

SEQ ID NO: 233920 - DNA, 438 bp, Artificial Sequence
  derived and/or modified sequence
tagcgcaggggggctggcgtgcgcagcggctgcgcaagcagagcctgttccggcgcacttggtggaagaggtccaggggagtctttattcgctcagtacccccgacgggctgagggccgtagagaaaagcagcaggtaacggagcagagaaacgggtggccgtcccaatcttggagctgctgttgctccacgtgctcgcctaacaagtgttcctacatcctgatgacccagtgtattggcagcagggagatggaattgagcgccgagtggcctggttgctcagtgaatatgaaagcaaccaagaccgctcgaggatctgagctgattctatcattaggatctttctccgggagagcgggacagcgccgtcgtccccctcctggccatcaggatggcagcgacacgcggggtctcagacgagttcaattagctctctag

SEQ ID NO: 233921 - DNA, 1131 bp, Artificial Sequence
  derived and/or modified sequence
atgttccccaggccactgacgcccctggctgccccaaacggagccgaaccactgggtagagccctgagaagagccccactgggacgggcacgagccggactaggtggccccccactgctcttgccaagtatgctgatgtttgccgtgattgtggcttcctccggcctgctgctgatgatcgagaggggcattttagctgagatgaaacctctgcccctccaccctcctggaagagagggcacggcctggagggggaaggctcccaagccagggggactctctttgagagctggcgacgcagacctgcaggttcggcaggacgttaggaacagaacgctgcgggccgtttgcggtcagcccggaatgccgagagacccttgggacctccccgtggggcagcggcgcaccttactgaggcacatccttgtgagcgatcgttacaggtttttatattgctacgtgcccaaggttgcatgctcaaactggaaaagagttatgaaggttctggcaggcgtgctcgactcagtggacgtgcgactgaagatggaccacagaagcgacctggtgtttttagccgacctgcgacccgaagaaataagatatcgactgcagcattattttaaatttctcttcgtcagggaacctctggagcgcctgctcagcgcatatagaaataaatttggggaaattcgcgagtatcagcagcggtatggggcagaaattgtccggagatacagggccggcgcaggcccttccccggcaggcgacgatgtgacttttcctgagtttcttagatatctcgttgacgaggatcctgagagaatgaacgagcattggatgcctgtctatcacctgtgtcaaccttgcgcggtacattacgacttcgtcgggagctacgagcgcctggaggccgatgcaaatcaagtgctggagtgggtgcgcgccccccctcacgtgcgctttccagctcgtcaggcctggtatcggccggccagtcctgaaagccttcattaccacttgtgcagtgcacccagggctctcctccaagacgtactgcctaagtatatccttgacttctctctcttcgcttaccccttacccaacgtgaccaaagaggcctgtcagcagtag

SEQ ID NO: 233922 - DNA, 1131 bp, Artificial Sequence
  derived and/or modified sequence
atgttcccccggcccctgacccccctggccgccccaaatggagctgagcccctgggccgggccctgcggcgggcccccctgggccgggcccgggccggcctgggcggcccccccctgctgctgcccagcatgctgatgtttgctgtgattgtggccagcagcggcctgctgctgatgattgaaagaggcatcctggccgagatgaagcccctgcccctgcaccccccaggccgggagggcacagcctggaggggcaaggcccccaagccaggcggcctgagcctgcgggctggagatgctgacctgcaggtgcggcaggatgtgaggaacagaaccctgcgggctgtgtgtggccagcccggcatgccccgggacccctgggacctgcctgtgggccagaggaggaccctgctgcggcacatcctggtgtctgaccgctaccgcttcctgtactgctacgtgcccaaggtggcctgcagcaactggaagagggtgatgaaggtgctggccggcgtgctggacagcgtggatgtgcggctgaagatggaccacagaagtgacctggtgttcctggccgacctgcggcctgaggagatccgctaccgcctgcagcactacttcaagttcctgtttgtgcgggagcccctggagcggctgctgagcgcctacagaaacaagtttggagagatccgggagtaccagcagagatatggagctgagatcgtgcggcgctacagagctggagctggccccagccctgctggagatgatgtgaccttccctgagttcctgcgctacctggtggatgaggaccctgagaggatgaatgagcactggatgcctgtgtaccacctgtgccagccctgtgctgtgcactatgactttgtgggcagctatgagcggctggaggctgatgccaaccaggtgctggagtgggtgcgggccccaccccacgtgcgcttccctgcccggcaggcctggtacagacctgccagccctgagagcctgcactaccacctgtgcagcgccccccgggccctgctgcaggatgtgctgcccaagtacatcctggacttcagcctgtttgcctaccccctgcccaacgtgaccaaggaggcctgccagcagtag

SEQ ID NO: 233923 - DNA, 1131 bp, Artificial Sequence
  derived and/or modified sequence
atgttcccccggcccctgacccccctggccgcccccaacggcgccgaaccgctggggcgggccctacggagagcaccactcggccgcgccagagccggactcggcggacccccgcttctactcccttcaatgcttatgtttgcagttatcgtggctagctccggcttgctccttatgatcgagcggggtatccttgcagaaatgaaacctcttccactccatcctccaggtcgagaaggaacggcctggcgcggcaaggccccaaagccgggtggcctttcactgcgggccggcgatgcagacctccaggtgagacaggacgttagaaaccgcacactgagagcagtgtgcggccagccagggatgccacgggacccttgggatcttcccgtcggacagagaaggacactcctgcggcatatcttggtgtccgatcgctataggttcctatattgctacgtgcccaaggtggcttgttcaaattggaaacgagtcatgaaggtgctagctggagtgctagactcagtagatgttcggttgaagatggaccaccgcagtgatctggtatttctcgccgatttgagaccagaggaaatccggtaccgacttcagcattactttaagtttctcttcgtccgggagcctcttgaacggctgctctcagcgtacaggaacaaatttggtgaaatccgggagtaccagcaacgctatggggcagagatagtgcgccgttacagagctggagccggaccaagtccagcaggtgatgacgtcacatttccggaatttctgcgctacctagtggacgaggatccggaacgaatgaatgagcattggatgcccgtctaccatctgtgccagccatgtgcagtccactacgacttcgtcgggagctacgagcgattggaggccgacgcaaaccaggtactggagtgggttagggcacctccacacgtgcggttcccagccagacaggcgtggtaccggccagctagtcccgagagcctgcactaccatctatgttctgctcctagagctctccttcaggatgtcttgcccaagtatatcctagatttctctctgttcgcttacccactgccaaacgttaccaaggaagcttgccagcagtag

SEQ ID NO: 233924 - DNA, 1131 bp, Artificial Sequence
  derived and/or modified sequence
atgttccctcggcctttgactccgctggctgcccctaatggggcagagcccctggggagggccttaaggagagcccctctcgggcgagccagggctggcctcggaggccctccactcttgctcccttcaatgttgatgtttgctgtgatcgtcgcctcttcaggcctcttattaatgatcgaacggggaatcttggctgagatgaagcctctgccccttcacccacctggtcgtgagggcacggcgtggcgcggaaaggccccaaagcctggagggttgtccctgagggcaggcgacgctgaccttcaggttcgtcaggatgtacggaatcgaacgctccgagcagtctgcggccagcccggtatgcctagagatccttgggacctgcccgtaggccaacggagaaccctgcttcgccatattcttgtgtccgacagatataggttcttgtactgttatgtgcccaaggttgcttgctctaattggaaacgggtcatgaaggtgttagcaggcgttttggactctgtggacgtgcgcctcaagatggatcataggtcagatctggtttttctcgctgacctgcgtccagaagagatacggtataggctgcaacattattttaagttcttgttcgtgagggaaccgctagagcgtttactctccgcatacagaaataagtttggggagatacgagagtatcagcagcgttacggggctgagatcgtgaggaggtaccgcgctggagccggtccctcacctgccggagatgacgtgacctttcccgaattccttagatacctcgtggacgaggatccagagcgaatgaacgagcattggatgccagtctatcacctctgccagccttgtgccgtgcattatgactttgtcggctcatacgaaaggctggaagccgacgctaatcaagtgctagaatgggtgagggcaccgcctcacgttcgcttcccagccaggcaggcctggtacagaccggcttccccagagtctctgcattatcacctttgtagtgcccctcgcgctctactgcaggatgtcctgccaaagtatatcttggacttcagcttgttcgcgtacccccttcccaatgtcactaaggaggcgtgtcagcaatag

SEQ ID NO: 233925 - DNA, 2194 bp, Artificial Sequence
  derived and/or modified sequence
ctgcgaggccgggggtggagagcggccgggcgggacatccggcccgggtccctcgccgcgcccgccgcccgccgcccgcttcggcgccgcagcccgggagccggccacccctacacgcgccagggctgtcccctgccctcccctccccaactacccccggtcccagaccctcctcccgcccccagcccgagcccgccttccaggccgccctcggatcggccgggcccgcgcaggcccccaccccttgagcaccatgttcccccgcccgctgaccccgctggcggccccaaatggcgccgagcccctgggccgggcgctgaggcgggcccctctgggcagggcccgggcggggctgggtgggccgcccctgctgctgccgtccatgctgatgtttgcggtgatcgtggcctccagcgggctgctgctcatgatcgagcggggcatcctggccgagatgaagcccctgcccctgcacccgcccggccgcgagggcacagcctggcgcgggaaagcccccaagcctgggggcctgtccctcagggctggggacgcggacttgcaagtgcggcaggacgtccggaacaggaccctgcgggcggtgtgcggacagccaggcatgccccgggacccctgggacttgccggtggggcagcggcgcaccctgctgcgccacatcctcgtaagtgaccgttaccgcttcctctactgctacgtccccaaggtggcctgctctaactggaagcgggtgatgaaggtgctggcaggcgtcctggacagcgtggacgtccgcctcaagatggaccaccgcagtgacctggtgttcctggccgacctgcggcctgaggagattcgctaccgcctgcagcactactttaagttcctgtttgtgcgggagcccttggaacgcctcctctctgcctaccgcaacaagtttggcgagatccgagagtaccagcaacgctatggggctgagatagtgaggcggtacagggctggagcggggcccagccctgcaggcgacgatgtcacattccccgagttcctgagatacctggtggatgaggaccctgagcgcatgaatgagcattggatgcccgtgtaccacctgtgccagccttgtgccgtgcactatgactttgtgggctcctatgagaggctggaggctgatgcaaatcaggtgctggagtgggtacgggcaccacctcacgtccgatttccagctcgccaggcctggtaccggccagccagccccgaaagcctgcattaccacttgtgcagtgccccccgggccctgctgcaggatgtgctgcctaagtatatcctggacttctccctctttgcctacccactgcctaatgtcaccaaggaggcgtgtcagcagtgaccatgggtgtggggccagcagctggtggggactggtttcaacgccagctttctgtgcttctgcctgtcattcggagaaactctggctctggggcttggggcttctcaggatcctggatggcagagactgccctcagaagttccttgtccagggtgggcacccacagtgactcagaggacagggctaggcaggagacctgctgctcctcattggggggatctcttggggggcagacaccagtttgccaatgaagcaacacatctgatctaaagactggctccagaccccgggctgccaggattatgcagtccacttggtctaccttaatttaacctgtggccaaactcagagatggtaccagccaggggcaagcatgaccagagccagggaccctgtggctctgatcccccatttatccaccccatgtgcctcaggactagagtgagcaatcataccttataaatgacttttgtgcctttctgctccagtctcaaaatttcctacacctgccagttctttacatttttccaaggaaaggaaaacggaagcagggttcttgcctggtagctccaggacccagctctgcaggcacccaaagaccctctgtgcccagcctcttccttgagttctcggaacctcctccctaattctcccttccttccccacaaggcctttgaggttgtgactgtggctggtatatctggctgccatttttctgatgcatttatttaaaatttgtactttttgatagaacccttgtaagggctttgttttcctaatagctgactttttaataaagcagttttatat

SEQ ID NO: 233926 - DNA, 1131 bp, Artificial Sequence
  derived and/or modified sequence
atgttccccagacccctgacccccctggccgcccccaacggcgccgagcccctgggcagagccctgagaagagcccccctgggcagagccagagccggcctgggcggcccccccctgctgctgcccagcatgctgatgttcgccgtgatcgtggccagcagcggcctgctgctgatgatcgagagaggcatcctggccgagatgaagcccctgcccctgcacccccccggcagagagggcaccgcctggagaggcaaggcccccaagcccggcggcctgagcctgagagccggcgacgccgacctgcaggtgagacaggacgtgagaaacagaaccctgagagccgtgtgcggccagcccggcatgcccagagacccctgggacctgcccgtgggccagagaagaaccctgctgagacacatcctggtgagcgacagatacagattcctgtactgctacgtgcccaaggtggcctgcagcaactggaagagagtgatgaaggtgctggccggcgtgctggacagcgtggacgtgagactgaagatggaccacagaagcgacctggtgttcctggccgacctgagacccgaggagatcagatacagactgcagcactacttcaagttcctgttcgtgagagagcccctggagagactgctgagcgcctacagaaacaagttcggcgagatcagagagtaccagcagagatacggcgccgagatcgtgagaagatacagagccggcgccggccccagccccgccggcgacgacgtgaccttccccgagttcctgagatacctggtggacgaggaccccgagagaatgaacgagcactggatgcccgtgtaccacctgtgccagccctgcgccgtgcactacgacttcgtgggcagctacgagagactggaggccgacgccaaccaggtgctggagtgggtgagagcccccccccacgtgagattccccgccagacaggcctggtacagacccgccagccccgagagcctgcactaccacctgtgcagcgcccccagagccctgctgcaggacgtgctgcccaagtacatcctggacttcagcctgttcgcctaccccctgcccaacgtgaccaaggaggcctgccagcagtag

SEQ ID NO: 233927 - protein, 1581 aa, Artificial Sequence
  derived and/or modified sequence
MVQKKKFCPRLLDYLVIVGARHPSSDSVAQTPELLRRYPLEDHTEFPLPPDVVFFCQPEGCLSVRQRRMSLRDDTSFVFTLTDKDTGVTRYGICVNFYRSFQKRISKEKGEGGAGSRGKEGTHATCASEEGGTESSESGSSLQPLSADSTPDVNQSPRGKRRAKAGSRSRNSTLTSLCVLSHYPFFSTFRECLYTLKRLVDCCSERLLGKKLGIPRGVQRDTMWRIFTGSLLVEEKSSALLHDLREIEAWIYRLLRSPVPVSGQKRVDIEVLPQELQPALTFALPDPSRFTLVDFPLHLPLELLGVDACLQVLTCILLEHKVVLQSRDYNALSMSVMAFVAMIYPLEYMFPVIPLLPTCMASAEQLLLAPTPYIIGVPASFFLYKLDFKMPDDVWLVDLDSNRVIAPTNAEVLPILPEPESLELKKHLKQALASMSLNTQPILNLEKFHEGQEIPLLLGRPSNDLQSTPSTEFNPLIYGNDVDSVDVATRVAMVRFFNSANVLQGFQMHTRTLRLFPRPVVAFQAGSFLASRPRQTPFAEKLARTQAVEYFGEWILNPTNYAFQRIHNNMFDPALIGDKPKWYAHQLQPIHYRVYDSNSQLAEALSVPPERDSDSEPTDDSGSDSMDYDDSSSSYSSLGDFVSEMMKCDINGDTPNVDPLTHAALGDASEVEIDELQNQKEAEEPGPDSENSQENPPLRSSSSTTASSSPSTVIHGANSEPADSTEMDDKAAVGVSKPLPSVPPSIGKSNVDRRQAEIGEGSVRRRIYDNPYFEPQYGFPPEEDEDEQGESYTPRFSQHVSGNRAQKLLRPNSLRLASDSDAESDSRASSPNSTVSNTSTEGFGGIMSFASSLYRNHSTSFSLSNLTLPTKGAREKATPFPSLKVFGLNTLMEIVTEAGPGSGEGNRRALVDQKSSVIKHSPTVKREPPSPQGRSSNSSENQQFLKEVVHSVLDGQGVGWLNMKKVRRLLESEQLRVFVLSKLNRMVQSEDDARQDIIPDVEISRKVYKGMLDLLKCTVLSLEQSYAHAGLGGMASIFGLLEIAQTHYYSKEPDKRKRSPTESVNTPVGKDPGLAGRGDPKAMAQLRVPQLGPRAPSATGKGPKELDTRSLKEENFIASIELWNKHQEVKKQKALEKQRPEVIKPVFDLGETEEKKSQISADSGVSLTSSSQRTDQDSVIGVSPAVMIRSSSQDSEVSTVVSNSSGETLGADSDLSSNAGDGPGGEGSVHLASSRGTLSDSEIETNSATSTIFGKAHSLKPSIKEKLAGSPIRTSEDVSQRVYLYEGLLGRDKGSMWDQLEDAAMETFSISKERSTLWDQMQFWEDAFLDAVMLEREGMGMDQGPQEMIDRYLSLGEHDRKRLEDDEDRLLATLLHNLISYMLLMKVNKNDIRKKVRRLMGKSHIGLVYSQQINEVLDQLANLNGRDLSIWSSGSRHMKKQTFVVHAGTDTNGDIFFMEVCDDCVVLRSNIGTVYERWWYEKLINMTYCPKTKVLCLWRRNGSETQLNKFYTKKCRELYYCVKDSMERAAARQQSIKPGPELGGEFPVQDLKTGEGGLLQVTLEGINLKFMHNQFLKLKKW

SEQ ID NO: 233928 - DNA, 4746 bp, Artificial Sequence
  derived and/or modified sequence
atggtgcaaaagaagaaattctgtccaaggctccttgattatcttgtcatcgtaggagccagacatccaagctcagacagcgtcgcacaaactccagaactgctgcgacgctatccactcgaggaccacaccgagtttccacttcctcccgatgtggtgtttttttgtcagccggaggggtgccttagcgttcgccagcggaggatgtctcttcgagatgatacctcctttgtctttaccctgacggataaagatactggagtgacgcggtatggcatctgcgtaaacttctacaggagctttcagaaaagaatctcaaaagagaagggcgaaggtggcgccggctctaggggaaaggaaggaactcatgcaacctgcgcctccgaggaagggggcactgagtcctcagaatcaggatcctcgttgcagcctctgtccgcagacagcacgccagacgtgaaccagagtccccgggggaaacgccgagccaaagctgggagtagaagcaggaatagcaccctgactagcctttgtgtgttatcccactatcctttctttagcacctttcgggagtgcctgtacactttgaagcggttggtggactgttgctctgagcggctgctggggaagaaattaggcattccacggggcgttcagcgcgataccatgtggcgcattttcacaggctccctgttagtagaggagaagtccagcgctctactgcacgatcttcgcgagatcgaggcatggatctatagactgcttaggtcccccgtacccgtgagcggtcagaagcgcgttgatatagaagtgttgccccaggaactacaacccgccctgacttttgccttacccgatccgtctcggttcacactcgttgattttcctctgcacctgccactcgaacttctgggagttgatgcatgtctgcaggtcctgacatgcatcctgttagagcacaaggtcgtgcttcagtcaagagactacaacgcgctttcgatgtccgtgatggcctttgtggcgatgatttaccccctggagtacatgtttcctgtgatccccttgctaccaacttgtatggcctccgctgagcagctcctgctggcccctaccccgtacatcatcggggtccccgcgtcattctttctctataaactcgacttcaagatgcctgatgacgtgtggttagtggaccttgatagcaaccgtgtcatagctcctacgaacgcagaggtgcttcctattttaccggaacctgagtcactggagttgaaaaaacaccttaaacaggcgttagcctcgatgtcgctgaatactcagcctattctgaacttggaaaagttccacgaaggccaagaaatccctctcctgctggggagacccagtaacgacttgcagagtacaccttctaccgaatttaatcccttgatctacgggaacgacgtggacagtgtggatgtggctactagggtggctatggtgcggtttttcaatagcgccaatgtcctccagggattccaaatgcatactcgcaccctccgcttgtttccccggccggtggtggcttttcaggctggctcctttctggcaagcagaccacgtcagacgcccttcgctgaaaaactagcccgcacacaggccgtggaatactttggggagtggatccttaatcccactaattatgccttccagcgtattcataacaacatgttcgatcctgcattgatcggggacaagcccaaatggtacgcacaccaactgcagccgatccactaccgcgtgtacgattctaactcacagctcgcggaggccctgagcgtgccccccgagcgcgatagtgatagtgaaccgacagacgactccggctcggatagcatggactacgacgacagtagttcctcatactcaagtctgggcgatttcgtaagtgaaatgatgaaatgcgatatcaatggagatacaccaaatgttgacccactgactcacgctgccctcggggacgcgtccgaggtggagatcgatgaattgcaaaatcagaaagaagctgaagagccgggccccgactccgaaaatagtcaggagaacccccccttaaggtcatctagttcaacaactgccagtagttccccatctacagtgatccatggcgccaactccgagcctgcagactccactgaaatggatgacaaggccgctgtcggtgtgtcgaagcccctgccctccgttccaccgagcataggaaagtctaacgtcgatagacggcaggcagagataggggaagggagtgtgcgacgcagaatatacgataacccttactttgaacctcagtacggttttcccccagaagaggatgaagatgaacagggagagagttacacaccacgcttctctcaacacgttagcggcaatagggcccagaagcttctgaggccaaactcactcagactcgcctctgactcagatgccgaaagcgattcacgagccagcagcccaaacagtaccgtgtccaacactagtaccgaaggatttggtgggataatgagttttgcatctagcctgtacagaaaccactcaacaagcttttcactctccaatttaacactaccaaccaagggggcccgcgaaaaggcaacacccttcccatccctaaaggtgtttggccttaacacgttgatggaaattgtaacagaagccggcccaggctctggcgagggcaatagacgagctctagtggatcaaaaatcttctgtgatcaagcacagtcccactgttaaaagagaaccgccttcaccacagggacggagttctaattcctccgaaaaccagcagttcctcaaagaagtggtccacagtgttctggacggccagggggtaggttggctgaacatgaaaaaggtgaggcgcttactggagtctgagcagctgcgagtattcgtcctctctaaactcaaccggatggtgcaaagcgaagacgatgccaggcaggatattatacccgatgtggaaatctctagaaaagtatataaaggaatgttggacctgctcaagtgtacagttctgagcctagaacagagttatgctcatgctggtctgggcggcatggccagcattttcggcctgctggagatcgcccagacacattattacagcaaagaaccagacaagcgaaaaaggtcgcctacagaatccgtgaatactccagtgggcaaggaccccgggctcgccggtcgcggcgatcccaaggcgatggcacagctgcgcgtcccacagctgggccccagagcaccaagcgccactgggaagggcccaaaggaacttgatacgagatccctcaaagaagagaatttcattgcttctatagaactatggaacaaacatcaggaagtgaaaaaacagaaagcactggagaagcagcggccggaggtaattaagccagtgtttgatctaggcgaaactgaagagaagaaatctcagatcagtgccgacagcggagtgagtctcacctcttcatcacagcgaacagatcaggactcagtgattggagtgagtcctgctgtcatgattcgttcctcctctcaggatagtgaggtgtccactgtggtcagcaactcatccggagaaaccctgggagctgatagcgatcttagtagcaatgccggcgatggtcccggtggcgaaggctctgttcacttggcctcttcacggggcaccctctcagattccgaaatcgaaacgaatagtgctacaagcacaattttcggtaaggcccatagccttaaaccatcaatcaaggaaaaactggccggttctccaatacgtacatccgaggatgttagccaacgagtgtacttgtatgagggactcctaggacgagacaagggatccatgtgggatcagttggaggacgccgccatggagactttttctattagtaaagagcggtccacgctatgggatcaaatgcaattttgggaggatgcattcctggatgctgtgatgttagagcgcgagggcatgggaatggatcagggcccgcaggaaatgattgatcggtaccttagcctgggagaacatgatcggaaaaggctcgaagacgatgaggatcgattgctggcgactctcctccataaccttataagttacatgttgctcatgaaggtgaacaaaaatgatatcagaaaaaaggtccgtcgcctgatgggaaagagccacataggactcgtttacagccagcagattaacgaggtccttgatcagttagccaatctgaacgggcgagatctctcaatttggtctagtgggtcgcgccacatgaagaaacagacgttcgtagtccatgccggcactgataccaatggggatatattctttatggaagtgtgcgacgactgtgtcgtactgcgctctaacataggcacagtgtacgagcgctggtggtacgaaaaattaatcaacatgacatattgtccaaaaaccaaggtcctctgcctttggcgccgcaacggatcggagacccagctcaataagttctacaccaagaagtgccgggaactgtactattgtgtgaaagattccatggagagagctgcggctcgacaacagagtatcaagcctgggcctgagctggggggtgagttccccgttcaggatctcaagacaggggagggtgggcttctacaggttactcttgaaggcattaatttgaagttcatgcacaaccaatttcttaagctgaaaaaatggtag

SEQ ID NO: 233929 - DNA, 4746 bp, Artificial Sequence
  derived and/or modified sequence
atggtgcagaagaagaagttctgcccccggctgctggactacctggtgattgtgggcgcccggcaccccagcagtgacagcgtggcccagaccccagagctgctgcggcgctaccccctggaggaccacacagagttccccctgcccccagatgtggtgttcttctgccagcctgagggctgcctgtctgtgcggcagaggaggatgagcctgagagatgacaccagctttgtgttcaccctgacagacaaggacaccggggtgaccaggtatggcatctgtgtgaacttctaccgctccttccagaagaggatcagcaaggagaagggggagggcggggccggcagccggggcaaggagggcacccacgccacctgtgccagcgaggagggcggcacagagagcagcgagagcggcagcagcctgcagcccctgtctgctgacagcaccccagatgtgaaccagagcccccggggcaagagaagagccaaggccggcagccgcagcaggaacagcaccctgaccagcctgtgtgtgctgagccactaccccttcttcagcaccttcagagaatgtctgtacaccctgaagaggctggtggactgctgcagcgagcggctgctgggcaagaagctgggcatcccccggggcgtgcagagggacaccatgtggaggatcttcaccggcagcctgctggtggaggagaagagcagcgccctgctgcatgacctgcgggagattgaggcctggatctaccgcctgctgcggagccctgtgcctgtgtctggccagaagagggtggacatcgaggtgctgccccaggagctgcagcctgccctgacctttgccctgcctgaccccagccgcttcaccctggtggacttccccctgcacctgcccctggagctgctgggcgtggatgcctgcctgcaggtgctgacctgcatcctgctggagcacaaggtggtgctgcagagccgggactacaatgccctgtccatgtctgtgatggcctttgtggccatgatctaccccctggagtacatgtttcctgtgatccccctgctgcccacctgcatggccagcgctgagcagctgctgctggcccccaccccctacatcattggagtgcctgccagcttcttcctgtacaagctggacttcaagatgccagatgatgtgtggctggtggacctggacagcaacagagtgattgcccccaccaatgctgaggtgctgcccatcctgcctgagcctgagagcctggagctgaagaagcacctgaagcaggccctggcctccatgagcctgaacacccagcccatcctgaacctggagaagttccacgagggccaggagatccccctgctgctgggccggcccagcaatgacctgcagagcacccccagcacagagttcaaccccctcatctatggaaatgatgtggacagcgtggatgtggccaccagggtggccatggtgcgcttcttcaacagcgccaacgtgctgcagggcttccagatgcacaccaggaccctgcggctcttccccaggcctgtggtggccttccaggccggcagcttcctggccagccggccccggcagaccccatttgctgagaagctggcccggacccaggccgtggagtactttggagagtggatcctgaaccccaccaactatgccttccagaggatccacaacaacatgtttgatcctgccctgattggagacaagcccaagtggtacgcccaccagctgcagcccatccactacagagtgtatgacagcaacagccagctggccgaggccctgtctgtgcccccagagcgggacagcgacagcgagcccacagatgattctggcagtgacagcatggactatgatgacagcagcagcagctacagcagcctgggggactttgtgtctgagatgatgaagtgtgacatcaatggagacacccccaacgtggaccccctgacccatgctgccctgggagatgccagcgaggtggagattgatgagctgcagaaccagaaggaggccgaggagcccggcccagattctgagaacagccaggagaacccccccctgcggagcagcagcagcaccacagccagcagcagccccagcaccgtcatccatggagccaacagcgagcctgctgacagcacagagatggatgacaaggctgctgtgggcgtgtccaagcccctgcccagcgtgcccccatccatcggcaagagcaatgtggaccggcggcaggccgagatcggggagggctctgtgagaagacgcatctatgacaacccctactttgagccccagtatggcttccccccagaagaagatgaagatgagcagggcgagagctacaccccccgcttcagccagcacgtgtctggcaacagagcccagaagctgctgcggcccaacagcctgcggctggccagtgacagtgatgctgagagtgacagccgggccagcagccccaacagcacagtgagcaacaccagcacagagggctttggaggcatcatgagctttgccagcagcctgtacagaaaccacagcaccagcttcagcctgagcaacctgaccctgcccaccaagggggcccgggagaaggccacccccttccccagcctgaaggtgtttggcctgaacaccctgatggagatcgtgacagaggccggccctggcagcggggagggcaacagaagagccctggtggaccagaagagcagcgtcatcaagcacagccccaccgtgaagcgggagccccccagcccccagggccgcagcagcaacagcagcgagaaccagcagttcctgaaggaggtggtgcacagcgtgctggatggccagggcgtgggctggctgaacatgaagaaggtgcggcggctgctggagagcgagcagctgcgggtgtttgtgctgagcaagctgaacaggatggtgcagagtgaagatgatgcccggcaggacatcatcccagatgtggagatcagcaggaaggtgtacaagggcatgctggacctgctgaagtgcaccgtgctgagcctggagcagagctatgcccatgctggcctgggcggcatggccagcatcttcggcctgctggagatcgcccagacccactactacagcaaggagccagacaagaggaagaggagccccacagaatctgtgaacacccctgtgggcaaggaccccggcctggccggccgcggggaccccaaggccatggcccagctgcgggtgccccagctgggcccccgggcccccagcgccaccgggaagggccccaaggagctggacaccaggagcctgaaggaggagaacttcatcgccagcattgagctgtggaacaagcaccaggaggtgaagaagcagaaggccctggagaagcagaggcctgaggtgatcaagcctgtgtttgacctgggggagacagaggagaagaagagccagatctctgctgacagcggcgtgtccctgaccagcagcagccagaggacagaccaggacagcgtcatcggcgtgtccccagctgtgatgatccgcagcagcagccaggacagcgaggtgtccacagtggtgagcaacagcagtggagagaccctgggcgctgacagcgacctgagcagcaatgctggagatggccctggaggagagggctctgtgcacctggccagcagccggggcaccctgagtgacagcgagattgagaccaacagcgccaccagcaccatctttgggaaggcccacagcctgaagcccagcatcaaggagaagctggccggcagccccatccgcaccagtgaagatgtgtcccagagggtgtacctgtatgagggcctgctgggccgggacaagggctccatgtgggaccagctggaggatgctgccatggagaccttcagcatcagcaaggagaggagcaccctgtgggaccagatgcagttctgggaggatgccttcctggatgctgtgatgctggagcgggagggcatgggcatggaccagggcccccaggagatgattgaccgctacctgagcctgggggagcatgacaggaagaggctggaggatgatgaagatcggctgctggccaccctgctgcacaacctgatctcctacatgctgctgatgaaggtgaacaagaatgacatcaggaagaaggtgcggcggctgatgggcaagagccacatcggcctggtgtacagccagcagatcaatgaggtgctggaccagctggccaacctgaatggccgggacctgagcatctggagcagcggcagccgccacatgaagaagcagacctttgtggtgcatgctggaacagacaccaacggggacatcttcttcatggaggtgtgtgatgactgtgtggtgctgcggagcaacattggaacagtgtatgagcgctggtggtatgagaagctgatcaacatgacctactgccccaagaccaaggtgctgtgcctgtggaggagaaatggaagtgagacccagctgaacaagttctacaccaagaagtgccgggagctgtactactgtgtgaaggacagcatggagagagctgctgcccggcagcagagcatcaagccaggccctgagctgggcggggagttccctgtgcaggacctgaagacaggagagggcggcctgctgcaggtgaccctggagggcatcaacctgaagttcatgcacaaccagttcctgaagctgaagaagtggtag

SEQ ID NO: 233930 - DNA, 5942 bp, Artificial Sequence
  derived and/or modified sequence
ctggcgcccgctcggagcggcgccgcgctggggagcgactgacgccccgctgccgggggacgtcgggctgggcctggccagtcccccagagcttgggagacttcgattttcagaattcctcctgggaatgctgactccttgcttggtgccctgatgcttctctgagataaactgatgaattggaaccatggtgcaaaagaagaagttctgtcctcggttacttgactatctagtgatcgtaggggccaggcacccgagcagtgatagcgtggcccagactcctgaattgctacggcgataccccttggaggatcacactgagtttcccctgcccccagatgtagtgttcttctgccagcccgagggctgcctgagcgtgcggcagcggcgcatgagccttcgggatgatacctcttttgtcttcaccctcactgacaaggacactggagtcacgcgatatggcatctgtgttaacttctaccgctccttccaaaagcgaatctctaaggagaagggggaaggtggggcagggtcccgtgggaaggaaggaacccatgccacctgtgcctcagaagagggtggcactgagagctcagagagtggctcatccctgcagcctctcagtgctgactctacccctgatgtgaaccagtctcctcggggcaaacgccgggccaaggcggggagccgctcccgcaacagtactctcacgtccctgtgcgtgctcagccactaccctttcttctccaccttccgagagtgtttgtatactctcaagcgcctggtggactgctgtagtgagcgccttctgggcaagaaactgggcatccctcgaggcgtacaaagggacaccatgtggcggatctttactggatcgctgctggtagaggagaagtcaagtgcccttctgcatgaccttcgagagattgaggcctggatctatcgattgctgcgctccccagtacccgtctctgggcagaagcgagtagacatcgaggtcctaccccaagagctccagccagctctgacctttgctcttccagacccatctcgattcaccctagtggatttcccactgcaccttcccttggaacttctaggtgtggacgcctgtctccaggtgctaacctgcattctgttagagcacaaggtggtgctacagtcccgagactacaatgcactctccatgtctgtgatggcattcgtggcaatgatctacccactggagtatatgtttcctgtcatcccgctgctacccacctgcatggcatcagcagagcagctgctgttggctccaaccccgtacatcattggggttcctgccagcttcttcctctacaaactggacttcaaaatgcctgatgatgtatggctagtggatctggacagcaatagggtgattgcccccaccaatgcagaagtgctgcctatcctgccagaaccagaatcactagagctgaaaaagcatttaaagcaggccttggccagcatgagtctcaacacccagcccatcctcaatctggagaaatttcatgagggccaggagatcccccttctcttgggaaggccttctaatgacctgcagtccacaccgtccactgaattcaacccactcatctatggcaatgatgtggattctgtggatgttgcaaccagggttgccatggtacggttcttcaattccgccaacgtgctgcagggatttcagatgcacacgcgtaccctgcgcctctttcctcggcctgtggtagcttttcaagctggctcctttctagcctcacgtccccggcagactccttttgccgagaaattggccaggactcaggctgtggagtactttggggaatggatccttaaccccaccaactatgcctttcagcgaattcacaacaatatgtttgatccagccctgattggtgacaagccaaagtggtatgctcatcagctgcagcctatccactatcgcgtctatgacagcaattcccagctggctgaggccctgagtgtaccaccagagcgggactctgactccgaacctactgatgatagtggcagtgatagtatggattatgacgattcaagctcttcttactcctcccttggtgactttgtcagtgaaatgatgaaatgtgacattaatggtgatactcccaatgtggaccctctgacacatgcagcactgggggatgccagcgaggtggagattgacgagctgcagaatcagaaggaagcagaagagcctggcccagacagtgagaactctcaggaaaaccccccactgcgctccagctctagcaccacagccagcagcagccccagcactgtcatccacggagccaactctgaacctgctgactctacggagatggatgataaggcagcagtaggcgtctccaagcccctcccttccgtgcctcccagcattggcaaatcgaacgtggacagacgtcaggcagaaattggagaggggtcagtgcgccggcgaatctatgacaatccatacttcgagccccaatatggctttccccctgaggaagatgaggatgagcagggggaaagttacactccccgattcagccaacatgtcagtggcaatcgggctcaaaagctgctgcggcccaacagcttgagactggcaagtgactcagatgcagagtcagactctcgggcaagctctcccaactccaccgtctccaacaccagcaccgagggcttcgggggcatcatgtcttttgccagcagcctctatcggaaccacagtaccagcttcagtctttcaaacctcacactgcccaccaaaggtgcccgagagaaggccacgcccttccccagtctgaaagtatttgggctaaatactctaatggagattgttactgaagccggccccgggagtggtgaaggaaacaggagggcgttagtggatcagaagtcatctgtcattaaacacagcccaacagtgaaaagagaacctccatcaccccagggtcgatccagcaattctagtgagaaccagcagttcctgaaggaggtggtgcacagcgtgctggacggccagggagttggctggctcaacatgaaaaaggtgcgccggctgctggagagcgagcagctgcgagtctttgtcctgagcaagctgaaccgcatggtgcagtcagaggacgatgcccggcaggacatcatcccggatgtggagatcagtcggaaggtgtacaagggaatgttagacctcctcaagtgtacagtcctcagcttggagcagtcctatgcccacgcgggtctgggtggcatggccagcatctttgggcttttggagattgcccagacccactactatagtaaagaaccagacaagcggaagagaagtccaacagaaagtgtaaataccccagttggcaaggatcctggcctagctgggcggggggacccaaaggctatggcacaactgagagttccacaactgggacctcgggcaccaagtgccacaggaaagggtcctaaggaactggacaccagaagtttaaaggaagaaaattttatagcatctattgaattgtggaacaagcaccaggaagtgaaaaagcaaaaagctttggaaaaacagaggcctgaagtaatcaaacctgtctttgaccttggtgagacagaggagaaaaagtcccagatcagcgcagacagtggtgtgagcctgacgtctagttcccagaggactgatcaagactctgtcatcggcgtgagtccagctgttatgatccgcagctcaagtcaggattctgaagttagcaccgtggtgagtaatagctctggagagacccttggagctgacagtgacttgagcagcaatgcaggtgatggaccaggtggcgagggcagtgttcacctggcaagctctcggggcactttgtctgatagtgaaattgagaccaactctgccacaagcaccatctttggtaaagcccacagcttgaagccaagcataaaggagaagctggcaggcagccccattcgtacttctgaagatgtgagccagcgagtctatctctatgagggactcctaggaagggacaaaggatccatgtgggaccagttagaggatgcagctatggagaccttttctataagcaaagagcgttctactttatgggaccaaatgcaattctgggaagatgccttcttagatgctgtgatgttggagagagaagggatgggtatggaccagggtccccaggaaatgatcgacaggtacctgtcccttggagaacatgaccggaagcgcctggaagatgatgaagatcgcttgttggccacacttctgcacaacctcatctcctacatgctgctgatgaaggtaaataagaatgacatccgcaagaaggtgaggcgcctaatgggaaagtcgcacattgggcttgtgtacagccagcaaatcaatgaggtgcttgatcagctggcgaacctgaatggacgcgatctctctatctggtccagtggcagccggcacatgaagaagcagacatttgtggtacatgcagggacagatacaaacggagatatctttttcatggaggtgtgcgatgactgtgtggtgttgcgtagtaacatcggaacagtgtatgagcgctggtggtacgagaagctcatcaacatgacctactgtcccaagacgaaggtgttgtgcttgtggcgtagaaatggctctgagacccagctcaacaagttctatactaaaaagtgtcgggagctgtactactgtgtgaaggacagcatggagcgcgctgccgcccgacagcaaagcatcaaacccggacctgaattgggtggcgagttccctgtgcaggacctgaagactggtgagggtggcctgctgcaggtgaccctggaagggatcaacctcaaattcatgcacaatcagttcctgaaattaaagaagtggtgagccacaagtacaagacaccaatggcccacgaaatctgctactccgtattatgtctcttctcgtacgtggctgcagttcatagcagtgaggaagatctcagaaccccgccccggcctgtctctagctgatggagaggggctacgcagctgccccagcccagggcacgcccctggccccttgctgttcccaagtgcacgatgctgctgtgactgaggagtggatgatgctcgtgtgtcctctgcaagccccctgctgtggcttggttggttaccggttatgtgtccctctgagtgtgtcttgagcgtgtccaccttctccctctccactcccagaagaccaaactgccttcccctcagggctcaagaatgtgtacagtctgtggggccggtgtgaacccactattttgtgtccttgagacatttgtgttgtggttccttgtccttgtccctggcgttataactgtccactgcaagagtctggctctcccttctctgtgacccggcatgactgggcgcctggagcagtttcactctgtgaggagtgagggaaccctggggctcaccctctcagaggaagggcacagagaggaagggaagaattggggggcagccggagtgagtggcagcctccctgcttccttctgcattcccaagccggcagctactgcccagggcccgcagtgttggctgctgcctgccacagcctctgtgactgcagtggagcggcgaattccctgtggcctgccatgccttcggcatcagaggatggagtggtcgaggctagtggagtcccagggaccgctggctgctctgcctgagcatcagggagggggcaggaaagaccaagctgggtttgcacatctgtctgcaggctgtctctccaggcacggggtgtcaggagggagagacagcctgggtatgggcaagaaatgactgtaaatatttcagccccacattatttatagaaaatgtacagttgtgtgaatgtgaaataaatgtcctcaactccc

SEQ ID NO: 233931 - DNA, 4746 bp, Artificial Sequence
  derived and/or modified sequence
atggtgcagaagaagaagttctgcccccggctgctggactacctggtgatagtcggggctagacatccatccagcgattcagtggcccagactcccgaattgctgcgtcgctatccactcgaggaccataccgaattcccgttgcctcccgatgtcgtcttcttttgtcagccggaggggtgcctgtcggttagacagaggaggatgagcctccgggacgacacatcctttgttttcacattaaccgataaagacacaggcgttacaagatacggaatctgtgtgaatttttaccgaagtttccagaaacgcatatctaaagagaagggggagggcggcgcgggcagccggggcaaggaggggacacatgccacatgcgccagtgaagaaggaggcaccgaatcatcagaatctggttccagcctgcagccgctttccgctgacagcactccagatgttaaccagagccccaggggtaagcggcgggctaaagctggtagcagaagcaggaacagtacgctgacctcactttgtgttcttagccactacccctttttttcaacgtttcgagaatgtctttacactctcaaacggttggtggactgttgctccgaacggctactgggaaagaagctggggatcccacggggtgtgcaaagagacactatgtggaggatctttacaggatccctcctagtggaggagaagagcagcgccctgttacacgatctacgggagattgaggcctggatttataggctgctgcgttcacccgtgcccgtgagtgggcagaagcgggtggacattgaagtgttaccccaagagcttcagccggctcttacctttgcgctgcccgaccccagccgcttcacgctcgtggacttccctctacatttgccgcttgagcttctcggcgttgacgcttgtctccaggtgttaacgtgtatattgctagagcacaaggtggtcctacagtcacgagattacaatgcccttagtatgtcggtgatggccttcgtggcgatgatttaccccctggagtacatgttcccagtgatccccctcctaccaacctgcatggccagcgccgaacagctcctgttggctcctactccatacatcattggcgtgcctgcatcatttttcctatacaaactggacttcaaaatgcccgacgatgtgtggctggtcgacctcgactccaatagagtcatcgctcccacaaatgcagaagttcttccaatcttaccagagcccgaatcccttgagctgaaaaaacatctgaagcaagccctggcctccatgtccctgaatacccagccgatcttgaatctggaaaagttccacgaaggccaagagatccccctcttactcgggaggccgagcaatgacttacaaagcacccctagcactgaatttaaccctcttatctacgggaacgacgttgactctgtggacgtagccacaagagtggccatggtgcggttcttcaactctgcaaacgtacttcagggatttcagatgcacactcgcaccctaaggctttttcctagaccagtggtagcctttcaggccggctcattcctggcatctcgtcccaggcagactccgttcgccgaaaaactcgctaggacccaagctgtcgagtatttcggcgagtggatcctcaacccaacaaattacgcatttcagagaatacacaacaacatgttcgatcccgcattgattggagacaagccgaagtggtatgcccatcagttgcagcccatccactacagagtatacgacagtaactcgcagctggcagaggcactctcagtgccacccgagcgcgacagtgatagtgagcccaccgatgattctgggtctgactcaatggattacgatgattcctcctcaagttatagctccctgggcgactttgtgagcgagatgatgaaatgtgatatcaatggcgacacaccgaacgtggatcctctgacccatgcggccctgggcgatgctagtgaagtggaaatcgacgaacttcaaaaccaaaaagaggccgaggagccagggcccgacagcgagaatagccaggaaaatccacccctgcgaagttcatctagtaccactgcctcctctagtccctcaacggttatacatggagccaattccgaacccgctgattcaaccgagatggatgataaagccgctgtgggggtgagtaaacccctgccatccgtccctccctcgataggcaagtcaaacgtagacaggcgtcaagcggaaatcggcgaaggttctgtgcgtagacggatctatgacaatccctacttcgagccccagtatggttttccacctgaagaggacgaagacgaacagggtgagtcctacacccctcgtttctcgcaacacgtctctggaaatcgagcacagaagctgttgcggcccaattcattgagactcgcaagcgactcagacgccgagagcgattctcgggcgtcgtcccccaattctacagtttcaaatacctctaccgaaggttttggcggcattatgtcattcgcatcttccttgtacagaaaccacagtacttcattcagcctaagcaacctgaccctgcccacaaagggggcacgagaaaaggcgacaccttttccaagcctgaaagtcttcggactaaataccctgatggaaatcgtgactgaagcgggcccaggtagtggcgaggggaaccgacgggctctggtggatcagaagagtagcgtcattaaacacagccctaccgttaaacgggaacctccgtccccgcaaggccgatcatccaacagcagcgaaaaccaacaatttctaaaggaggtcgttcatagcgtgctggacgggcagggggtgggatggttgaatatgaaaaaagtccgacggctcctggagagcgagcagctgcgggtatttgtactgagtaagctgaatagaatggttcagtccgaagacgacgctagacaagacatcatccccgatgtggagataagccgaaaggtgtacaagggaatgctcgatctgctgaagtgcaccgtgctgtcgctcgagcagtcttacgcacacgccggcttaggcggaatggcctctatctttgggctgcttgaaattgctcaaacacattattattccaaagaaccagataagcgcaagaggtccccaactgagtctgtaaacaccccagttggaaaagatccaggccttgccgggagaggcgaccccaaagctatggcccaattgagagttcctcaactaggaccgcgcgcaccatctgccaccggcaaaggtcctaaggaactggataccagaagcttaaaggaagaaaactttattgcaagtatcgagctttggaacaaacaccaggaagtgaagaaacaaaaggctctcgaaaagcaaaggcccgaggtgatcaaacctgttttcgacctcggcgaaaccgaggaaaaaaagagtcaaatctctgccgactcaggcgtatcactgacatcatcttctcagagaacagatcaggattctgtcattggagtatcacctgccgtgatgattcggtcaagttctcaagacagcgaagtctccaccgtcgtcagcaattcgagcggtgagacattgggagccgactccgacctaagttctaacgctggagacggccccgggggtgaaggttccgtccatttggcctcaagccgcgggaccctgtctgactctgaaatcgagaccaactccgcaacctccaccatcttcgggaaagctcacagcctgaaaccttctatcaaagaaaagctagccgggagccccatccggaccagcgaggacgtatctcaacgcgtttacctctacgagggattgctgggtagagataaaggctcaatgtgggatcagttggaggatgcggcgatggaaacattctctatctctaaagaacggagcactctgtgggaccagatgcagttctgggaagatgcatttcttgacgctgtgatgctggagagagagggaatgggcatggaccaggggccccaggagatgattgatcgctacctgagcctgggagaacatgatagaaagcgcttggaagacgatgaggacagactgctggcaactcttctgcacaacctgatctcatacatgctcttgatgaaagtgaacaagaacgacattcgcaagaaggttagacgcctaatgggaaaatctcatatcgggctggtctatagtcagcagattaatgaggttctggatcaactggccaatttgaatggtagagatctgtccatatggtcatccggaagcagacatatgaagaaacagaccttcgttgtacatgccggaacagatactaacggagatatcttcttcatggaagtctgcgatgattgtgtcgtgctccgtagtaacattggcaccgtgtatgagaggtggtggtatgaaaagctgattaacatgacgtactgccctaagaccaaagtgctgtgtctttggaggcgcaatggtagcgaaactcagttgaacaaattttatacaaagaaatgtcgggaactttactactgcgtcaaggacagcatggagcgcgccgctgctcggcagcagagtatcaaacccggccccgaactcggtggagaatttccagtgcaggatcttaaaaccggtgaggggggccttctgcaggtgacactggaggggatcaatctgaaattcatgcacaatcaattccttaagctaaaaaagtggtag

SEQ ID NO: 233932 - DNA, 4746 bp, Artificial Sequence
  derived and/or modified sequence
atggtccagaagaaaaaattctgtccacgcctcctggactacctagtgattgttggagcgagacatccaagctcagattccgtagcccagaccccagagcttctccgcagataccccctggaggatcatactgagtttccactgccgcctgatgtcgttttcttttgtcagcctgaaggctgcctatccgtacggcaacgccgtatgagcttaagggatgacacttccttcgtcttcactcttacagacaaagatacaggagtgactaggtacggaatctgtgttaatttttaccgttcatttcagaaacgcatctcaaaagagaagggtgaggggggtgccggaagccggggaaaggagggcacccacgcaacctgcgcctcagaggagggcggaactgagtcctccgagtccggttcaagcctgcaaccactcagtgctgacagtacgccagacgtgaaccagagtcctcggggaaaacgccgagccaaggccggttctcgctctcgcaatagcactcttacctcactgtgcgttttgagtcactacccattctttagcactttccgagaatgtctgtataccctcaaaagactagttgactgttgttccgaacgtcttctcggaaagaaattgggcataccgcgaggagtccagagggatacaatgtggaggatttttaccggcagcctgctggtagaagagaagtcgtccgcccttctgcatgatttacgagagatcgaggcatggatttatagactcctgagatctcctgtccctgtcagcggacaaaagcgcgtggacatagaggtactcccacaggagctccagccggctctgacttttgcactacctgatccgtcccgattcactctggtagacttcccacttcacttacctttggagctccttggtgttgatgcctgtctgcaggttctgacctgtatcctgttagagcacaaggtcgtcctgcagtcaagagattacaacgcactcagcatgtctgttatggcctttgtagctatgatctatccgttagaatatatgtttcccgtgatccctctgctgccaacctgtatggcctctgccgagcagttgctgctcgctccgaccccctatatcatcggcgttccggcttctttttttctatacaagctcgattttaagatgccggacgatgtgtggctggtggacctcgactctaaccgtgtcatcgccccaaccaatgccgaggtcctccctattctcccagaaccagaaagcttagaactcaaaaagcacctgaagcaggctttggcctctatgagtttaaatacacagcctatcttgaacctggaaaaattccacgaaggccaggaaatcccgcttttgctcggacgcccatccaacgacctgcagtctactccaagcaccgaattcaaccctttaatatacggcaatgacgtggatagcgtagatgtcgccactcgggtggccatggtgcgattctttaattccgccaacgtgctccagggcttccagatgcacactagaactttgcgactttttccgagaccagtcgtggctttccaggctggatcctttttagcaagcagaccccgacagacccccttcgccgagaaacttgcgaggacccaggctgtcgaatacttcggtgaatggatcctgaacccaaccaactacgcgtttcagcgcatccacaacaatatgttcgatccagccctgatcggcgacaagccgaagtggtatgctcatcaactccaaccaatccactaccgggtctatgacagcaattctcaactggccgaagcgctcagtgtgccacccgagagggactccgacagcgagccaacagatgactccggatcagatagcatggattacgacgatagttcttcatcatattcttccctaggggacttcgtgtcggagatgatgaaatgcgatataaatggagacactcccaatgtggatcccctgacacacgcagcgctcggcgacgcttccgaggtggagattgacgagttacagaatcaaaaggaagctgaagagccaggcccagactcggagaactcccaagagaatcctcctctgcggagctccagcagcacaaccgcttccagcagtccgagcaccgtgatccatggggctaatagcgaacctgccgatagcaccgagatggacgacaaggcggctgttggagttagcaaacccctccccagtgtcccgccatccattggaaaaagcaacgtggaccggaggcaggcagagattggggaaggtagtgttaggaggaggatttacgacaacccctatttcgaaccccagtacgggtttccccctgaggaggacgaggacgagcagggcgagtcctacacccctcggtttagccagcatgtatccgggaatagggcgcagaagctgcttagacccaactctttgagactggcttctgattccgacgccgaatctgactcaagggcaagctcacccaactcaacagtgagcaacacctcaacagagggtttcgggggaatcatgtcattcgccagcagtctgtatcggaaccactcaacatcgttcagtttgagtaacctgacgttgccgaccaaaggggctagggagaaagcaaccccctttccctctttgaaggtgttcgggctgaacacgttgatggaaatcgttaccgaggcaggacctggctcgggcgaggggaacaggcgtgccctggtggatcaaaaaagcagcgttataaagcattcaccaacggtgaaaagggaaccgccttccccccagggacgctcttccaacagttcagagaaccagcagtttctgaaagaagtcgtccactctgtcctggatggtcagggggtaggttggcttaacatgaagaaagtgagaaggctgttagagtctgaacagctgcgtgtttttgtgctctccaagttgaaccgaatggtccaaagcgaggatgatgcaaggcaggacattatcccagacgttgaaatttcacggaaggtctataagggcatgctcgatctgctaaagtgcaccgtccttagcctggagcaatcctatgctcacgctggtcttggcggaatggcctcaatctttggcctgctagaaattgcccagacacattattatagcaaggaacctgacaaacgcaaacgcagcccaacagagtcagtaaatacgcccgttgggaaggatccgggtctggctggaagaggagaccccaaagcgatggcgcagctccgcgtcccccagctggggcctcgtgctccctccgcgactggcaagggccctaaggagctggatacccgctctctcaaagaggaaaactttatagcatcaatcgaactgtggaacaaacaccaagaagtgaagaagcagaaagcattggagaaacagagacccgaggtgatcaagccagtctttgacctgggagagaccgaagaaaaaaagagccaaatttctgccgattctggcgttagcctgaccagcagctcgcagaggactgatcaggatagtgtgatcggagtgtcccccgctgtgatgattcgatcttcctctcaggacagtgaagtctcaaccgtagtgagtaattcctcgggcgagactcttggggcagacagtgacctgtccagcaacgccggagacggacctgggggtgagggaagcgttcatctcgcttcatcaaggggcacgctgagtgacagcgagatcgagaccaattcagctacttccactatattcggcaaagcgcacagcctgaagccttcaatcaaggagaagttggccggtagccctatccgcacatccgaggatgttagtcagcgtgtgtatctatatgagggactccttggcagagataagggctccatgtgggaccagctggaagatgctgcaatggagacatttagcatcagcaaggaaaggtcaaccctctgggatcagatgcaattctgggaagacgcatttctagacgccgtcatgttggagagagagggaatgggcatggaccaaggcccacaagagatgatagacagatatctgtcactgggcgagcatgacagaaagagacttgaagatgatgaggacagactgttggctaccttgctccacaatcttatctcttatatgctgttgatgaaagtcaataagaacgacattcgaaaaaaggtgagacgcttaatgggaaagagccatattggactggtgtattcccaacaaattaatgaagtgttggaccagctggcaaatctcaatggcagagacctgtcaatctggagtagtggcagcagacacatgaagaagcagacatttgttgttcacgcaggcactgataccaacggagacatcttcttcatggaagtgtgcgacgactgcgtcgtactccgcagcaacatcgggacagtatatgaaaggtggtggtatgagaaactgatcaacatgacatactgccccaagacaaaggtcctttgtctctggagacgcaatggctctgagactcagttaaacaagttctacaccaagaaatgccgggaactgtactactgcgttaaggatagtatggaaagggctgccgcacggcagcaatctatcaagcctgggccagaactgggcggagagtttccggttcaggacctgaagactggagagggcggattgcttcaagtcactctggaaggcatcaatctcaaatttatgcacaatcagttcctgaaactgaagaaatggtag

SEQ ID NO: 233933 - DNA, 4746 bp, Artificial Sequence
  derived and/or modified sequence
atggtgcagaagaagaagttctgccccagactgctggactacctggtgatcgtgggcgccagacaccccagcagcgacagcgtggcccagacccccgagctgctgagaagataccccctggaggaccacaccgagttccccctgccccccgacgtggtgttcttctgccagcccgagggctgcctgagcgtgagacagagaagaatgagcctgagagacgacaccagcttcgtgttcaccctgaccgacaaggacaccggcgtgaccagatacggcatctgcgtgaacttctacagaagcttccagaagagaatcagcaaggagaagggcgagggcggcgccggcagcagaggcaaggagggcacccacgccacctgcgccagcgaggagggcggcaccgagagcagcgagagcggcagcagcctgcagcccctgagcgccgacagcacccccgacgtgaaccagagccccagaggcaagagaagagccaaggccggcagcagaagcagaaacagcaccctgaccagcctgtgcgtgctgagccactaccccttcttcagcaccttcagagagtgcctgtacaccctgaagagactggtggactgctgcagcgagagactgctgggcaagaagctgggcatccccagaggcgtgcagagagacaccatgtggagaatcttcaccggcagcctgctggtggaggagaagagcagcgccctgctgcacgacctgagagagatcgaggcctggatctacagactgctgagaagccccgtgcccgtgagcggccagaagagagtggacatcgaggtgctgccccaggagctgcagcccgccctgaccttcgccctgcccgaccccagcagattcaccctggtggacttccccctgcacctgcccctggagctgctgggcgtggacgcctgcctgcaggtgctgacctgcatcctgctggagcacaaggtggtgctgcagagcagagactacaacgccctgagcatgagcgtgatggccttcgtggccatgatctaccccctggagtacatgttccccgtgatccccctgctgcccacctgcatggccagcgccgagcagctgctgctggcccccaccccctacatcatcggcgtgcccgccagcttcttcctgtacaagctggacttcaagatgcccgacgacgtgtggctggtggacctggacagcaacagagtgatcgcccccaccaacgccgaggtgctgcccatcctgcccgagcccgagagcctggagctgaagaagcacctgaagcaggccctggccagcatgagcctgaacacccagcccatcctgaacctggagaagttccacgagggccaggagatccccctgctgctgggcagacccagcaacgacctgcagagcacccccagcaccgagttcaaccccctgatctacggcaacgacgtggacagcgtggacgtggccaccagagtggccatggtgagattcttcaacagcgccaacgtgctgcagggcttccagatgcacaccagaaccctgagactgttccccagacccgtggtggccttccaggccggcagcttcctggccagcagacccagacagacccccttcgccgagaagctggccagaacccaggccgtggagtacttcggcgagtggatcctgaaccccaccaactacgccttccagagaatccacaacaacatgttcgaccccgccctgatcggcgacaagcccaagtggtacgcccaccagctgcagcccatccactacagagtgtacgacagcaacagccagctggccgaggccctgagcgtgccccccgagagagacagcgacagcgagcccaccgacgacagcggcagcgacagcatggactacgacgacagcagcagcagctacagcagcctgggcgacttcgtgagcgagatgatgaagtgcgacatcaacggcgacacccccaacgtggaccccctgacccacgccgccctgggcgacgccagcgaggtggagatcgacgagctgcagaaccagaaggaggccgaggagcccggccccgacagcgagaacagccaggagaacccccccctgagaagcagcagcagcaccaccgccagcagcagccccagcaccgtgatccacggcgccaacagcgagcccgccgacagcaccgagatggacgacaaggccgccgtgggcgtgagcaagcccctgcccagcgtgccccccagcatcggcaagagcaacgtggacagaagacaggccgagatcggcgagggcagcgtgagaagaagaatctacgacaacccctacttcgagccccagtacggcttcccccccgaggaggacgaggacgagcagggcgagagctacacccccagattcagccagcacgtgagcggcaacagagcccagaagctgctgagacccaacagcctgagactggccagcgacagcgacgccgagagcgacagcagagccagcagccccaacagcaccgtgagcaacaccagcaccgagggcttcggcggcatcatgagcttcgccagcagcctgtacagaaaccacagcaccagcttcagcctgagcaacctgaccctgcccaccaagggcgccagagagaaggccacccccttccccagcctgaaggtgttcggcctgaacaccctgatggagatcgtgaccgaggccggccccggcagcggcgagggcaacagaagagccctggtggaccagaagagcagcgtgatcaagcacagccccaccgtgaagagagagccccccagcccccagggcagaagcagcaacagcagcgagaaccagcagttcctgaaggaggtggtgcacagcgtgctggacggccagggcgtgggctggctgaacatgaagaaggtgagaagactgctggagagcgagcagctgagagtgttcgtgctgagcaagctgaacagaatggtgcagagcgaggacgacgccagacaggacatcatccccgacgtggagatcagcagaaaggtgtacaagggcatgctggacctgctgaagtgcaccgtgctgagcctggagcagagctacgcccacgccggcctgggcggcatggccagcatcttcggcctgctggagatcgcccagacccactactacagcaaggagcccgacaagagaaagagaagccccaccgagagcgtgaacacccccgtgggcaaggaccccggcctggccggcagaggcgaccccaaggccatggcccagctgagagtgccccagctgggccccagagcccccagcgccaccggcaagggccccaaggagctggacaccagaagcctgaaggaggagaacttcatcgccagcatcgagctgtggaacaagcaccaggaggtgaagaagcagaaggccctggagaagcagagacccgaggtgatcaagcccgtgttcgacctgggcgagaccgaggagaagaagagccagatcagcgccgacagcggcgtgagcctgaccagcagcagccagagaaccgaccaggacagcgtgatcggcgtgagccccgccgtgatgatcagaagcagcagccaggacagcgaggtgagcaccgtggtgagcaacagcagcggcgagaccctgggcgccgacagcgacctgagcagcaacgccggcgacggccccggcggcgagggcagcgtgcacctggccagcagcagaggcaccctgagcgacagcgagatcgagaccaacagcgccaccagcaccatcttcggcaaggcccacagcctgaagcccagcatcaaggagaagctggccggcagccccatcagaaccagcgaggacgtgagccagagagtgtacctgtacgagggcctgctgggcagagacaagggcagcatgtgggaccagctggaggacgccgccatggagaccttcagcatcagcaaggagagaagcaccctgtgggaccagatgcagttctgggaggacgccttcctggacgccgtgatgctggagagagagggcatgggcatggaccagggcccccaggagatgatcgacagatacctgagcctgggcgagcacgacagaaagagactggaggacgacgaggacagactgctggccaccctgctgcacaacctgatcagctacatgctgctgatgaaggtgaacaagaacgacatcagaaagaaggtgagaagactgatgggcaagagccacatcggcctggtgtacagccagcagatcaacgaggtgctggaccagctggccaacctgaacggcagagacctgagcatctggagcagcggcagcagacacatgaagaagcagaccttcgtggtgcacgccggcaccgacaccaacggcgacatcttcttcatggaggtgtgcgacgactgcgtggtgctgagaagcaacatcggcaccgtgtacgagagatggtggtacgagaagctgatcaacatgacctactgccccaagaccaaggtgctgtgcctgtggagaagaaacggcagcgagacccagctgaacaagttctacaccaagaagtgcagagagctgtactactgcgtgaaggacagcatggagagagccgccgccagacagcagagcatcaagcccggccccgagctgggcggcgagttccccgtgcaggacctgaagaccggcgagggcggcctgctgcaggtgaccctggagggcatcaacctgaagttcatgcacaaccagttcctgaagctgaagaagtggtag

SEQ ID NO: 233934 - protein, 1587 aa, Artificial Sequence
  derived and/or modified sequence
MVQKKKFCPRLLDYLVIVGARHPSSDSVAQTPELLRRYPLEDHTEFPLPPDVVFFCQPEGCLSVRQRRMSLRDDTSFVFTLTDKDTGVTRYGICVNFYRSFQKRISKEKGEGGAGSRGKEGTHATCASEEGGTESSESGSSLQPLSADSTPDVNQSPRGKRRAKAGSRSRNSTLTSLCVLSHYPFFSTFRECLYTLKRLVDCCSERLLGKKLGIPRGVQRDTMWRIFTGSLLVEEKSSALLHDLREIEAWIYRLLRSPVPVSGQKRVDIEVLPQELQPALTFALPDPSRFTLVDFPLHLPLELLGVDACLQVLTCILLEHKVVLQSRDYNALSMSVMAFVAMIYPLEYMFPVIPLLPTCMASAEQLLLAPTPYIIGVPASFFLYKLDFKMPDDVWLVDLDSNRVIAPTNAEVLPILPEPESLELKKHLKQALASMSLNTQPILNLEKFHEGQEIPLLLGRPSNDLQSTPSTEFNPLIYGNDVDSVDVATRVAMVRFFNSANVLQGFQMHTRTLRLFPRPVVAFQAGSFLASRPRQTPFAEKLARTQAVEYFGEWILNPTNYAFQRIHNNMFDPALIGDKPKWYAHQLQPIHYRVYDSNSQLAEALSVPPERDSDSEPTDDSGSDSMDYDDSSSSYSSLGDFVSEMMKCDINGDTPNVDPLTHAALGDASEVEIDELQNQKEAEEPGPDSENSQENPPLRSSSSTTASSSPSTVIHGANSEPADSTEMDDKAAVGVSKPLPSVPPSIGKSNVDRRQAEIGEGSVRRRIYDNPYFEPQYGFPPEEDEDEQGESYTPRFSQHVSGNRAQKLLRPNSLRLASDSDAESDSRASSPNSTVSNTSTEGFGGIMSFASSLYRNHSTSFSLSNLTLPTKGAREKATPFPSLKGNRRALVDQKSSVIKHSPTVKREPPSPQGRSSNSSENQQFLKEVVHSVLDGQGVGWLNMKKVRRLLESEQLRVFVLSKLNRMVQSEDDARQDIIPDVEISRKVYKGMLDLLKCTVLSLEQSYAHAGLGGMASIFGLLEIAQTHYYSKEPDKRKRSPTESVNTPVGKDPGLAGRGDPKAMAQLRVPQLGPRAPSATGKGPKELDTRSLKEENFIASIGPEVIKPVFDLGETEEKKSQISADSGVSLTSSSQRTDQDSVIGVSPAVMIRSSSQDSEVSTVSNSSGETLGADSDLSSNAGDGPGGEGSVHLASSRGTLSDSEIETNSATSTIFGKAHSLKPSIKEKLAGSPIRTSEDVSQRVYLYEGLLGKERSTLWDQMQFWEDAFLDAVMLEREGMGMDQGPQEMIDRYLSLGEHDRKRLEDDEDRLLATLLHNLISYMLLMKVNKNDIRKKVRRLMGKSHIGLVYSQQINEVLDQLANLNGRDLSIWSSGSRHMKKQTFVVHAGTDTNGDIFFMEVCDDCVVLRSNIGTVYERWWYEKLINMTYCPKTKVLCLWRRNGSETQLNKFYTKKCRELYYCVKDSMERAAARQQSIKPGPELGGEFPVQDLKTGEGGLLQVTLEGINLKFMHNQVFIELNHIKKCNTVRGVFVLEEFVPEIKEVVSHKYKTPMAHEICYSVLCLFSYVAAVHSSEEDLRTPPRPVSS

SEQ ID NO: 233935 - DNA, 4764 bp, Artificial Sequence
  derived and/or modified sequence
atggtgcagaaaaaaaagttttgtccccgcctgcttgattatctcgtgatcgtcggagcgagacacccatcttcagatagcgtggcacaaacccccgagctgttgcgaagatatcccctagaggatcacacagagttccccctgccaccagacgtggtgttcttttgtcagcctgagggatgtctgtctgtgagacagcgccggatgtcgcttagggatgacacatcgttcgtgttcacactgaccgacaaagacacaggagttactcggtatggcatctgcgtcaacttttacagaagcttccagaaacggatttcgaaggagaaaggtgagggcggggctggtagccgtgggaaagaagggacacatgcaacttgtgccagcgaagaagggggaacagagtcatccgaaagcggcagcagcttgcagcccttgtcagccgattcgacacctgacgtcaaccaaagccctcgcggaaaacggcgtgctaaggctggaagtcgatcacggaactcaacgctcacatctctatgcgttctgtcccactacccctttttctccacctttagagaatgcctttacactctaaagaggctagtggattgttgcagtgagcggctgctcggcaagaagctaggtattccaaggggggtacagagggacactatgtggcgaatcttcaccggtagtctgcttgttgaggagaagagctccgccctacttcacgaccttcgtgagattgaagcatggatttatcgcctccttcgatctccggtaccagttagcgggcaaaaaagggtcgatattgaggtgcttcctcaggaattgcagcccgctctgaccttcgctttgccggatccaagtagatttaccttagtcgacttccccctacaccttccgctagagctgctcggggtggatgcctgcctgcaggtgctcacatgtatccttttggagcacaaggtcgtgctgcagagccgagactacaatgccctctccatgagcgttatggcttttgtcgccatgatataccccttggaatacatgttccccgtgattcccctgctgccgacctgtatggcctctgccgaacagcttctgcttgcccccaccccttacattataggtgttccggcttcttttttcctttacaagctggattttaagatgcctgacgacgtgtggctggtcgacctcgactcaaatcgcgtaatcgctcccaccaatgctgaggtgttacctatcttgccggaacctgagagcctcgagctgaaaaagcacttgaagcaagcactggcctctatgtccttgaatacgcaacccattttgaacctggaaaagttccacgaaggtcaggaaattcccttactccttgggcgaccttcaaacgatcttcaatctacgccatcaactgagtttaaccctctgatctacgggaatgatgttgacagcgtggacgtggccacgcgagtagcaatggttagattctttaatagcgccaacgtgttgcagggcttccaaatgcataccagaactctgcgcctcttcccacgccctgttgttgccttccaagccgggtcctttctcgcgagtcggcctagacagactccgtttgccgaaaaactcgcacgcacacaagcggttgaatactttggcgaatggattctgaatccgaccaactacgccttccagcggattcacaataacatgttcgatcccgcgctaataggcgataaaccaaagtggtatgcccaccaactgcagcccattcactacagagtgtatgactccaattcacagctggctgaagccctgagtgtcccaccagagcgggattcagatagcgagcccaccgacgactctggttctgattccatggattacgatgattcatcttcctcttactcatcgctaggcgactttgtgtcagagatgatgaaatgcgatataaatggtgatacccccaacgttgatcccctcactcacgcggctctcggcgatgcaagcgaagtcgaaattgatgagttacagaatcaaaaggaggcggaagagccgggccctgatagcgagaactcccaagagaacccgcccctgcgtagcagctccagtacaactgctagttcaagtccttccactgtgattcacggcgccaacagcgaacccgccgacagtacggagatggacgataaagctgccgtcggtgtttccaaacctcttccgagtgtccccccttcaattgggaagtccaatgtagataggcgtcaggctgagattggagaaggcagcgtgagaagacgtatctacgacaacccctactttgaacctcaatatggttttcctcccgaggaagatgaggacgaacagggcgaatcctacaccccacgtttctctcagcacgtctcagggaacagagcacagaaattactcaggcctaactcgctgcgcctagcgagcgattccgacgctgagtctgactccagggcctcctctcctaatagtaccgttagtaacactagcactgaaggctttgggggcatcatgtcgttcgcatcctcgttataccgcaatcactccacatccttctcacttagtaacctgactttacctaccaagggggcccgggagaaggccacccctttccccagcctgaaaggcaatcgaagggcactggttgatcaaaaatcctcagttattaaacacagcccaactgtgaaacgcgagcccccctcgccccaaggacggtccagcaattcctccgagaaccaacagtttctgaaggaggtcgtacatagcgtgttggacgggcagggcgtgggctggttgaacatgaagaaggtgagaagattgctcgagagcgagcagttacgggtctttgttctatccaagttaaatcggatggttcagagcgaggacgacgcccgccaagatattatacctgacgtggagatcagcagaaaggtctataaaggtatgctcgaccttcttaagtgtaccgtcctatctctagaacagtcgtatgcccacgctgggctgggcggaatggcctccatttttggccttctggaaatcgcacagactcactactactccaaagagccagacaaacggaagagatctcctacagaaagcgtcaacaccccagtgggtaaagaccctgggctcgcaggccgcggcgacccaaaggccatggcacaattgcgggtgccccagctcggtcccagggctcccagcgccacaggtaaaggacccaaggaactggatacacgtagtctcaaagaggaaaacttcatagccagcattggccccgaagtcatcaagcctgtctttgacctaggagaaaccgaagaaaagaaaagtcaaatcagtgccgattccggggtgtcgctcacctctagctctcaacgtactgaccaggactccgtcataggggtatcgcctgccgtgatgattagatcgtcgagccaggactctgaggtgagcacagtgtctaattccagcggcgagacactgggcgcagattctgatctgtcatcaaacgccggggacggccctggtggtgagggatcggtgcacctcgcatcttcgagagggactctgtctgacagtgagatagaaaccaattcagctacctcaacgattttcgggaaagcccactccctcaagcctagcatcaaggaaaagctggcaggctcacccatccgcacctcggaggacgtatcccaacgagtttatctctacgagggcctgctgggaaaggagcgtagcacactctgggaccagatgcagttttgggaggacgcattcctcgatgccgtgatgctcgaaagagaaggaatggggatggaccagggcccacaggaaatgatcgaccggtacttgtctctgggggaacatgaccgcaaacgtctggaggatgacgaggaccgcctgctcgcgactctgttacataatttaatttcctacatgctcttgatgaaggtgaacaaaaacgacatccggaagaaagttaggagattgatgggcaagtctcacattggcttagtctatagtcagcaaatcaacgaggtgctggaccagttagccaacttaaacggcagagacctctctatttggagctctggaagccggcacatgaagaagcaaacattcgtggtgcacgccgggacggatactaacggagatatcttcttcatggaggtgtgcgatgattgtgtcgtgctgcgcagcaacatcgggaccgtgtatgagaggtggtggtacgaaaagttaatcaatatgacttattgtcccaagacaaaagtcctgtgtttatggcgaagaaatgggtctgaaacccagctgaacaaattttacacaaaaaaatgccgcgagctttattactgcgtcaaggatagcatggagagagctgcagcgcggcagcagtctatcaagcctggtcctgagctcgggggggagttcccagtacaagacctcaagaccggcgaaggcgggctgcttcaggtgaccctcgaagggattaatctcaagttcatgcataatcaagtctttattgagcttaaccatatcaaaaaatgtaacaccgtgcggggggtgtttgtccttgaggagttcgtcccagaaatcaaggaagtggtttcccataagtataaaactcccatggcacacgagatctgctattcagtcctatgcctcttctcctacgttgccgctgtgcattcctccgaggaggaccttagaacccctccccgccctgtctcatcttag

SEQ ID NO: 233936 - DNA, 4764 bp, Artificial Sequence
  derived and/or modified sequence
atggtgcagaagaagaagttctgcccccggctgctggactacctggtgattgtgggcgcccggcaccccagcagtgacagcgtggcccagaccccagagctgctgcggcgctaccccctggaggaccacacagagttccccctgcccccagatgtggtgttcttctgccagcctgagggctgcctgtctgtgcggcagaggaggatgagcctgagagatgacaccagctttgtgttcaccctgacagacaaggacaccggggtgaccaggtatggcatctgtgtgaacttctaccgctccttccagaagaggatcagcaaggagaagggggagggcggggccggcagccggggcaaggagggcacccacgccacctgtgccagcgaggagggcggcacagagagcagcgagagcggcagcagcctgcagcccctgtctgctgacagcaccccagatgtgaaccagagcccccggggcaagagaagagccaaggccggcagccgcagcaggaacagcaccctgaccagcctgtgtgtgctgagccactaccccttcttcagcaccttcagagaatgtctgtacaccctgaagaggctggtggactgctgcagcgagcggctgctgggcaagaagctgggcatcccccggggcgtgcagagggacaccatgtggaggatcttcaccggcagcctgctggtggaggagaagagcagcgccctgctgcatgacctgcgggagattgaggcctggatctaccgcctgctgcggagccctgtgcctgtgtctggccagaagagggtggacatcgaggtgctgccccaggagctgcagcctgccctgacctttgccctgcctgaccccagccgcttcaccctggtggacttccccctgcacctgcccctggagctgctgggcgtggatgcctgcctgcaggtgctgacctgcatcctgctggagcacaaggtggtgctgcagagccgggactacaatgccctgtccatgtctgtgatggcctttgtggccatgatctaccccctggagtacatgtttcctgtgatccccctgctgcccacctgcatggccagcgctgagcagctgctgctggcccccaccccctacatcattggagtgcctgccagcttcttcctgtacaagctggacttcaagatgccagatgatgtgtggctggtggacctggacagcaacagagtgattgcccccaccaatgctgaggtgctgcccatcctgcctgagcctgagagcctggagctgaagaagcacctgaagcaggccctggcctccatgagcctgaacacccagcccatcctgaacctggagaagttccacgagggccaggagatccccctgctgctgggccggcccagcaatgacctgcagagcacccccagcacagagttcaaccccctcatctatggaaatgatgtggacagcgtggatgtggccaccagggtggccatggtgcgcttcttcaacagcgccaacgtgctgcagggcttccagatgcacaccaggaccctgcggctcttccccaggcctgtggtggccttccaggccggcagcttcctggccagccggccccggcagaccccatttgctgagaagctggcccggacccaggccgtggagtactttggagagtggatcctgaaccccaccaactatgccttccagaggatccacaacaacatgtttgatcctgccctgattggagacaagcccaagtggtacgcccaccagctgcagcccatccactacagagtgtatgacagcaacagccagctggccgaggccctgtctgtgcccccagagcgggacagcgacagcgagcccacagatgattctggcagtgacagcatggactatgatgacagcagcagcagctacagcagcctgggggactttgtgtctgagatgatgaagtgtgacatcaatggagacacccccaacgtggaccccctgacccatgctgccctgggagatgccagcgaggtggagattgatgagctgcagaaccagaaggaggccgaggagcccggcccagattctgagaacagccaggagaacccccccctgcggagcagcagcagcaccacagccagcagcagccccagcaccgtcatccatggagccaacagcgagcctgctgacagcacagagatggatgacaaggctgctgtgggcgtgtccaagcccctgcccagcgtgcccccatccatcggcaagagcaatgtggaccggcggcaggccgagatcggggagggctctgtgagaagacgcatctatgacaacccctactttgagccccagtatggcttccccccagaagaagatgaagatgagcagggcgagagctacaccccccgcttcagccagcacgtgtctggcaacagagcccagaagctgctgcggcccaacagcctgcggctggccagtgacagtgatgctgagagtgacagccgggccagcagccccaacagcacagtgagcaacaccagcacagagggctttggaggcatcatgagctttgccagcagcctgtacagaaaccacagcaccagcttcagcctgagcaacctgaccctgcccaccaagggggcccgggagaaggccacccccttccccagcctgaagggcaacagaagagccctggtggaccagaagagcagcgtcatcaagcacagccccaccgtgaagcgggagccccccagcccccagggccgcagcagcaacagcagcgagaaccagcagttcctgaaggaggtggtgcacagcgtgctggatggccagggcgtgggctggctgaacatgaagaaggtgcggcggctgctggagagcgagcagctgcgggtgtttgtgctgagcaagctgaacaggatggtgcagagtgaagatgatgcccggcaggacatcatcccagatgtggagatcagcaggaaggtgtacaagggcatgctggacctgctgaagtgcaccgtgctgagcctggagcagagctatgcccatgctggcctgggcggcatggccagcatcttcggcctgctggagatcgcccagacccactactacagcaaggagccagacaagaggaagaggagccccacagaatctgtgaacacccctgtgggcaaggaccccggcctggccggccgcggggaccccaaggccatggcccagctgcgggtgccccagctgggcccccgggcccccagcgccaccgggaagggccccaaggagctggacaccaggagcctgaaggaggagaacttcatcgccagcatcggccctgaggtgatcaagcctgtgtttgacctgggggagacagaggagaagaagagccagatctctgctgacagcggcgtgtccctgaccagcagcagccagaggacagaccaggacagcgtcatcggcgtgtccccagctgtgatgatccgcagcagcagccaggacagcgaggtgtccacagtgagcaacagcagcggggagaccctgggcgctgacagcgacctgagcagcaatgctggagatggccctggaggagagggctctgtgcacctggccagcagccggggcaccctgagtgacagcgagattgagaccaacagcgccaccagcaccatctttgggaaggcccacagcctgaagcccagcatcaaggagaagctggccggcagccccatccgcaccagtgaagatgtgtcccagagggtgtacctgtatgagggcctgctgggcaaggagaggagcaccctgtgggaccagatgcagttctgggaggatgccttcctggatgctgtgatgctggagcgggagggcatgggcatggaccagggcccccaggagatgattgaccgctacctgagcctgggggagcatgacaggaagaggctggaggatgatgaagatcggctgctggccaccctgctgcacaacctgatctcctacatgctgctgatgaaggtgaacaagaatgacatcaggaagaaggtgcggcggctgatgggcaagagccacatcggcctggtgtacagccagcagatcaatgaggtgctggaccagctggccaacctgaatggccgggacctgagcatctggagcagcggcagccgccacatgaagaagcagacctttgtggtgcatgctggaacagacaccaacggggacatcttcttcatggaggtgtgtgatgactgtgtggtgctgcggagcaacattggaacagtgtatgagcgctggtggtatgagaagctgatcaacatgacctactgccccaagaccaaggtgctgtgcctgtggaggagaaatggaagtgagacccagctgaacaagttctacaccaagaagtgccgggagctgtactactgtgtgaaggacagcatggagagagctgctgcccggcagcagagcatcaagccaggccctgagctgggcggggagttccctgtgcaggacctgaagacaggagagggcggcctgctgcaggtgaccctggagggcatcaacctgaagttcatgcacaaccaggtgttcatcgagctgaaccacatcaagaagtgcaacacagtgcggggcgtgtttgtgctggaggagtttgtgcctgagatcaaggaggtggtgagccacaagtacaagacccccatggcccacgagatctgctacagcgtgctgtgcctcttctcctatgtggccgctgtgcacagcagcgaggaggacctgcggaccccacccaggcctgtgagcagctag

SEQ ID NO: 233937 - DNA, 5823 bp, Artificial Sequence
  derived and/or modified sequence
cgctcggagcggcgccgcgctggggagcgactgacgccccgctgccgggggacgtcgggctgggcctggccagtcccccagagcttgggagacttcgattttcagaattcctcctgggaatgctgactccttgcttggtgccctgatgcttctctgagataaactgatgaattggaaccatggtgcaaaagaagaagttctgtcctcggttacttgactatctagtgatcgtaggggccaggcacccgagcagtgatagcgtggcccagactcctgaattgctacggcgataccccttggaggatcacactgagtttcccctgcccccagatgtagtgttcttctgccagcccgagggctgcctgagcgtgcggcagcggcgcatgagccttcgggatgatacctcttttgtcttcaccctcactgacaaggacactggagtcacgcgatatggcatctgtgttaacttctaccgctccttccaaaagcgaatctctaaggagaagggggaaggtggggcagggtcccgtgggaaggaaggaacccatgccacctgtgcctcagaagagggtggcactgagagctcagagagtggctcatccctgcagcctctcagtgctgactctacccctgatgtgaaccagtctcctcggggcaaacgccgggccaaggcggggagccgctcccgcaacagtactctcacgtccctgtgcgtgctcagccactaccctttcttctccaccttccgagagtgtttgtatactctcaagcgcctggtggactgctgtagtgagcgccttctgggcaagaaactgggcatccctcgaggcgtacaaagggacaccatgtggcggatctttactggatcgctgctggtagaggagaagtcaagtgcccttctgcatgaccttcgagagattgaggcctggatctatcgattgctgcgctccccagtacccgtctctgggcagaagcgagtagacatcgaggtcctaccccaagagctccagccagctctgacctttgctcttccagacccatctcgattcaccctagtggatttcccactgcaccttcccttggaacttctaggtgtggacgcctgtctccaggtgctaacctgcattctgttagagcacaaggtggtgctacagtcccgagactacaatgcactctccatgtctgtgatggcattcgtggcaatgatctacccactggagtatatgtttcctgtcatcccgctgctacccacctgcatggcatcagcagagcagctgctgttggctccaaccccgtacatcattggggttcctgccagcttcttcctctacaaactggacttcaaaatgcctgatgatgtatggctagtggatctggacagcaatagggtgattgcccccaccaatgcagaagtgctgcctatcctgccagaaccagaatcactagagctgaaaaagcatttaaagcaggccttggccagcatgagtctcaacacccagcccatcctcaatctggagaaatttcatgagggccaggagatcccccttctcttgggaaggccttctaatgacctgcagtccacaccgtccactgaattcaacccactcatctatggcaatgatgtggattctgtggatgttgcaaccagggttgccatggtacggttcttcaattccgccaacgtgctgcagggatttcagatgcacacgcgtaccctgcgcctctttcctcggcctgtggtagcttttcaagctggctcctttctagcctcacgtccccggcagactccttttgccgagaaattggccaggactcaggctgtggagtactttggggaatggatccttaaccccaccaactatgcctttcagcgaattcacaacaatatgtttgatccagccctgattggtgacaagccaaagtggtatgctcatcagctgcagcctatccactatcgcgtctatgacagcaattcccagctggctgaggccctgagtgtaccaccagagcgggactctgactccgaacctactgatgatagtggcagtgatagtatggattatgacgattcaagctcttcttactcctcccttggtgactttgtcagtgaaatgatgaaatgtgacattaatggtgatactcccaatgtggaccctctgacacatgcagcactgggggatgccagcgaggtggagattgacgagctgcagaatcagaaggaagcagaagagcctggcccagacagtgagaactctcaggaaaaccccccactgcgctccagctctagcaccacagccagcagcagccccagcactgtcatccacggagccaactctgaacctgctgactctacggagatggatgataaggcagcagtaggcgtctccaagcccctcccttccgtgcctcccagcattggcaaatcgaacgtggacagacgtcaggcagaaattggagaggggtcagtgcgccggcgaatctatgacaatccatacttcgagccccaatatggctttccccctgaggaagatgaggatgagcagggggaaagttacactccccgattcagccaacatgtcagtggcaatcgggctcaaaagctgctgcggcccaacagcttgagactggcaagtgactcagatgcagagtcagactctcgggcaagctctcccaactccaccgtctccaacaccagcaccgagggcttcgggggcatcatgtcttttgccagcagcctctatcggaaccacagtaccagcttcagtctttcaaacctcacactgcccaccaaaggtgcccgagagaaggccacgcccttccccagtctgaaaggaaacaggagggcgttagtggatcagaagtcatctgtcattaaacacagcccaacagtgaaaagagaacctccatcaccccagggtcgatccagcaattctagtgagaaccagcagttcctgaaggaggtggtgcacagcgtgctggacggccagggagttggctggctcaacatgaaaaaggtgcgccggctgctggagagcgagcagctgcgagtctttgtcctgagcaagctgaaccgcatggtgcagtcagaggacgatgcccggcaggacatcatcccggatgtggagatcagtcggaaggtgtacaagggaatgttagacctcctcaagtgtacagtcctcagcttggagcagtcctatgcccacgcgggtctgggtggcatggccagcatctttgggcttttggagattgcccagacccactactatagtaaagaaccagacaagcggaagagaagtccaacagaaagtgtaaataccccagttggcaaggatcctggcctagctgggcggggggacccaaaggctatggcacaactgagagttccacaactgggacctcgggcaccaagtgccacaggaaagggtcctaaggaactggacaccagaagtttaaaggaagaaaattttatagcatctattgggcctgaagtaatcaaacctgtctttgaccttggtgagacagaggagaaaaagtcccagatcagcgcagacagtggtgtgagcctgacgtctagttcccagaggactgatcaagactctgtcatcggcgtgagtccagctgttatgatccgcagctcaagtcaggattctgaagttagcaccgtgagtaatagctctggagagacccttggagctgacagtgacttgagcagcaatgcaggtgatggaccaggtggcgagggcagtgttcacctggcaagctctcggggcactttgtctgatagtgaaattgagaccaactctgccacaagcaccatctttggtaaagcccacagcttgaagccaagcataaaggagaagctggcaggcagccccattcgtacttctgaagatgtgagccagcgagtctatctctatgagggactcctaggcaaagagcgttctactttatgggaccaaatgcaattctgggaagatgccttcttagatgctgtgatgttggagagagaagggatgggtatggaccagggtccccaggaaatgatcgacaggtacctgtcccttggagaacatgaccggaagcgcctggaagatgatgaagatcgcttgttggccacacttctgcacaacctcatctcctacatgctgctgatgaaggtaaataagaatgacatccgcaagaaggtgaggcgcctaatgggaaagtcgcacattgggcttgtgtacagccagcaaatcaatgaggtgcttgatcagctggcgaacctgaatggacgcgatctctctatctggtccagtggcagccggcacatgaagaagcagacatttgtggtacatgcagggacagatacaaacggagatatctttttcatggaggtgtgcgatgactgtgtggtgttgcgtagtaacatcggaacagtgtatgagcgctggtggtacgagaagctcatcaacatgacctactgtcccaagacgaaggtgttgtgcttgtggcgtagaaatggctctgagacccagctcaacaagttctatactaaaaagtgtcgggagctgtactactgtgtgaaggacagcatggagcgcgctgccgcccgacagcaaagcatcaaacccggacctgaattgggtggcgagttccctgtgcaggacctgaagactggtgagggtggcctgctgcaggtgaccctggaagggatcaacctcaaattcatgcacaatcaggttttcatagagctgaatcacattaaaaagtgcaatacagttcgaggcgtctttgtcctggaggaatttgttcctgaaattaaagaagtggtgagccacaagtacaagacaccaatggcccacgaaatctgctactccgtattatgtctcttctcgtacgtggctgcagttcatagcagtgaggaagatctcagaaccccgccccggcctgtctctagctgatggagaggggctacgcagctgccccagcccagggcacgcccctggccccttgctgttcccaagtgcacgatgctgctgtgactgaggagtggatgatgctcgtgtgtcctctgcaagccccctgctgtggcttggttggttaccggttatgtgtccctctgagtgtgtcttgagcgtgtccaccttctccctctccactcccagaagaccaaactgccttcccctcagggctcaagaatgtgtacagtctgtggggccggtgtgaacccactattttgtgtccttgagacatttgtgttgtggttccttgtccttgtccctggcgttataactgtccactgcaagagtctggctctcccttctctgtgacccggcatgactgggcgcctggagcagtttcactctgtgaggagtgagggaaccctggggctcaccctctcagaggaagggcacagagaggaagggaagaattggggggcagccggagtgagtggcagcctccctgcttccttctgcattcccaagccggcagctactgcccagggcccgcagtgttggctgctgcctgccacagcctctgtgactgcagtggagcggcgaattccctgtggcctgccatgccttcggcatcagaggatggagtggtcgaggctagtggagtcccagggaccgctggctgctctgcctgagcatcagggagggggcaggaaagaccaagctgggtttgcacatctgtctgcaggctgtctctccaggcacggggtgtcaggagggagagacagcctgggtatgggcaagaaatgactgtaaatatttcagccccacattatttatagaaaatgtacagttgtgtgaatgtgaaataaatgtcctcaactcc

SEQ ID NO: 233938 - DNA, 4764 bp, Artificial Sequence
  derived and/or modified sequence
atggtgcagaagaagaagttctgcccccggctgctggactacctggtgatcgtgggggcccgccatcccagttccgattctgtggcccaaacacccgaactgctccgacggtatcctttagaagatcacacagagtttcctttaccacctgacgtcgtgttcttttgtcagcctgaaggctgtctgagtgtgcggcaacggcgaatgtccctgcgggatgataccagtttcgtgtttacgctgaccgataaggacaccggagtcactcggtatggcatatgtgtaaacttttataggtcatttcagaaacgaattagcaaggagaagggggaaggtggggccggatccaggggcaaggagggaacacacgctacttgtgctagcgaagaggggggcacggaaagcagcgaaagtgggagctcactacagcctctcagcgccgattcgaccccggacgtgaatcagagcccccggggcaagagacgagccaaagcaggatcaaggtcacggaatagcactctgacctctctgtgtgtgctgtctcactatccattcttcagcacattccgggagtgtctgtacacgctgaaacgcctcgtggattgctgttcagagcggctgctgggaaagaaactgggaataccgcgtggagtgcaaagggacaccatgtggagaatcttcacgggaagtctactagtggaagagaaaagctccgctctgctccacgacctgcgtgagattgaggcatggatatatcgcctcttacggagccccgtgcccgtgagtggacagaagcgtgttgatatcgaggtcctcccccaagaactgcagcccgctcttacatttgcactccctgaccccagccggtttactttagtcgatttccccctgcatctgccgctagaactcttgggtgtcgacgcatgtctgcaggtgctgacttgcatacttcttgagcataaagtggtcctgcagagcagagattataacgctttgtcaatgtccgtgatggctttcgtcgcaatgatatatcctctcgagtacatgttcccggtaatacctctactcccaacgtgcatggcctctgctgaacagctgctactggcacctactccctatattatcggagttccagcaagtttttttctctacaagctggatttcaaaatgccagacgatgtatggctcgtggacctggattctaatcgcgtcatcgctcccaccaatgccgaagttcttcccatattgcctgagccagagtccctcgagttgaaaaaacatctgaagcaggcactggcttctatgtctctgaatacccagccaatattaaacttagaaaagttccatgagggtcaggaaattccactcttattaggccggccctctaatgacctgcaatcaacgccttccactgaattcaaccccctgatatatgggaatgacgtcgatagcgtggatgttgcgactcgagttgcaatggttagattcttcaactcggcaaacgtgctgcaggggttccagatgcatacacgaacactcaggctttttccccggccagtagttgccttccaagccgggtcttttcttgcgtcacgtccccgtcaaacaccctttgccgaaaagctggcaaggacgcaggccgtggaatatttcggagaatggatccttaatccgacaaattatgccttccagcgtattcataataacatgttcgacccagcgctgatcggtgataagcccaagtggtatgcacaccagctccagcctatccactacagagtatatgactccaacagtcagctcgccgaagcactgtccgtcccacccgagagagactccgattcagaacctactgacgacagtggctccgattcaatggactacgacgacagttcctcatcttactcctctctgggggatttcgtcagcgaaatgatgaagtgcgatattaacggtgacaccccaaatgtggacccgctgactcatgcggccctaggggatgcttccgaagtggagatcgacgaactgcaaaaccagaaggaagccgaggaaccagggccagactcagagaattctcaggagaaccctcctttacgaagctcttcttccactactgccagctcgtccccatctacagtgattcacggtgccaattccgaacccgccgattctaccgaaatggacgataaagccgcagtgggcgtgtctaagcctctcccgagcgtgcccccatcgataggcaagtccaatgtcgatcgtagacaggcagaaataggcgagggttctgtgcggagaaggatatatgacaacccatatttcgaaccacaatatgggttcccccccgaagaagatgaagacgagcagggagaaagctacaccccccgcttcagccagcatgtgtctggaaatcgcgcccaaaagcttctgaggccaaatagcctgcgactggcatctgatagcgacgccgagtctgactctcgcgcctcaagtccgaatagtactgtttccaatacgtccactgagggttttgggggcatcatgtccttcgccagctctctgtatcgcaatcacagcacttcctttagtctaagcaatctgaccctgccaaccaagggcgcccgcgaaaaagctacgcccttcccttccctcaaggggaacaggagagccctagtggatcaaaagtcgtctgtgatcaagcattcacccaccgtgaaaagggagcccccatctccacagggcagatcaagcaatagtagcgagaaccagcaatttctgaaggaagtggtccatagcgtacttgatggccagggagttggctggctcaacatgaagaaagtgagaagactcctggagtctgagcagctgcgggtgtttgtattgagcaaactcaataggatggttcaatccgaagacgacgctcgacaagatatcattcctgatgtggaaatcagccgaaaggtgtacaaggggatgcttgacctgcttaagtgcacagtgctatctttggagcaatcatacgcccatgcgggcctcgggggaatggcaagcatcttcggtctcctggagattgcccaaacacactattactcaaaagagccggacaaacggaaacgctcacctacagagtcagtgaacactcctgtaggaaaggatcctggactcgctggccggggcgatccaaaggccatggcccagctgcgggttccccagctgggccccagagcgcccagtgccacagggaagggtccgaaggagttggacacacgcagcctgaaggaagagaattttatcgccagtataggccccgaagtgatcaagccagtctttgatctgggcgaaacagaagagaagaagtcgcaaatttcggctgattccggcgtgtctctgacctcctcttcccaacgcacagatcaagactctgtaataggtgtgagcccggccgtaatgatcaggtctagcagtcaggattccgaggtctcaactgtatccaattctagcggggaaacactcggtgctgactcagacctcagcagtaatgcaggggatggccccggcggagagggctcagtgcacttggcctcatctcgcgggactttgtcagactcggagattgagaccaactccgcgaccagtaccatttttggaaaggcgcatagcctgaagccgtcgatcaaggagaagctcgctggttcccctatacgcacctcagaggatgtatctcagagggtgtatctgtatgagggcttgctgggcaaggaacgcagcaccctttgggatcaaatgcagttctgggaagatgcgtttttggatgcagtcatgcttgagagggaaggaatggggatggatcagggtccccaggagatgatcgaccgttacctatcattaggcgagcacgaccgaaaacgactcgaggacgacgaggataggcttttagctactctgctgcacaatctgattagttacatgctactcatgaaagtaaataaaaacgacataaggaaaaaggtgcgaagactcatgggcaaaagccacatcgggctggtatacagtcagcagattaacgaagtcctggatcagctggcgaacctgaacggccgggatctgagcatttggtctagcggcagcagacacatgaaaaagcagacatttgtcgtacacgccgggaccgatacaaatggcgacattttcttcatggaggtttgtgacgattgcgtagtgttgcggtctaatataggcactgtttatgagaggtggtggtatgagaaacttatcaatatgacctactgcccgaagaccaaggtgctgtgtttgtggcgacgcaacggttcggaaactcagctcaacaagttctacactaaaaaatgtcgggaattgtactattgcgtaaaggatagcatggaacgtgctgcggctcggcagcagtcaataaaacccggacctgaactgggcggagagtttccagtccaggatttgaaaaccggggaaggtggactgctacaggtgaccttagaaggcatcaacctcaagtttatgcacaaccaggttttcattgagttgaaccacatcaaaaaatgcaacacagttaggggcgtgttcgtgctggaagaatttgtacccgaaattaaggaggtcgttagccataagtacaagacccctatggcccatgagatttgctattcagtgctgtgcctgttctcctatgttgctgccgtgcactcctcagaggaggatctcagaacccccccaaggccagtgtcctcatag

SEQ ID NO: 233939 - DNA, 4764 bp, Artificial Sequence
  derived and/or modified sequence
atggtgcagaaaaaaaaattttgccctaggctcctcgattatctcgtaatcgtgggggcacggcatccaagcagtgatagcgtggctcagactcctgaactgctgagacggtacccacttgaagatcatactgaattccccctgcctcccgacgtcgtattcttttgccaacccgaaggttgcctgagtgtgcgtcagcggagaatgtccttaagagacgacactagcttcgtctttactcttacagataaagataccggggtcacacgttatggaatttgcgtgaacttctacagaagttttcaaaagaggattagcaaggagaaaggcgagggcggagccggttctcggggaaaagagggcacccacgccacatgcgcctccgaggagggaggtactgagagttctgagtccggatcttctctgcagcctctgtccgcagattccactccagatgtgaaccagagtcctcgcggtaagcgaagagctaaggcaggctccagatctcggaactctaccctgaccagcttgtgcgttttgagccactacccatttttttctactttcagagaatgcctgtatacgcttaagcgactggtggactgctgcagtgagcgcctgctcggaaaaaaacttgggatccccagaggcgtgcaaagagatactatgtggcggatcttcaccggaagcctcctggttgaagaaaagagctcggccctgttgcacgacttacgtgaaatcgaggcatggatataccgcctgctgagatcacccgtacctgtgtcaggtcaaaagagagttgatattgaagtcctgccccaggagttgcagcccgcattgacgttcgcgcttcccgacccaagtagattcaccctggtcgacttcccactgcacctccccctggagctgctcggtgtggacgcttgcctccaggtactgacatgcatcttgctggagcacaaggtagtgctgcaaagccgggattataacgcgctttctatgtcggtgatggcttttgtagcgatgatctacccactggagtacatgttcccggtcatccccctcctacccacgtgcatggcatccgctgagcagctcttgcttgcccctactccgtacataataggtgtgcctgcctcattcttcctgtacaagctcgacttcaaaatgcccgacgatgtgtggctggtcgacttggattccaaccgggtgattgctccaacaaacgcagaggtcctgccgattcttcccgagccagagagtttagaactgaaaaagcatctaaaacaggccttggcctcgatgtcgttaaacacacaacctatcctgaatttggagaagttccatgagggtcaagaaattcctctgctgttgggcaggccgagtaatgatcttcagtctacgccgagcactgaattcaaccccctgatctatgggaacgatgtcgattccgtcgacgtggctaccagagtagctatggtcaggttttttaacagcgcaaatgtgctgcagggtttccagatgcataccaggaccctgaggctttttccacgcccagtagtggcatttcaagcaggctccttcctcgcttcccggccaaggcagaccccatttgcagagaaactggcacgaacgcaggccgttgagtattttggcgagtggattctcaacccaacgaactatgcttttcagcgaattcacaacaacatgttcgaccccgctctcatcggcgacaagcccaaatggtacgcacatcagctgcagcccattcactaccgtgtctatgatagtaatagccagctggctgaagctctgtctgtaccaccggaaagggattcagactccgagcccacagacgactccggctctgactctatggactacgacgactcgtctagctcttactctagcctgggagacttcgtgagcgagatgatgaaatgcgacattaatggggacaccccaaatgtcgatcccctgacgcacgctgccctgggtgacgctagcgaggtagaaattgacgaattgcagaatcagaaagaagccgaggagccgggacctgattctgagaacagccaggagaatccccctttacggagctcttctagtaccacggctagctcttctccttccacagtgattcatggtgccaattccgaacctgcagattcgacggaaatggatgataaagccgctgttggggtgagcaagccactgccctccgtgcccccttccattggtaagtccaacgtggatagaagacaggccgagattggagaaggatcagtgaggcggaggatctacgataatccgtatttcgaaccccagtacggcttccctccagaagaggatgaggatgaacaaggggaatcatacacccccaggttcagtcagcatgtatcggggaaccgagctcaaaagctgcttcggccaaatagtcttagactagcatccgattccgacgcggagagcgactcccgggctagcagccccaacagtactgtgtccaatacatctacggagggatttggcggaattatgagctttgccagctctctataccggaatcactctacctcattctcactgtccaatctgacattacccacaaaaggagccagggaaaaggcaacaccatttcctagcttaaaaggcaatcggagggccctggtcgatcaaaaatcttcagtgatcaaacactcacctactgtcaaacgcgagccccctagccctcaaggacggtcatccaattccagcgagaaccagcagttccttaaagaggtggtgcatagcgtcctggacggccaaggcgtgggctggctgaatatgaaaaaagtcagacgactgttggagtccgagcagctgagggttttcgtcctaagtaagttgaatcggatggtccagagcgaggacgacgcccgacaggacatcataccggacgtggaaatttctaggaaggtgtacaaaggcatgctggacttgttgaagtgtacagtactgtcacttgagcagagttatgcacatgccggtctgggagggatggccagcatctttggccttttagaaattgctcagacccactactatagcaaggagcccgacaaaaggaagcgcagtcccactgaatccgtcaacactccagtggggaaggaccctgggctagctggacggggtgatcccaaagcaatggcccagcttagagtcccccaactgggacctcgcgcaccctccgccaccggcaagggacctaaagaactagacacccgctccctgaaggaggaaaacttcatcgcaagcatcggacctgaggtcataaagccggttttcgacttaggagaaaccgaggagaagaagtcccagatcagtgccgactcaggggttagcctaactagctcctctcaacgcacggaccaggactccgtgatcggagtctccccagctgtaatgatcaggagcagcagtcaggacagcgaggtgagtaccgtgagcaatagctccggcgaaacccttggcgctgactctgacttgtcaagcaacgcaggggatggtccgggaggcgagggtagcgtacacctggcctcctccaggggtaccttgagcgactctgaaattgagacaaatagtgccacaagcaccatcttcggcaaagctcattccctcaaaccgtccatcaaggagaagttagccggttccccgatccgaacatcagaggatgtttcccagcgcgtgtacctgtacgaagggctcttaggcaaagaacggtccaccttatgggatcagatgcagttctgggaagatgcctttcttgacgccgtgatgctagagcgggaaggcatgggcatggaccaaggaccccaggagatgatcgacaggtacttgagtttaggcgagcatgaccgcaagcgtctggaagacgacgaagaccgtttactcgcaactttgctgcacaacctgatttcttatatgctgctgatgaaggttaataaaaacgacatcaggaaaaaggtgcggaggctaatggggaaaagccacatcggccttgtttattctcagcaaatcaatgaagtattggaccaattggccaacctgaatggccgtgacctgagtatctggagtagcggttcgcgccatatgaaaaagcagacattcgtcgtgcatgccggaaccgatacaaacggcgatatatttttcatggaggtctgtgacgattgtgtggtcttaagaagcaacattgggacagtttacgaaagatggtggtacgagaagcttataaacatgacgtactgcccaaagactaaagttctgtgcttgtggagacgtaacgggtcagaaacacagctgaataaattttatactaagaagtgtagggaactgtattactgcgtgaaggacagcatggaaagagcagcagctcgtcagcagtcaatcaagccgggacccgaactggggggtgaattccctgtccaggacctgaagacaggagaggggggtctcctccaggttacgcttgaaggcataaatctaaaatttatgcataatcaggtgttcatcgagctgaatcacattaaaaaatgcaacaccgtgaggggtgtgttcgtacttgaggaatttgtgccagagattaaagaggtggtgagtcacaagtataaaaccccaatggcacatgagatatgctatagcgtactttgcctgttttcatatgtcgcagcagtccattccagcgaggaagacctacgaacccccccaagacccgtgagcagttag

SEQ ID NO: 233940 - DNA, 4764 bp, Artificial Sequence
  derived and/or modified sequence
atggtgcagaagaagaagttctgccccagactgctggactacctggtgatcgtgggcgccagacaccccagcagcgacagcgtggcccagacccccgagctgctgagaagataccccctggaggaccacaccgagttccccctgccccccgacgtggtgttcttctgccagcccgagggctgcctgagcgtgagacagagaagaatgagcctgagagacgacaccagcttcgtgttcaccctgaccgacaaggacaccggcgtgaccagatacggcatctgcgtgaacttctacagaagcttccagaagagaatcagcaaggagaagggcgagggcggcgccggcagcagaggcaaggagggcacccacgccacctgcgccagcgaggagggcggcaccgagagcagcgagagcggcagcagcctgcagcccctgagcgccgacagcacccccgacgtgaaccagagccccagaggcaagagaagagccaaggccggcagcagaagcagaaacagcaccctgaccagcctgtgcgtgctgagccactaccccttcttcagcaccttcagagagtgcctgtacaccctgaagagactggtggactgctgcagcgagagactgctgggcaagaagctgggcatccccagaggcgtgcagagagacaccatgtggagaatcttcaccggcagcctgctggtggaggagaagagcagcgccctgctgcacgacctgagagagatcgaggcctggatctacagactgctgagaagccccgtgcccgtgagcggccagaagagagtggacatcgaggtgctgccccaggagctgcagcccgccctgaccttcgccctgcccgaccccagcagattcaccctggtggacttccccctgcacctgcccctggagctgctgggcgtggacgcctgcctgcaggtgctgacctgcatcctgctggagcacaaggtggtgctgcagagcagagactacaacgccctgagcatgagcgtgatggccttcgtggccatgatctaccccctggagtacatgttccccgtgatccccctgctgcccacctgcatggccagcgccgagcagctgctgctggcccccaccccctacatcatcggcgtgcccgccagcttcttcctgtacaagctggacttcaagatgcccgacgacgtgtggctggtggacctggacagcaacagagtgatcgcccccaccaacgccgaggtgctgcccatcctgcccgagcccgagagcctggagctgaagaagcacctgaagcaggccctggccagcatgagcctgaacacccagcccatcctgaacctggagaagttccacgagggccaggagatccccctgctgctgggcagacccagcaacgacctgcagagcacccccagcaccgagttcaaccccctgatctacggcaacgacgtggacagcgtggacgtggccaccagagtggccatggtgagattcttcaacagcgccaacgtgctgcagggcttccagatgcacaccagaaccctgagactgttccccagacccgtggtggccttccaggccggcagcttcctggccagcagacccagacagacccccttcgccgagaagctggccagaacccaggccgtggagtacttcggcgagtggatcctgaaccccaccaactacgccttccagagaatccacaacaacatgttcgaccccgccctgatcggcgacaagcccaagtggtacgcccaccagctgcagcccatccactacagagtgtacgacagcaacagccagctggccgaggccctgagcgtgccccccgagagagacagcgacagcgagcccaccgacgacagcggcagcgacagcatggactacgacgacagcagcagcagctacagcagcctgggcgacttcgtgagcgagatgatgaagtgcgacatcaacggcgacacccccaacgtggaccccctgacccacgccgccctgggcgacgccagcgaggtggagatcgacgagctgcagaaccagaaggaggccgaggagcccggccccgacagcgagaacagccaggagaacccccccctgagaagcagcagcagcaccaccgccagcagcagccccagcaccgtgatccacggcgccaacagcgagcccgccgacagcaccgagatggacgacaaggccgccgtgggcgtgagcaagcccctgcccagcgtgccccccagcatcggcaagagcaacgtggacagaagacaggccgagatcggcgagggcagcgtgagaagaagaatctacgacaacccctacttcgagccccagtacggcttcccccccgaggaggacgaggacgagcagggcgagagctacacccccagattcagccagcacgtgagcggcaacagagcccagaagctgctgagacccaacagcctgagactggccagcgacagcgacgccgagagcgacagcagagccagcagccccaacagcaccgtgagcaacaccagcaccgagggcttcggcggcatcatgagcttcgccagcagcctgtacagaaaccacagcaccagcttcagcctgagcaacctgaccctgcccaccaagggcgccagagagaaggccacccccttccccagcctgaagggcaacagaagagccctggtggaccagaagagcagcgtgatcaagcacagccccaccgtgaagagagagccccccagcccccagggcagaagcagcaacagcagcgagaaccagcagttcctgaaggaggtggtgcacagcgtgctggacggccagggcgtgggctggctgaacatgaagaaggtgagaagactgctggagagcgagcagctgagagtgttcgtgctgagcaagctgaacagaatggtgcagagcgaggacgacgccagacaggacatcatccccgacgtggagatcagcagaaaggtgtacaagggcatgctggacctgctgaagtgcaccgtgctgagcctggagcagagctacgcccacgccggcctgggcggcatggccagcatcttcggcctgctggagatcgcccagacccactactacagcaaggagcccgacaagagaaagagaagccccaccgagagcgtgaacacccccgtgggcaaggaccccggcctggccggcagaggcgaccccaaggccatggcccagctgagagtgccccagctgggccccagagcccccagcgccaccggcaagggccccaaggagctggacaccagaagcctgaaggaggagaacttcatcgccagcatcggccccgaggtgatcaagcccgtgttcgacctgggcgagaccgaggagaagaagagccagatcagcgccgacagcggcgtgagcctgaccagcagcagccagagaaccgaccaggacagcgtgatcggcgtgagccccgccgtgatgatcagaagcagcagccaggacagcgaggtgagcaccgtgagcaacagcagcggcgagaccctgggcgccgacagcgacctgagcagcaacgccggcgacggccccggcggcgagggcagcgtgcacctggccagcagcagaggcaccctgagcgacagcgagatcgagaccaacagcgccaccagcaccatcttcggcaaggcccacagcctgaagcccagcatcaaggagaagctggccggcagccccatcagaaccagcgaggacgtgagccagagagtgtacctgtacgagggcctgctgggcaaggagagaagcaccctgtgggaccagatgcagttctgggaggacgccttcctggacgccgtgatgctggagagagagggcatgggcatggaccagggcccccaggagatgatcgacagatacctgagcctgggcgagcacgacagaaagagactggaggacgacgaggacagactgctggccaccctgctgcacaacctgatcagctacatgctgctgatgaaggtgaacaagaacgacatcagaaagaaggtgagaagactgatgggcaagagccacatcggcctggtgtacagccagcagatcaacgaggtgctggaccagctggccaacctgaacggcagagacctgagcatctggagcagcggcagcagacacatgaagaagcagaccttcgtggtgcacgccggcaccgacaccaacggcgacatcttcttcatggaggtgtgcgacgactgcgtggtgctgagaagcaacatcggcaccgtgtacgagagatggtggtacgagaagctgatcaacatgacctactgccccaagaccaaggtgctgtgcctgtggagaagaaacggcagcgagacccagctgaacaagttctacaccaagaagtgcagagagctgtactactgcgtgaaggacagcatggagagagccgccgccagacagcagagcatcaagcccggccccgagctgggcggcgagttccccgtgcaggacctgaagaccggcgagggcggcctgctgcaggtgaccctggagggcatcaacctgaagttcatgcacaaccaggtgttcatcgagctgaaccacatcaagaagtgcaacaccgtgagaggcgtgttcgtgctggaggagttcgtgcccgagatcaaggaggtggtgagccacaagtacaagacccccatggcccacgagatctgctacagcgtgctgtgcctgttcagctacgtggccgccgtgcacagcagcgaggaggacctgagaaccccccccagacccgtgagcagctag

SEQ ID NO: 233941 - protein, 382 aa, Artificial Sequence
  derived and/or modified sequence
MDFGLALLLAGLLGLLLGQSLQVKPLQVEPPEPVVAVALGASRQLTCRLACADRGASVQWRGLDTSLGAVQSDTGRSVLTVRNASLSAAGTRVCVGSCGGRTFQHTVQLLVYAFPDQLTVSPAALVPGDPEVACTAHKVTPVDPNALSFSLLVGGQELEGAQALGPEVQEEEEEPQGDEDVLFRVTERWRLPPLGTPVPPALYCQATMRLPGLELSHRQAIPVLHSPTSPEPPDTTSPESPDTTSPESPDTTSQEPPDTTSPEPPDKTSPEPAPQQGSTHTPRSPGSTRTRRPEISQAGPTQGEVIPTGSSKPAGDQLPAALWTSSAVLGLLLLALPTYHLWKRCRHLAEDDTHPPASLRLLPQVSAWAGLRGTGQVGISPS

SEQ ID NO: 233942 - protein, 406 aa, Artificial Sequence
  derived and/or modified sequence
MDFGLALLLAGLLGLLLGQSLQVKPLQVEPPEPVVAVALGASRQLTCRLACADRGASVQWRGLDTSLGAVQSDTGRSVLTVRNASLSAAGTRVCVGSCGGRTFQHTVQLLVYAFPDQLTVSPAALVPGDPEVACTAHKVTPVDPNALSFSLLVGGQELEGAQALGPEVQEEEEEPQGDEDVLFRVTERWRLPPLGTPVPPALYCQATMRLPGLELSHRQAIPALHALSNPEAPAAESPQAPSLSTPASSHPTSPEPPDTTSPESPDTTSPESPDTTSQEPPDTTSPEPPDKTSPEPAPQQGSTHTPRSPGSTRTRRPEISQAGPTQGEVIPTGSSKPAGDQLPAALWTSSAVLGLLLLALPTYHLWKRCRHLAEDDTHPPASLRLLPQVSAWAGLRGTGQVGISPS

SEQ ID NO: 233943 - protein, 398 aa, Artificial Sequence
  derived and/or modified sequence
MDFGLALLLAGLLGLLLGQSLQVKPLQVEPPEPVVAVALGASRQLTCRLACADRGASVQWRGLDTSLGAVQSDTGRSVLTVRNASLSAAGTRVCVGSCGGRTFQHTVQLLVYAFPDQLTVSPAALVPGDPEVACTAHKVTPVDPNALSFSLLVGGQELEGAQALGPEVQEEEEEPQGDEDVLFRVTERWRLPPLGTPVPPALYCQATMRLPGLELSHRQAIPALHGWLSPPPPQNTGPHGPHPTSPEPPDTTSPESPDTTSPESPDTTSQEPPDTTSPEPPDKTSPEPAPQQGSTHTPRSPGSTRTRRPEISQAGPTQGEVIPTGSSKPAGDQLPAALWTSSAVLGLLLLALPTYHLWKRCRHLAEDDTHPPASLRLLPQVSAWAGLRGTGQVGISPS

SEQ ID NO: 233944 - protein, 390 aa, Artificial Sequence
  derived and/or modified sequence
MDFGLALLLAGLLGLLLGQSLQVKPLQVEPPEPVVAVALGASRQLTCRLACADRGASVQWRGLDTSLGAVQSDTGRSVLTVRNASLSAAGTRVCVGSCGGRTFQHTVQLLVYAFPDQLTVSPAALVPGDPEVACTAHKVTPVDPNALSFSLLVGGQELEGAQALGPEVQEEEEEPQGDEDVLFRVTERWRLPPLGTPVPPALYCQATMRLPGLELSHRQAIPALHALSNPEAPAPTSPEPPDTTSPESPDTTSPESPDTTSQEPPDTTSPEPPDKTSPEPAPQQGSTHTPRSPGSTRTRRPEISQAGPTQGEVIPTGSSKPAGDQLPAALWTSSAVLGLLLLALPTYHLWKRCRHLAEDDTHPPASLRLLPQVSAWAGLRGTGQVGISPS

SEQ ID NO: 233945 - DNA, 1173 bp, Artificial Sequence
  derived and/or modified sequence
atggacttcggcctggccctgctgctggccggcctgctgggcctgctgctgggccagagcctgcaggtgaagcccctgcaggtggagccccccgagcccgtggtggccgtggccctgggcgccagcagacagctgacctgcagactggcctgcgccgacagaggcgccagcgtgcagtggagaggcctggacaccagcctgggcgccgtgcagagcgacaccggcagaagcgtgctgaccgtgagaaacgccagcctgagcgccgccggcaccagagtgtgcgtgggcagctgcggcggcagaaccttccagcacaccgtgcagctgctggtgtacgccttccccgaccagctgaccgtgagccccgccgccctggtgcccggcgaccccgaggtggcctgcaccgcccacaaggtgacccccgtggaccccaacgccctgagcttcagcctgctggtgggcggccaggagctggagggcgcccaggccctgggccccgaggtgcaggaggaggaggaggagccccagggcgacgaggacgtgctgttcagagtgaccgagagatggagactgccccccctgggcacccccgtgccccccgccctgtactgccaggccaccatgagactgcccggcctggagctgagccacagacaggccatccccgccctgcacgccctgagcaaccccgaggcccccgcccccaccagccccgagccccccgacaccaccagccccgagagccccgacaccaccagccccgagagccccgacaccaccagccaggagccccccgacaccaccagccccgagccccccgacaagaccagccccgagcccgccccccagcagggcagcacccacacccccagaagccccggcagcaccagaaccagaagacccgagatcagccaggccggccccacccagggcgaggtgatccccaccggcagcagcaagcccgccggcgaccagctgcccgccgccctgtggaccagcagcgccgtgctgggcctgctgctgctggccctgcccacctaccacctgtggaagagatgcagacacctggccgaggacgacacccacccccccgccagcctgagactgctgccccaggtgagcgcctgggccggcctgagaggcaccggccaggtgggcatcagccccagctag

SEQ ID NO: 233946 - DNA, 1173 bp, Artificial Sequence
  derived and/or modified sequence
atggattttgggctggctctcctgcttgcggggctgctgggtctgcttctgggtcagagcctgcaggtcaaacctcttcaggtcgaaccacccgagcccgttgtagcagttgcactgggagcttcacgccagctgacctgtcggcttgcgtgtgccgatcgcggcgctagcgttcagtggcggggactggacacctctctcggggccgtacagagcgatacaggtcgctcggtcctgacagtgcgaaacgctagtctgagcgctgcaggcactagggtgtgcgtggggagttgcggaggaaggactttccagcatactgtccagctgttagtctatgcttttccagaccagctgacggtgagcccggctgccctcgtgcccggtgatccagaggtggcatgcacagcacacaaggtgactcctgtggatccgaatgccctcagcttttctctcctggtgggaggccaggaactcgaaggtgctcaggctctcgggcctgaagtgcaagaggaagaagaagaaccacagggggatgaagatgtgctcttccgggtaaccgagcggtggcgcctcccacccctaggcacacctgtccctccggccctctattgccaggcaactatgcgcttacctggtttggaactctctcacagacaagccattccagctttacacgctctgtccaatccagaggccccagcccccacgtccccagagccaccagatactaccagccctgagagccccgacacaaccagcccagagtccccggataccaccagccaggagccccctgataccacctccccagaacctccagacaaaactagccctgagcctgccccacagcaaggatctacgcacaccccgagatctccaggttctactcgaacccgaagacccgagatttcccaggccggacccacccaaggggaggtgattcccacggggagctctaaaccggccggggatcagctccccgccgcactttggacttcttctgctgtcctgggcttgttactgctggcgttgccaacttaccacctttggaagcgttgcagacatttagccgaagatgacacccatccacctgcgtccctgagactgctgcctcaggtgtccgcatgggctggattaagaggcaccggacaagtcggaatctccccgtcctag

SEQ ID NO: 233947 - DNA, 1173 bp, Artificial Sequence
  derived and/or modified sequence
atggactttggcctggccctgctgctggccggcctgctgggcctgctgctgggccagagcctgcaggtgaagcccctgcaggtggagcccccagagcctgtggtggccgtggccctgggcgccagccggcagctgacctgccgcctggcctgtgccgacagaggagcctctgtgcagtggaggggcctggacaccagcctgggcgctgtgcagagcgacaccggccgctctgtgctgactgtgagaaatgccagcctgtctgctgctggcaccagggtgtgtgtgggcagctgtggcggccgcaccttccagcacacagtgcagctgctggtgtatgccttcccagaccagctgactgtgtccccagctgccctggtgcctggggaccctgaggtggcctgcacagcccacaaggtgacccctgtggaccccaatgccctgtccttcagcctgctggtgggcggccaggagctggagggcgcccaggccctgggccctgaggtgcaggaggaggaggaggagccccagggagatgaagatgtgctcttccgggtgacagagcgctggaggctgccccccctgggcacccctgtgcccccagccctgtactgccaggccaccatgaggctgcccggcctggagctgagccaccggcaggccatcccagccctgcacgccctgagcaaccctgaggccccagcccccaccagccctgagcccccagacaccaccagccctgagagcccagacaccaccagccctgagagcccagacaccaccagccaggagcccccagacaccaccagccctgagcccccagacaagaccagccctgagcccgccccccagcagggcagcacccacacccccaggagccctggcagcaccaggaccaggaggcctgagatcagccaggccggccccacccagggcgaggtgatccccaccggcagcagcaagccagctggggaccagctgcctgctgccctgtggaccagcagcgctgtgctgggcctgctgctgctggccctgcccacctaccacctgtggaagcgctgccgccacctggccgaggatgacacccaccccccagccagcctgcggctgctgccccaggtgtctgcctgggccggcctgcggggcaccggccaggtgggcatcagccccagctag

SEQ ID NO: 233948 - DNA, 1534 bp, Artificial Sequence
  derived and/or modified sequence
gggactgagcatggatttcggactggccctcctgctggcggggcttctggggctcctcctcggccagtccctccaggtgaagcccctgcaggtggagcccccggagccggtggtggccgtggccttgggcgcctcgcgccagctcacctgccgcctggcctgcgcggaccgcggggcctcggtgcagtggcggggcctggacaccagcctgggcgcggtgcagtcggacacgggccgcagcgtcctcaccgtgcgcaacgcctcgctgtcggcggccgggacccgcgtgtgcgtgggctcctgcgggggccgcaccttccagcacaccgtgcagctccttgtgtacgccttcccggaccagctgaccgtctccccagcagccctggtgcctggtgacccggaggtggcctgtacggcccacaaagtcacgcccgtggaccccaacgcgctctccttctccctgctcgtcgggggccaggaactggagggggcgcaagccctgggcccggaggtgcaggaggaggaggaggagccccagggggacgaggacgtgctgttcagggtgacagagcgctggcggctgccgcccctggggacccctgtcccgcccgccctctactgccaggccacgatgaggctgcctggcttggagctcagccaccgccaggccatccccgtcctgcacagcccgacctccccggagcctcccgacaccacctccccggagtctcccgacaccacctccccggagtctcccgacaccacctcccaggagcctcccgacaccacctccccggagcctcccgacaagacctccccggagcccgccccccagcagggctccacacacacccccaggagcccaggctccaccaggactcgccgccctgagatctcccaggctgggcccacgcagggagaagtgatcccaacaggctcgtccaaacctgcgggtgaccagctgcccgcggctctgtggaccagcagtgcggtgctgggactgctgctcctggccttgcccacctatcacctctggaaacgctgccggcacctggctgaggacgacacccacccaccagcttctctgaggcttctgccccaggtgtcggcctgggctgggttaagggggaccggccaggtcgggatcagcccctcctgagtggccagcctttccccctgtgaaagcaaaatagcttggaccccttcaagttgagaactggtcagggcaaacctgcctcccattctactcaaagtcatccctctgttcacagagatggatgcatgttctgattgcctctttggagaagctcatcagaaactcaaaagaaggccactgtttgtctcacctacccatgacctgaagcccctccctgagtggtccccacctttctggacggaaccacgtactttttacatacattgattcatgtctcacgtctccctaaaaatgcgtaagaccaagctgtgccctgaccaccctgggcccctgtcgtcaggacctcctgaggctttggcaaataaacctcctaaaatg

SEQ ID NO: 233949 - DNA, 1461 bp, Artificial Sequence
  derived and/or modified sequence
ctatttaagcggcttccccgcggcctcgggacagaggggactgagcatggatttcggactggccctcctgctggcggggcttctggggctcctcctcggccagtccctccaggtgaagcccctgcaggtggagcccccggagccggtggtggccgtggccttgggcgcctcgcgccagctcacctgccgcctggcctgcgcggaccgcggggcctcggtgcagtggcggggcctggacaccagcctgggcgcggtgcagtcggacacgggccgcagcgtcctcaccgtgcgcaacgcctcgctgtcggcggccgggacccgcgtgtgcgtgggctcctgcgggggccgcaccttccagcacaccgtgcagctccttgtgtacgccttcccggaccagctgaccgtctccccagcagccctggtgcctggtgacccggaggtggcctgtacggcccacaaagtcacgcccgtggaccccaacgcgctctccttctccctgctcgtcgggggccaggaactggagggggcgcaagccctgggcccggaggtgcaggaggaggaggaggagccccagggggacgaggacgtgctgttcagggtgacagagcgctggcggctgccgcccctggggacccctgtcccgcccgccctctactgccaggccacgatgaggctgcctggcttggagctcagccaccgccaggccatccccgcccttcacgctctgtccaatcccgaagcccctgccccgacctccccggagcctcccgacaccacctccccggagtctcccgacaccacctccccggagtctcccgacaccacctcccaggagcctcccgacaccacctccccggagcctcccgacaagacctccccggagcccgccccccagcagggctccacacacacccccaggagcccaggctccaccaggactcgccgccctgagatctcccaggctgggcccacgcagggagaagtgatcccaacaggctcgtccaaacctgcgggtgaccagctgcccgcggctctgtggaccagcagtgcggtgctgggactgctgctcctggccttgcccacctatcacctctggaaacgctgccggcacctggctgaggacgacacccacccaccagcttctctgaggcttctgccccaggtgtcggcctgggctgggttaagggggaccggccaggtcgggatcagcccctcctgagtggccagcctttccccctgtgaaagcaaaatagcttggaccccttcaagttgagaactggtcagggcaaacctgcctcccattctactcaaagtcatccctctgttcacagagatggatgcatgttctgattgcctctttggagaagctcatcagaaactcaaaagaaggccactgtttgtctcacctacccatgacctgaagcccctccctgagtggtccccacctttctggacggaacc

SEQ ID NO: 233950 - DNA, 1173 bp, Artificial Sequence
  derived and/or modified sequence
atggacttcggcctggccctgctgctggccggcctgctgggcctgttattgggccagtccctccaggtcaagcctttgcaagtagagccccccgagccagtggtggctgtcgctctcggcgcttcccggcaattaacctgccgactggcgtgtgctgaccgcggagcttcagttcagtggagaggcctggacacttcactcggcgcggtgcagtcagatactggtcgttctgtcctcactgttcggaatgcctcactaagtgcggccggcaccagagtctgtgtgggcagctgtggcggccggacctttcagcataccgtgcagctattggtgtacgccttccctgatcagctcaccgtaagccctgctgctttagtgcccggcgaccctgaagttgcctgtactgcccataaggtgacaccagtagacccaaatgctttatccttttctctcttggtggggggtcaggaactcgaaggtgctcaggccctgggaccagaggttcaggaagaggaggaggaacctcagggggacgaagatgtgctgttccgggtcacagaacgatggcgcctacccccgttgggcaccccagtgcctcccgctctgtactgtcaggcgaccatgaggcttccgggactggagttgtcgcaccgtcaggcgattccagctctgcacgctctctcaaacccggaggcccccgccccaacatcccccgagccacctgacaccacgtctcccgaaagccccgataccacttctccggagtctcccgacacaactagtcaggagccccctgacactacctcccccgaaccaccggacaagacctctcccgagcccgccccccagcagggaagcacccacaccccgcgctcccctggatccacacgtaccaggaggcctgaaatatcccaggcaggacccacccagggggaagtcattccaactggctcttccaaaccggccggcgaccagctgccagcggcgttgtggacttcttcagccgtactgggccttctcctgctagcgctgcctacctatcacctttggaagcgttgcagacatttggcggaagatgacacccacccgcccgcctcattgcgattactgccccaagtgtctgcctgggcaggtcttcgtggaaccggccaggtcggaatttcaccctcttag

SEQ ID NO: 233951 - DNA, 1173 bp, Artificial Sequence
  derived and/or modified sequence
atggactttggactggcactcctgctcgctggactactcggactgctcctgggccagtcattgcaggtgaaaccactgcaggtggagccacccgagcctgtcgtagctgtggcactcggcgcttccaggcagctcacatgtcgcctggcttgtgctgatagaggtgcgagtgtccagtggcggggactggacaccagcctgggtgccgtgcagagcgataccggcagaagtgtactgacagtacgcaacgcaagcctcagtgctgccggtaccagggtttgcgtcggctcgtgtggagggcgtaccttccagcacaccgtgcaattattggtgtacgcttttcccgatcagctgactgtaagccctgctgccctggtgcccggagacccggaagtggcctgcaccgctcataaggtcacccccgttgaccccaacgcactgtctttttcattgctagtgggcggtcaagagttggaaggcgctcaggctctgggcccagaggtgcaggaggaggaagaggagccacagggagacgaagacgtcctgtttcgcgtgactgagcgctggcggctgccacccctgggaacccctgtgccccctgctttatactgtcaagccaccatgaggctcccaggacttgaactctcacataggcaggccattcccgctctgcacgctctgagtaacccagaggcccctgctcccacctcacccgagccccctgacacaacaagccccgagtctcccgatactacctctcctgagagtcctgatacgaccagccaggaacccccagatacaacctctccagagccccctgacaagacaagccccgaacccgcaccccagcagggaagtacccacacaccaagatctcctggcagtaccagaacacgcaggccggaaatctcacaggcagggccaacccagggcgaagtaattccaaccgggtcgagtaaacctgcaggagatcaactgcccgctgctctttggacttccagcgccgtcctcggtctgctgcttctggctctgcctacttatcacctctggaagcgctgtcggcaccttgcagaggatgatacccatccccctgcatctttgagactgctgccccaggtctctgcttgggccggactgcgcggaacaggacaggtaggtatctccccatcgtag

SEQ ID NO: 233952 - DNA, 1149 bp, Artificial Sequence
  derived and/or modified sequence
atggacttcggcctggccctgctgctggccggcctgctgggcctgctgctgggccagagcctgcaggtgaagcccctgcaggtggagccccccgagcccgtggtggccgtggccctgggcgccagcagacagctgacctgcagactggcctgcgccgacagaggcgccagcgtgcagtggagaggcctggacaccagcctgggcgccgtgcagagcgacaccggcagaagcgtgctgaccgtgagaaacgccagcctgagcgccgccggcaccagagtgtgcgtgggcagctgcggcggcagaaccttccagcacaccgtgcagctgctggtgtacgccttccccgaccagctgaccgtgagccccgccgccctggtgcccggcgaccccgaggtggcctgcaccgcccacaaggtgacccccgtggaccccaacgccctgagcttcagcctgctggtgggcggccaggagctggagggcgcccaggccctgggccccgaggtgcaggaggaggaggaggagccccagggcgacgaggacgtgctgttcagagtgaccgagagatggagactgccccccctgggcacccccgtgccccccgccctgtactgccaggccaccatgagactgcccggcctggagctgagccacagacaggccatccccgtgctgcacagccccaccagccccgagccccccgacaccaccagccccgagagccccgacaccaccagccccgagagccccgacaccaccagccaggagccccccgacaccaccagccccgagccccccgacaagaccagccccgagcccgccccccagcagggcagcacccacacccccagaagccccggcagcaccagaaccagaagacccgagatcagccaggccggccccacccagggcgaggtgatccccaccggcagcagcaagcccgccggcgaccagctgcccgccgccctgtggaccagcagcgccgtgctgggcctgctgctgctggccctgcccacctaccacctgtggaagagatgcagacacctggccgaggacgacacccacccccccgccagcctgagactgctgccccaggtgagcgcctgggccggcctgagaggcaccggccaggtgggcatcagccccagctag

SEQ ID NO: 233953 - DNA, 1149 bp, Artificial Sequence
  derived and/or modified sequence
atggactttgggttagcccttttattggctggattattaggcctgcttctgggccagtcactgcaagtgaagccgctgcaggtagagcctcccgaacctgtagttgcagtcgcactcggcgcctcacgtcaactgacatgccggctggcctgcgcagaccggggagcaagtgtccagtggcgcggactggacaccagcctgggtgcagtccagtccgatacaggccgaagcgtgctaacagtgaggaatgcatcacttagcgcggctgggaccagagtatgcgtgggctcttgcgggggccggactttccaacacaccgtccaattacttgtgtatgccttcccagaccagctaacggtgtccccagcggccttggtccccggggatcccgaggtcgcatgcacagcccacaaagtgactcccgtcgaccctaacgctttatctttttcattgctggtcggcggacaggaactcgagggcgcacaggccctgggaccggaagtgcaagaagaggaggaagaaccacagggggacgaagatgtgcttttcagagtgacagaacgttggagacttcccccactagggacaccagtcccgcccgccctctattgtcaggccacgatgagactgccgggattggagctctcccacaggcaagctataccggtgctgcacagcccaacctcccctgagccccccgacacaacctcacccgaatcccccgacaccacctctcccgagtctcctgatacgacatcccaagaaccccctgataccaccagtccagagccaccagataagacatccccagaacctgccccacagcaagggagcacacacaccccgcgctctccaggcagcacgaggactcggcgccctgagattagccaggcagggccaacccagggtgaagtcattccaaccggaagctccaaaccagcaggggatcaactgcctgctgccctctggacctctagtgccgtactgggtttactgctgctcgcactgccaacatatcacctttggaagcgctgtaggcatttagccgaggacgatacccatccacctgctagcctacgactgctgccacaggtgtctgcctgggctggcttgcgggggactggacaggttgggattagtccatcatag

SEQ ID NO: 233954 - DNA, 1149 bp, Artificial Sequence
  derived and/or modified sequence
atggactttggcctggccctgctgctggccggcctgctgggcctgctgctgggccagagcctgcaggtgaagcccctgcaggtggagcccccagagcctgtggtggccgtggccctgggcgccagccggcagctgacctgccgcctggcctgtgccgacagaggagcctctgtgcagtggaggggcctggacaccagcctgggcgctgtgcagagcgacaccggccgctctgtgctgactgtgagaaatgccagcctgtctgctgctggcaccagggtgtgtgtgggcagctgtggcggccgcaccttccagcacacagtgcagctgctggtgtatgccttcccagaccagctgactgtgtccccagctgccctggtgcctggggaccctgaggtggcctgcacagcccacaaggtgacccctgtggaccccaatgccctgtccttcagcctgctggtgggcggccaggagctggagggcgcccaggccctgggccctgaggtgcaggaggaggaggaggagccccagggagatgaagatgtgctcttccgggtgacagagcgctggaggctgccccccctgggcacccctgtgcccccagccctgtactgccaggccaccatgaggctgcccggcctggagctgagccaccggcaggccatccctgtgctgcacagccccaccagccctgagcccccagacaccaccagccctgagagcccagacaccaccagccctgagagcccagacaccaccagccaggagcccccagacaccaccagccctgagcccccagacaagaccagccctgagcccgccccccagcagggcagcacccacacccccaggagccctggcagcaccaggaccaggaggcctgagatcagccaggccggccccacccagggcgaggtgatccccaccggcagcagcaagccagctggggaccagctgcctgctgccctgtggaccagcagcgctgtgctgggcctgctgctgctggccctgcccacctaccacctgtggaagcgctgccgccacctggccgaggatgacacccaccccccagccagcctgcggctgctgccccaggtgtctgcctgggccggcctgcggggcaccggccaggtgggcatcagccccagctag

SEQ ID NO: 233955 - DNA, 1149 bp, Artificial Sequence
  derived and/or modified sequence
atggacttcggcctggccctgctgctggccggcctgctgggcctgctgctgggacagagtctacaggtgaaacctttacaagtggagcctcccgaacccgtcgttgccgttgccctgggggcatcacggcaactaacctgtcggttggcctgcgccgatcggggggctagtgttcaatggcgcgggttggatacctcattgggcgccgtgcaaagcgacactgggcgctcagtgttgaccgtcaggaatgcctccctgagcgcagccgggacacgtgtgtgcgtgggcagctgtggcggccgcacgtttcagcacaccgtgcaactcttggtctacgcctttccagatcagcttaccgtctcacctgctgccctggtgcctggtgacccagaagttgcctgtaccgctcacaaggtgacccccgtagaccccaatgcactttcattctcgctgctggtaggcggccaagagctcgagggagcccaagcattagggcctgaagtccaggaggaggaggaggaacctcagggcgatgaagacgtgttgtttagggtcacagagcgctggaggctgccacctctgggaacacccgtgccgccagcattgtactgccaggccactatgcgactgcccggactggaacttagccatcgccaagctatcccggtcctgcacagtccaactagccctgagccgcccgacaccacttcccccgaatcccccgataccacttcgccagaatctccggatacgacaagccaggagcctcccgacacaacttcccctgagcctcctgataagacaagccccgaacccgccccacagcagggctccactcatacccctcgatccccaggcagcacccgcactcgtaggccagaaatttcacaagcaggaccgactcaaggggaggtaatccctacaggatctagcaagccagccggagatcagttgcccgctgccctgtggacctccagtgccgtgctgggtctgttgctgttggctctacccacgtaccatttgtggaagagatgccgccatcttgctgaggatgacacccaccctccagcttccttgcgactactcccccaggtctctgcctgggcgggacttagaggtactggacaggtgggaatctccccatcttag

SEQ ID NO: 233956 - DNA, 1149 bp, Artificial Sequence
  derived and/or modified sequence
atggactttggcctggcactgctgctggctggtcttttagggttgcttcttggtcagagcctgcaggtgaagcctttacaggtagagccaccagagccagtagtggcagtggccctgggggctagccgacagctgacttgtcggctggcctgtgcagaccgcggtgcctccgtccagtggaggggattggacacctctttgggcgctgtgcaatcggataccggacgctccgtgctgaccgttcgaaacgcatccctgtctgccgcaggaactagggtgtgtgtcgggtcgtgcgggggaaggacctttcaacacacagtgcagctactggtgtacgcattccccgatcagctgacggtgagccccgcagcgctagtgccaggagatcccgaggtggcctgcacagcacataaggtgactcccgttgatcccaacgccttatcattcagcctcctggttggcggacaggaacttgagggggctcaggctttaggccctgaagtgcaggaggaggaggaggaaccccagggcgacgaggacgtgctgtttcgcgtcacggagagatggcggctgcctccacttggtacacccgtaccgccagctttgtattgccaggcaaccatgcggctgcccggtctcgaactcagccaccgccaggcaattcccgtcctacattctcctaccagccccgagcctcccgataccacaagcccagaatccccagacaccaccagtccagagtccccagacactacctcacaggaaccccctgacaccactagtcccgaaccaccagataagacctcccccgaacctgccccacagcagggaagcactcacacaccacggtcccccggttctacccgcacacggagacctgagatttcgcaggctggaccaacacagggcgaggtcatacccacagggagctctaagccagctggagaccaactgcctgccgcactctggacgtcatctgccgttcttggcttgctgttacttgccctgccaacctatcatttgtggaagagatgtcgccatctcgcggaagacgatacgcatccgccagcttcgttgcggctgctgccgcaggttagcgcttgggcaggcttgaggggaactggacaggtgggaatttccccatcctag

SEQ ID NO: 233957 - protein, 295 aa, Artificial Sequence
  derived and/or modified sequence
MDFGLALLLAGLLGLLLGQSLQVKPLQVEPPEPVVAVALGASRQLTCRLACADRGASVQWRGLDTSLGAVQSDTGRSVLTVRNASLSAAGTRVCVGSCGGRTFQHTVQLLVYAFPDQLTVSPAALVPGDPEVACTAHKVTPVDPNALSFSLLVGGQELEGAQALGPEVQEEEEEPQGDEDVLFRVTERWRLPPLGTPVPPALYCQATMRLPGLELSHRQAIPASKPAGDQLPAALWTSSAVLGLLLLALPTYHLWKRCRHLAEDDTHPPASLRLLPQVSAWAGLRGTGQVGISPS

SEQ ID NO: 233958 - protein, 200 aa, Artificial Sequence
  derived and/or modified sequence
MDFGLALLLAGLLGLLLAFPDQLTVSPAALVPGDPEVACTAHKVTPVDPNALSFSLLVGGQELEGAQALGPEVQEEEEEPQGDEDVLFRVTERWRLPPLGTPVPPALYCQATMRLPGLELSHRQAIPASKPAGDQLPAALWTSSAVLGLLLLALPTYHLWKRCRHLAEDDTHPPASLRLLPQVSAWAGLRGTGQVGISPS

SEQ ID NO: 233959 - DNA, 888 bp, Artificial Sequence
  derived and/or modified sequence
atggacttcggcctggccctgctgctggccggcctgctgggcctgctgctgggccagagcctgcaggtgaagcccctgcaggtggagccccccgagcccgtggtggccgtggccctgggcgccagcagacagctgacctgcagactggcctgcgccgacagaggcgccagcgtgcagtggagaggcctggacaccagcctgggcgccgtgcagagcgacaccggcagaagcgtgctgaccgtgagaaacgccagcctgagcgccgccggcaccagagtgtgcgtgggcagctgcggcggcagaaccttccagcacaccgtgcagctgctggtgtacgccttccccgaccagctgaccgtgagccccgccgccctggtgcccggcgaccccgaggtggcctgcaccgcccacaaggtgacccccgtggaccccaacgccctgagcttcagcctgctggtgggcggccaggagctggagggcgcccaggccctgggccccgaggtgcaggaggaggaggaggagccccagggcgacgaggacgtgctgttcagagtgaccgagagatggagactgccccccctgggcacccccgtgccccccgccctgtactgccaggccaccatgagactgcccggcctggagctgagccacagacaggccatccccgccagcaagcccgccggcgaccagctgcccgccgccctgtggaccagcagcgccgtgctgggcctgctgctgctggccctgcccacctaccacctgtggaagagatgcagacacctggccgaggacgacacccacccccccgccagcctgagactgctgccccaggtgagcgcctgggccggcctgagaggcaccggccaggtgggcatcagccccagctag

SEQ ID NO: 233960 - DNA, 603 bp, Artificial Sequence
  derived and/or modified sequence
atggacttcggcctggccctgctgctggccggcctgctgggcctgctgctggccttccccgaccagctgaccgtgagccccgccgccctggtgcccggcgaccccgaggtggcctgcaccgcccacaaggtgacccccgtggaccccaacgccctgagcttcagcctgctggtgggcggccaggagctggagggcgcccaggccctgggccccgaggtgcaggaggaggaggaggagccccagggcgacgaggacgtgctgttcagagtgaccgagagatggagactgccccccctgggcacccccgtgccccccgccctgtactgccaggccaccatgagactgcccggcctggagctgagccacagacaggccatccccgccagcaagcccgccggcgaccagctgcccgccgccctgtggaccagcagcgccgtgctgggcctgctgctgctggccctgcccacctaccacctgtggaagagatgcagacacctggccgaggacgacacccacccccccgccagcctgagactgctgccccaggtgagcgcctgggccggcctgagaggcaccggccaggtgggcatcagccccagctag

SEQ ID NO: 233961 - DNA, 1221 bp, Artificial Sequence
  derived and/or modified sequence
atggacttcggcctggccctgctgctggccggcctgctgggcctgctgctgggccagagcctgcaggtgaagcccctgcaggtggagccccccgagcccgtggtggccgtggccctgggcgccagcagacagctgacctgcagactggcctgcgccgacagaggcgccagcgtgcagtggagaggcctggacaccagcctgggcgccgtgcagagcgacaccggcagaagcgtgctgaccgtgagaaacgccagcctgagcgccgccggcaccagagtgtgcgtgggcagctgcggcggcagaaccttccagcacaccgtgcagctgctggtgtacgccttccccgaccagctgaccgtgagccccgccgccctggtgcccggcgaccccgaggtggcctgcaccgcccacaaggtgacccccgtggaccccaacgccctgagcttcagcctgctggtgggcggccaggagctggagggcgcccaggccctgggccccgaggtgcaggaggaggaggaggagccccagggcgacgaggacgtgctgttcagagtgaccgagagatggagactgccccccctgggcacccccgtgccccccgccctgtactgccaggccaccatgagactgcccggcctggagctgagccacagacaggccatccccgccctgcacgccctgagcaaccccgaggcccccgccgccgagagcccccaggcccccagcctgagcacccccgccagcagccaccccaccagccccgagccccccgacaccaccagccccgagagccccgacaccaccagccccgagagccccgacaccaccagccaggagccccccgacaccaccagccccgagccccccgacaagaccagccccgagcccgccccccagcagggcagcacccacacccccagaagccccggcagcaccagaaccagaagacccgagatcagccaggccggccccacccagggcgaggtgatccccaccggcagcagcaagcccgccggcgaccagctgcccgccgccctgtggaccagcagcgccgtgctgggcctgctgctgctggccctgcccacctaccacctgtggaagagatgcagacacctggccgaggacgacacccacccccccgccagcctgagactgctgccccaggtgagcgcctgggccggcctgagaggcaccggccaggtgggcatcagccccagctag

SEQ ID NO: 233962 - DNA, 1197 bp, Artificial Sequence
  derived and/or modified sequence
atggacttcggcctggccctgctgctggccggcctgctgggcctgctgctgggccagagcctgcaggtgaagcccctgcaggtggagccccccgagcccgtggtggccgtggccctgggcgccagcagacagctgacctgcagactggcctgcgccgacagaggcgccagcgtgcagtggagaggcctggacaccagcctgggcgccgtgcagagcgacaccggcagaagcgtgctgaccgtgagaaacgccagcctgagcgccgccggcaccagagtgtgcgtgggcagctgcggcggcagaaccttccagcacaccgtgcagctgctggtgtacgccttccccgaccagctgaccgtgagccccgccgccctggtgcccggcgaccccgaggtggcctgcaccgcccacaaggtgacccccgtggaccccaacgccctgagcttcagcctgctggtgggcggccaggagctggagggcgcccaggccctgggccccgaggtgcaggaggaggaggaggagccccagggcgacgaggacgtgctgttcagagtgaccgagagatggagactgccccccctgggcacccccgtgccccccgccctgtactgccaggccaccatgagactgcccggcctggagctgagccacagacaggccatccccgccctgcacggctggctgagccccccccccccccagaacaccggcccccacggcccccaccccaccagccccgagccccccgacaccaccagccccgagagccccgacaccaccagccccgagagccccgacaccaccagccaggagccccccgacaccaccagccccgagccccccgacaagaccagccccgagcccgccccccagcagggcagcacccacacccccagaagccccggcagcaccagaaccagaagacccgagatcagccaggccggccccacccagggcgaggtgatccccaccggcagcagcaagcccgccggcgaccagctgcccgccgccctgtggaccagcagcgccgtgctgggcctgctgctgctggccctgcccacctaccacctgtggaagagatgcagacacctggccgaggacgacacccacccccccgccagcctgagactgctgccccaggtgagcgcctgggccggcctgagaggcaccggccaggtgggcatcagccccagctag

SEQ ID NO: 233963 - DNA, 888 bp, Artificial Sequence
  derived and/or modified sequence
atggatttcggtctggctctgctgctagctggtcttctagggctcttgcttggccaatctctccaagtgaagccactgcaagtagaacctcccgagcccgtcgtcgctgtcgcactgggggcgtccagacagttgacctgccggttggcctgcgcagaccggggcgcaagcgtgcagtggcgagggctcgatacttccctgggtgccgtacagagtgacaccgggcggtcggtcctgacggtgcggaacgcctccctctctgctgcaggcactagagtgtgtgtcggaagctgcggcgggcgaacattccaacatacagtgcagctattggtgtacgcatttccagatcagctaacggttagtcccgctgccttggtccccggagatccagaggtagcttgtacggcccacaaagtcactcccgtggaccccaacgcacttagtttcagcctgctggttggaggccaggaactggaaggagcacaggccctcggtcctgaagtgcaagaggaggaagaagagccacagggcgacgaggacgtgctctttagagtcaccgaaaggtggcgcctgccgcctttaggaactcctgtgcctcctgctctgtactgtcaggccacaatgcgcttaccagggttggagctttctcaccgtcaggcgatacctgcaagtaaacctgccggtgatcagctgcccgcagctctttggacctcgtcagccgtcctaggccttcttctgctggccctccctacctatcacttgtggaaacggtgccgccacctcgccgaagatgacacgcacccccccgcgtctctgcggcttctgcctcaggtgtctgcgtgggcagggttgcgcggcaccggccaggttggaatctccccatcttag

SEQ ID NO: 233964 - DNA, 603 bp, Artificial Sequence
  derived and/or modified sequence
atggatttcgggttggccctgctgctggccgggcttctggggctgctgcttgcctttcctgatcagctgacagtgtcaccagcagcactggtgccaggcgaccctgaagtggcttgcaccgcacataaagtgacccctgtagatcctaatgccctatcttttagcctgttagtgggcggtcaggagttagagggcgcccaggcactcggtcccgaggtgcaggaggaggaagaagaaccacagggagacgaagacgtgctgttccgtgtgactgaacgctggcgattaccccctcttggaacacccgtcccccctgcactatactgtcaagccaccatgagactgcccggcttggagcttagtcatcgccaagccatacctgctagcaagcccgctggcgatcagctgcccgcggccttatggacatctagcgctgtcctgggcctgctccttctcgctttgcccacctatcatctgtggaagcggtgcagacacctcgctgaggacgacacccaccctccagcctcgttgcgcctgctgcctcaagtgtccgcatgggcaggcctgcggggaaccggacaggttggcatctcccctagttag

SEQ ID NO: 233965 - DNA, 1221 bp, Artificial Sequence
  derived and/or modified sequence
atggatttcggcctcgcgctgctgctggccggacttttaggactactgctcggacagagcctacaggtgaaacccctccaggtggagccccccgagccggtggtggcagtcgccctgggtgccagccggcagctgacctgccgattggcatgcgctgacaggggtgcgagtgtgcaatggagaggccttgatacgagtctcggagccgttcagagcgacacaggaaggagcgtgctcaccgtgcgcaatgcctccctctcggctgccgggactagggtctgtgttggctcctgtggcggcagaacctttcaacacaccgtgcagctgctggtgtacgcgttccccgatcagcttacggttagccctgccgcactagtgcccggtgaccccgaggtggcctgtacagctcacaaggtaactccagtggaccctaacgccctgagcttcagccttctggtgggaggccaggaattggaaggggctcaggccctcgggcctgaggtgcaggaagaggaggaagagccacagggagatgaagacgtgttattccgcgttactgaaaggtggagactccctcctcttgggacccctgtgcctccggccctgtattgccaggcaaccatgagacttcctggactggagctgtctcaccgacaagcaatccccgcgctgcacgctctgtccaaccccgaggcaccggccgctgagtccccccaagcaccctccttatccactccagcctctagccatccaacctcaccagagccacctgatacgacgtctcccgagtccccagatacaacctcgcccgagtcccccgatactacgagtcaggagcctccggatacaacttcccccgagccgccggataagacctctcctgaaccggcaccacagcaagggagcacacatacacccagatcacctgggagtaccagaacaagaagaccagaaatatctcaggcgggtcccacacagggcgaagtcatccctaccgggagctcgaaacctgcgggagatcagttgcctgccgccctgtggacctcaagcgccgtgctgggcttgctgttattggcactgcctacctaccacctgtggaaacgctgcaggcacctggcagaggatgatacacacccacctgccagcctgcgactcctcccgcaagtgagcgcctgggccggtctgcggggaaccggccaagtggggatcagcccatcttag

SEQ ID NO: 233966 - DNA, 1197 bp, Artificial Sequence
  derived and/or modified sequence
atggactttggcctggcattgctattggctggcctcttgggcctgctcctcggccagagcctgcaggtgaaaccattgcaagtcgaaccgcccgagcccgtggtcgccgtcgccctgggcgcgagccggcaactgacatgccgcctggcatgcgccgatcgaggcgcttctgtgcagtggcgtggtttggacacatctctgggtgctgtgcagagcgatactggcaggagtgtactgactgtgcgtaatgccagcctgagcgccgcggggacccgggtgtgcgtaggaagctgtggcggcagaactttccagcacacagtgcagctcttagtgtacgcctttcccgaccaattgaccgtttcaccagccgctctcgtgcctggcgatcccgaggtggcgtgtactgctcacaaagttacccctgtggacccaaacgccctgagcttttctctgcttgtgggggggcaggagctagaaggggcacaggcgttagggccagaggtgcaggaggaggaggaggagcctcaaggggacgaggatgtgttgttccgcgtcaccgagcggtggcgacttcccccgctggggacacctgtcccacctgccctgtattgccaagccaccatgcgactcccggggcttgaactgtcgcaccgacaggcaatccccgcccttcatggatggctctcacccccccctccacagaataccgggccccacggccctcaccccacaagccccgaacctcctgataccacgtcccctgagagcccagacaccacctctcctgagtctcctgacacaaccagtcaggagccccctgacaccacttcgcccgagcctccagacaaaacttcccctgagcccgcacctcagcaggggtctactcatacgccccggagccctggatccacgcgtacacgaaggccagagatctctcaggcgggacccacccagggcgaggtaatccccactggtagtagtaaacctgccggagatcagcttccagccgcactctggactagttctgccgtgctagggttactgctcttggccctgcccacctatcacttgtggaaacgctgtcgccatctggctgaagacgacacacatccccctgcctctctgcgcctgttaccacaggtctccgcatgggcgggcttacgcggaacggggcaggtcggtattagtccatcctag

SEQ ID NO: 233967 - DNA, 888 bp, Artificial Sequence
  derived and/or modified sequence
atggactttggcctggccctgctgctggccggcctgctgggcctgctgctgggccagagcctgcaggtgaagcccctgcaggtggagcccccagagcctgtggtggccgtggccctgggcgccagccggcagctgacctgccgcctggcctgtgccgacagaggagcctctgtgcagtggaggggcctggacaccagcctgggcgctgtgcagagcgacaccggccgctctgtgctgactgtgagaaatgccagcctgtctgctgctggcaccagggtgtgtgtgggcagctgtggcggccgcaccttccagcacacagtgcagctgctggtgtatgccttcccagaccagctgactgtgtccccagctgccctggtgcctggggaccctgaggtggcctgcacagcccacaaggtgacccctgtggaccccaatgccctgtccttcagcctgctggtgggcggccaggagctggagggcgcccaggccctgggccctgaggtgcaggaggaggaggaggagccccagggagatgaagatgtgctcttccgggtgacagagcgctggaggctgccccccctgggcacccctgtgcccccagccctgtactgccaggccaccatgaggctgcccggcctggagctgagccaccggcaggccatcccagccagcaagccagctggggaccagctgcctgctgccctgtggaccagcagcgctgtgctgggcctgctgctgctggccctgcccacctaccacctgtggaagcgctgccgccacctggctgaagatgacacccaccccccagccagcctgcggctgctgccccaggtgtctgcctgggccggcctgcggggcaccggccaggtgggcatcagccccagctag

SEQ ID NO: 233968 - DNA, 603 bp, Artificial Sequence
  derived and/or modified sequence
atggactttggcctggccctgctgctggccggcctgctgggcctgctgctggccttcccagaccagctgactgtgtccccagctgccctggtgcctggggaccctgaggtggcctgcacagcccacaaggtgacccctgtggaccccaatgccctgtccttcagcctgctggtgggcggccaggagctggagggcgcccaggccctgggccctgaggtgcaggaggaggaggaggagccccagggagatgaagatgtgctcttccgggtgacagagcgctggaggctgccccccctgggcacccctgtgcccccagccctgtactgccaggccaccatgaggctgcccggcctggagctgagccaccggcaggccatcccagccagcaagccagctggggaccagctgcctgctgccctgtggaccagcagcgctgtgctgggcctgctgctgctggccctgcccacctaccacctgtggaagcgctgccgccacctggccgaggatgacacccaccccccagccagcctgcggctgctgccccaggtgtctgcctgggccggcctgcggggcaccggccaggtgggcatcagccccagctag

SEQ ID NO: 233969 - DNA, 1221 bp, Artificial Sequence
  derived and/or modified sequence
atggactttggcctggccctgctgctggccggcctgctgggcctgctgctgggccagagcctgcaggtgaagcccctgcaggtggagcccccagagcctgtggtggccgtggccctgggcgccagccggcagctgacctgccgcctggcctgtgccgacagaggagcctctgtgcagtggaggggcctggacaccagcctgggcgctgtgcagagcgacaccggccgctctgtgctgactgtgagaaatgccagcctgtctgctgctggcaccagggtgtgtgtgggcagctgtggcggccgcaccttccagcacacagtgcagctgctggtgtatgccttcccagaccagctgactgtgtccccagctgccctggtgcctggggaccctgaggtggcctgcacagcccacaaggtgacccctgtggaccccaatgccctgtccttcagcctgctggtgggcggccaggagctggagggcgcccaggccctgggccctgaggtgcaggaggaggaggaggagccccagggagatgaagatgtgctcttccgggtgacagagcgctggaggctgccccccctgggcacccctgtgcccccagccctgtactgccaggccaccatgaggctgcccggcctggagctgagccaccggcaggccatcccagccctgcacgccctgagcaaccctgaggccccagctgctgagagcccccaggcccccagcctgagcaccccagccagcagccaccccaccagccctgagcccccagacaccaccagccctgagagcccagacaccaccagccctgagagcccagacaccaccagccaggagcccccagacaccaccagccctgagcccccagacaagaccagccctgagcccgccccccagcagggcagcacccacacccccaggagccctggcagcaccaggaccaggaggcctgagatcagccaggccggccccacccagggcgaggtgatccccaccggcagcagcaagccagctggggaccagctgcctgctgccctgtggaccagcagcgctgtgctgggcctgctgctgctggccctgcccacctaccacctgtggaagcgctgccgccacctggccgaggatgacacccaccccccagccagcctgcggctgctgccccaggtgtctgcctgggccggcctgcggggcaccggccaggtgggcatcagccccagctag

SEQ ID NO: 233970 - DNA, 1197 bp, Artificial Sequence
  derived and/or modified sequence
atggactttggcctggccctgctgctggccggcctgctgggcctgctgctgggccagagcctgcaggtgaagcccctgcaggtggagcccccagagcctgtggtggccgtggccctgggcgccagccggcagctgacctgccgcctggcctgtgccgacagaggagcctctgtgcagtggaggggcctggacaccagcctgggcgctgtgcagagcgacaccggccgctctgtgctgactgtgagaaatgccagcctgtctgctgctggcaccagggtgtgtgtgggcagctgtggcggccgcaccttccagcacacagtgcagctgctggtgtatgccttcccagaccagctgactgtgtccccagctgccctggtgcctggggaccctgaggtggcctgcacagcccacaaggtgacccctgtggaccccaatgccctgtccttcagcctgctggtgggcggccaggagctggagggcgcccaggccctgggccctgaggtgcaggaggaggaggaggagccccagggagatgaagatgtgctcttccgggtgacagagcgctggaggctgccccccctgggcacccctgtgcccccagccctgtactgccaggccaccatgaggctgcccggcctggagctgagccaccggcaggccatcccagccctgcacggctggctgagccccccaccaccccagaacacaggcccccacggcccccaccccaccagccctgagcccccagacaccaccagccctgagagcccagacaccaccagccctgagagcccagacaccaccagccaggagcccccagacaccaccagccctgagcccccagacaagaccagccctgagcccgccccccagcagggcagcacccacacccccaggagccctggcagcaccaggaccaggaggcctgagatcagccaggccggccccacccagggcgaggtgatccccaccggcagcagcaagccagctggggaccagctgcctgctgccctgtggaccagcagcgctgtgctgggcctgctgctgctggccctgcccacctaccacctgtggaagcgctgccgccacctggccgaggatgacacccaccccccagccagcctgcggctgctgccccaggtgtctgcctgggccggcctgcggggcaccggccaggtgggcatcagccccagctag

SEQ ID NO: 233971 - DNA, 1273 bp, Artificial Sequence
  derived and/or modified sequence
gggactgagcatggatttcggactggccctcctgctggcggggcttctggggctcctcctcggccagtccctccaggtgaagcccctgcaggtggagcccccggagccggtggtggccgtggccttgggcgcctcgcgccagctcacctgccgcctggcctgcgcggaccgcggggcctcggtgcagtggcggggcctggacaccagcctgggcgcggtgcagtcggacacgggccgcagcgtcctcaccgtgcgcaacgcctcgctgtcggcggccgggacccgcgtgtgcgtgggctcctgcgggggccgcaccttccagcacaccgtgcagctccttgtgtacgccttcccggaccagctgaccgtctccccagcagccctggtgcctggtgacccggaggtggcctgtacggcccacaaagtcacgcccgtggaccccaacgcgctctccttctccctgctcgtcgggggccaggaactggagggggcgcaagccctgggcccggaggtgcaggaggaggaggaggagccccagggggacgaggacgtgctgttcagggtgacagagcgctggcggctgccgcccctggggacccctgtcccgcccgccctctactgccaggccacgatgaggctgcctggcttggagctcagccaccgccaggccatccccgcgtccaaacctgcgggtgaccagctgcccgcggctctgtggaccagcagtgcggtgctgggactgctgctcctggccttgcccacctatcacctctggaaacgctgccggcacctggctgaggacgacacccacccaccagcttctctgaggcttctgccccaggtgtcggcctgggctgggttaagggggaccggccaggtcgggatcagcccctcctgagtggccagcctttccccctgtgaaagcaaaatagcttggaccccttcaagttgagaactggtcagggcaaacctgcctcccattctactcaaagtcatccctctgttcacagagatggatgcatgttctgattgcctctttggagaagctcatcagaaactcaaaagaaggccactgtttgtctcacctacccatgacctgaagcccctccctgagtggtccccacctttctggacggaaccacgtactttttacatacattgattcatgtctcacgtctccctaaaaatgcgtaagaccaagctgtgccctgaccaccctgggcccctgtcgtcaggacctcctgaggctttggcaaataaacctcctaaaatg

SEQ ID NO: 233972 - DNA, 603 bp, Artificial Sequence
  derived and/or modified sequence
atggatttcggactggccctcctgctggcggggcttctggggctcctcctcgccttcccggaccagctgaccgtctccccagcagccctggtgcctggtgacccggaggtggcctgtacggcccacaaagtcacgcccgtggaccccaacgcgctctccttctccctgctcgtcgggggccaggaactggagggggcgcaagccctgggcccggaggtgcaggaggaggaggaggagccccagggggacgaggacgtgctgttcagggtgacagagcgctggcggctgccgcccctggggacccctgtcccgcccgccctctactgccaggccacgatgaggctgcctggcttggagctcagccaccgccaggccatccccgcgtccaaacctgcgggtgaccagctgcccgcggctctgtggaccagcagtgcggtgctgggactgctgctcctggccttgcccacctatcacctctggaaacgctgccggcacctggctgaggacgacacccacccaccagcttctctgaggcttctgccccaggtgtcggcctgggctgggttaagggggaccggccaggtcgggatcagcccctcctga

SEQ ID NO: 233973 - DNA, 1509 bp, Artificial Sequence
  derived and/or modified sequence
ctatttaagcggcttccccgcggcctcgggacagaggggactgagcatggatttcggactggccctcctgctggcggggcttctggggctcctcctcggccagtccctccaggtgaagcccctgcaggtggagcccccggagccggtggtggccgtggccttgggcgcctcgcgccagctcacctgccgcctggcctgcgcggaccgcggggcctcggtgcagtggcggggcctggacaccagcctgggcgcggtgcagtcggacacgggccgcagcgtcctcaccgtgcgcaacgcctcgctgtcggcggccgggacccgcgtgtgcgtgggctcctgcgggggccgcaccttccagcacaccgtgcagctccttgtgtacgccttcccggaccagctgaccgtctccccagcagccctggtgcctggtgacccggaggtggcctgtacggcccacaaagtcacgcccgtggaccccaacgcgctctccttctccctgctcgtcgggggccaggaactggagggggcgcaagccctgggcccggaggtgcaggaggaggaggaggagccccagggggacgaggacgtgctgttcagggtgacagagcgctggcggctgccgcccctggggacccctgtcccgcccgccctctactgccaggccacgatgaggctgcctggcttggagctcagccaccgccaggccatccccgcccttcacgctctgtccaatcccgaagcccctgcggcagaaagcccccaagcaccttctctctccacgccagcctcctcccacccgacctccccggagcctcccgacaccacctccccggagtctcccgacaccacctccccggagtctcccgacaccacctcccaggagcctcccgacaccacctccccggagcctcccgacaagacctccccggagcccgccccccagcagggctccacacacacccccaggagcccaggctccaccaggactcgccgccctgagatctcccaggctgggcccacgcagggagaagtgatcccaacaggctcgtccaaacctgcgggtgaccagctgcccgcggctctgtggaccagcagtgcggtgctgggactgctgctcctggccttgcccacctatcacctctggaaacgctgccggcacctggctgaggacgacacccacccaccagcttctctgaggcttctgccccaggtgtcggcctgggctgggttaagggggaccggccaggtcgggatcagcccctcctgagtggccagcctttccccctgtgaaagcaaaatagcttggaccccttcaagttgagaactggtcagggcaaacctgcctcccattctactcaaagtcatccctctgttcacagagatggatgcatgttctgattgcctctttggagaagctcatcagaaactcaaaagaaggccactgtttgtctcacctacccatgacctgaagcccctccctgagtggtccccacctttctggacggaacc

SEQ ID NO: 233974 - DNA, 1485 bp, Artificial Sequence
  derived and/or modified sequence
ctatttaagcggcttccccgcggcctcgggacagaggggactgagcatggatttcggactggccctcctgctggcggggcttctggggctcctcctcggccagtccctccaggtgaagcccctgcaggtggagcccccggagccggtggtggccgtggccttgggcgcctcgcgccagctcacctgccgcctggcctgcgcggaccgcggggcctcggtgcagtggcggggcctggacaccagcctgggcgcggtgcagtcggacacgggccgcagcgtcctcaccgtgcgcaacgcctcgctgtcggcggccgggacccgcgtgtgcgtgggctcctgcgggggccgcaccttccagcacaccgtgcagctccttgtgtacgccttcccggaccagctgaccgtctccccagcagccctggtgcctggtgacccggaggtggcctgtacggcccacaaagtcacgcccgtggaccccaacgcgctctccttctccctgctcgtcgggggccaggaactggagggggcgcaagccctgggcccggaggtgcaggaggaggaggaggagccccagggggacgaggacgtgctgttcagggtgacagagcgctggcggctgccgcccctggggacccctgtcccgcccgccctctactgccaggccacgatgaggctgcctggcttggagctcagccaccgccaggccatccccgcgctccatggctggctctctcctcctccccctcagaacacgggccctcacgggcctcacccgacctccccggagcctcccgacaccacctccccggagtctcccgacaccacctccccggagtctcccgacaccacctcccaggagcctcccgacaccacctccccggagcctcccgacaagacctccccggagcccgccccccagcagggctccacacacacccccaggagcccaggctccaccaggactcgccgccctgagatctcccaggctgggcccacgcagggagaagtgatcccaacaggctcgtccaaacctgcgggtgaccagctgcccgcggctctgtggaccagcagtgcggtgctgggactgctgctcctggccttgcccacctatcacctctggaaacgctgccggcacctggctgaggacgacacccacccaccagcttctctgaggcttctgccccaggtgtcggcctgggctgggttaagggggaccggccaggtcgggatcagcccctcctgagtggccagcctttccccctgtgaaagcaaaatagcttggaccccttcaagttgagaactggtcagggcaaacctgcctcccattctactcaaagtcatccctctgttcacagagatggatgcatgttctgattgcctctttggagaagctcatcagaaactcaaaagaaggccactgtttgtctcacctacccatgacctgaagcccctccctgagtggtccccacctttctggacggaacc

SEQ ID NO: 233975 - DNA, 888 bp, Artificial Sequence
  derived and/or modified sequence
atggacttcggcctggccctgctgctggccggcctgctgggcctgctcttaggccagtctttacaagtgaaacccttacaggtagaacctccagagccagtggtggcggtggccctgggagcctctcgccagctgacatgcaggctggcttgtgctgatcgaggagcttccgtccagtggcgcggccttgacacttccttaggtgccgttcagtcggatacaggtcgctctgtgttgacagtaaggaatgcttctctgtctgccgccggcacacgcgtatgcgtgggttcttgtggcgggaggaccttccagcataccgtacagctgcttgtgtacgcgtttcccgatcagctgacagtgtctcctgccgcccttgtgccaggcgatcccgaagtggcgtgtactgctcataaggtgacacctgtggatcctaatgccttgagcttctcattgctggtgggcggacaggaattggaaggggcacaggccctgggccccgaggttcaggaggaggaagaggaaccacagggggacgaagacgtcctttttcgagtcactgaaaggtggcgccttccccctttgggaacacctgttcctcccgcgctgtattgccaggcaacaatgcgccttccaggcctggagctgagccaccgccaggccatcccggcctccaagccggccggggaccagctccccgctgcactgtggacgtcaagcgccgtgctgggcctgctgctcctggccctgccaacgtaccacctctggaagcgctgtcgtcaccttgcggaggacgacacccacccacctgctagcctgcgcttattaccccaagtgtctgcgtgggcggggctgcggggcactgggcaggttggcatctcgcctagttag

SEQ ID NO: 233976 - DNA, 603 bp, Artificial Sequence
  derived and/or modified sequence
atggacttcggcctggccctgctgctggccggcctgctgggcctgctgctcgcctttcctgaccaactgaccgtctctcccgctgcgcttgttcctggtgacccagaagtggcgtgtaccgctcacaaggtcactcccgtagacccaaatgccctgtctttctcccttctggtgggaggacaggagctggaaggggcacaagcccttggcccagaggtccaggaagaggaagaagagccccaaggagacgaagatgtgcttttcagagtgaccgagcgatggcgcttgccaccgctgggaactcccgttcctcccgctctgtactgccaggccactatgcggcttcccgggctggaactctctcaccgtcaagctatcccagccagcaagcctgccggcgaccaactgccagctgctctgtggacaagtagtgcggttctaggtctcctgttgctggccctcccgacctatcacctgtggaagcggtgcaggcatctggcggaggatgatacccatccccctgcttcattacgtttgcttccccaggtgtccgcctgggcagggctccgcggcactggccaagtagggattagtccttcttag

SEQ ID NO: 233977 - DNA, 1221 bp, Artificial Sequence
  derived and/or modified sequence
atggacttcggcctggccctgctgctggccggcctgctgggcctgttgttgggccagagtctgcaggtgaagcccctccaggtggagcccccggaaccagtggtggccgtcgcccttggtgcttctcgccagctgacctgtaggctggcctgcgctgaccgcggtgcttcggtccagtggcgcggactagatacaagtcttggcgctgtgcagtctgacacgggcagatcagtcctgaccgtgaggaacgcatctctgagtgccgccggtaccagggtctgcgtggggtcatgtggcggaagaacatttcagcataccgtccagctgctcgtgtatgcattccctgatcagttgacggtcagccccgctgctctggtgcccggtgatccagaagtcgcctgtacagcccacaaggttacacccgttgaccccaatgcactgagtttctcactgctggtgggtggccaggagttggaaggagcacaggcccttggccctgaggtgcaggaggaggaggaagaaccccagggcgacgaagatgtgctgttccgcgtcaccgaacgatggcgcctgccgcccctcgggaccccggtgcccccagccctctattgccaagctacgatgcgtctccctggcctggaactgtcccatcgacaggccatccctgcactacatgcattatccaaccctgaggcccccgcagcagagagcccgcaggctccatctctgagtactccagcgagctctcacccgactagccctgagccgcccgatacaacctctccggaatcccccgatactacaagccccgagagcccagacaccacaagtcaagagccaccagatacgacgtcgccagagccccccgacaaaacctctcccgagcccgccccacagcagggctctacacatacccccagaagccccggctccacgaggacgcgccgacccgagatctcacaagccggcccaacccagggcgaggttatccccaccggttcttctaagcccgcgggagaccaactgcccgccgcactgtggacatcctccgccgtgctcggactactcctgttagctctccccacctatcacctttggaagcgatgtaggcacctggctgaggatgacacccacccccccgcatccctgaggctgctgcctcaggtgagcgcctgggctggtctgcgtgggaccgggcaggtcggtatttctccgtcatag

SEQ ID NO: 233978 - DNA, 1197 bp, Artificial Sequence
  derived and/or modified sequence
atggacttcggcctggccctgctgctggccggcctgctgggcctgctcctcggtcagtcattgcaggtgaaaccactgcaagtcgaacccccagagccagtggtggctgtggcattgggggcctcgagacagctgacatgccgcctggcgtgcgccgatcgtggggcttctgttcagtggaggggtcttgatacctctctgggcgcggtgcagtctgatactggacggagcgtgttgactgtaagaaatgcaagtctctcggctgccgggaccagggtatgcgttggtagctgtggcggacgtacctttcagcatacggttcagctgctcgtgtacgcatttcccgaccaattgactgtgagcccggccgcccttgtacctggagatccggaggtggcctgcacagcacataaagtgacgccagtcgaccccaatgcactgagcttttcactcctagtcggggggcaggagttagagggcgcccaagcactgggtcccgaagtccaggaggaggaagaagagcctcaaggtgacgaggatgtcctgttccgggtgaccgaaagatggcgccttcccccactggggactcctgtcccccccgccctttactgccaggcaaccatgagacttcctggtcttgagctctcccatcgtcaagcaatacctgcgctgcacgggtggctgtcccccccaccaccacaaaatacaggacctcatgggccccatcctacctctccagaacccccagatactacgtcgccggaaagccctgacaccaccagtccagagagcccagatactacatcgcaggagcctcccgatacaacttcccctgagcctcccgacaagactagccccgagcctgcgcctcaacagggctccactcacaccccccgcagccctgggtcgacccggacacggaggccagagatctcccaggccggacccactcagggagaggttatcccgaccgggtccagcaagccagccggggaccagctgccagctgccctgtggacttcctctgccgtactgggtttgctgttactagctcttccaacgtaccatctctggaaacgatgccggcacttagctgaagatgatactcatcctccggcctctttgaggctcctcccccaggtgtcagcatgggcaggcctgagggggaccggacaagtgggtattagtccgagttag

SEQ ID NO: 233979 - DNA, 888 bp, Artificial Sequence
  derived and/or modified sequence
atggattttgggcttgccctgcttctggcaggcttgctcggcctcctactggggcagtcactgcaggtgaagccactccaagttgaaccacccgagcctgtggtcgctgtggcacttggcgcaagtaggcagctgacgtgcaggctggcttgcgccgatagaggggcatctgttcagtggcgcggactggacactagcctgggggcagtgcagtcagacacaggcaggagcgtccttacagtacgcaatgccagcctgagcgccgctgggactcgagtgtgcgtgggatcttgtggtggcagaacttttcagcataccgtacaactcctagtatatgccttcccggaccaactaacggtgagtcctgcagccctcgtgccaggtgaccctgaagtagcctgcaccgcacacaaagttaccccagttgacccaaatgccttatcattttccctgctggtaggcggacaggagctagaaggcgctcaggcgctgggtcccgaagtgcaggaagaggaagaagaacctcagggggatgaggatgtactgtttcgagtgactgagcggtggaggttgcctcctctgggcaccccagtgcctcccgcactttactgccaggctaccatgcgcctacctggactggagctctctcacaggcaggctattcctgccagcaagccggcaggcgatcaactgccagctgcgctttggacatcctccgcagtactggggttgctcttgttggccctgcccacctatcacctatggaagcgctgcaggcatctcgccgaagacgacacccacccaccagcctccctccggctactgccccaggtctcagcatgggcaggcctgcgtggcacaggtcaggtggggatctcacctagctag

SEQ ID NO: 233980 - DNA, 603 bp, Artificial Sequence
  derived and/or modified sequence
atggactttggactcgccctgctgctcgccggtctgttgggccttctcctcgccttcccagaccagctgacagtctccccagctgctttagtgccaggcgatcccgaagtcgcatgtactgcgcataaggtaacaccagttgaccctaatgcgttgtccttcagcctgctcgtcggaggacaggagttagagggcgcacaggccctaggacccgaggtccaggaagaggaagaggagccccagggggatgaggacgtgctattccgcgttactgagcgctggcggttaccaccactgggcacacccgtgcctcccgctctgtactgccaggcaaccatgaggcttcctggcttagagctatcccaccgccaggcgatacctgcctcaaagcctgccggtgaccagctcccagctgctctgtggacttcctctgcagtgctcggactgctcctgctcgctctccctacttaccatctgtggaagcgctgtcgtcatctcgcagaagatgacactcaccctcctgcgtcgctgaggctactgccccaggtaagcgcttgggccggactccgtggaacaggacaggtcggcatttcaccttcatag

SEQ ID NO: 233981 - DNA, 1221 bp, Artificial Sequence
  derived and/or modified sequence
atggacttcggactggctctcctgctcgcgggattgctcggcttactactaggtcagagtctgcaggtgaagcccttacaggtggaaccgccagagccggtcgtggccgtcgccctgggtgcctcacggcaattgacctgccgcctcgcgtgtgccgatcgaggggcttcagttcaatggagaggcctcgacaccagcctcggagccgtccagtcggacactggccgttccgtgctcaccgtcagaaatgccagtctctccgccgcaggtactcgagtgtgcgtcgggtcatgtggtggtcgtacattccagcatactgtgcaactgctagtgtacgcatttcccgaccagctgacagtatctcctgccgctcttgtcccaggggatcctgaggttgcctgcacagcccacaaagtgacacctgtcgaccccaatgctctgtcattctctctcctcgtcggagggcaggagctggaaggcgctcaagctctgggtcccgaagtgcaagaagaagaggaggaaccacagggagacgaggatgttctttttagagtgaccgaaaggtggaggctgccccctctaggaacgcctgtgccgccagctttgtattgccaagccacaatgcgcctgcctggtttggagctgagtcatcggcaggcaattcctgctttacacgccctgtctaatcctgaagcacccgcagctgagtcccctcaggccccatctttgtcaactccagcctcctcccaccccacaagtcctgagccgcctgatacaacgtcaccagagtctcccgacactacctctcccgaaagccccgacaccactagccaggagccccctgacacaacaagccctgagcctccggataaaaccagccccgaacctgccccacagcaaggtagcacacacacccccaggtcccctggatctactcggacacgccgtccagagatctcccaagccggaccaacacagggggaagtcatccccaccggttctagtaagcctgcaggcgaccagcttccagccgcactgtggacctcgtccgcagtactgggtctgctattgctggcccttccaacttaccatctgtggaagcggtgtaggcaccttgccgaggacgacacacacccccctgccagccttcgtctactccctcaggtctccgcctgggccggtctgcgagggactggacaggttggcatcagccctagctag

SEQ ID NO: 233982 - DNA, 1197 bp, Artificial Sequence
  derived and/or modified sequence
atggactttggactggcgctgctgctggccggactcctgggactccttctgggccaatcacttcaagtcaaacccctgcaggtcgagcctcctgaacccgtggttgcagtcgccctgggagctagccgtcagctgacctgtagactggcgtgcgcagaccgcggtgccagtgtgcaatggaggggtttagacacatctctgggtgcagttcagtctgatacaggacgcagtgtgctgacggtcaggaacgctagcctcagtgcagccggtactcgggtgtgcgtcgggtcttgcggcggaaggacattccagcacaccgtacaactcctggtctacgccttccccgaccaactgaccgtctccccagcagcccttgtgcccggtgatcccgaggtggcctgcacggcacacaaagtgacccctgtggatccaaacgcactatctttcagcctattggtgggcggacaggaactcgaaggagcgcaagcactgggtcccgaggtacaggaggaagaagaggagcctcagggcgatgaagacgtcctatttagggtgacagagcggtggcgcctgcccccacttgggactcccgttccccctgcactgtattgtcaggccactatgcgtcttccaggattggagctgagtcatagacaggccattccagccctccacggttggctgagcccaccaccgcctcaaaataccgggccacatggaccgcacccaacctctcctgaacccccagataccacttcccccgagagccctgatactacaagccccgagtctccggataccacgagtcaggaaccgccagatactacctcaccggagccaccggataagacgtctcctgagcccgctccccaacaaggctcgacacatacaccccgtagtccaggatcaactcgcacaaggaggccagaaatcagccaggcgggtccaacccagggcgaagtaatccctacaggctcctccaaacctgccggagaccaactcccagcagccctctggactagcagcgccgtccttggattattactgctggctctcccgacttatcatctctggaagaggtgtcgccacttagcggaggatgacacccatccccctgcaagcctgcgccttctaccacaggtgagtgcgtgggcgggattgcgcggaactggtcaagtaggaatcagcccatcttag

SEQ ID NO: 233983 - protein, 475 aa, Artificial Sequence
  derived and/or modified sequence
MAASALRGLPVAGGGESSESEDDGWEIGYLDRTSQKLKRLLPIEEKKEKFKKAMTIGDVSLVQELLDSGISVDSNFQYGWTPLMYAASVANAELVRVLLDRGANASFEKDKQSILITACSAHGSEEQILKCVELLLSRNADPNVACRRLMTPIMYAARDGHTQVVALLVAHGAEVNTQDENGYTALTWAARQGHKNIVLKLLELGANKMLQTKDGKMPSEIAKRNKHHEIFNLLSFTLNPLEGKLQQLTKEDTICKILTTDSDREKDHIFSSYTAFGDLEVFLHGLGLEHMTDLLKERDITLRHLLTMREDEFTKNGITSKDQQKILAALKELQVEEIQFGELSEETKLEISGDEFLNFLLKLNKQCGHLITAVQNVITELPVNSQKITLEWASPQNFTSVCEELVNNVEDLSEKVCKLKDLIQKLQNERENDPTHIQLREEVSTWNSRILKRTAITICGFGFLLFICKLTFQRK

SEQ ID NO: 233984 - DNA, 1428 bp, Artificial Sequence
  derived and/or modified sequence
atggctgctagtgccttgaggggactacctgtggcaggcggtggcgagtcatcagaatccgaagacgatggctgggaaatcggctatctagatcggacatcgcagaaactgaagcgcctgctaccgatcgaagagaagaaggagaaattcaagaaagctatgacaattggcgacgtgagtctcgtccaggaattactggattcaggcataagtgtggacagtaattttcagtacgggtggacacctctgatgtacgccgcctccgttgcgaatgccgagctggttcgcgttttactggataggggggctaacgccagcttcgagaaagacaagcagtccatcctgatcacggcgtgctctgctcacggctcagaagagcagattctcaagtgtgtcgagctgctgctgtctcggaatgctgacccgaacgttgcatgccggcgcctgatgacccccattatgtatgcagcccgcgatggccatacccaggtagttgccctgctagtcgcacatggggcggaggtgaatacacaagatgagaacggatataccgcactcacttgggctgcacgacagggccacaagaacattgtgctaaagctgctcgaactgggggccaataagatgttacagaccaaggatgggaaaatgccatctgagattgccaaacggaataaacatcatgaaatctttaacctgctgtcattcactctcaaccctctagagggtaaactgcagcaactcacgaaagaagacaccatctgcaaaatcttgacgactgattcagaccgcgaaaaggatcatatcttttctagctacaccgcattcggagacctggaggtcttcctgcacggcttagggctcgaacacatgaccgacctgcttaaggagagggatatcacactgcgacacctcctgactatgcgcgaggacgagtttacaaagaacggcatcacgtccaaggatcaacagaagatcctcgccgccttaaaggagctgcaggtggaggaaatccagttcggggagctctcggaagagaccaagctggagatttcaggcgacgaattcctcaacttcctgttaaagctgaataaacagtgtggtcatctgatcacagcggtccagaatgttatcacagagctgcccgtgaatagccaaaagatcaccctggagtgggcgtcaccacagaatttcacctctgtgtgtgaggagctggtgaacaatgtcgaagatctctctgagaaggtgtgtaaactcaaggatttgatccagaagctgcagaatgagagggaaaacgacccaactcatatccagctgcgcgaagaagtctccacctggaatagccgcatactcaagagaacagccattaccatttgtggctttggctttctcttgttcatctgcaagttgacctttcagagaaagtag

SEQ ID NO: 233985 - DNA, 1428 bp, Artificial Sequence
  derived and/or modified sequence
atggccgccagcgccctgcggggcctgcctgtggccggcggcggggagagcagcgagagtgaagatgatggctgggagatcggctacctggacaggaccagccagaagctgaagaggctgctgcccatcgaggagaagaaggagaagttcaagaaggccatgaccatcggagatgtgtccctggtgcaggagctgctggacagcggcatctctgtggacagcaacttccagtatggctggacccccctgatgtatgctgcctctgtggccaatgctgagctggtgcgggtgctgctggacagaggagccaatgccagctttgagaaggacaagcagagcatcctgatcacagcctgcagcgcccacggcagcgaggagcagatcctgaagtgtgtggagctgctgctgagcagaaatgctgaccccaacgtggcctgccggcggctgatgacccccatcatgtatgctgccagagatggccacacccaggtggtggccctgctggtggcccatggagctgaggtgaacacccaggatgaaaatggctacacagccctgacctgggccgcccggcagggccacaagaacatcgtgctgaagctgctggagctgggcgccaacaagatgctgcagaccaaggatggcaagatgcccagcgagatcgccaagaggaacaagcaccacgagatcttcaacctgctgtccttcaccctgaaccccctggagggcaagctgcagcagctgaccaaggaggacaccatctgcaagatcctgaccacagacagcgaccgggagaaggaccacatcttcagcagctacacagccttcggggacctggaggtgttcctgcacggcctgggcctggagcacatgacagacctgctgaaggagcgggacatcaccctgcggcacctgctgaccatgagagaagatgagttcaccaagaatggcatcaccagcaaggaccagcagaagatcctggccgccctgaaggagctgcaggtggaggagatccagtttggagagctgtctgaggagaccaagctggagatctctggagatgagttcctgaacttcctgctgaagctgaacaagcagtgtggccacctgatcacagctgtgcagaatgtcatcacagagctgcctgtgaacagccagaagatcaccctggagtgggccagcccccagaacttcacctctgtgtgtgaggagctggtgaacaacgtggaggacctgtctgagaaggtgtgcaagctgaaggacctgatccagaagctgcagaatgaaagagaaaatgaccccacccacatccagctgcgggaggaggtgtccacctggaacagccgcatcctgaagaggacagccatcaccatctgtggcttcggcttcctgctcttcatctgcaagctgaccttccagaggaagtag

SEQ ID NO: 233986 - DNA, 1428 bp, Artificial Sequence
  derived and/or modified sequence
atggccgccagcgccctgcggggcctgcccgtggccggcggcggcgagtcatcagaatccgaggatgacggttgggaaatcggctatctggaccgcacttctcagaaactgaagcggcttcttccaatagaagagaaaaaggaaaaattcaagaaagcaatgaccatcggtgatgttagcttggttcaagagctactggatagtggcatcagcgtagattcaaatttccagtacggctggaccccacttatgtacgccgccagcgtggccaacgccgagctcgtccgagtgttactcgatcgtggggctaacgcatcgttcgagaaggacaagcagtccatccttatcacagcttgttcggctcacgggtccgaggaacagattttaaaatgtgttgagcttctgctcagtcgcaacgccgaccccaatgtcgcctgcaggagacttatgacaccgattatgtatgcggctagggatggacacacgcaggtggtcgctctcttggtggcgcatggggcggaggtgaacacccaggatgaaaacgggtacaccgcactgacctgggccgcacggcagggtcacaagaatattgtactgaagttgttggaactgggcgccaacaaaatgttgcaaaccaaagatggcaagatgccgtctgaaattgcaaaacgaaacaagcatcacgaaatttttaacctgctaagcttcactttaaacccactggaagggaagttacaacagttaaccaaagaggatactatatgcaagattctaaccaccgactcagacagagagaaggatcatatcttttcctcttacactgcgtttggcgaccttgaagtgtttctccatggcttaggcctggagcatatgacagatttgctaaaggagagggatatcacacttaggcatctactgactatgcgtgaagacgaatttacgaaaaatggcatcacatcaaaggaccagcagaaaatcctagcagccctgaaggagctacaagttgaagagattcaattcggtgagctgtcggaagagaccaaacttgagatttcaggcgatgagtttctcaacttcctgcttaaactaaacaagcagtgtggacatttgatcacagctgtgcagaatgttataacggaactccccgtgaatagtcagaaaatcaccctagagtgggcaagcccccagaactttaccagcgtctgcgaggaactggttaacaacgtggaggacctgtccgaaaaggtatgtaaactgaaagatttgatccaaaaactccaaaatgagcgagaaaatgaccctactcacattcagctcagggaagaagtgagcacttggaatagtcggattcttaaacgaacggccatcaccatctgtgggtttggttttctgttatttatatgtaaactgactttccaacgcaaatag

SEQ ID NO: 233987 - DNA, 1865 bp, Artificial Sequence
  derived and/or modified sequence
ggtgcgcatgcgcccggagagctgaagggcgcgcggtgccgacagggagcttccttggctggcatggcggcgagcgcgctgcgaggcctgccagtggctggcggaggcgagagtagcgagagcgaggatgatggctgggagattgggtatctcgaccggacgtctcagaaattgaaaaggctattacccattgaagaaaagaaagaaaaatttaagaaagcaatgaccatcggagatgtttcattggtccaggagctcctagattctggcattagtgtagattccaactttcagtatggatggactccccttatgtatgctgctagtgttgccaatgcagagctggttcgggtccttttggacagaggtgctaatgcaagctttgagaaggataagcaaagtattttgataactgcatgttctgctcatggctcagaggaacagatcttgaagtgtgtagaactactactttcaagaaatgctgatccaaatgttgcttgtaggagacttatgaccccaatcatgtatgctgctcgagatggtcacacccaggttgttgctctccttgttgctcatggagcagaagttaatacccaggatgagaatggttacactgctttaacgtgggcagcacgtcagggtcataaaaatatagttttgaagttgcttgaacttggagctaataaaatgctacaaaccaaagatggaaagatgccaagtgagattgcaaaaagaaacaaacatcatgagatcttcaacttactttcttttactttaaatccattggaaggaaaacttcaacagctaactaaagaagacactatttgtaaaatattgacaacagattctgatagagaaaaagatcacatttttagttcatatacagcatttggagatctggaagtatttttacatggtcttggacttgaacatatgacagatttactaaaggaaagggatataacgttaagacatcttttgaccatgagggaagatgaatttacaaagaatggaattaccagtaaagaccagcagaaaattctggctgctcttaaagaactacaggtagaagagatacaatttggagagctatctgaagagacaaagttggaaatcagtggtgatgagttcctcaactttcttctcaaattaaataaacagtgtggccatttaataacagctgtacagaatgttattactgagttacctgtaaattctcaaaagataacactggaatgggcttctccccagaattttacttcagtttgtgaagaattggttaataatgttgaagatttgagtgaaaaggtctgcaaactaaaagacctaattcaaaagttgcaaaatgaacgggaaaatgatccaactcatatacaattaagggaagaagtatctacatggaatagtagaattttgaagaggacagctattaccatatgcggattcggttttcttcttttcatttgcaagctaactttccagaggaaataatccaaatatttgttttaagttatatatacacatcttattgaaccatccaaaaatcattgcttttaactgtttgcagcacaatataactttacattctttgccaatattccataggaaaaattttgacaatgtggagtttttttttaaaaagtggtttgttactttgacttataaatacaatttgttatgtttatgttaattgtgattaggtagtaaagtataagtaattttttggtttgatcgtatctaaatcacattcaaaattaaagttatatctaatatctttgacattttttaaagtgtgttcatttgtcagtgaatcgtacaggatttgtaaagtgttcataaattgagctttcttttgtttctttttt

SEQ ID NO: 233988 - DNA, 1428 bp, Artificial Sequence
  derived and/or modified sequence
atggctgcttccgcccttcgaggtcttccagtggcgggaggaggagagtctagcgagtcagaagatgatggatgggagatcggatacttggacaggacatctcagaaacttaagcggttgctgccaattgaagaaaagaaggagaagttcaaaaaagccatgaccatcggcgacgtctctctagtgcaggagctgctggattcggggatcagcgtggatagcaactttcagtacggttggactcctctgatgtatgcagcaagtgtggctaatgcagagctcgtgagggtccttctggaccgaggcgctaacgcctcatttgaaaaagacaaacagtcgattctgattactgcatgttcagcgcatggctccgaggaacagattttgaagtgtgtggaacttcttctttctaggaacgctgacccaaatgtggcctgccggaggcttatgactccaatcatgtatgcagcccgagacggccatacacaggttgtcgccctgctggtggctcatggtgctgaggtgaacacccaggatgagaacgggtacacggccctgacttgggcagcgaggcagggtcacaaaaatattgttttaaaactcctggagttgggagctaataagatgctgcagactaaagatggaaagatgccgtctgagatagccaaaaggaacaaacaccacgagatatttaacttgctgtccttcacgctcaatccattggagggcaagctgcagcaactgacaaaagaagatacgatctgcaaaatccttacaacggacagcgacagggagaaggatcacattttttctagttatactgcattcggggatctggaagtcttcttgcacggcctggggctggagcatatgacagatctcctcaaggagcgagatatcaccctccgccatctgctgactatgcgcgaggacgaattcactaagaacggcatcacgtctaaggaccagcagaaaatccttgcagctctgaaggagctgcaagtggaggaaatacagttcggcgagctgtcggaagagaccaaactggaaatctctggcgatgagttcctgaactttctgcttaagctcaacaaacagtgcggtcacctgataacagcggttcagaacgtaatcactgagctcccggtgaactcccagaagatcactctggaatgggcttctccgcagaatttcacctctgtgtgcgaggaactcgtgaacaacgtcgaagacctgagcgagaaggtgtgcaagctgaaggaccttattcaaaaactgcaaaatgagcgggagaacgaccccacccatatccaattgcgggaggaagtgagcacttggaactcccgcatcctgaagcgcactgctatcactatttgtggattcggatttttgctcttcatatgcaagttgactttccaacgtaagtag

SEQ ID NO: 233989 - DNA, 1428 bp, Artificial Sequence
  derived and/or modified sequence
atggccgccagcgccctgagaggcctgcccgtggccggcggcggcgagagcagcgagagcgaggacgacggctgggagatcggctacctggacagaaccagccagaagctgaagagactgctgcccatcgaggagaagaaggagaagttcaagaaggccatgaccatcggcgacgtgagcctggtgcaggagctgctggacagcggcatcagcgtggacagcaacttccagtacggctggacccccctgatgtacgccgccagcgtggccaacgccgagctggtgagagtgctgctggacagaggcgccaacgccagcttcgagaaggacaagcagagcatcctgatcaccgcctgcagcgcccacggcagcgaggagcagatcctgaagtgcgtggagctgctgctgagcagaaacgccgaccccaacgtggcctgcagaagactgatgacccccatcatgtacgccgccagagacggccacacccaggtggtggccctgctggtggcccacggcgccgaggtgaacacccaggacgagaacggctacaccgccctgacctgggccgccagacagggccacaagaacatcgtgctgaagctgctggagctgggcgccaacaagatgctgcagaccaaggacggcaagatgcccagcgagatcgccaagagaaacaagcaccacgagatcttcaacctgctgagcttcaccctgaaccccctggagggcaagctgcagcagctgaccaaggaggacaccatctgcaagatcctgaccaccgacagcgacagagagaaggaccacatcttcagcagctacaccgccttcggcgacctggaggtgttcctgcacggcctgggcctggagcacatgaccgacctgctgaaggagagagacatcaccctgagacacctgctgaccatgagagaggacgagttcaccaagaacggcatcaccagcaaggaccagcagaagatcctggccgccctgaaggagctgcaggtggaggagatccagttcggcgagctgagcgaggagaccaagctggagatcagcggcgacgagttcctgaacttcctgctgaagctgaacaagcagtgcggccacctgatcaccgccgtgcagaacgtgatcaccgagctgcccgtgaacagccagaagatcaccctggagtgggccagcccccagaacttcaccagcgtgtgcgaggagctggtgaacaacgtggaggacctgagcgagaaggtgtgcaagctgaaggacctgatccagaagctgcagaacgagagagagaacgaccccacccacatccagctgagagaggaggtgagcacctggaacagcagaatcctgaagagaaccgccatcaccatctgcggcttcggcttcctgctgttcatctgcaagctgaccttccagagaaagtag

SEQ ID NO: 233990 - DNA, 390 bp, Artificial Sequence
  derived and/or modified sequence
atgcccatggcttctcctcagacccttgttctgtacctgcttgtgctggctgtcaccgaggcctggggtcaggaggctgtgatcccgggttgtcacctacatccctttaatgtcacggttaggagcgaccgacaggggacctgccaggggtcacacgtagctcaggcttgcgttggtcactgtgagagcagtgccttcccttccagatacagcgtcctagtggcctcaggctaccgacacaacatcacctccgtgtcccagtgctgcactatctctggcctcaagaaggtgaaggtgcaattgcagtgcgtggggtccagaagggaagaactggaaattttcacagccagggcctgtcagtgcgacatgtgcaggctctctcgctactag

SEQ ID NO: 233991 - DNA, 390 bp, Artificial Sequence
  derived and/or modified sequence
atgcccatggcctcacctcagacactcgtgctctatttgctggtcctggctgtgaccgaggcctggggccaggaggctgtcatccccggatgccacctccatccttttaatgtcaccgtgagatcggatagacaggggacttgccagggctcccacgttgctcaggcttgtgttggacattgcgaatcgagtgcttttccatctcgctattcggtgctggtggctagcggctaccgacataatatcacttcagtgagccagtgctgcactatttccggcttaaagaaagtgaaggtgcagttgcaatgcgtcgggagtcggcgagaagagctggagatattcaccgcacgggcttgtcaatgcgacatgtgcaggctttctcgctactag

SEQ ID NO: 233992 - DNA, 390 bp, Artificial Sequence
  derived and/or modified sequence
atgccgatggcctcgccacaaacactggtcttatatctgctcgtgttagctgtcacagaggcttggggccaggaagcagtgatccctggctgccacctacatcccttcaatgttacggtccggtccgaccgccagggtacatgccaaggatcccacgtggcacaagcttgtgtcggacattgtgaaagtagcgctttcccttcaagatattctgtactcgtggctagcggctacaggcacaacatcaccagtgtgtcccaatgctgtacaatctccgggctgaaaaaggtcaaggtccagctccagtgtgtggggagccgacgagaagagctcgaaatattcaccgcccgagcctgtcagtgcgatatgtgtcgccttagccggtactag

SEQ ID NO: 233993 - DNA, 390 bp, Artificial Sequence
  derived and/or modified sequence
atgcctatggcttctccccagaccctagttctttacctgctcgtactggccgtcacagaagcctgggggcaagaagctgtaatccctgggtgtcatctgcatccgtttaacgtaacagtgagatcggatcgacaagggacctgtcagggctctcacgtggctcaagcctgtgtcggtcattgtgagtcctctgctttcccttcgcggtacagtgtcctcgtggcctcagggtatagacacaacatcacctcagttagccagtgttgcaccataagtggcttaaagaaagttaaggtacagctgcaatgtgttggaagtcggcgtgaagagctcgaaatttttacagcccgggcttgccagtgcgatatgtgtcgcttatcccgctactag

SEQ ID NO: 233994 - DNA, 390 bp, Artificial Sequence
  derived and/or modified sequence
atgccaatggcatcaccccagacgcttgtcctatatctcctagtcctggccgtgacagaggcatggggccaggaagcggtgatccccggttgccacctccatccgttcaatgtaaccgtaagaagcgatagacagggcacctgtcaaggttcacatgtagcgcaggcctgtgttggacactgtgaatcctccgcgtttccatccagatactccgtgctcgttgcttctggataccggcacaatatcacttccgtgtcacaatgttgtactatttctggcttaaagaaggtaaaagtccagctgcagtgcgtggggagtagacgagaagagctggagatctttacagccagggcctgtcagtgcgacatgtgcagattgtcaagatactag

SEQ ID NO: 233995 - DNA, 390 bp, Artificial Sequence
  derived and/or modified sequence
atgcctatggcttctccccagaccctagttctttacctgctcgtactggccgtcacagaagcctgggggcaagaagctgtaatccctgggtgtcatctgcatccgtttaacgtaacagtgagatcggatcgacaagggacctgtcagggctctcacgtggctcaagcctgtgtcggtcattgtgagtcctctgctttcccttcgcggtacagtgtcctcgtggcctcagggtatagacacaacatcacctcagttagccagtgttgcaccataagtggcttaaagaaagttaaggtacagctgcagtgtgtcgggagtcggagagaagagttagagatattcacagccagagcatgccagtgtgatatgtgtagactgagtaggtattag

SEQ ID NO: 233996 - DNA, 582 bp, Artificial Sequence
  derived and/or modified sequence
atttaaagaactcgccatcccacctgcacacccacgtagagacatctccccactgtgtttcagatgcctatggcgtcccctcaaaccctggtcctctatctgctggtcctggcagtcactgaagcctggggccaggaggcagtcatcccaggctgccacttgcaccccttcaatgtgacagtgcgaagtgaccgccaaggcacctgccagggctcccacgtggcacaggcctgtgtgggccactgtgagtccagcgccttcccttctcggtactctgtgctggtggccagtggttaccgacacaacatcacctccgtctctcagtgctgcaccatcagtggcctgaagaaggtcaaagtacagctgcagtgtgtggggagccggagggaggagctcgagatcttcacggccagggcctgccagtgtgacatgtgtcgcctctctcgctactagcccatcctctcccctccttcctcccctgggtcacagggcttgacgttctggtgggggaaacctgtgttcaagattcaaaaactggaaggagctccagccctgatggttacttgctatggaattttttta

SEQ ID NO: 233997 - DNA, 390 bp, Artificial Sequence
  derived and/or modified sequence
atgcccatggccagcccccagaccctggtgctgtacctgctggtgctggccgtgaccgaggcctggggccaggaggccgtgatccccggctgccacctgcaccccttcaacgtgaccgtgagaagcgacagacagggcacctgccagggcagccacgtggcccaggcctgcgtgggccactgcgagagcagcgccttccccagcagatacagcgtgctggtggccagcggctacagacacaacatcaccagcgtgagccagtgctgcaccatcagcggcctgaagaaggtgaaggtgcagctgcagtgcgtgggcagcagaagagaggagctggagatcttcaccgccagagcctgccagtgcgacatgtgcagactgagcagatactag

SEQ ID NO: 233998 - DNA, 390 bp, Artificial Sequence
  derived and/or modified sequence
atgcccatggccagcccacagactctggtcctgtatttactggtgctggccgtgaccgaagcatggggccaggaggcagtgatacctggctgtcacctccacccctttaacgtgacagtccggtctgacagacagggcacctgccagggtagccacgtggctcaagcctgtgtgggccactgcgagtcgtctgcctttccatctaggtactctgttctagtggcaagcggctataggcacaatattaccagtgtcagtcagtgttgtacaatctcgggccttaagaaagtcaaggtgcagctgcaatgtgtggggagtaggagggaggaactcgaaatcttcacggcccgagcgtgtcaatgtgacatgtgccgtttatctaggtactag

SEQ ID NO: 233999 - DNA, 390 bp, Artificial Sequence
  derived and/or modified sequence
atgccaatggcttcaccccagactcttgtcctgtacttgctcgttctagcggtcacagaggcatggggccaagaggcagtcatacctgggtgtcatttacatccgttcaacgtgacggtgcgctctgacagacagggaacgtgtcagggttcgcacgttgcccaggcctgcgtaggtcactgtgagtcatccgcatttccgtcacggtactcagtactggtggcgagtggatataggcataatatcacctctgtctctcagtgctgtaccatcagcggcctgaagaaagtcaaagtccagctacagtgtgttggctctcggcgggaagagctagagatttttacagcccgggcatgtcagtgcgacatgtgcaggcttagtaggtattag

SEQ ID NO: 234000 - DNA, 390 bp, Artificial Sequence
  derived and/or modified sequence
atgcccatggccagcccccagaccctggtgctgtacctgctggtgctggccgtgacagaggcctggggccaggaggccgtcatccctggctgccacctgcaccccttcaacgtgacagtgcggagtgaccggcagggcacctgccagggcagccacgtggcccaggcctgtgtgggccactgtgagagcagcgccttccccagccgctacagcgtgctggtggccagcggctaccgccacaacatcacctctgtgtcccagtgctgcaccatcagcggcctgaagaaggtgaaggtgcagctgcagtgtgtgggcagcagaagagaggagctggagatcttcaccgcccgggcctgccagtgtgacatgtgccgcctgagccgctactag

SEQ ID NO: 234001 - DNA, 390 bp, Artificial Sequence
  derived and/or modified sequence
atgcccatggccagcccccagaccctggtgctgtacctgctggtgctggccgtgactgaggcgtggggtcaagaagctgtgatccctggctgtcatctgcacccatttaatgttaccgtcagatctgacagacagggtacatgccaggggtcccatgttgcgcaggcttgtgtgggtcattgcgaatcctccgcctttccatcgcggtactctgtcctggtcgcatccggatacaggcacaacattacctccgttagccaatgctgtaccattagcggattgaagaaggtgaaggtgcaactgcagtgtgtgggcagtaggagagaggagctggaaattttcactgcacgcgcatgtcaatgcgacatgtgtcgcctgtctcggtattag

SEQ ID NO: 234002 - DNA, 390 bp, Artificial Sequence
  derived and/or modified sequence
atgcccatggccagcccccagaccctggtgctgtacctgctggtgttagccgttaccgaagcatgggggcaagaggccgtgattcccgggtgtcaccttcatcctttcaatgtcactgtaaggagtgaccgtcagggcacctgtcagggaagtcacgtggcccaggcctgtgttgggcattgcgagagtagtgcctttcccagccgttactctgtgctggtggccagtgggtacaggcacaatataaccagcgtgtcgcagtgctgcactatctctgggttaaagaaagtgaaggtgcagcttcagtgcgttggctctcgaagagaagaactcgagattttcacagcccgcgcatgtcaatgcgatatgtgccgcctctcgaggtactag

SEQ ID NO: 234003 - RNA, 390 nt, Artificial Sequence
  derived and/or modified sequence
augccgauggccucgccacaaacacuggucuuauaucugcucguguuagcugucacagaggcuuggggccaggaagcagugaucccuggcugccaccuacaucccuucaauguuacgguccgguccgaccgccaggguacaugccaaggaucccacguggcacaagcuugugucggacauugugaaaguagcgcuuucccuucaagauauucuguacucguggcuagcggcuacaggcacaacaucaccagugugucccaaugcuguacaaucuccgggcugaaaaaggucaagguccagcuccaguguguggggagccgacgagaagagcucgaaauauucaccgcccgagccugucagugcgauaugugucgccuuagccgguacuag

SEQ ID NO: 234004 - RNA, 390 nt, Artificial Sequence
  derived and/or modified sequence
augccuauggcuucuccccagacccuaguucuuuaccugcucguacuggccgucacagaagccugggggcaagaagcuguaaucccugggugucaucugcauccguuuaacguaacagugagaucggaucgacaagggaccugucagggcucucacguggcucaagccugugucggucauugugaguccucugcuuucccuucgcgguacaguguccucguggccucaggguauagacacaacaucaccucaguuagccaguguugcaccauaaguggcuuaaagaaaguuaagguacagcugcaauguguuggaagucggcgugaagagcucgaaauuuuuacagcccgggcuugccagugcgauaugugucgcuuaucccgcuacuag

SEQ ID NO: 234005 - RNA, 390 nt, Artificial Sequence
  derived and/or modified sequence
augccaauggcaucaccccagacgcuuguccuauaucuccuaguccuggccgugacagaggcauggggccaggaagcggugauccccgguugccaccuccauccguucaauguaaccguaagaagcgauagacagggcaccugucaagguucacauguagcgcaggccuguguuggacacugugaauccuccgcguuuccauccagauacuccgugcucguugcuucuggauaccggcacaauaucacuuccgugucacaauguuguacuauuucuggcuuaaagaagguaaaaguccagcugcagugcguggggaguagacgagaagagcuggagaucuuuacagccagggccugucagugcgacaugugcagauugucaagauacuag

SEQ ID NO: 234006 - RNA, 390 nt, Artificial Sequence
  derived and/or modified sequence
augccuauggcuucuccccagacccuaguucuuuaccugcucguacuggccgucacagaagccugggggcaagaagcuguaaucccugggugucaucugcauccguuuaacguaacagugagaucggaucgacaagggaccugucagggcucucacguggcucaagccugugucggucauugugaguccucugcuuucccuucgcgguacaguguccucguggccucaggguauagacacaacaucaccucaguuagccaguguugcaccauaaguggcuuaaagaaaguuaagguacagcugcagugugucgggagucggagagaagaguuagagauauucacagccagagcaugccagugugauauguguagacugaguagguauuag

SEQ ID NO: 234007 - protein, 447 aa, Artificial Sequence
  derived and/or modified sequence
MEGGWPARQSALLCLTVSLLLQGRGDAFTINCSGFDQHGVDPAVFQAVFDRKAFRPFTNYSIPTRVNISFTLSAILGVDAQLQLLTSFLWMDLVWDNPFINWNPKECVGINKLTVLAENLWLPDIFIVESMDVDQTPSGLTAYISSEGRIKYDKPMRVTSICNLDIFYFPFDQQNCTFTFSSFLYTVDSMLLGMDKEVWEITDTSRKVIQTQGEWELLGINKATPKMSMGNNLYDQIMFYVAIRRRPSLYIINLLVPSSFLVAIDALSFYLPAESENRAPFKITLLLGYNVFLLMMNDLLPASGTPLISVYFALCLSLMVVSLLETVFITYLLHVATTQPPPMPRWLHSLLLHCTSPGRCCPTAPQKGNKGLGLTLTHLPGPKEPGELAGKKLGPRETEPDGGSGWTKTQLMELWVQFSHAMDTLLFRLYLLFMASSILTVIVLWNT

SEQ ID NO: 234008 - DNA, 1344 bp, Artificial Sequence
  derived and/or modified sequence
atggaaggtggatggccggccaggcaaagtgctcttctgtgcctgaccgtgtcgctactattgcagggacgcggcgacgcttttactatcaactgttctggatttgatcagcacggcgtcgatcccgcagtctttcaagcagtattcgaccgtaaagcattcaggcccttcacgaattactctattcctacccgtgttaatatcagcttcaccttgtccgctattctgggcgtggacgctcagctccagctcctcacatccttcctctggatggatctggtgtgggataatccctttattaactggaatcctaaagagtgtgtcggcattaacaagctgacggtgcttgcagagaacctgtggctccctgacatcttcatcgtggagtccatggacgttgatcaaactcccagcgggcttactgcgtacatctccagtgagggcaggatcaagtacgataaacctatgcgtgtgacctcaatttgtaatttagacatattctacttcccctttgaccaacagaattgcacatttactttttcctcatttctgtacaccgttgattcaatgcttctaggaatggacaaggaggtctgggaaatcactgacacctcccgtaaggttatccaaacacagggtgaatgggagctgcttgggattaataaggccacacccaaaatgtccatggggaacaatttatacgatcagatcatgttttatgtcgccattaggcgacgtccatccctgtacattatcaatctgctcgtcccttcttcatttctagtggccatagatgccctgagcttctatttgcctgctgagtctgaaaatagagccccctttaaaatcactctccttctcggctacaatgtttttctcctcatgatgaacgatctcttgcctgcctccgggactcccctcatctcagtgtacttcgctttatgcctgagtttaatggttgtgagcctgctggagactgtcttcatcacctacctcctgcatgtggccacaacacagccgccgcccatgcctcgttggctgcacagtctgctgctccactgcacttcgcctggccgctgttgtccaacagcgcctcaaaaaggtaacaagggactcgggctgaccctgacccacttacctggtcctaaggagcctggtgaactcgctggcaagaagctgggcccacgcgagaccgaacctgacggtggcagcggatggacaaagactcagctgatggagctgtgggtacagttctcccatgccatggacacactattatttcggctttatctactctttatggcctcatccatccttacggtgatcgtactctggaatacgtag

SEQ ID NO: 234009 - DNA, 1344 bp, Artificial Sequence
  derived and/or modified sequence
atggagggcggctggccagcccggcagagcgccctgctgtgcctgactgtgtccctgctgctgcagggcagaggagatgccttcaccatcaactgcagcggctttgaccagcacggcgtggaccctgctgtgttccaggccgtgtttgacaggaaggccttccggcccttcaccaactacagcatccccaccagggtgaacatctccttcaccctgagcgccatcctgggcgtggatgcccagctgcagctgctgaccagcttcctgtggatggacctggtgtgggacaaccccttcatcaactggaaccccaaggaatgtgtgggcatcaacaagctgactgtgctggccgagaacctgtggctgcctgacatcttcatcgtggagagcatggatgtggaccagacccccagcggcctgacagcctacatcagcagcgagggccgcatcaagtatgacaagcccatgagggtgaccagcatctgcaacctggacatcttctacttcccctttgaccagcagaactgcaccttcaccttcagcagcttcctgtacacagtggacagcatgctgctgggcatggacaaggaggtgtgggagatcacagacaccagcaggaaggtgatccagacccagggcgagtgggagctgctgggcatcaacaaggccacccccaagatgtccatgggcaacaacctgtatgaccagatcatgttctacgtggccatcagaagaagacccagcctgtacatcatcaacctgctggtgcccagcagcttcctggtggccattgatgccctgtccttctacctgcctgctgagagcgagaacagagcccccttcaagatcaccctgctgctgggctacaacgtgttcctgctgatgatgaatgacctgctgcctgccagcggcacccccctcatctctgtgtactttgccctgtgcctgagcctgatggtggtgtccctgctggagaccgtcttcatcacctacctgctgcacgtggccaccacccagcccccacccatgccccgctggctgcacagcctgctgctgcactgcaccagccctggccgctgctgccccacagccccccagaagggcaacaagggcctgggcctgaccctgacccacctgcccggccccaaggagcctggagagctggccggcaagaagctgggcccccgggagacagagccagatggcggcagcggctggaccaagacccagctgatggagctgtgggtgcagttcagccacgccatggacaccctgctcttccggctgtacctgctcttcatggccagcagcatcctgaccgtcatcgtgctgtggaacacctag

SEQ ID NO: 234010 - DNA, 1344 bp, Artificial Sequence
  derived and/or modified sequence
atggagggcggctggcccgcccggcagagcgccctgctgtgcctgaccgtgtctctccttttgcagggtcgcggcgatgcattcaccatcaactgcagtgggtttgaccaacacggcgttgaccccgccgttttccaagccgtcttcgaccggaaagcttttcgccccttcaccaactattctatccctacaagagtcaatatttccttcaccctcagcgcaatcctcggcgtggacgcgcagcttcagctgctgacctctttcttgtggatggacctcgtgtgggacaatccatttataaactggaaccctaaggagtgtgtagggatcaacaagcttactgtcctcgccgagaacctttggctgcctgatatattcatcgtagagagcatggacgtggatcagaccccatcagggctgactgcatacatttccagcgagggccgaatcaagtacgataagccaatgagggtgaccagcatctgcaatctggacatcttctattttccttttgatcaacagaactgtacttttaccttctcctcattcttgtacaccgtagactccatgctgctgggtatggataaagaggtgtgggagattacagacacaagcagaaaagtgatacaaactcagggagaatgggagctgctgggaattaataaggctaccccgaaaatgagcatgggaaacaacctgtatgaccagattatgttctacgtggcgatcaggcggcgtccttctctctatattattaacctccttgtgccatcatcctttctcgtcgccatcgacgccttatcgttttacttacccgcggagtctgaaaatcgcgcacctttcaaaataacactgctgctaggatacaatgtgttcctgcttatgatgaacgacctcttgcccgcctctggtactccccttattagcgtctactttgccttatgcttgtccctgatggtggtgtctcttctggagacagtctttattacttacctcctgcacgtggctactacacagccacctccaatgccaaggtggcttcactccttactgctgcattgtacctccccggggcggtgttgtccaacggccccccaaaaaggtaataaaggcttgggcctcaccctcacccacttacccgggcctaaagagcccggagagttagcgggaaaaaagctggggcccagggagacggaacctgatggagggtccggatggacaaaaacacagctgatggagctatgggtgcagtttagtcatgctatggatacgctcctttttcgactgtacttactgtttatggctagctccatcctgaccgtgattgttctgtggaacacttag

SEQ ID NO: 234011 - DNA, 1344 bp, Artificial Sequence
  derived and/or modified sequence
atggaggggggttggcccgctcggcaatccgccctgctgtgcttgaccgtcagccttctcttgcaggggcgaggggacgctttcacgattaattgctcaggcttcgaccaacatggagtcgatcctgctgtctttcaggctgtatttgacagaaaggcttttcggcctttcacaaattactccattccgacccgggtgaacatttcatttacactatcggcaatactgggagtggacgcacaactacagctcttaaccagcttcttatggatggatctggtgtgggacaaccctttcatcaattggaacccaaaagaatgcgtgggcatcaataaactcacagtgctagccgagaatctctggctgccagatatcttcattgtggagagcatggatgtggatcagaccccctcagggctgacagcctatatttcttcggaaggaagaatcaagtatgacaagccaatgcgagttacatcaatctgcaacttagacatcttttattttccctttgaccagcagaattgtaccttcaccttcagcagcttcctctacactgtggactccatgctgttggggatggacaaggaggtgtgggaaattaccgacacttctcgcaaagtgattcagactcagggcgagtgggagttgttaggcattaacaaggcaactcccaaaatgtcaatgggaaacaatctgtatgatcagattatgttctacgtggcgatccggagacgtccatctttgtatataattaatctgcttgttccatcctcatttttggtggctatcgacgccctatctttttatctgcccgctgagtccgaaaatcgggctccgttcaaaatcacgctgttgctgggctacaatgtgtttctcctgatgatgaatgatttgctccccgcttccggaacacccctaattagcgtgtattttgcactctgtttgtcattgatggtggtttcactgttagagactgtgtttataacttacctgctgcacgtcgccaccacccagccaccccctatgccaaggtggttgcacagcttgctgctccattgtacctccccgggtaggtgttgtccaactgctcctcagaaggggaataaagggctgggtctaacgctgactcaccttccaggcccaaaggaacctggagaacttgctggcaagaaacttgggcctagggaaactgagcccgacggagggagcggctggaccaaaacccagctcatggagttatgggtgcagttctcccacgccatggacacgctgctgttccggctttatctcttgtttatggcctccagcatcctgactgtcatcgttctgtggaacacgtag

SEQ ID NO: 234012 - DNA, 1697 bp, Artificial Sequence
  derived and/or modified sequence
tggtgaatccccagagaagagtccagaaagaagaatggaaggagggtggcctgcaaggcagagtgccctcctctgcctcactgtcagtcttctgcttcaaggaagaggcgacgcttttaccatcaattgctcaggctttgaccagcatggggttgaccctgctgtcttccaagcagtgtttgacagaaaggccttccgtccattcaccaactacagcatccctacccgtgtcaacatctccttcaccctgtctgccatcctgggagtggatgcacagctccagctgctgacatcattcctgtggatggatttggtatgggacaatcctttcattaattggaacccaaaagagtgtgttggcatcaataaactcacagtattagctgaaaacctgtggctcccagacatcttcatcgtggaatccatggatgtggatcagacgccttccggtctcactgcctatatcagcagtgaaggtcgaattaagtatgataagccaatgagggtgaccagcatctgtaacctggacatcttctacttcccttttgaccaacagaactgtaccttcaccttcagttctttcctctacacagtggacagcatgctgctgggcatggacaaggaggtgtgggagatcacagacacgtctcgcaaagtcatccaaacccagggggagtgggagctcttgggcatcaacaaggccaccccaaagatgtccatgggcaacaacctatatgaccagatcatgttttatgtggccatcaggcgcaggccaagcctctacatcataaacctgctggtgcccagtagctttctggttgccattgatgccctcagcttctacctgccagcagagagcgagaatcgtgccccattcaagataacacttctgctgggctacaacgtcttcctgctcatgatgaatgacttgctccctgccagtggcacccccctcatcagtgtctacttcgccctgtgcctgtccctgatggtggtcagcctgctggagaccgtcttcattacctacctgctgcacgtggccaccacccagcccccacccatgcctaggtggcttcactccctgctgctccactgcaccagcccagggagatgctgtcccactgcgccccagaagggaaataagggcctgggtctcaccctcacccacctgcctggcccaaaggagccgggggagttagcagggaagaagctgggacccagagagaccgagccagatgggggctcaggatggacaaagacccagctaatggagctgtgggtgcagttcagccacgcgatggacaccctgctcttccgcctctacctgctcttcatggcctcctccatccttactgtcattgtcctctggaacacctaggcagacatcccccctctctggcaaacaacagcttggagtttctgctggtcttgggccagccggactcattttcctaatcttagccacttatccccagtgactaccatgtccccttctaaattccaaagactccaacgcagcactagcaagcaggttcgggacagccctggacgatttcccgaccgctgctcaggctgctcattcctgctcaccctcagtctccctgagctaccacctaactcctcactccctgatcaatggaagtccaggtcagtggagtctctccttgattgatcaccccaataaacaactttccagg

SEQ ID NO: 234013 - DNA, 1344 bp, Artificial Sequence
  derived and/or modified sequence
atggagggcggctggcccgccagacagagcgccctgctgtgcctgaccgtgagcctgctgctgcagggcagaggcgacgccttcaccatcaactgcagcggcttcgaccagcacggcgtggaccccgccgtgttccaggccgtgttcgacagaaaggccttcagacccttcaccaactacagcatccccaccagagtgaacatcagcttcaccctgagcgccatcctgggcgtggacgcccagctgcagctgctgaccagcttcctgtggatggacctggtgtgggacaaccccttcatcaactggaaccccaaggagtgcgtgggcatcaacaagctgaccgtgctggccgagaacctgtggctgcccgacatcttcatcgtggagagcatggacgtggaccagacccccagcggcctgaccgcctacatcagcagcgagggcagaatcaagtacgacaagcccatgagagtgaccagcatctgcaacctggacatcttctacttccccttcgaccagcagaactgcaccttcaccttcagcagcttcctgtacaccgtggacagcatgctgctgggcatggacaaggaggtgtgggagatcaccgacaccagcagaaaggtgatccagacccagggcgagtgggagctgctgggcatcaacaaggccacccccaagatgagcatgggcaacaacctgtacgaccagatcatgttctacgtggccatcagaagaagacccagcctgtacatcatcaacctgctggtgcccagcagcttcctggtggccatcgacgccctgagcttctacctgcccgccgagagcgagaacagagcccccttcaagatcaccctgctgctgggctacaacgtgttcctgctgatgatgaacgacctgctgcccgccagcggcacccccctgatcagcgtgtacttcgccctgtgcctgagcctgatggtggtgagcctgctggagaccgtgttcatcacctacctgctgcacgtggccaccacccagcccccccccatgcccagatggctgcacagcctgctgctgcactgcaccagccccggcagatgctgccccaccgccccccagaagggcaacaagggcctgggcctgaccctgacccacctgcccggccccaaggagcccggcgagctggccggcaagaagctgggccccagagagaccgagcccgacggcggcagcggctggaccaagacccagctgatggagctgtgggtgcagttcagccacgccatggacaccctgctgttcagactgtacctgctgttcatggccagcagcatcctgaccgtgatcgtgctgtggaacacctag

SEQ ID NO: 234014 - protein, 99 aa, Artificial Sequence
  derived and/or modified sequence
MPTQLEMAMDTMIRIFHRYSGKERKRFKLSKGELKLLLQRELTEFLSCQKETQLVDKIVQDLDANKDNEVDFNEFVVMVAALTVACNDYFVEQLKKKGK

SEQ ID NO: 234015 - DNA, 300 bp, Artificial Sequence
  derived and/or modified sequence
atgccaacacagttagaaatggccatggataccatgatccggattttccatagatattctggcaaagaacgcaaaagatttaagctcagcaagggcgaactcaaactgctcctccagcgagagctgacagagtttctttcctgccaaaaggagactcaactggttgataagatcgtccaagacctcgatgccaacaaagacaacgaggttgactttaatgagttcgtcgtcatggtggcagccctgacagtagcttgcaacgactatttcgtggagcagttaaaaaagaagggcaaatag

SEQ ID NO: 234016 - DNA, 300 bp, Artificial Sequence
  derived and/or modified sequence
atgcctacccaattagagatggcgatggacacaatgatcagaatctttcaccgctactcgggcaaggaaaggaagagatttaaactgagcaaaggagagcttaagctcttattgcagcgggaattgaccgagtttctttcctgccagaaggagactcagctcgtcgataaaatcgtacaggacctggacgcgaacaaagataatgaggtggatttcaacgagtttgtggttatggtggctgctttaacggttgcctgcaacgactactttgtggaacagcttaagaagaagggaaagtag

SEQ ID NO: 234017 - DNA, 300 bp, Artificial Sequence
  derived and/or modified sequence
atgcccacccagctggagatggccatggacaccatgatccgcatcttccaccgctacagcggcaaggagaggaagcgcttcaagctgagcaaaggagagctgaagctgctgctgcagcgggagctgacagagttcctgagctgccagaaggagacccagctggtggacaagatcgtgcaggacctggatgccaacaaggacaatgaggtggacttcaatgaatttgtggtgatggtggccgccctgactgtggcctgcaatgactactttgtggagcagctgaagaagaagggcaagtag

SEQ ID NO: 234018 - DNA, 300 bp, Artificial Sequence
  derived and/or modified sequence
atgcccacccagctggagatggccatggacaccatgatccggatcttccatagatattccggcaaagaacggaaacggttcaaactgtctaagggcgagttaaaactactgctgcaaagagaactcactgagttcctctcatgccagaaagagacccagctcgtggacaagatagttcaagatctggatgccaacaaagataacgaagtggatttcaacgagtttgttgtgatggtcgcagccctcacggtggcctgcaacgactacttcgtggagcagttaaaaaagaaggggaagtag

SEQ ID NO: 234019 - DNA, 300 bp, Artificial Sequence
  derived and/or modified sequence
atgcccacccagctggagatggccatggacaccatgatccggatcttccacaggtacagtggtaaagaaaggaagagatttaagcttagtaagggcgagctgaaattgctcctgcaaagagaattaaccgagtttctgagctgtcagaaggaaacacagctggtggataaaatcgtgcaggacctcgacgctaataaggacaatgaagtagatttcaacgagttcgtcgtgatggtagcggccctgacggtcgcctgcaatgactacttcgttgagcagctgaagaagaaaggtaagtag

SEQ ID NO: 234020 - DNA, 300 bp, Artificial Sequence
  derived and/or modified sequence
atgccgacacagctggagatggctatggacactatgatccggatctttcatcggtattccggcaaggagcggaagaggttcaagctttccaagggggagctcaagctgttgctccagcgcgagctcaccgagttcctctcctgtcagaaagagactcagcttgtggacaagatcgtgcaggacctcgatgcgaacaaggataatgaggttgacttcaatgaattcgttgtgatggtagccgcactgaccgttgcgtgcaacgattacttcgttgagcagctaaaaaagaagggaaagtag

SEQ ID NO: 234021 - DNA, 300 bp, Artificial Sequence
  derived and/or modified sequence
atgccgacacaactggaaatggctatggatactatgattcgaattttccataggtatagtggtaaggagcggaagagatttaagctgagcaaaggagaactgaaactcttgctgcagagagagctgaccgagttcttgtcatgccagaaggagactcaactggtcgataagattgtgcaggatcttgatgcaaacaaagacaatgaagtcgacttcaatgaattcgtggtgatggtggccgctctgacagtagcttgtaacgactattttgtagaacagctcaagaaaaaaggaaagtag

SEQ ID NO: 234022 - DNA, 1468 bp, Artificial Sequence
  derived and/or modified sequence
cagaaattcagacaagagcattctccttatctcatctgcacaggaagcaggtctaagtgtaatttcacaagcccctgactctgtgtagacacccagctctccagaaaaatgctttgaagacaaaggatacagcatacagtcccgtgtctcggctgagtcatcgcattccttaatagtgtcttctccccgggtttggtggcctgcttctggagtggtcagttctgctgccgacatgcccacccagctcgagatggccatggacaccatgattagaatcttccaccgctattctggcaaggaaaggaagagattcaagctcagcaagggggaactgaaactgctcctgcagcgagagctcacggaattcctctcgtgccaaaaggaaacccagttggttgataagatagtgcaggacctggatgccaataaggacaacgaagtggattttaatgaattcgtggtcatggtggcagctctgacagttgcttgtaatgattactttgtagaacaattgaagaagaaaggaaaataaaggaagttcgtgaatgctaatcaagggctaaataaagtggaaagcagcatccttgaaaatcatcgctctcaggacggggtctgcctggaatagcactgaatgtgtttagtagtgcctttggcttgggggctttggagaaagctgcttgagcccttcccatgctcataaattaggtaaggagcagtgaggaagtgtctacagcaacctcagccaatgtgatgtgcctctacagctgtatgaagtagattctctgattttatcttgaaatccacaacttccacaaaaaagaaaaatcttttaccatttctcattaaaaaagtaatataagtttattgtagggggaaataatcaaatgtaatctcattacccagatataatcactgttaacttcttcattcgaattttccctaggtccatgtatctatatatctatggttcataaaaatgagattacaccaaaaaatatcttttgttatctatatagttccagcttaataaatatacaactgtattattatttttgtctgaatagtattttcattgatatatcacaatatatttactccaattccctattgcatatagattatttctaatttttctattaataatactaagggagcttttaagtcaatacatctgaatcttgaataaaattcttgttccttctctttggatgggtattcagactcttaattttacaaatgaagaaataaagtcccagaaggtaacagagatagaactaggcacgattttctattcttctttccttcctttctttgtgagagttaacgattatttaaaagtattcataattttctgataataaaagtaagacatggcattatgacactggatattcaaaaaccacgatgtccttttacttgaagattttaaaaggaaatgattacaataaatacccagagtcaacaatta

SEQ ID NO: 234023 - DNA, 1017 bp, Artificial Sequence
  derived and/or modified sequence
gagtctggaccacgcagactcagaacagcactactcacagcagggcctcttgctcgctctagctgctgggaggaaaacggcttgctaatctccacgcccagaaattcagacaagagcattctccttatctcatctgcacaggaagcaggtctaagtgtaatttcacaagcccctgactctgtgtagacacccagctctccagaaaaatgctttgaagacaaaggatacagcatacagtcccgtgtctcggctgagtcatcgcattccttaatagtgtcttctccccgggtttggtggcctgcttctggagtggtcagttctgctgccgacatgcccacccagctcgagatggccatggacaccatgattagaatcttccaccgctattctggcaaggaaaggaagagattcaagctcagcaagggggaactgaaactgctcctgcagcgagagctcacggaattcctctcgtgccaaaaggaaacccagttggttgataagatagtgcaggacctggatgccaataaggacaacgaagtggattttaatgaattcgtggtcatggtggcagctctgacagttgcttgtaatgattactttgtagaacaattgaagaagaaaggaaaataaaggtaagtaataagctcatctaaaggcagaaatatatccaaagttatgtacttaatgttcatttataccgttcagatctatagacccagtaatgtcatttatagctataatatccagtgcatatattaataattaattgctactattgaattatgtgccccttaaaatattgactttatgtagatattctaaatctcatatgccctacttgaaacttgcctgtattattaagaggctatatgcatctttttggtttgtcaaaacgagggcattacaaaaatttagctactttcaaatgagacttgaatttggcaaatttctaagatggacattcatatccttaaattgtattttgaacttcttaccctattaaaaaaaattaactgg

SEQ ID NO: 234024 - DNA, 300 bp, Artificial Sequence
  derived and/or modified sequence
atgcccacccagctggagatggccatggacaccatgatcagaatcttccacagatacagcggcaaggagagaaagagattcaagctgagcaagggcgagctgaagctgctgctgcagagagagctgaccgagttcctgagctgccagaaggagacccagctggtggacaagatcgtgcaggacctggacgccaacaaggacaacgaggtggacttcaacgagttcgtggtgatggtggccgccctgaccgtggcctgcaacgactacttcgtggagcagctgaagaagaagggcaagtag

SEQ ID NO: 234025 - protein, 1306 aa, Artificial Sequence
  derived and/or modified sequence
MDSLPRLTSVLTLLFSGLWHLGLTATNYNCDDPLASLLSPMAFSSSSDLTGTHSPAQLNWRVGTGGWSPADSNAQQWLQMDLGNRVEITAVATQGRYGSSDWVTSYSLMFSDTGRNWKQYKQEDSIWTFAGNMNADSVVHHKLLHSVRARFVRFVPLEWNPSGKIGMRVEVYGCSYKSDVADFDGRSSLLYRFNQKLMSTLKDVISLKFKSMQGDGVLFHGEGQRGDHITLELQKGRLALHLNLGDSKARLSSSLPSATLGSLLDDQHWHSVLIERVGKQVNFTVDKHTQHFRTKGETDALDIDYELSFGGIPVPGKPGTFLKKNFHGCIENLYYNGVNIIDLAKRRKHQIYTGNVTFSCSEPQIVPITFVNSSGSYLLLPGTPQIDGLSVSFQFRTWNKDGLLLSTELSEGSGTLLLSLEGGILRLVIQKMTERVAEILTGSNLNDGLWHSVSINARRNRITLTLDDEAAPPAPDSTWVQIYSGNSYYFGGCPDNLTDSQCLNPIKAFQGCMRLIFIDNQPKDLISVQQGSLGNFSDLHIDLCSIKDRCLPNYCEHGGSCSQSWTTFYCNCSDTSYTGATCHNSIYEQSCEVYRHQGNTAGFFYIDSDGSGPLGPLQVYCNITEDKIWTSVQHNNTELTRVRGANPEKPYAMALDYGGSMEQLEAVIDGSEHCEQEVAYHCRRSRLLNTPDGTPFTWWIGRSNERHPYWGGSPPGVQQCECGLDESCLDIQHFCNCDADKDEWTNDTGFLSFKDHLPVTQIVITDTDRSNSEAAWRIGPLRCYGDRRFWNAVSFYTEASYLHFPTFHAEFSADISFFFKTTALSGVFLENLGIKDFIRLEISSPSEITFAIDVGNGPVELVVQSPSLLNDNQWHYVRAERNLKETSLQVDNLPRSTRETSEEGHFRLQLNSQLFVGGTSSRQKGFLGCIRSLHLNGQKMDLEERAKVTSGVRPGCPGHCSSYGSICHNGGKCVEKHNGYLCDCTNSPYEGPFCKKEVSAVFEAGTSVTYMFQEPYPVTKNISLSSSAIYTDSAPSKENIALSFVTTQAPSLLLFINSSSQDFVVVLLCKNGSLQVRYHLNKEETHVFTIDADNFANRRMHHLKINREGRELTIQMDQQLRLSYNFSPEVEFRVIRSLTLGKVTENLGLDSEVAKANAMGFAGCMSSVQYNHIAPLKAALRHATVAPVTVHGTLTESSCGFMVDSDVNAVTTVHSSSDPFGKTDEREPLTNAVRSDSAVIGGVIAVVIFIIFCIIGIMTRFLYQHKQSHRTSQMKEKEYPENLDSSFRNEIDLQNTVSECKREYFI

SEQ ID NO: 234026 - DNA, 5284 bp, Artificial Sequence
  derived and/or modified sequence
gattccagctctcgcgcccgacgaggtggatttggctgtccaccgagctccggcgcctgtcgttctaattgggtttggatttgcaccgttaaggaggggggaagagaaggaagaggcgggcgaggaaggcgagtccagctagcggctgttgcggggaccgtagccccagctgcagctccgaagaatcccccgccacggtttcggtggagcgtctgggcacgggatggagtgaaagagcgagtgcctctccaagcgggggtgggagggggtcaggctgtgcagaggagagagacagcgagaagaagccgcggctggctactgcgaatttgggattcgattgggagggaccgctcactcgggggaaatggattctttaccacggctgaccagcgttttgactttgctgttctctggcttgtggcatttaggattaacagcgacaaactacaactgtgatgatccactagcatccctgctctctccaatggctttttccagttcctcagacctcactggcactcacagcccagctcaactcaactggagagttggaactggcggttggtccccagcagattccaatgctcaacagtggctccagatggacctgggaaacagagtagagattacagcagtggccacgcagggaagatacggaagctctgactgggtgacgagttacagcctgatgttcagtgacacaggacgcaactggaaacagtacaaacaagaagacagcatctggacctttgcaggaaacatgaatgctgacagcgtggtgcaccacaagctattgcactcagtgagagcccgatttgttcgctttgtgcccctggaatggaatcccagtgggaagattggcatgagagtcgaggtctacggatgttcctataaatcagatgttgctgactttgatggccgaagctcacttctgtacaggttcaatcagaagttgatgagtactctcaaagatgtgatctccctgaagttcaagagcatgcaaggagatggggtcctgttccatggagaaggtcagcgtggagaccacatcaccttggaactccagaaggggaggctcgccctacacctcaatttgggtgacagcaaagcgcggctcagcagcagcttgccctctgccaccctgggcagcctcctggatgaccagcactggcactcggtcctcattgagcgggtgggcaagcaggtgaacttcacggtggacaagcacacacagcacttccgcaccaagggcgagacggatgccttagacattgactatgagcttagttttggaggaattccagtaccaggaaaacctgggacctttttaaagaaaaacttccatggatgcatcgaaaacctttactacaatggagtaaacataattgacctggctaagagacgaaagcatcagatctatactggcaatgtcactttttcctgctccgaaccacagattgtgcccatcacatttgtcaactccagcggcagctatttgctgctgcccggcaccccccaaattgatgggctctcagtgagtttccagtttcgaacatggaacaaggatggtctgcttctgtccacagagctgtctgagggctcgggaaccctgctgctgagcctggagggtggaatcctgagactcgtgattcagaaaatgacagaacgcgtagctgaaatcctcacaggcagcaacttgaatgatggcctgtggcactcggttagcatcaacgccaggaggaaccgcatcacgctcactctggatgatgaagcagcacccccggctccagacagcacttgggtgcagatttattctggaaatagctactattttggagggtgccccgacaatctcaccgattcccaatgtttaaatcccattaaggctttccaaggctgcatgaggctcatctttattgataaccagcccaaggacctcatttcagttcagcaaggttccctggggaattttagtgatttacacattgatctgtgtagcatcaaagacaggtgtttgccaaactactgtgaacatggaggaagctgctcccagtcctggactaccttctattgtaactgcagtgacacaagttacactggtgccacctgccacaactccatctacgagcaatcctgcgaggtgtacaggcaccaggggaatacagccggcttcttctacatcgactcagatggcagcggcccactgggacctctccaggtgtactgcaatatcactgaggacaagatctggacatcagtgcagcacaacaatacagagctgacccgagtgcggggcgctaaccctgagaagccctatgccatggccttggactacgggggcagcatggaacagctggaggccgtgatcgacggctctgagcactgtgagcaggaggtggcctaccactgcaggaggtcccgcctgctcaacacgccggatggaacaccatttacctggtggattgggcggtccaatgaaaggcacccttactggggaggttcccctcctggggtccagcagtgtgagtgtggcctagacgagagctgcctggacattcagcacttttgcaattgcgacgctgacaaggatgaatggacaaatgatactggctttctttccttcaaagaccacttgcctgtcactcagatagttatcactgataccgacagatcaaactcagaagccgcttggagaattggtcccttgcgttgctatggtgaccgacgcttctggaacgccgtctcattttatacagaagcctcttacctccactttcctaccttccatgcggaattcagtgccgatatttccttcttttttaaaaccacagcattatccggagttttcctagaaaatcttggcattaaagacttcattcgactcgaaataagctctccttcagagatcacctttgccatcgatgttgggaatggtcctgtggagcttgtagtccagtctccttctcttctgaatgacaaccaatggcactatgtccgggctgagaggaacctcaaggagacctccctgcaggtggacaaccttccaaggagcaccagggagacgtcggaggagggccattttcgactgcagctgaacagccagttgtttgtagggggaacgtcatccagacagaaaggcttcctaggatgcattcgctccttacacttgaatggacagaaaatggacctggaagagagggcaaaggtcacatctggagtcaggccaggctgccccggccactgcagcagctacggcagcatctgccacaacgggggcaagtgtgtggagaagcacaatggctacctgtgtgattgcaccaattcaccttatgaagggcccttttgcaaaaaagaggtttctgctgtttttgaggctggcacgtcggttacttacatgtttcaagaaccctatcctgtgaccaagaatataagcctctcatcctcagctatttacacagattcagctccatccaaggaaaacattgcacttagctttgtgacaacccaggcacccagtcttttgctctttatcaattcttcttctcaggacttcgtggttgttctgctctgcaagaatggaagcttacaggttcgctatcacctaaacaaggaagaaacccatgtattcaccattgatgcagataactttgctaacagaaggatgcaccacttgaagattaaccgagagggaagagagcttaccattcagatggaccagcaacttcgactcagttataacttctctccggaagtagagttcagggttataaggtcactcaccttgggcaaagtcacagagaatcttggtttggattctgaagttgctaaagcaaatgccatgggttttgctggatgcatgtcttccgtccagtacaaccacatagcaccactgaaggctgccctgcgccatgccactgtcgcgcctgtgactgtccatgggaccttgacggaatccagctgtggcttcatggtggactcagatgtgaatgcagtgaccacggtgcattcttcatcagatccttttgggaagacagatgagcgggaaccactcacaaatgctgttcgaagtgattcggcagtcatcggaggggtgatagcagtggtgatattcatcatcttctgtatcatcggcatcatgacccggttcctctaccagcacaagcagtcacatcgtacgagccagatgaaggagaaggaatatccagaaaatttggacagttccttcagaaatgaaattgacttgcaaaacacagtgagcgagtgtaaacgggaatatttcatctgagaaactgcagggttcctactactcttttttcttgttgttcaattatctcctccccctcttctctcctgtcttttgatttggtcattctctttattttctgcttgccatgtcttttctggaacatacttgcatccaccacagcatcaattcccttgatccagcccaagagaccaggcagccatggccactgccttcctctctgatgaacctatcgggtgaaaacgaccactcaagagactgacttcgccattcaagacaaggaagagacacatgtgtgcactcctgcatgttcagttctgtacttccagtttctaaaatgcactgttcagttttccaaccacttggtggttcaggcttgctttgaacctgagctcttaggcacatgacggtcattcctgacatcctccccagctcaagtctattcttaccatagaacccagggcagggagagaagaacctagaggcctggtttgctttggtggcattgtaaaaagagtaagagaggtttggtttgtggtggtttgctttctttaccataagcaatcccttgccttaactcatcaccctttttcactatgacccttagaccctgagtattttcaaatatatgattgctgatagtagtgaccaaaactactttgttcctttcttaccactctctcctggggccgacacgttgggacagcacaccatagcataaagctaggggatgcatggaaatagcagcttgaaactaggaggtaacaagaaagcttctaggaagtagatgttccatatcttcaaaatgcctcctccaattttgtaagaatgctagctaggtattcctgggattattatactgagatatatatatatacacacacacacacatatgtgtatatatgtatatatatatgtgagtatatatacacacacacacacacacacacatatatatatatacacacacgcacacatatatgttgctgcagcataaagaaattgaaataaaagtttaaa

SEQ ID NO: 234027 - DNA, 3921 bp, Artificial Sequence
  derived and/or modified sequence
atggacagcctgcccagactgaccagcgtgctgaccctgctgttcagcggcctgtggcacctgggcctgaccgccaccaactacaactgcgacgaccccctggccagcctgctgagccccatggccttcagcagcagcagcgacctgaccggcacccacagccccgcccagctgaactggagagtgggcaccggcggctggagccccgccgacagcaacgcccagcagtggctgcagatggacctgggcaacagagtggagatcaccgccgtggccacccagggcagatacggcagcagcgactgggtgaccagctacagcctgatgttcagcgacaccggcagaaactggaagcagtacaagcaggaggacagcatctggaccttcgccggcaacatgaacgccgacagcgtggtgcaccacaagctgctgcacagcgtgagagccagattcgtgagattcgtgcccctggagtggaaccccagcggcaagatcggcatgagagtggaggtgtacggctgcagctacaagagcgacgtggccgacttcgacggcagaagcagcctgctgtacagattcaaccagaagctgatgagcaccctgaaggacgtgatcagcctgaagttcaagagcatgcagggcgacggcgtgctgttccacggcgagggccagagaggcgaccacatcaccctggagctgcagaagggcagactggccctgcacctgaacctgggcgacagcaaggccagactgagcagcagcctgcccagcgccaccctgggcagcctgctggacgaccagcactggcacagcgtgctgatcgagagagtgggcaagcaggtgaacttcaccgtggacaagcacacccagcacttcagaaccaagggcgagaccgacgccctggacatcgactacgagctgagcttcggcggcatccccgtgcccggcaagcccggcaccttcctgaagaagaacttccacggctgcatcgagaacctgtactacaacggcgtgaacatcatcgacctggccaagagaagaaagcaccagatctacaccggcaacgtgaccttcagctgcagcgagccccagatcgtgcccatcaccttcgtgaacagcagcggcagctacctgctgctgcccggcaccccccagatcgacggcctgagcgtgagcttccagttcagaacctggaacaaggacggcctgctgctgagcaccgagctgagcgagggcagcggcaccctgctgctgagcctggagggcggcatcctgagactggtgatccagaagatgaccgagagagtggccgagatcctgaccggcagcaacctgaacgacggcctgtggcacagcgtgagcatcaacgccagaagaaacagaatcaccctgaccctggacgacgaggccgccccccccgcccccgacagcacctgggtgcagatctacagcggcaacagctactacttcggcggctgccccgacaacctgaccgacagccagtgcctgaaccccatcaaggccttccagggctgcatgagactgatcttcatcgacaaccagcccaaggacctgatcagcgtgcagcagggcagcctgggcaacttcagcgacctgcacatcgacctgtgcagcatcaaggacagatgcctgcccaactactgcgagcacggcggcagctgcagccagagctggaccaccttctactgcaactgcagcgacaccagctacaccggcgccacctgccacaacagcatctacgagcagagctgcgaggtgtacagacaccagggcaacaccgccggcttcttctacatcgacagcgacggcagcggccccctgggccccctgcaggtgtactgcaacatcaccgaggacaagatctggaccagcgtgcagcacaacaacaccgagctgaccagagtgagaggcgccaaccccgagaagccctacgccatggccctggactacggcggcagcatggagcagctggaggccgtgatcgacggcagcgagcactgcgagcaggaggtggcctaccactgcagaagaagcagactgctgaacacccccgacggcacccccttcacctggtggatcggcagaagcaacgagagacacccctactggggcggcagcccccccggcgtgcagcagtgcgagtgcggcctggacgagagctgcctggacatccagcacttctgcaactgcgacgccgacaaggacgagtggaccaacgacaccggcttcctgagcttcaaggaccacctgcccgtgacccagatcgtgatcaccgacaccgacagaagcaacagcgaggccgcctggagaatcggccccctgagatgctacggcgacagaagattctggaacgccgtgagcttctacaccgaggccagctacctgcacttccccaccttccacgccgagttcagcgccgacatcagcttcttcttcaagaccaccgccctgagcggcgtgttcctggagaacctgggcatcaaggacttcatcagactggagatcagcagccccagcgagatcaccttcgccatcgacgtgggcaacggccccgtggagctggtggtgcagagccccagcctgctgaacgacaaccagtggcactacgtgagagccgagagaaacctgaaggagaccagcctgcaggtggacaacctgcccagaagcaccagagagaccagcgaggagggccacttcagactgcagctgaacagccagctgttcgtgggcggcaccagcagcagacagaagggcttcctgggctgcatcagaagcctgcacctgaacggccagaagatggacctggaggagagagccaaggtgaccagcggcgtgagacccggctgccccggccactgcagcagctacggcagcatctgccacaacggcggcaagtgcgtggagaagcacaacggctacctgtgcgactgcaccaacagcccctacgagggccccttctgcaagaaggaggtgagcgccgtgttcgaggccggcaccagcgtgacctacatgttccaggagccctaccccgtgaccaagaacatcagcctgagcagcagcgccatctacaccgacagcgcccccagcaaggagaacatcgccctgagcttcgtgaccacccaggcccccagcctgctgctgttcatcaacagcagcagccaggacttcgtggtggtgctgctgtgcaagaacggcagcctgcaggtgagataccacctgaacaaggaggagacccacgtgttcaccatcgacgccgacaacttcgccaacagaagaatgcaccacctgaagatcaacagagagggcagagagctgaccatccagatggaccagcagctgagactgagctacaacttcagccccgaggtggagttcagagtgatcagaagcctgaccctgggcaaggtgaccgagaacctgggcctggacagcgaggtggccaaggccaacgccatgggcttcgccggctgcatgagcagcgtgcagtacaaccacatcgcccccctgaaggccgccctgagacacgccaccgtggcccccgtgaccgtgcacggcaccctgaccgagagcagctgcggcttcatggtggacagcgacgtgaacgccgtgaccaccgtgcacagcagcagcgaccccttcggcaagaccgacgagagagagcccctgaccaacgccgtgagaagcgacagcgccgtgatcggcggcgtgatcgccgtggtgatcttcatcatcttctgcatcatcggcatcatgaccagattcctgtaccagcacaagcagagccacagaaccagccagatgaaggagaaggagtaccccgagaacctggacagcagcttcagaaacgagatcgacctgcagaacaccgtgagcgagtgcaagagagagtacttcatctag

SEQ ID NO: 234028 - DNA, 3921 bp, Artificial Sequence
  derived and/or modified sequence
atggattctctgcccagactgacctcagtattgactctattattcagtggcctctggcacctgggtcttactgccaccaactataactgtgatgaccctctggcctctctcctgtcacctatggcctttagcagctccagcgacctgacgggcacacactcaccagcccaactgaattggcgcgtcggtaccggcggctggtctcccgccgatagcaacgcccagcagtggctgcagatggacctgggcaaccgagtggagattacagctgtggctacccaaggacgctacggctcaagcgactgggtgaccagttacagtctaatgtttagtgacaccgggaggaattggaaacagtataagcaggaagactccatatggaccttcgcagggaatatgaatgccgatagtgtagtacatcacaaattgcttcattcagtccgggccagattcgtgcggttcgtcccgctggagtggaatccatccggaaagattggaatgcgcgtcgaggtttacggatgcagctataagagcgatgtggccgacttcgatggacgatccagtctcctgtacagatttaatcagaaattaatgagtaccttaaaggacgtcatcagtctgaagtttaagtcaatgcagggtgacggggttctgttccacggcgagggacagcggggagatcacatcactctggagctgcagaaaggccgcctggcgctccacttgaaccttggcgacagcaaagctaggttgagctcaagtctgccgtccgcaaccttggggtcccttctcgacgaccagcactggcacagcgtactcattgaaagggtgggcaaacaggtgaatttcactgtggataaacatacgcagcacttccggactaagggcgagactgacgctttggacattgattatgaactttcatttgggggtatccctgtgcctgggaaacctgggacctttttgaagaaaaactttcacggctgtatcgaaaacttgtattacaatggcgtaaatataattgacctagcaaagcgtcgtaagcaccagatctacactggcaacgtaaccttttcatgcagcgagcctcagatagtccccatcacatttgttaattcgtctgggagttacctgctgctgcccggtactccccagattgacggactgtccgtcagcttccagttcaggacatggaataaagatgggctgttactctcaacagagctcagtgagggcagcggcactctgctcctgagtctggaaggaggtattctgagactggtaatacagaagatgactgaacgcgtggccgaaattcttacaggctccaacctaaatgatggattgtggcattccgtgtcgattaacgccaggcggaaccgtatcactctcacgctggacgacgaagctgcgccccctgcgccagacagtacctgggtacagatatactccgggaattcctactattttggcgggtgcccggacaatctgactgatagtcagtgcctcaatccaattaaagctttccaaggctgcatgcgactgatatttattgataatcagcctaaagatctcatcagcgttcagcagggaagtttggggaatttctccgacttacacatcgacctttgctcaatcaaggatcggtgcctccccaactactgcgaacacggcggctcctgttctcagagctggactaccttttactgcaattgctctgacacgtcctacaccggtgccacctgccacaacagcatttacgaacaatcctgcgaggtttacagacaccaggggaacactgccggcttcttttatattgatagcgacgggtctggaccattgggcccgttgcaggtatactgcaacatcacggaagacaagatctggacctcagtgcagcataacaataccgaactcacaagggtgagaggcgcaaaccctgagaaaccatatgcaatggcactggactacggcggctccatggaacaactcgaggctgtgattgatggtagtgagcactgcgagcaagaagttgcatatcattgtagacggtcgaggcttcttaatacgccagatggcaccccgttcacttggtggatcggcagaagcaatgagcggcacccttattgggggggcagccccccgggggttcagcagtgcgaatgcggactcgatgaatcttgcctcgatattcagcatttttgtaattgcgatgccgataaagatgagtggacgaacgataccggatttctttcattcaaagatcacctgccagtgactcagattgtcattaccgacacagatagatccaatagtgaggctgcttggcgcattggtccccttagatgctatggagaccgacggttttggaacgcggtgagcttctatacagaagcctcttacctccacttccccacattccacgccgagttcagcgcagatatttcattcttcttcaaaaccacggcactgagcggcgtcttcctggaaaatctcggcattaaagactttattcgactggagatatcaagtccgtcggaaattacatttgccatcgatgtgggcaacggccccgtagaactagtggtgcaaagtcctagtttactgaacgataatcagtggcactacgtgcgtgctgaacgtaacctcaaggagacaagccttcaggtggataaccttcctcgctcaacaagggaaacttctgaggaggggcacttccgtctccagcttaattcccaactgttcgttggtgggacgagcagccgacagaagggattcttgggatgtattcgatcacttcatctgaacgggcaaaaaatggacctggaggagagagccaaggtcacaagtggggtgcggcctggatgtcctggtcactgcagttcttacgggagcatttgtcacaatggcgggaaatgtgttgaaaaacacaacggatacttgtgtgactgtaccaacagcccgtacgaagggcccttttgcaagaaggaagtttcagctgtttttgaggcaggtacttccgtaacgtacatgtttcaggagccgtaccccgtgacaaaaaacatctccctttcttcttccgctatttatactgacagcgcacccagcaaggagaacatagcgctatcttttgtcactacacaggccccgtctctcttgttatttatcaactcaagcagtcaagacttcgtggtggtgttgctgtgtaagaatgggtcattgcaagttcgatatcacctgaataaggaggaaacccatgttttcaccattgacgccgacaatttcgctaacaggcgaatgcaccatttgaaaatcaatcgtgaagggcgcgagctgaccatccagatggatcagcagctccggctttcctacaacttctcgccagaagttgaattccgagtcatccgatcactgactctgggcaaggtgactgagaacctcggcctagactcagaagtggctaaggccaatgccatgggcttcgccggctgcatgtcctccgttcagtataatcacatagcgccactcaaagcagctctgagacatgccaccgtcgccccagtcacagtgcacggtaccctgacagaaagttcatgcgggttcatggtggacagtgacgtgaatgcagtcacaaccgttcattcctcttctgacccttttgggaagactgacgagagggagcccctcacaaacgcagtgaggtcggactcggcagtgatcgggggcgtaatagcagtcgttatatttatcatattttgcatcattggcatcatgaccaggtttctatatcagcacaaacagtctcacagaacatcccagatgaaggaaaaagagtatcccgaaaacttagacagctcttttagaaacgaaattgatttacagaacaccgtatcggaatgcaaacgtgagtatttcatttag

SEQ ID NO: 234029 - DNA, 3921 bp, Artificial Sequence
  derived and/or modified sequence
atggacagcctgccccggctgacctctgtgctgaccctgctcttcagcggcctgtggcacctgggcctgacagccaccaactacaactgtgatgaccccctggccagcctgctgagccccatggccttcagcagcagcagtgacctgaccggcacccacagccctgcccagctgaactggagggtgggcaccggcggctggagccctgctgacagcaatgcccagcagtggctgcagatggacctgggcaacagagtggagatcacagctgtggccacccagggccgctatggcagcagtgactgggtgaccagctacagcctgatgttcagtgacacaggaagaaactggaagcagtacaagcaggaggacagcatctggacctttgctggcaacatgaatgctgacagcgtggtgcaccacaagctgctgcacagcgtgcgggccaggtttgtgcgctttgtgcccctggagtggaaccccagcggcaagattggcatgagggtggaggtgtatggctgcagctacaagagtgatgtggccgactttgatggccgcagcagcctgctgtaccgcttcaaccagaagctgatgagcaccctgaaggatgtgatcagcctgaagttcaagtccatgcagggagatggagtgctcttccacggggagggccagagaggagaccacatcaccctggagctgcagaagggccgcctggccctgcacctgaacctgggggacagcaaggcccggctgagcagcagcctgcccagcgccaccctgggcagcctgctggatgaccagcactggcacagcgtgctgattgaaagagtgggcaagcaggtgaacttcaccgtggacaagcacacccagcacttccgcaccaagggggagacagatgccctggacattgattatgagctgagctttggaggcatccctgtgcctgggaagccaggcaccttcctgaagaagaacttccacggctgcattgaaaatctctactacaacggggtgaacatcatcgacctggccaagaggaggaagcaccagatctacacaggaaatgtgaccttcagctgcagcgagccccagatcgtgcccatcacctttgtgaacagcagcggcagctacctgctgctgcccggcaccccccagattgatggcctgtctgtgtccttccagttccgcacctggaacaaggatggcctgctgctgagcacagagctgtctgagggcagcggcaccctgctgctgagcctggagggcggcatcctgcggctggtgatccagaagatgacagagcgggtggccgagatcctgaccggcagcaacctgaatgatggcctgtggcacagcgtgtccatcaatgcccggaggaaccgcatcaccctgaccctggatgatgaggccgcccccccagccccagacagcacctgggtgcagatctacagcggcaacagctactactttggaggctgcccagacaacctgacagacagccagtgcctgaaccccatcaaggccttccagggctgcatgaggctcatcttcatcgacaaccagcccaaggacctgatctctgtgcagcagggcagcctgggcaacttcagtgacctgcacatcgacctgtgcagcatcaaggaccgctgcctgcccaactactgtgaacatggaggcagctgcagccagagctggaccaccttctactgcaactgcagcgacaccagctacaccggggccacctgccacaacagcatctatgagcagagctgtgaggtgtaccgccaccagggcaacacagctggcttcttctacatcgacagtgatggcagcggccccctgggccccctgcaggtgtactgcaacatcacagaggacaagatctggacctctgtgcagcacaacaacacagagctgaccagggtgcggggggccaaccctgagaagccctatgccatggccctggactatggaggctccatggagcagctggaggccgtgattgatggcagcgagcactgtgagcaggaggtggcctaccactgcagaagaagccggctgctgaacaccccagatggcacccccttcacctggtggattggccgcagcaatgaaagacacccctactggggcggcagccccccaggagtgcagcagtgtgaatgtggcctggatgagagctgcctggacatccagcacttctgcaactgtgatgctgacaaggatgagtggaccaatgacaccggcttcctgtccttcaaggaccacctgcctgtgacccagatcgtcatcacagacacagacaggagcaacagcgaggccgcctggagaattggccccctgcgctgctacggggaccggcgcttctggaatgctgtgtccttctacacagaggccagctacctgcacttccccaccttccacgccgagttctctgctgacatctccttcttcttcaagaccacagccctgtctggagtcttcctggagaacctgggcatcaaggacttcatccggctggagatcagcagccccagcgagatcacctttgccattgatgtgggcaatggacctgtggagctggtggtgcagagccccagcctgctgaatgacaaccagtggcactacgtgcgggcagagaggaacctgaaggagaccagcctgcaggtggacaacctgcccaggagcacccgggagaccagcgaggagggccacttccggctgcagctgaacagccagctgtttgtgggcggcaccagcagccggcagaagggcttcctgggctgcatccgcagcctgcacctgaatggccagaagatggacctggaggagcgggccaaggtgaccagcggcgtgcggcccggctgccccggccactgcagcagctatggcagcatctgccacaatggaggaaaatgtgtggagaagcacaacggctacctgtgtgactgcaccaacagcccctatgagggccccttctgcaagaaggaggtgtctgctgtgtttgaggccggcacctctgtgacctacatgttccaggagccctaccctgtgaccaagaacatcagcctgagcagcagcgccatctacacagattctgcccccagcaaggagaacatcgccctgagctttgtgaccacccaggcccccagcctgctgctcttcatcaacagcagcagccaggactttgtggtggtgctgctgtgcaagaatggcagcctgcaggtgcgctaccacctgaacaaggaggagacccacgtgttcaccattgatgctgacaactttgccaacagaaggatgcaccacctgaagatcaaccgggagggccgggagctgaccatccagatggaccagcagctgcggctgagctacaacttcagccctgaggtggagttccgggtcatccgcagcctgaccctgggcaaggtgacagagaacctgggcctggacagcgaggtggccaaggccaatgccatgggctttgctggctgcatgagctctgtgcagtacaaccacatcgcccccctgaaggccgccctgcggcatgccaccgtggcccctgtgacagtgcacggcaccctgacagagagcagctgtggcttcatggtggacagtgatgtgaatgctgtgaccaccgtgcacagcagcagtgacccctttgggaagacagatgagcgggagcccctgaccaatgctgtgcggagtgacagcgctgtgattggaggagtgattgctgtggtgatcttcatcatcttctgcatcatcggcatcatgacccgcttcctgtaccagcacaagcagagccacaggaccagccagatgaaggagaaggagtacccagagaacctggacagcagcttcagaaatgaaattgacctgcagaacacagtgtctgagtgcaagcgggagtacttcatctag

SEQ ID NO: 234030 - DNA, 3921 bp, Artificial Sequence
  derived and/or modified sequence
atggacagcctgccccggctgaccagcgtgctgaccctgctgttctccggtctctggcatctcgggctcactgcaaccaactacaactgcgatgaccccctcgctagccttctgagtcctatggcgtttagcagtagctctgatctcacaggcacccatagtccagctcagctgaattggagggtgggtactggtgggtggtcccctgccgattctaacgcccaacagtggttgcagatggacctgggaaacagagtggaaataactgccgttgccacacaaggccggtatggctcatctgactgggtgacgagctattcccttatgttttctgacacaggcaggaattggaagcagtacaaacaggaagactcaatatggacctttgcgggcaatatgaacgccgatagtgttgtgcatcacaagctccttcacagcgtgagagctcgctttgtaagattcgtccctttagaatggaatcccagcggcaagatcgggatgcgcgtggaagtgtatggatgctcctacaaatctgacgtcgcagactttgatggccgatcgtctctcctgtatcggttcaaccagaagttgatgtccaccctgaaagacgtgatatcactgaagttcaagtcaatgcagggggatggtgttctcttccacggggagggacagcggggagaccatatcaccctggaactgcagaagggcagacttgcactccacctgaatctgggagattctaaggctaggctcagttcgagcctcccgagcgccaccctggggtccctgttggatgaccaacattggcacagcgtactgattgagcgcgtcggtaagcaggtcaactttaccgtagacaagcacacccagcattttaggacaaagggagaaaccgacgcgctggatatcgactacgaactgagctttggcggaattcccgtgcctgggaaaccaggcacttttcttaagaagaattttcacgggtgtatcgaaaacctttattacaacggcgtgaatatcatcgacctggctaagagaagaaagcatcaaatatacacaggcaatgtgacattttcctgtagcgagcctcaaattgtgcctatcacttttgtcaactcctcaggatcatatctgctattaccagggacaccccagattgatggactgagcgtctcatttcagttccgtacctggaataaagacgggctgctcctgtcgacagagttgtctgaagggagcggcactttactcctgagtctggaaggtggcatcctgcgcctcgttattcagaaaatgacagaacgggtggcggaaatcctgacaggatctaatctgaacgacgggctgtggcacagtgtctccatcaacgcacgccgcaatcggataaccctcactctggacgacgaagcagctccccctgctcctgatagcacttgggtgcaaatctattcaggtaacagttactacttcggcggctgtccagacaacctcaccgactctcagtgtcttaatcctataaaggcgttccaggggtgtatgaggctgatttttattgacaaccagcccaaggacctgatcagtgtacagcaagggagtttgggtaatttctcagacctgcatatcgacctgtgcagcatcaaggataggtgcctgcccaattactgcgagcacgggggctcctgttcccagtcctggaccactttttattgcaattgctctgatacaagctataccggagctacctgccataattcgatatacgaacagagttgtgaggtctatcgtcaccagggcaacacagccgggttcttttacattgacagcgatggatcggggcccttaggcccgttgcaggtttattgtaacataaccgaagacaaaatctggaccagcgtgcaacataacaatacagagctaacacgcgtcaggggcgccaatcccgagaaaccatatgcaatggcgttggattatggcgggagcatggaacaactggaagctgtcattgatggcagtgaacattgcgaacaggaggtagcctaccactgccgccgctctagattactgaatacccccgatggtacaccattcacctggtggattggcagaagtaatgaaagacatccatactggggcgggtccccaccgggggtacaacagtgcgagtgcggactggacgaatcttgtttggatattcagcatttttgcaattgtgatgcagacaaggatgagtggactaatgataccgggttcctgtccttcaaggaccatttgcccgtgacccagatcgtaattaccgacacagaccgcagcaactccgaagccgcatggcggatcggccctctaagatgttacggagaccggaggttttggaatgccgtgtctttctataccgaggcctcctacctgcacttccctaccttccatgccgaattctccgccgatatctcgtttttttttaagacgaccgccctgtctggggtgttcctggagaacctggggattaaagatttcattagactagaaatttctagcccttccgagattaccttcgccatcgacgtaggaaatgggcccgtagaactcgtggtacagtccccgtccctactgaacgataatcagtggcattacgttcgcgccgaaaggaatctgaaggagacttctttgcaggtggataatctgccgcggtccactcgggagacttccgaagaagggcattttagactacagttgaactcccagttattcgtgggggggacctccagccgccaaaaaggatttctcggctgcatccgatcactccacctaaacggacagaaaatggacctggaggagcgggcaaaggtgaccagtggcgtgcggcccggatgccccggccattgtagtagttacggatcgatctgccacaacggtggcaaatgcgttgaaaagcacaacgggtatctgtgtgactgcacgaactctccttatgagggaccattttgtaaaaaggaggtgagcgctgtcttcgaagccggcacatcagtcacttacatgtttcaggagccttatcctgttaccaaaaacatttccctttcgtcgtcggctatctataccgattctgcccccagcaaggagaatatagccctcagtttcgtgaccactcaggctccctcattgctgctgtttatcaattcgtcaagtcaggatttcgtcgtggttcttctctgcaagaatggctccctacaggtgagatatcatctgaacaaggaggagacacatgtgttcacgatcgacgccgataatttcgctaatcgtcggatgcaccatctgaagattaatagggagggtagagagctgacaattcagatggatcagcagctgcggctgtcatacaactttagtcccgaggtcgaattccgagtgattcgctcattaaccttaggcaaagttaccgaaaacctaggccttgattccgaggtggccaaagctaacgccatgggctttgccgggtgcatgtccagcgtacagtataaccacattgctccccttaaagccgccttgagacacgcaactgtcgcccccgtgaccgttcacggcacccttactgagagctcgtgtgggtttatggtcgatagtgacgttaacgccgtgacaacagttcactcctcttctgaccccttcggcaaaactgatgaaagagagcctctcaccaatgctgtacgtagtgactctgctgtgatagggggagtgatcgctgtggtgatttttattatcttctgtattatcggaattatgaccagatttctctaccagcataaacagtcacaccggacctctcaaatgaaggagaaggagtatcctgaaaatttggacagcagcttcaggaacgagatcgacctccagaacacagtgagtgaatgtaagcgagagtacttcatatag

SEQ ID NO: 234031 - DNA, 3921 bp, Artificial Sequence
  derived and/or modified sequence
atggattccctcccacgcctgacttctgtgctcacattgctcttctcaggtctgtggcaccttggactaacagcaactaattataattgcgatgaccctctcgcctctctgctaagtcctatggcgttttccagctccagcgaccttacagggacgcatagtccagcacagctgaattggcgcgtaggaaccgggggatggagtcccgctgactcgaatgcgcagcagtggctgcagatggacctggggaacagggttgaaattaccgctgtggccacccaaggacggtacggtagcagcgattgggtaaccagttatagcctcatgttcagcgacactgggcgtaactggaaacaatacaagcaggaggattctatttggactttcgctggaaatatgaatgccgactctgttgtgcaccacaaacttctgcactcagttcgggctcggtttgtgagattcgtgccattagaatggaacccaagcggcaagataggaatgcgcgtcgaggtgtacggttgtagctataagagcgatgtcgccgactttgacgggaggagcagcctcctgtataggttcaaccagaaactcatgtccactctgaaggacgttattagccttaaattcaagtcaatgcaaggtgacggagtcctcttccacggggagggccagcgtggggaccacatcaccctcgagctgcaaaaaggacgccttgctctgcacttaaatctgggcgatagcaaggccaggctgtcgagttcgctcccatccgctactctgggcagcctgttagacgatcagcactggcacagcgtgttgattgaacgagtcggcaagcaggtgaactttacagtggacaaacacacgcagcacttccggacgaagggggagacggatgcccttgacattgactacgaactatcgtttgggggtattcccgttcctggaaagccaggtacttttcttaaaaagaactttcatggctgcattgagaatctctattacaatggagtgaatataattgacttagcaaaaaggcgcaaacaccagatttatacaggcaatgtgacctttagctgttctgagccccaaattgtccccatcacattcgtcaattcatctggtagctacctgttgctgccaggtaccccccagatagatgggctgtccgtgtccttccagttccgaacgtggaacaaggacggcttgcttctgagcacagagttgtccgagggcagcggaacccttttgttatccctggaaggcggaattctccggctggtcattcagaaaatgacagaaagggtcgccgagatcctgactggatcaaacctgaatgacggtctgtggcattccgtaagcattaatgctagacggaatcggattaccctgacattggacgatgaggcagcgccacctgcccctgatagtacatgggtgcagatatatagcggcaatagttactattttggaggatgccctgataatcttacagactctcagtgtctgaatccaatcaaggccttccaggggtgcatgcgactcatattcattgataatcagccaaaagacctcatctctgtacaacaaggaagcctgggcaatttttcagatttgcacatcgacttgtgtagcatcaaagatcgctgcctcccaaattattgtgaacacggaggctcgtgcagtcagtcatggactaccttctactgtaactgttctgacacttcatataccggagccacttgccataatagtatctatgagcagagctgtgaggtctacaggcaccaggggaatacagctgggttcttctacattgactctgacggctcgggacccctgggtcccctgcaggtgtactgtaatattacagaagataagatttggacctcagtgcagcacaataacacagagctaactagagtccgaggcgctaatccagaaaaaccttatgcgatggcactcgactacgggggttccatggagcagctcgaggcggtcatagacggttccgagcactgcgagcaggaagtagcctaccattgtaggaggtcaaggctcttgaacacccccgatgggactccattcacatggtggattggcaggagtaacgaacgccacccatattggggagggtcaccacctggggtgcaacaatgcgagtgtggccttgatgaatcttgtttggatattcagcacttttgcaactgcgacgctgacaaggatgagtggactaacgacactggttttctgtccttcaaggaccacctccccgtcacccagattgtaattaccgacaccgataggtctaacagtgaggctgcttggaggataggaccattgcgctgctatggtgatcgaagattttggaatgccgtgtcattttataccgaagcatcttatctgcacttccccacttttcatgcagagttttccgcggacatttcctttttcttcaaaacgactgccctgtcaggtgtttttctggagaatctggggatcaaggactttataaggttagaaatttcttcaccatcagagattacgttcgcaattgacgtggggaacggtcctgttgagctggtggtgcagtctcccagcctcctcaatgataaccagtggcactacgtccgcgcagaacgtaatctcaaagaaaccagtttgcaagtggacaatttgccaagatcgaccagggaaacatcggaagagggccattttagattgcagctgaatagtcagttgttcgtaggtggcacttcatcacggcagaaaggttttctgggatgcattaggagcctgcatctgaacgggcagaaaatggacctggaggaaagggccaaggtgacctctggtgtaagaccagggtgccctggccattgctccagttatgggtctatctgtcacaatggcggtaaatgcgtggagaaacacaatgggtatctgtgtgattgcacgaatagtccctatgaggggccattttgcaaaaaggaagtgtcagctgtgtttgaggcaggaacatccgtgacctacatgttccaggagccttacccggtgaccaagaacatctctctgagctctagcgctatttacaccgactctgctcccagcaaggagaacattgctttgagctttgttacgacacaggcaccaagtctccttctctttatcaactcctctagtcaggactttgtcgtagtacttctctgcaagaacggatctctccaagtgcgatatcatctgaacaaagaggagacccacgtctttaccattgacgcagataacttcgccaatagacggatgcaccacttgaagataaatcgagagggaagagaattgaccatacagatggatcaacagctgcggctttcgtataacttctctcctgaggtggagtttcgggtcattcgatcactgaccctgggcaaggttactgagaacctcgggctggactccgaggtcgctaaggccaatgctatgggctttgccggatgcatgtccagcgtgcagtataaccacattgctccactcaaagcagccctccgccacgcaactgtggctcctgtgaccgttcacgggacacttaccgaaagctcatgcggattcatggtggacagcgacgtgaacgctgtaacaacggtccattcatcctcagaccctttcgggaagactgacgaacgggaacccctgaccaatgccgttagatctgactcggcggttattggcggagtcattgcagtggtcatcttcattatcttctgtattattggaattatgacccggttcctctatcagcacaaacaaagtcaccgtacaagccaaatgaaggaaaaggaatatccggagaacctggactcctcttttagaaacgagattgatctgcagaacaccgtcagtgagtgcaagcgcgagtatttcatatag

SEQ ID NO: 234032 - protein, 203 aa, Artificial Sequence
  derived and/or modified sequence
MSGQRVDVKVVMLGKEYVGKTSLVERYVHDRFLVGPYQNTIGAAFVAKVMSVGDRTVTLGIWDTAGSERYEAMSRIYYRGAKAAIVCYDLTDSSSFERAKFWVKELRSLEEGCQIYLCGTKSDLLEEDRRRRRVDFHDVQDYADNIKAQLFETSSKTGQSVDELFQKVAEDYVSVAAFQVMTEDKGVDLGQKPNPYFYSCCHH

SEQ ID NO: 234033 - protein, 66 aa, Artificial Sequence
  derived and/or modified sequence
MSGQRVDVKVVMLGKEYVGKTSLVERYVHDRFLVGPYQNTIGAAFVAKVMSVGDRTVTLGIWDTAG

SEQ ID NO: 234034 - DNA, 612 bp, Artificial Sequence
  derived and/or modified sequence
atgagcggccagcgcgtcgacgtcaaggtggtgatgctcgggaaagagtatgtgggaaagacgtctctggtggagcggtatgtgcacgaccggttcctggtcgggccttatcagaataccatcggagctgccttcgttgccaaggtgatgtccgtaggcgatcgaacggtcactctgggaatttgggataccgcgggcagtgagcgatacgaagccatgtctcgaatctactatcgtggagccaaggcagccattgtatgctacgacttgaccgattcttcatctttcgagcgagccaaattctgggtgaaagagctacgctctctggaagaagggtgtcaaatctacctgtgcggaactaagagcgacctgctggaggaagatcgacggagacgacgtgtggactttcatgacgtccaagactacgccgataatatcaaagcacagctgtttgagaccagcagtaagacggggcaatctgtggacgagctcttccaaaaagttgccgaggactatgttagcgttgctgccttccaggtgatgacagaggacaagggtgtcgacctcgggcagaagcctaacccatacttttactcttgctgtcatcactag

SEQ ID NO: 234035 - DNA, 612 bp, Artificial Sequence
  derived and/or modified sequence
atgtcaggtcagcgagtagatgtgaaggtggtgatgctgggtaaggagtacgtgggaaaaacctcactggttgaaaggtacgtccacgaccggttcctggtcggcccctaccagaacactatcggcgccgctttcgtggccaaggtaatgtctgtgggcgaccgcacagtgactctggggatttgggacacggccgggtccgaaagatacgaggctatgtcgcggatctattaccggggagcaaaagcagccatcgtgtgttatgacttgaccgactcgtcaagtttcgagcgggccaagttctgggtcaaggagcttcgtagccttgaggagggctgtcagatctatctgtgcgggaccaaatccgatctgctggaagaggataggagaagaaggcgggtggatttccatgacgtgcaagactacgccgacaacattaaagcccagctgttcgaaacatccagtaaaaccggccagtcagtagacgagcttttccaaaaagtggccgaagactatgttagtgtcgcggcgtttcaggtcatgacagaggataagggcgtggacttagggcagaaacccaatccgtatttttacagctgctgccatcattag

SEQ ID NO: 234036 - DNA, 201 bp, Artificial Sequence
  derived and/or modified sequence
atgtccggtcagcgggttgacgtcaaggtggttatgctgggaaaggagtacgtggggaaaacaagccttgttgagcgctatgtgcatgatcgctttctggttggtccctatcagaatactatcggagctgccttcgtagcaaaagtcatgtccgtgggcgacaggaccgttacactgggcatctgggatactgcaggctag

SEQ ID NO: 234037 - DNA, 612 bp, Artificial Sequence
  derived and/or modified sequence
atgagcggccagagggtggatgtgaaggtggtgatgctgggcaaggagtatgtgggcaagaccagcctggtggagagatatgtgcatgaccgcttcctggtgggcccctaccagaacaccatcggggccgcctttgtggccaaggtgatgtctgtgggggacagaacagtgaccctgggcatctgggacacagctggcagcgagagatatgaggccatgagccgcatctactacagaggagccaaggccgccatcgtgtgctatgacctgacagacagcagcagctttgagcgggccaagttctgggtgaaggagctgcggagcctggaggagggctgccagatctacctgtgtggcaccaagagtgacctgctggaggaggacagaagaagaagaagagtggacttccatgatgtgcaggactatgctgacaacatcaaggcccagctgtttgagaccagcagcaagacaggccagagcgtggatgagctgttccagaaggtggccgaggactatgtgtctgtggccgccttccaggtgatgacagaagataaaggagtggacctgggccagaagcccaacccctacttctacagctgctgccaccactag

SEQ ID NO: 234038 - DNA, 201 bp, Artificial Sequence
  derived and/or modified sequence
atgagcggccagagggtggatgtgaaggtggtgatgctgggcaaggagtatgtgggcaagaccagcctggtggagagatatgtgcatgaccgcttcctggtgggcccctaccagaacaccatcggggccgcctttgtggccaaggtgatgtctgtgggggacagaacagtgaccctgggcatctgggacacagctggatag

SEQ ID NO: 234039 - DNA, 612 bp, Artificial Sequence
  derived and/or modified sequence
atgagcggccagcgggtggacgtgaaggtggtgatgctgggcaaggagtatgtggggaaaacctccctggtggaacgatatgttcacgaccggttcctggtgggcccctaccagaacacaatcggggctgccttcgtggccaaggtaatgtccgtgggggacaggacagttaccctcggcatctgggatactgctggctctgagaggtacgaggccatgagtcggatttattatcgcggagcgaaagccgcaatagtctgttatgacctgacagattcctctagttttgaaagggcgaagttttgggttaaagagttaaggagcttggaggaggggtgccagatttacctctgcggcaccaagtccgacctcctggaggaagaccgaagacgccgccgcgtcgatttccacgacgtgcaggactacgccgacaacattaaagcacagctgttcgaaacttcgagcaaaacagggcagtccgtcgatgaactgtttcagaaggtcgccgaagactacgtatctgtcgccgcttttcaagtgatgaccgaagataagggcgtggacctcgggcagaagccaaatccgtacttttatagctgctgccaccactag

SEQ ID NO: 234040 - DNA, 612 bp, Artificial Sequence
  derived and/or modified sequence
atgagcggccagcgggtggacgtgaaggtggtgatgctgggcaaggagtacgtgggcaagacgtccctggtcgaaagatatgtgcatgatcgattcctagtgggcccctatcagaatacgattggagccgctttcgtcgctaaggtgatgtcagtcggcgaccgcacagtgaccctgggcatctgggatacagctggcagtgagaggtacgaagctatgtcacgaatttactatcgcggtgcgaaggccgcaattgtttgttacgatctgaccgattcctccagcttcgagcgcgccaaattttgggtgaaggaattgaggtccctggaggagggttgtcagatttatctgtgcgggacaaagtccgatctattggaggaggaccggcggcgcagacgcgtcgactttcacgacgtccaggattacgctgacaacatcaaagcacagctttttgaaacctccagtaaaaccgggcaatctgttgatgaattattccaaaaggttgccgaggattacgtgagcgtggcggccttccaggtcatgaccgaggataaaggcgtcgatctgggacagaagccaaacccatatttttattcttgttgccaccattag

SEQ ID NO: 234041 - DNA, 201 bp, Artificial Sequence
  derived and/or modified sequence
atgagcggccagcgggtggacgtgaaggtggtgatgctgggcaaggagtacgtcgggaagactagtctggtggagcgctatgtccacgaccgtttccttgtaggtccatatcagaatactatcggcgctgcatttgtcgcgaaggtgatgtccgtgggcgaccgaacagtgactctgggcatttgggacacagccggctag

SEQ ID NO: 234042 - DNA, 612 bp, Artificial Sequence
  derived and/or modified sequence
atgtctgggcagcgcgtcgacgtcaaggtagtgatgctgggcaaggagtacgttggcaaaacttctttggtagaacggtatgtgcacgaccgattcctcgtggggccttatcagaatactatcggggctgcttttgtggcaaaagtaatgtcagtgggagacagaaccgtgacactaggcatctgggacacagcgggaagcgaacgctacgaagcgatgtccaggatctactatagaggggctaaagccgcaatcgtttgctatgacctgaccgacagttcctcatttgaaagggcaaaattctgggtcaaagagcttcggtccctcgaggaaggttgccagatctatctctgtggcaccaagtccgacctgttagaagaagatcgtagacgacgtagagtggacttccatgatgtgcaggattatgcggataatatcaaagctcagctttttgagacttctagcaagaccggacagagcgttgatgagctgttccagaaggtggcagaagactatgtcagcgtagccgctttccaggttatgaccgaagacaagggagtggacttagggcaaaagccgaacccgtacttctactcttgctgccatcactag

SEQ ID NO: 234043 - DNA, 612 bp, Artificial Sequence
  derived and/or modified sequence
atgtcaggacagcgtgtcgacgttaaagtggtgatgttggggaaagaatacgtggggaagaccagcctcgtggaacgttacgtgcatgatcggttcttggtgggtccttatcaaaacaccatcggcgcagcattcgtggcgaaagtgatgagtgttggagatcggactgtcaccctcggcatctgggacactgcaggctcagaaagatacgaggccatgtcccggatttactatagaggggctaaggcagcaattgtctgctatgacctcaccgatagctcctctttcgagagagcaaagttctgggtgaaagaactgcgctcgctcgaggaaggatgtcaaatctacctctgtggaacaaagtctgatctgctggaggaagaccgccgacggaggcgcgtcgatttccacgatgtccaggactacgccgacaatatcaaggcgcaactgtttgagaccagtagcaaaacgggccagtccgtggacgaactgttccaaaaagttgcagaggactatgtaagcgtggctgccttccaggtgatgaccgaagataaaggggtagacttaggccagaagccaaacccttatttttattcttgctgccaccactag

SEQ ID NO: 234044 - DNA, 201 bp, Artificial Sequence
  derived and/or modified sequence
atgtcagggcagcgtgtggacgttaaagtagtcatgttggggaaggagtacgtgggtaaaacaagtctggttgaacggtatgtgcatgaccgttttctggtgggcccataccagaatactatcggagccgcttttgtggcgaaggtgatgtctgtcggcgacaggacggttaccctagggatctgggatacagcaggatag

SEQ ID NO: 234045 - DNA, 1311 bp, Artificial Sequence
  derived and/or modified sequence
tcccgcgggagtcgcggcgctgcgggtaggagccgggttgcgggagaccccaggttcggttgggattcccagccagaacggagcttaagccgggcaggcgagcgaatgacggagtagcgagctgcacggcggcgtgctgcgctgttgaggacgctgtcccgcgcgctcccaggccgccccgaggcttggggtcttcgaaggataatcggcgcccggggccgaacagcgggggcacacggggcgctgccgaagtgcaaggccacggccagagctcgagcccgacgcgctgtctggagtcgtaggttggcgccgtttggggtcggggtctgaggcttgggcgctgcctgggccgagcggagatcggggtttgcctcccgtccccgctcaggaccctgacgtggctgaagcggccccgggagcatgagcgggcagcgcgtggacgtcaaggtggtgatgctgggcaaggagtacgtgggcaagactagcctggtggagcgctacgtgcacgaccgctttctggtggggccttatcagaacaccatcggggccgccttcgtggccaaggtgatgtcggtcggagaccggactgtgacattaggtatttgggacacagcaggctctgagcgctatgaggccatgagtagaatctactatcggggtgccaaggctgccatcgtctgctatgacctcacagacagcagcagctttgagcgagcaaagttctgggtgaaggaactgcgcagcctagaggagggctgccaaatctacttatgtggcaccaagagtgacctgctggaagaagaccggaggcgtcgacgtgtggacttccacgacgtccaggactatgcagacaatatcaaagctcagctctttgaaacatccagcaagacaggccagagtgtggacgagctcttccagaaagtggcagaggattacgtcagtgtggctgccttccaggtgatgacagaggacaagggcgtggatctgggccagaagccaaacccctacttctacagctgttgtcatcactgagtcagcactcacctggcctgggggaattaaaggaattccccgtaagggctggacccagctcctttctgggcttgggtagtcaaatgtctgagctaccccaggtcctcatgtcagcagagtggcgcctgcctgtgctggcccatggaacggagacagcattgggctgactgtgggcatgaggagggataaggctgatttggaccccaggcttctgccctggacagcacttgtgtctgcagattatttaagtggcttttgatctgtaaataaaatcagtgc

SEQ ID NO: 234046 - DNA, 1236 bp, Artificial Sequence
  derived and/or modified sequence
ccgcgggagtcgcggcgctgcgggtaggagccgggttgcgggagaccccaggttcggttgggattcccagccagaacggagcttaagccgggcaggcgagcgaatgacggagtagcgagctgcacggcggcgtgctgcgctgttgaggacgctgtcccgcgcgctcccaggccgccccgaggcttggggtcttcgaaggataatcggcgcccggggccgaacagcgggggcacacggggcgctgccgaagtgcaaggccacggccagagctcgagcccgacgcgctgtctggagtcgtaggaccctgacgtggctgaagcggccccgggagcatgagcgggcagcgcgtggacgtcaaggtggtgatgctgggcaaggagtacgtgggcaagactagcctggtggagcgctacgtgcacgaccgctttctggtggggccttatcagaacaccatcggggccgccttcgtggccaaggtgatgtcggtcggagaccggactgtgacattaggtatttgggacacagcaggctctgagcgctatgaggccatgagtagaatctactatcggggtgccaaggctgccatcgtctgctatgacctcacagacagcagcagctttgagcgagcaaagttctgggtgaaggaactgcgcagcctagaggagggctgccaaatctacttatgtggcaccaagagtgacctgctggaagaagaccggaggcgtcgacgtgtggacttccacgacgtccaggactatgcagacaatatcaaagctcagctctttgaaacatccagcaagacaggccagagtgtggacgagctcttccagaaagtggcagaggattacgtcagtgtggctgccttccaggtgatgacagaggacaagggcgtggatctgggccagaagccaaacccctacttctacagctgttgtcatcactgagtcagcactcacctggcctgggggaattaaaggaattccccgtaagggctggacccagctcctttctgggcttgggtagtcaaatgtctgagctaccccaggtcctcatgtcagcagagtggcgcctgcctgtgctggcccatggaacggagacagcattgggctgactgtgggcatgaggagggataaggctgatttggaccccaggcttctgccctggacagcacttgtgtctgcagattatttaagtggcttttgatctgtaaataaaatcagtgcactgtgcatcaca

SEQ ID NO: 234047 - DNA, 563 bp, Artificial Sequence
  derived and/or modified sequence
gaccttgcggccccgccccctcgccctctagccccctcccgcgggagtcgcggcgctgcgggtaggagccgggttgcgggagaccccaggttcggttgggattcccagccagaacggagcttaagccgggcaggcgagcgaatgacggagtagcgagctgcacggcggcgtgctgcgctgttgaggacgctgtcccgcgcgctcccaggccgccccgaggcttggggtcttcgaaggataatcggcgcccggggccgaacagcgggggcacacggggcgctgccgaagtgcaaggccacggccagagctcgagcccgacgcgctgtctggagtcgaccctgacgtggctgaagcggccccgggagcatgagcgggcagcgcgtggacgtcaaggtggtgatgctgggcaaggagtacgtgggcaagactagcctggtggagcgctacgtgcacgaccgctttctggtggggccttatcagaacaccatcggggccgccttcgtggccaaggtgatgtcggtcggagaccggactgtgacattaggtatttgggacacagcagg

SEQ ID NO: 234048 - DNA, 612 bp, Artificial Sequence
  derived and/or modified sequence
atgagcggccagagagtggacgtgaaggtggtgatgctgggcaaggagtacgtgggcaagaccagcctggtggagagatacgtgcacgacagattcctggtgggcccctaccagaacaccatcggcgccgccttcgtggccaaggtgatgagcgtgggcgacagaaccgtgaccctgggcatctgggacaccgccggcagcgagagatacgaggccatgagcagaatctactacagaggcgccaaggccgccatcgtgtgctacgacctgaccgacagcagcagcttcgagagagccaagttctgggtgaaggagctgagaagcctggaggagggctgccagatctacctgtgcggcaccaagagcgacctgctggaggaggacagaagaagaagaagagtggacttccacgacgtgcaggactacgccgacaacatcaaggcccagctgttcgagaccagcagcaagaccggccagagcgtggacgagctgttccagaaggtggccgaggactacgtgagcgtggccgccttccaggtgatgaccgaggacaagggcgtggacctgggccagaagcccaacccctacttctacagctgctgccaccactag

SEQ ID NO: 234049 - DNA, 201 bp, Artificial Sequence
  derived and/or modified sequence
atgagcggccagagagtggacgtgaaggtggtgatgctgggcaaggagtacgtgggcaagaccagcctggtggagagatacgtgcacgacagattcctggtgggcccctaccagaacaccatcggcgccgccttcgtggccaaggtgatgagcgtgggcgacagaaccgtgaccctgggcatctgggacaccgccggctag

SEQ ID NO: 234050 - protein, 235 aa, Artificial Sequence
  derived and/or modified sequence
METTLLFFSQINMCESKEKTFFKLIHGSGKEETSKEAKIRAKEKRNRLSLLVQKPEFHEDTRSSRSGHLAKETRVSPEEAVKWGESFDKLLSHRDGLEAFTRFLKTEFSEENIEFWIACEDFKKSKGPQQIHLKAKAIYEKFIQTDAPKEVNLDFHTKEVITNSITQPTLHSFDAAQSRVYQLMEQDSYTRFLKSDIYLDLMEGRPQRPTNLRRRSRSFTCNEFQDVQSDVAIWL

SEQ ID NO: 234051 - DNA, 708 bp, Artificial Sequence
  derived and/or modified sequence
atggagaccaccctgctgttcttcagccagatcaacatgtgcgagagcaaggagaagaccttcttcaagctgatccacggcagcggcaaggaggagaccagcaaggaggccaagatcagagccaaggagaagagaaacagactgagcctgctggtgcagaagcccgagttccacgaggacaccagaagcagcagaagcggccacctggccaaggagaccagagtgagccccgaggaggccgtgaagtggggcgagagcttcgacaagctgctgagccacagagacggcctggaggccttcaccagattcctgaagaccgagttcagcgaggagaacatcgagttctggatcgcctgcgaggacttcaagaagagcaagggcccccagcagatccacctgaaggccaaggccatctacgagaagttcatccagaccgacgcccccaaggaggtgaacctggacttccacaccaaggaggtgatcaccaacagcatcacccagcccaccctgcacagcttcgacgccgcccagagcagagtgtaccagctgatggagcaggacagctacaccagattcctgaagagcgacatctacctggacctgatggagggcagaccccagagacccaccaacctgagaagaagaagcagaagcttcacctgcaacgagttccaggacgtgcagagcgacgtggccatctggctgtag

SEQ ID NO: 234052 - DNA, 708 bp, Artificial Sequence
  derived and/or modified sequence
atggagaccacgctgcttttcttctctcagattaatatgtgtgagtctaaagagaagacctttttcaagctgatccacggttctgggaaggaggaaacaagcaaagaggccaaaataagagccaaggaaaagagaaaccgcctcagcctactggtgcaaaagcctgagttccacgaagacaccagatccagccgctccgggcacctggcaaaagagaccagagtgtcgccagaagaagccgtcaagtggggcgaatcctttgacaagctcctgagtcatcgcgatggattggaagccttcactagattcctgaagactgaatttagtgaggagaatatagaattctggatcgcttgcgaggattttaaaaagtcaaaaggaccccagcagatccacctgaaggccaaagccatatacgagaaatttattcagacggacgcccctaaggaagtgaatctggattttcacacaaaggaggttattacaaattctatcacacaaccaaccctgcattcatttgatgccgcccagtcccgtgtttaccagctgatggaacaggacagttacacacggttccttaaaagtgacatatatcttgatttgatggaagggagaccacagcgcccaacaaatcttaggaggaggagcagaagctttacttgtaacgagttccaggacgtccagtccgacgtagcaatttggctgtag

SEQ ID NO: 234053 - DNA, 708 bp, Artificial Sequence
  derived and/or modified sequence
atggagaccaccctgctcttcttcagccagatcaacatgtgtgagagcaaggagaagaccttcttcaagctgatccacggcagcggcaaggaggagaccagcaaggaggccaagatccgggccaaggagaagaggaaccggctgagcctgctggtgcagaagccagagttccacgaggacaccaggagcagccgcagcggccacctggccaaggagaccagggtgtccccagaggaggccgtgaagtggggcgagagctttgacaagctgctgagccacagagatggcctggaggccttcacccgcttcctgaagacagagttctctgaagaaaatattgagttctggatcgcctgtgaggacttcaagaagagcaagggcccccagcagatccacctgaaggccaaggccatctatgagaagttcatccagacagatgcccccaaggaggtgaacctggacttccacaccaaggaggtgatcaccaacagcatcacccagcccaccctgcacagctttgatgctgcccagagccgggtgtaccagctgatggagcaggacagctacacccgcttcctgaagagtgacatctacctggacctgatggagggccggccccagaggcccaccaacctgcggcggcgcagccgctccttcacctgcaatgagttccaggatgtgcagagtgatgtggccatctggctgtag

SEQ ID NO: 234054 - DNA, 708 bp, Artificial Sequence
  derived and/or modified sequence
atggagaccaccctgctgttcttcagccagatcaacatgtgcgagtctaaggagaaaacgttttttaagttgatccatggcagtggaaaggaagaaacgtcaaaggaggccaagatacgcgccaaggagaaacggaaccgtctgtccctgttggtccagaaaccagaattccacgaggataccagatctagtaggtcagggcatctggcaaaggagactagagtgtctcccgaggaagctgtaaagtggggcgagagcttcgataaactcctcagccacagggatggacttgaagccttcactcgttttctcaagactgaattttcagaggagaacatcgagttctggattgcctgtgaggactttaagaagtctaagggtcctcagcaaatccacctgaaagcgaaggccatctacgaaaagtttatccaaacagacgcacccaaggaggtcaatttagattttcacactaaggaggtgataacaaactctatcacccagccaacactccacagttttgatgccgcccaatctcgagtgtaccagttgatggaacaagattcctacacacggtttttgaagtctgatatatacctagatcttatggagggacgcccgcagagacctaccaatctccgacgtcgctcccgcagtttcacatgcaatgagttccaggatgtgcagtccgacgttgccatatggctttag

SEQ ID NO: 234055 - DNA, 708 bp, Artificial Sequence
  derived and/or modified sequence
atggagaccacactcctattcttcagccagatcaacatgtgtgagtccaaggaaaaaacattcttcaagttaattcacggaagcggtaaggaagagacaagtaaggaagccaaaatcagggctaaagagaagcgcaaccgtctgtctctgttagttcaaaagcccgaatttcacgaagatacccggagcagtcggtcgggtcacctggcaaaggaaaccagagtgagccctgaggaagccgtcaagtggggcgagtcctttgataagctactgtcccacagagacggattagaagccttcacacgattcctgaagaccgaattctctgaagagaacatcgagttttggattgcttgcgaagacttcaaaaagagtaaagggccacagcagatccacctgaaggctaaggcaatctatgagaagttcattcagacagacgccccaaaggaggtgaaccttgatttccacaccaaggaagtcattaccaacagtatcacacaacccacactgcactctttcgacgcagcccaaagcagggtttaccagttgatggagcaggatagctacacccggttcttgaaatctgacatttatctggacttgatggagggtagaccacaaaggcccacgaacctgaggaggcgctcccgctcgttcacctgtaacgaatttcaggatgtgcagagcgacgtggccatatggctctag

SEQ ID NO: 234056 - DNA, 2150 bp, Artificial Sequence
  derived and/or modified sequence
tcctcagttctgcatttctgcagagacagaaagaaacgcagctcttgacttcttttttgtaaacattactgtaagagttgtgataactttttattctactatgtatatgtatggaatagtattaataaatgaactagggaaggatgtaataaattagacatctcttcattttagagagaagatggaaacaacattgcttttcttttctcaaataaatatgtgtgaatcaaaagaaaaaacttttttcaagttaatacatggttcaggaaaagaagaaacaagcaaagaagccaaaatcagagctaaggaaaaaagaaatagactaagtcttcttgtgcagaaacctgagtttcatgaagacacccgctccagtagatctgggcacttggccaaagaaacaagagtctcccctgaagaggcagtgaaatggggtgaatcatttgacaaactgctttcccatagagatggactagaggcttttaccagatttcttaaaactgaattcagtgaagaaaatattgaattttggatagcctgtgaagatttcaagaaaagcaagggacctcaacaaattcaccttaaagcaaaagcaatatatgagaaatttatacagactgatgccccaaaagaggttaaccttgattttcacacaaaagaagtcattacaaacagcatcactcaacctaccctccacagttttgatgctgcacaaagcagagtgtatcagctcatggaacaagacagttatacacgttttctgaaatctgacatctatttagacttgatggaaggaagacctcagagaccaacaaatcttaggagacgatcacgctcatttacctgcaatgaattccaagatgtacaatcagatgttgccatttggttataaagaaaattgattttgctcatttttatgacaaacttatacatctgcttctaacatatcgcatgtttatgttaagatttggtcccatcctttaaactgaaatatgtcatgtgaaattattttaaaaatgtaaaaacaaaactttctgctaacaaaatacatacagtatctgccagtatattctgtaaaaccttctatttgatgtcattccatttataatcagaaaaaaaacttatttcttaatcaaaaggcagtacaaaaaaagtaataatgttttataagattgtagagttaagtaaaagttaagcttttgcaaagttgtcaaaagttcaaacaaaagtctagttgggattttttaccaaagcagcataatatgtgttatataaacataataatactcagatatccaaatgttcagatagcatttttcataatgaatgttctcttttttttggtaatagtgtagaagtgatctggttcttacaatgggagatgaagaacatttattattgggttactactaaccctgtcccaagaatagtaatatcacctctagttataagccagcaacaggaacttttgtgaagacacattcatctctacagaacttcagattaaatataatctagattaatgactgagaataagatccacatttgaactcattcctaagtgaacatggacgtacccagttatacaaagtacttctgttggtcacagaaacatgaccagattttgcatatctccaggtagggaactaagtagactaccttatcaccggctaagaaaacttgctactaaactattaggccatcaatggcttgaataaaaaccagagaaggtttttcccaggacgtctcatgtttggccctttagaattggggtagaaatcagaaatgagatgaggggaagaagcaaggagtctaaggccctagcgatttgggcatctgccacattggttcatattcagaaagtgttatctcattgattatattcttgttaagcaaatctccttaagtaattattattcaaataagattatactcatacatctatatgtcactgttttaaagagatatttaatttttaatgtgtgttacatggtctgtaaatatttgtatttaaaaatgccatgcattaggctttggaaatttaatgttagttgaaatgtaaaatgtgaaaactttagatcatttgtagtaataaatatttttaacttcattcatacagttaagtttatctgacaataaaagctctgactgaa

SEQ ID NO: 234057 - DNA, 849 bp, Artificial Sequence
  derived and/or modified sequence
atggagatggtgcagaagctgcagaaggtgggcagcctggagcccagagtggaggtgctgatcaacagaatcaacgaggtgcagcaggccaagaagaaggccaacaaggacctgggcgaggccagaaccatctgcgaggccctgcagaaggagctggacagcctgcacggcgagaaggtgcacctgaaggagatcctgagcaagaagcaggagaccctgagaatcctgagactgcactgccaggagaaggagagcgaggcccacagaaagcacaccatgctgcaggagtgcaaggagagaatcagcgccctgaacctgcagatcgaggaggagaagaacaagcagagacagctgagactggccttcgaggagcagctggaggacctgatgggccagcacaaggacctgtgggacttccacatgcccgagagactggccaaggagatctgcgccctggacagcagcaaggagcagctgctgaaggaggagaagctggtgaaggccaccctggaggacgtgaagcaccagctgtgcagcctgtgcggcgccgagggccccagcaccctggacgagggcctgttcctgagaagccaggaggccgccgccaccgtgcagctgttccaggaggagcacagaaaggccgaggagctgctggccgccgccgcccagagacaccagcagctgcagcagaagtgccagcagcagcagcagaagagacagagactgaaggaggagctggagaagcacggcatgcaggtgcccgcccaggcccagagcacccaggaggaggaggccggccccggcgacgtggcccccagacccggcagacccgtgacctggtggagctag

SEQ ID NO: 234058 - DNA, 849 bp, Artificial Sequence
  derived and/or modified sequence
atggagatggtgcagaagctccaaaaggttgggtctctagagccccgggtggaggtgctgattaaccgaatcaatgaggtgcagcaagccaaaaaaaaagcgaacaaggatctcggcgaggcccggacgatttgtgaagccctccagaaggaattagactcactccacggcgagaaggttcaccttaaagagattctgtcgaaaaagcaagagacacttagaatcctgcggttacactgtcaggagaaggagtcggaagcccacagaaagcatacgatgttgcaggagtgcaaagagcgcattagtgcattgaaccttcaaatcgaggaagaaaagaataagcagagacagttgagacttgcatttgaagaacagttggaagatctgatgggtcagcataaggatctctgggatttccatatgcctgagaggctcgcaaaagagatctgtgccttagactctagcaaggagcaattactaaaagaggagaagctggtgaaagcgactctagaagacgtgaagcatcagctctgctcactgtgcggggccgaagggcccagcacgctggatgagggccttttcctgaggtcacaggaggcagctgccactgttcagctttttcaggaagaacatcgcaaagctgaagagcttctggccgccgctgcccagcgccaccaacagctccagcaaaaatgccaacagcagcagcagaagcggcagagacttaaggaagagctagagaaacatggaatgcaagtgccagcgcaagcccaatccacacaggaggaggaggctggtccgggagatgtcgctccaagacccggaaggcccgtaacatggtggagttag

SEQ ID NO: 234059 - DNA, 849 bp, Artificial Sequence
  derived and/or modified sequence
atggagatggtacaaaagcttcagaaggtgggcagtctggagccacgagtggaagtcctgatcaatagaatcaatgaggtgcagcaagccaagaagaaagccaataaggacttaggggaggcgcggaccatttgcgaggccctgcaaaaagaactcgatagcctccacggcgagaaagtacatttgaaagaaattctgagcaagaagcaggagacccttcgcattctgcgcctgcattgccaagagaaggaatcagaggcccatcgcaagcacactatgttgcaagagtgtaaggagaggatcagcgcccttaacctccagatagaggaggaaaaaaacaagcaacggcagctcagactcgcctttgaggaacagctggaggatcttatgggtcaacataaagatctgtgggactttcacatgccggaaagactggccaaggagatctgtgccttggattctagtaaagaacaactactgaaggaagagaagctggttaaggccaccctggaggacgtgaagcatcagctttgttccctctgtggcgccgagggtccttcaactcttgacgagggtcttttcttgcgttctcaggaggctgcagctaccgttcagctgtttcaagaggaacaccgaaaagcggaggagttgctggctgctgccgcacaacgccatcagcaattacagcaaaaatgtcagcagcagcagcagaaacggcaaaggttaaaagaggaattagagaagcacggcatgcaggttcccgctcaggctcaatcgacccaggaagaggaggctgggcctggagacgtggctcctaggcccggaagaccagtgacctggtggagctag

SEQ ID NO: 234060 - DNA, 849 bp, Artificial Sequence
  derived and/or modified sequence
atggagatggtgcagaagctgcagaaggtgggcagcctggagccccgggtggaggtgctgatcaaccgcatcaatgaggtgcagcaggccaagaagaaggccaacaaggacctgggggaggcccggaccatctgtgaggccctgcagaaggagctggacagcctgcacggggagaaggtgcacctgaaggagatcctgagcaagaagcaggagaccctgcgcatcctgcggctgcactgccaggagaaggagagcgaggcccacaggaagcacaccatgctgcaggagtgcaaggagcgcatcagcgccctgaacctgcagatcgaggaggagaagaacaagcagaggcagctgcggctggcctttgaggagcagctggaggacctgatgggccagcacaaggacctgtgggacttccacatgcctgagcggctggccaaggagatctgtgccctggacagcagcaaggagcagctgctgaaggaggagaagctggtgaaggccaccctggaggatgtgaagcaccagctgtgcagcctgtgtggggctgagggccccagcaccctggatgagggcctcttcctgcggagccaggaggccgccgccaccgtgcagctgttccaggaggagcacaggaaggccgaggagctgctggccgctgctgcccagaggcaccagcagctgcagcagaagtgccagcagcagcagcagaagaggcagaggctgaaggaggagctggagaagcacggcatgcaggtgcctgcccaggcccagagcacccaggaggaggaggccggccctggagatgtggccccccggcccggccggcctgtgacctggtggagctag

SEQ ID NO: 234061 - DNA, 849 bp, Artificial Sequence
  derived and/or modified sequence
atggagatggtgcagaagctgcagaaggtgggcagcctggagcccagggttgaggtgctcatcaataggatcaatgaggttcagcaagctaaaaagaaggcgaataaagacctcggggaggccaggacaatctgtgaagcacttcagaaagaacttgactccctccacggagaaaaagttcaccttaaggaaatcctgtcaaaaaaacaggagaccctgcgcatcttgcgattgcactgccaggaaaaagagtccgaggcacatagaaaacatactatgttgcaagaatgtaaggaaaggatctcagcactgaacctgcagattgaggaggaaaagaacaagcagaggcagctgcgcttagcgtttgaagaacagttagaagatctcatgggccagcacaaggacctgtgggatttccacatgccagagcggctggctaaggaaatttgtgccctagattcctccaaagagcagcttctgaaagaagagaagctggtcaaggctacactggaagatgtcaagcaccaactctgtagcctctgcggcgctgaaggcccatccaccctcgacgaggggttgttcctccggagccaggaggccgcagccactgtccagctgtttcaggaagagcacaggaaggcggaggagctgcttgccgccgccgcccagagacaccagcagctgcagcagaagtgccaacagcaacagcagaaacgccagcgcctgaaagaggagctggaaaagcatgggatgcaggtgccagctcaggcacagtccacacaagaagaggaggctggcccaggggacgtggctccacgcccagggaggcctgtgacgtggtggagctag

SEQ ID NO: 234062 - DNA, 849 bp, Artificial Sequence
  derived and/or modified sequence
atggagatggtgcagaagctgcagaaggtgggcagcctggagcccagagtagaagtgctgatcaaccgaataaatgaagtgcaacaagcaaaaaagaaggccaataaagatcttggtgaagccagaaccatctgcgaggcgttgcagaaagagctcgattctctccacggcgaaaaagtccacctgaaagaaattcttagcaaaaaacaggagactctgagaattctgcgactgcactgtcaagagaaggagagcgaggctcaccgaaaacatacgatgcttcaggagtgcaaggaaagaatatccgcgttgaaccttcagattgaagaggagaaaaacaaacagaggcagctgcgcttggcatttgaagagcagctggaggatctgatggggcaacacaaggacttgtgggacttccacatgcctgagcggctagctaaagagatctgcgccctggattcttctaaggaacagctgctaaaggaagaaaaattagtcaaggctaccctggaagacgttaaacaccagctctgtagcctatgtggcgccgaagggccgtcaacattggatgagggactctttctgaggtctcaggaagcagctgcgacagtacagctgtttcaggaggaacatagaaaagctgaagagttattagcagccgctgcccagcggcatcagcagctgcagcaaaaatgccagcagcagcagcagaaacggcaacgccttaaagaggagctcgaaaagcatggaatgcaggtgcccgcccaagcacagagcacccaggaggaagaggcaggaccaggcgacgttgccccaagaccagggcggccagtgacatggtggtcctag

SEQ ID NO: 234063 - DNA, 849 bp, Artificial Sequence
  derived and/or modified sequence
atggagatggtacagaagctgcagaaggtggggagcttggaacccagggtcgaggtgcttataaacagaatcaatgaggtgcagcaggccaagaaaaaggcaaacaaggatttgggtgaagctaggactatatgcgaggcattgcagaaggagctagattcactgcacggggaaaaggtccacctcaaggaaatccttagcaaaaagcaggaaacactacggatcttacgtctgcattgccaggaaaaggagtccgaagctcatcgaaaacatactatgctccaagaatgtaaggaacgcattagtgctttgaacctccaaatcgaggaggaaaaaaacaaacagcggcaattgagactggccttcgaagagcagctggaggatcttatgggtcagcacaaggatctatgggattttcatatgcctgaacgcctggcgaaagagatctgtgcactggattcaagtaaagaacagctgctcaaggaagagaagcttgtgaaagctaccttggaagatgtaaaacaccaactgtgctctttatgcggcgcagaaggccctagtacactggacgagggcttatttctacgcagtcaggaagccgctgcgaccgttcaactgttccaggaagagcacaggaaggcagaagaattgctggcagctgcggcacaacgtcatcaacagttgcagcagaaatgtcagcagcagcagcaaaagcggcagcgcctcaaggaagagctggagaagcatgggatgcaggtgcctgcacaggcccagtctactcaggaggaagaagcaggccctggagatgtggccccacgcccaggccgtccagttacatggtggtcatag

SEQ ID NO: 234064 - DNA, 849 bp, Artificial Sequence
  derived and/or modified sequence
atggaaatggtgcagaagttgcagaaggtgggttctcttgaacccagagttgaggtcctgatcaacaggataaatgaggtgcagcaggctaagaaaaaagctaacaaagatcttggtgaagccagaactatctgtgaagccctccaaaaagagctggatagtctccatggagaaaaagtccacctgaaggagatcctgagcaagaagcaagagacactgcggatattgagattgcactgccaggaaaaggaatccgaggctcatcgcaagcacactatgctgcaggaatgcaaagagcgcattagcgcattgaacttgcagatcgaggaagagaagaacaagcagcggcagctgcgattggccttcgaggaacagcttgaggacctgatgggacagcacaaagacctatgggacttccacatgcctgagcggcttgccaaggagatttgcgccctggactcgtcgaaggaacagcttctcaaagaggaaaaattagtgaaagctacactggaagatgtgaagcatcaactatgctctctgtgtggcgcagaaggcccaagcaccctggacgaaggactcttcctccggtcgcaggaggcagccgcaaccgtgcaactgtttcaggaggagcaccgcaaggccgaggaactgctggccgcagcagctcaaaggcaccagcagctgcagcagaagtgtcagcaacagcaacaaaagagacaacgcctgaaagaggagctcgagaagcacggcatgcaggtgccggctcaggcccagtcaacacaggaagaggaagctggaccaggcgacgtagctcctcggcctgggcgaccagtgacatggtggtcatag

SEQ ID NO: 234065 - protein, 445 aa, Artificial Sequence
  derived and/or modified sequence
MNESPQTNEFKGTTEEAPAKESPHTSEFKGAALVSPISKRIFGVFLVLLDVTLLLADLIFTDSKLYIPLEYRSISLAIGLFFLMDVLLRVFVEGWTHLVRLLRLIILIRIFHLLHQKRQLEKLMRRLVSENKRRYTRDGFDLDLTYVTERIIAMSFPSSGRQSFYRNPIEEVVRFLDKKHRNHYRVYNLCSERAYDPKHFHNRVSRIMIDDHNVPTLHEMVVFTKEVNEWMAQDLENIVAIHCKGGKGRTGTMVCALLIASEIFLTAEESLYYFGERRTNKTHSNKFQGVETPSQNRYVGYFAQVKHLYNWNLPPRRILFIKRFIIYSIRGDVCDLKVQVVMEKKVVFSSTSLGNCSILHDIETDKILINVYDGPPLYDDVKVQFFSSNLPKYYDNCPFFFWFNTSFIQNNRLCLPRNELDNPHKQKAWKIYPPEFAVEILFGEK

SEQ ID NO: 234066 - DNA, 1338 bp, Artificial Sequence
  derived and/or modified sequence
atgaacgagagcccccagaccaacgagttcaagggcaccaccgaggaggcccccgccaaggagagcccccacaccagcgagttcaagggcgccgccctggtgagccccatcagcaagagaatcttcggcgtgttcctggtgctgctggacgtgaccctgctgctggccgacctgatcttcaccgacagcaagctgtacatccccctggagtacagaagcatcagcctggccatcggcctgttcttcctgatggacgtgctgctgagagtgttcgtggagggctggacccacctggtgagactgctgagactgatcatcctgatcagaatcttccacctgctgcaccagaagagacagctggagaagctgatgagaagactggtgagcgagaacaagagaagatacaccagagacggcttcgacctggacctgacctacgtgaccgagagaatcatcgccatgagcttccccagcagcggcagacagagcttctacagaaaccccatcgaggaggtggtgagattcctggacaagaagcacagaaaccactacagagtgtacaacctgtgcagcgagagagcctacgaccccaagcacttccacaacagagtgagcagaatcatgatcgacgaccacaacgtgcccaccctgcacgagatggtggtgttcaccaaggaggtgaacgagtggatggcccaggacctggagaacatcgtggccatccactgcaagggcggcaagggcagaaccggcaccatggtgtgcgccctgctgatcgccagcgagatcttcctgaccgccgaggagagcctgtactacttcggcgagagaagaaccaacaagacccacagcaacaagttccagggcgtggagacccccagccagaacagatacgtgggctacttcgcccaggtgaagcacctgtacaactggaacctgccccccagaagaatcctgttcatcaagagattcatcatctacagcatcagaggcgacgtgtgcgacctgaaggtgcaggtggtgatggagaagaaggtggtgttcagcagcaccagcctgggcaactgcagcatcctgcacgacatcgagaccgacaagatcctgatcaacgtgtacgacggcccccccctgtacgacgacgtgaaggtgcagttcttcagcagcaacctgcccaagtactacgacaactgccccttcttcttctggttcaacaccagcttcatccagaacaacagactgtgcctgcccagaaacgagctggacaacccccacaagcagaaggcctggaagatctacccccccgagttcgccgtggagatcctgttcggcgagaagtag

SEQ ID NO: 234067 - DNA, 1338 bp, Artificial Sequence
  derived and/or modified sequence
atgaacgaatcccctcagactaatgaattcaagggcactaccgaggaggccccagctaaagagagcccccacactagcgagtttaagggggcagccctggtgagccccataagcaagcgcatattcggcgtctttctagttcttctggacgtgactctgctgctggcagaccttatttttactgattccaaattatatatccccctcgagtatcggtctatatcactcgctatcggtttattctttttgatggatgtgttgcttcgggtgttcgttgaaggctggactcatctcgtcaggctcctgagattaatcatcctgatccgcattttccaccttttacaccagaagcggcagttggagaagttgatgaggcggctagtgtctgagaacaagcgccggtatacaagagatggttttgatctggacctgacatatgtgacagaacggatcatcgcaatgtcattcccctctagtgggagacagtcattttaccgtaatcctattgaagaggttgtgagattcttggataagaaacaccgcaaccattatcgggtatacaatttgtgttcagagagagcctacgacccgaaacatttccacaatcgagtctcacgtataatgattgacgatcacaatgtgccaaccctgcacgaaatggtcgtattcactaaggaggtgaatgagtggatggctcaggatcttgagaacattgttgccatacactgcaagggaggaaagggtcggacaggcacaatggtatgcgcccttctcatcgcatctgaaattttcttaaccgcggaggagtctctgtattatttcggagaacgaagaaccaacaagactcactctaacaagtttcagggggtggaaacaccgtcacagaatagatacgtgggatattttgctcaggttaagcacctttataactggaatcttcccccacgcaggattttatttattaaacggttcattatttacagcatccgcggggacgtctgtgacctgaaagtgcaagttgtgatggaaaagaaggtggtgtttagctccacatccctggggaattgctccattctacatgacatagagacagacaaaatcttaatcaacgtttacgatgggcctccactgtacgacgacgtgaaggtccagttcttctcctccaacctccccaagtattatgacaactgccccttcttcttttggttcaatacttctttcattcagaacaatagattatgtcttccaaggaacgagctcgacaatccacacaagcaaaaagcttggaagatctatcctccagaattcgccgtggagattctgttcggggaaaaatag

SEQ ID NO: 234068 - DNA, 1338 bp, Artificial Sequence
  derived and/or modified sequence
atgaatgagtcaccgcagaccaacgagtttaagggcacaactgaagaagcacctgcaaaagagagcccccatacctccgaatttaaaggagccgccctggtgtcgcccatctccaaacgtatttttggagtctttctggtgcttctagacgttactctgctgcttgctgatctcatatttactgacagcaagctgtacatccccttagagtatcgaagcatcagcctcgcaatcgggctgttctttttaatggatgttctgctgcgagtttttgtcgaaggctggacacatctggtccgtcttctgcgactcattatcctaataagaatcttccacctcttgcatcagaagcggcagctggagaaacttatgcgaagactagtgagtgaaaacaagcgtaggtataccagggatggtttcgacctggacttgacttacgtgaccgagaggattattgctatgtccttcccatcgagcggcagacagtccttctatcgtaatcccatcgaggaggtggtccgtttcctcgataagaaacaccgcaatcattatagggtatacaacctttgctctgagcgtgcatacgacccaaaacatttccacaacagggtgtcccgcattatgattgatgatcacaatgttcccactctgcatgagatggtggtgtttactaaggaggtaaatgagtggatggctcaggatctggaaaacatcgtagcgatccattgtaaaggcggcaagggtcgtactggaacaatggtctgcgcattgctgattgcgtccgagatttttctgactgcagaggaatcactgtattactttggcgaaaggcgaaccaacaagacacatagtaacaagttccagggcgttgaaaccccatcccagaacagatatgtcggatatttcgctcaggtgaagcacctgtataactggaacctccctcccaggaggattctcttcattaaacgattcattatctattccattcgcggtgatgtatgtgacttgaaggtgcaggtggtaatggagaaaaaagtcgtctttagcagcacatccctcggtaactgttccattttacatgatattgagactgataagattctgatcaacgtctacgacggccctccactttacgatgatgtgaaggttcaatttttttcatccaacctccctaagtattatgataattgcccgttttttttctggtttaataccagctttattcagaataatcggctttgcctgccacggaacgaattggacaacccccataagcaaaaagcatggaaaatctaccctcccgagttcgccgtggaaattctgttcggagaaaaatag

SEQ ID NO: 234069 - DNA, 1338 bp, Artificial Sequence
  derived and/or modified sequence
atgaatgaaagcccccagaccaatgagttcaagggcaccacagaggaggccccagccaaggagagcccccacaccagcgagttcaagggagctgccctggtgagccccatcagcaagaggatctttggagtcttcctggtgctgctggatgtgaccctgctgctggccgacctgatcttcacagacagcaagctgtacatccccctggagtaccgcagcatcagcctggccatcggcctcttcttcctgatggatgtgctgctgcgggtgtttgtggagggctggacccacctggtgcggctgctgcggctcatcatcctgatccgcatcttccacctgctgcaccagaagaggcagctggagaagctgatgaggcggctggtgtctgagaacaagaggcgctacaccagagatggctttgacctggacctgacctacgtgacagagcgcatcatcgccatgtccttccccagcagcggccggcagagcttctacagaaaccccatcgaggaggtggtgcgcttcctggacaagaagcacaggaaccactacagagtgtacaacctgtgcagcgagcgggcctatgaccccaagcacttccacaacagagtgagccgcatcatgattgatgaccacaacgtgcccaccctgcacgagatggtggtgttcaccaaggaggtgaatgagtggatggcccaggacctggagaacatcgtggccatccactgcaagggcggcaaaggaagaacaggcaccatggtgtgtgccctgctgattgccagcgagatcttcctgacagctgaggagagcctgtactactttggagagaggaggaccaacaagacccacagcaacaagttccagggcgtggagacccccagccagaaccgctacgtgggctactttgcccaggtgaagcacctgtacaactggaacctgcccccccggcgcatcctcttcatcaagcgcttcatcatctacagcatcagaggagatgtgtgtgacctgaaggtgcaggtggtgatggagaagaaggtggtgttcagcagcaccagcctgggcaactgcagcatcctgcatgacatcgagacagacaagatcctgatcaacgtgtatgatggcccccccctgtatgatgatgtgaaggtgcagttcttcagcagcaacctgcccaagtactatgacaactgccccttcttcttctggttcaacaccagcttcatccagaacaaccggctgtgcctgcccagaaatgagctggacaacccccacaagcagaaggcctggaagatctacccacctgagtttgctgtggagatcctgtttggagagaagtag

SEQ ID NO: 234070 - DNA, 1338 bp, Artificial Sequence
  derived and/or modified sequence
atgaacgagagcccccagaccaacgagttcaagggcaccaccgaggaggctccggccaaagagagcccccacacatccgagtttaagggcgccgccctggtcagcccgatttccaagcgtattttcggcgtgttcctggtcctgctggacgttaccctgctcctggccgatttgatcttcactgatagcaaactgtatatccctctcgagtataggagcatctccttagcaattggcctctttttcttgatggatgtgctcttgagagtttttgttgagggatggacccaccttgtcagactgctccggctgataatcttgattcggatctttcacctgttgcaccagaaacggcagctggagaaacttatgcgtcggctggtaagtgagaataagcggagatatacacgcgacggatttgacctcgatcttacatacgtgactgaaaggatcattgctatgtcctttccctcctccggacgacaatccttctatcggaatccaatagaggaggtcgtgagattcctggacaaaaaacatcggaatcattaccgcgtttacaatctgtgctctgaaagagcttacgacccaaaacacttccacaaccgcgtttcgagaatcatgattgacgatcacaatgtgccaactctgcacgaaatggtggtattcacgaaggaggtgaatgaatggatggcacaggatctggaaaatatagtggccatacactgtaaagggggaaaaggtcggactggtacgatggtgtgtgcgctacttatagcctctgagatcttcctaaccgcagaggagtccctatactacttcggcgaacgccgaactaataagacccacagtaacaaattccagggtgtagagaccccttcccaaaatcgctatgtggggtactttgcgcaggtaaaacacttgtataactggaatctgcccccacgaagaatactttttattaagcgctttattatatactctatccgcggggacgtctgcgacttgaaagtccaggtggtgatggagaaaaaagtggtgttctcaagcactagcttagggaactgctccatcctccatgacattgaaactgataagatattgatcaatgtctatgacgggccccccctgtacgatgatgtcaaggtacagttcttctcatccaatctccccaagtattatgataactgccctttcttcttttggttcaatacttccttcatccagaacaacagactctgtttacccaggaacgaactggacaaccctcataagcagaaagcatggaagatttacccacctgaattcgcagtggagattctgttcggcgaaaagtag

SEQ ID NO: 234071 - DNA, 1338 bp, Artificial Sequence
  derived and/or modified sequence
atgaacgagagcccccagaccaacgagttcaagggcaccaccgaggaagctccggcaaaggagtcgcctcacacttccgaattcaaaggagctgccctggtgagccctatatctaagaggatattcggagtgtttctggtgttgcttgatgtcactttattactggccgacttgattttcacagattccaagctctacatacctctcgagtaccggagcataagcctcgctatcggcctcttctttctgatggatgtactcttaagagtgttcgtggagggatggactcacctcgtgaggctgctcagattgattatactgattcgcatttttcacctgctgcatcagaagcggcagctggaaaaactgatgagaaggcttgtgtcagagaacaaacggaggtatacccgggacgggtttgatctggatcttacatacgtgacagaacgtatcatcgcaatgtcttttcctagcagcggtagacagtcattttacagaaacccaatcgaagaagttgtgcgatttctcgataaaaaacatagaaaccattacagggtctataatctgtgttcggagagggcctacgacccaaagcatttccacaatcgggtctcgcggattatgatcgatgaccacaacgtgcccactttacatgagatggtcgttttcaccaaggaggtcaatgaatggatggcccaggacctcgagaatatcgtcgccattcattgcaaaggaggtaaagggcgcaccggaacgatggtttgtgctcttttaattgctagcgaaatttttctgaccgctgaggagagcctctattacttcggcgaaaggcgaacgaacaagacacattccaacaaattccagggtgtggaaacgccatcccagaaccgatacgtgggttatttcgcacaagtaaagcatctctataattggaatttaccgcctcgtcggattctgtttatcaagcggttcattatatactctattcgtggtgatgtgtgcgacctcaaagtgcaggtggtgatggagaaaaaggtggtgttttcttctacctcccttggcaattgctcaatcttgcatgatatcgaaaccgataagatattgataaatgtttacgacggaccccccctgtacgacgatgtgaaagtacagttctttagcagcaacctgcccaagtactacgacaattgtccgttcttcttttggtttaacactagctttatccagaacaaccggctctgtctgccaaggaatgagttggacaatcctcacaagcaaaaagcctggaagatatatccacctgagtttgccgttgaaatcctttttggagagaagtag

SEQ ID NO: 234072 - DNA, 1338 bp, Artificial Sequence
  derived and/or modified sequence
atgaatgagagcccccaaactaatgagtttaaagggacaacagaagaggcaccagccaaagaatcgcctcatacctcggagttcaagggagccgcacttgtatctcctatcagtaaacggatctttggcgtgttcctggtgctgctcgatgtgactctcctccttgcagatctgattttcaccgacagcaagctttatatccccttagagtataggtcaatatccctcgctatcggccttttctttctcatggatgtcctgttgcgggtgtttgtcgaagggtggacccatctggtgcgtctgcttaggctgatcattcttatccgaatcttccatttactgcaccagaagcgccagctggagaaactgatgcggaggcttgtatccgaaaacaaaaggcgctacactagggatgggttcgatttggatctaacatacgtcaccgagcgaatcatcgctatgagctttccgtcttcaggccgacagtctttctacagaaacccaatcgaagaggttgtgaggtttctggataaaaagcataggaaccactaccgtgtgtacaacttgtgttctgaaagggcctatgaccctaagcactttcacaacagggtctcaaggatcatgatagatgaccataacgtgccgacccttcatgagatggtggttttcacaaaggaagtgaacgaatggatggcccaggacctcgagaacatcgtggcaatccattgcaagggcggaaagggcaggacaggaacaatggtgtgtgcccttctgattgctagcgagatattcctgacagctgaggaatccctgtactatttcggggagcgaagaacaaataaaacacattctaataagttccaaggagtggagacccccagccagaatcggtacgtagggtacttcgctcaggttaagcacctgtacaactggaatttaccccctcggcgtatccttttcatcaaacggtttataatttacagcatccgcggagacgtctgcgacttgaaggtgcaagtcgtgatggaaaaaaaagtggtattctcatctacctccttaggtaactgttcaattctgcacgacatcgagacagacaagatcctgatcaacgtatacgatggcccacccttgtatgacgatgtgaaggttcagttcttttctagtaatcttccgaaatactatgataactgtccgttcttcttttggtttaacacatcctttattcaaaacaaccgactgtgtcttcccagaaatgaactagataacccgcacaagcaaaaggcttggaagatctaccctccggaatttgccgtggagattctctttggggagaagtag

SEQ ID NO: 234073 - DNA, 1338 bp, Artificial Sequence
  derived and/or modified sequence
atgaacgagagtccccaaacaaacgagtttaagggtactacagaggaagctcctgccaaagagagccctcacaccagtgagttcaaaggtgctgcgctggtaagtcctatctctaagcggatcttcggtgtcttcttggtactgctcgatgtgacactcctgcttgctgacctgattttcaccgactcgaagttgtacattcctctcgaatatcgttcaatcagcctcgcgattggccttttcttcctaatggatgtcttgctgcgagtgtttgttgagggctggacacacctggtgcggttgctgcgcctcatcatcctgatccggattttccatttgcttcatcagaagcgccagcttgagaaactgatgaggcggttagtaagtgagaacaagcggagatatactagggatggtttcgacctcgatctcacctacgtgacagaacgtatcatagcaatgtcattcccttcatctggcaggcagtcattttatagaaacccaatagaggaggtggttaggttcctggataagaagcatcgcaaccactatagagtttataatctatgctccgagagggcctacgatcctaaacacttccacaatagggtgagtcggattatgattgatgatcacaacgtgcccacgctgcatgaaatggttgtgtttacaaaagaagttaacgagtggatggcacaggatctcgagaatatcgtggccatacattgcaaaggcggaaagggtcggaccggcaccatggtgtgcgcacttctgattgccagtgagatctttttgactgcagaggaaagcctgtattatttcggggagcgcaggacgaacaaaacgcacagcaacaagtttcagggagtagagacaccttcccaaaataggtatgtgggatattttgctcaggtaaagcatctctacaactggaacctgcccccacgacgcatactattcatcaagcggtttatcatttattccatccgcggagatgtgtgtgacttgaaagtgcaggtggtgatggaaaaaaaggtggtattctcttcaactagcctcggcaactgttccattttacacgacatcgagacagataagatcctgatcaacgtatacgacggaccacccctgtatgatgatgtgaaggttcagtttttttcgagtaatctgcccaaatattacgacaattgcccttttttcttctggtttaacacatcttttattcagaacaaccggctgtgcctaccaaggaatgagctggataacccacataagcagaaggcctggaagatctaccctcccgaattcgcagtggaaatcctctttggggagaagtag

SEQ ID NO: 234074 - DNA, 1562 bp, Artificial Sequence
  derived and/or modified sequence
agtccacccacaaatgaattatcaggagtgaacccagaggcacgtatgaatgaaagtccacagacaaacgaatttaaaggaacaaccgaggaggcacctgcgaaagaaagcccacacacaagtgaatttaaaggagcagccctggtgtcacctatcagtaaaagaatatttggagttttcctggtcttactggatgtcactctcctccttgccgacctaattttcactgacagcaaactttatattcctttggagtatcgttctatttctctagctattggcttattttttctcatggatgttcttcttcgagtatttgtagaaggatggacacatttagttcgacttctacgacttattattctgataagaatttttcatctgcttcatcaaaaaagacaacttgaaaagctgatgagaaggctggtttcagaaaacaaaaggcgatacacaagggatggatttgacctagacctcacttacgttacagaacgtattattgctatgtcatttccatcttctggaaggcagtctttctatagaaatccaattgaggaagttgtgcggtttctagataagaaacatcgaaaccactatcgagtctacaatctatgcagtgaaagagcttatgatcctaagcacttccataatagggtcagtagaatcatgattgatgatcataatgtccccactctacatgagatggtggttttcaccaaggaagtaaatgagtggatggctcaagatcttgaaaacatcgtagcgattcactgtaaaggaggcaaaggaagaaccgggactatggtttgtgccctccttattgcctccgaaatatttttaactgccgaggaaagcctatattattttggagaaaggcgaaccaataaaacccacagcaataaatttcagggagtagaaactccttctcagaatagatatgttggatattttgcacaagtgaaacatctctacaactggaatctccctccaagacggatactctttataaaaagattcattatttattcgattcgtggtgatgtatgtgatctaaaagtccaagtagtaatggagaaaaaggttgtcttttccagtacttcattaggaaattgttcgatattgcatgacattgaaacagacaaaatattaattaatgtatatgacggtccacctctgtatgatgatgtgaaagtgcagtttttctcttcgaatcttcctaaatactatgacaattgtccatttttcttctggttcaacacgtcttttattcaaaataacaggctttgtctaccaagaaatgaattggataatccacataaacaaaaagcatggaaaatttatccaccagaatttgctgtggagatactttttggcgagaaatgacttccaatgatgttgtagctggatccgactaagtatagctcccccttccccttctgggaaagaattatgttctttccaacccctgccacatgttcatgtgtcctaagtcttccttgatgatgcatctatatttatatatgtttatatatgttcttcataaatctattaaatatatatag

SEQ ID NO: 234075 - DNA, 1558 bp, Artificial Sequence
  derived and/or modified sequence
atgatcgaagcagtacaaatcaggggagaacgtgcccaagacctggagaactgataataaattgtggtttatccttgcaatggaacactatatggaagtgaaaatgattgaaatagagctatacacatcatcacagacaaatttcagaaacaacgctgagtgaaaaatccacccacaaatgaattatcaggagtgaacccagaggcacgtatgaatgaaagtccacagacaaacgaatttaaaggaacaaccgaggaggcacctgcgaaagaaagcccacacacaagtgaatttaaaggagcagccctggtgtcacctatcagtaaaagaatatttggagttttcctggtcttactggatgtcactctcctccttgccgacctaattttcactgacagcaaactttatattcctttggagtatcgttctatttctctagctattggcttattttttctcatggatgttcttcttcgagtatttgtagaaggatggacacatttagttcgacttctacgacttattattctgataagaatttttcatctgcttcatcaaaaaagacaacttgaaaagctgatgagaaggctggtttcagaaaacaaaaggcgatacacaagggatggatttgacctagacctcacttacgttacagaacgtattattgctatgtcatttccatcttctggaaggcagtctttctatagaaatccaattgaggaagttgtgcggtttctagataagaaacatcgaaaccactatcgagtctacaatctatgcagtgaaagagcttatgatcctaagcacttccataatagggtcagtagaatcatgattgatgatcataatgtccccactctacatgagatggtggttttcaccaaggaagtaaatgagtggatggctcaagatcttgaaaacatcgtagcgattcactgtaaaggaggcaaaggaagaaccgggactatggtttgtgccctccttattgcctccgaaatatttttaactgccgaggaaagcctatattattttggagaaaggcgaaccaataaaacccacagcaataaatttcagggagtagaaactccttctcagaatagatatgttggatattttgcacaagtgaaacatctctacaactggaatctccctccaagacggatactctttataaaaagattcattatttattcgattcgtggtgatgtatgtgatctaaaagtccaagtagtaatggagaaaaaggttgtcttttccagtacttcattaggaaattgttcgatattgcatgacattgaaacagacaaaatattaattaatgtatatgacggtccacctctgtatgatgatgtgaaagtgcagtttttctcttcgaatcttcctaaatactatgacaattgtccatttttcttctggttcaacacgtcttttattcaaaataacaggctttgtctaccaagaaatgaattggataatccacataaacaaaaagcatggaaaatttatccaccagaatttgctgtggagatactttttggcgagaaatgacttccaatga

SEQ ID NO: 234076 - protein, 495 aa, Artificial Sequence
  derived and/or modified sequence
MSMLVVFLLLWGVTWGPVTEAAIFYETQPSLWAESESLLKPLANVTLTCQAHLETPDFQLFKNGVAQEPVHLDSPAIKHQFLLTGDTQGRYRCRSGLSTGWTQLSKLLELTGPKSLPAPWLSMAPVSWITPGLKTTAVCRGVLRGVTFLLRREGDHEFLEVPEAQEDVEATFPVHQPGNYSCSYRTDGEGALSEPSATVTIEELAAPPPPVLMHHGESSQVLHPGNKVTLTCVAPLSGVDFQLRRGEKELLVPRSSTSPDRIFFHLNAVALGDGGHYTCRYRLHDNQNGWSGDSAPVELILSDETLPAPEFSPEPESGRALRLRCLAPLEGARFALVREDRGGRRVHRFQSPAGTEALFELHNISVADSANYSCVYVDLKPPFGGSAPSERLELHVDGPPPRPQLRATWSGAVLAGRDAVLRCEGPIPDVTFELLREGETKAVKTVRTPGAAANLELIFVGPQHAGNYRCRYRSWVPHTFESELSDPVELLVAES

SEQ ID NO: 234077 - DNA, 1488 bp, Artificial Sequence
  derived and/or modified sequence
atgagcatgctggtggtgtttctgctgttgtggggggttacgtggggccctgtcaccgaggccgcaattttctacgagactcaacctagcctgtgggcagagtcagaatccctcctaaagcccctagcaaatgttacactaacctgtcaagcccacctggaaacgcctgattttcagcttttcaagaacggcgttgcacaggaacccgtgcatctcgatagcccagcaatcaagcaccagtttctccttactggcgacacacaagggaggtatagatgccggtctgggctgtcaacaggatggacccaactgtcgaaactgctggagctcaccgggcccaaatccctgcctgctccgtggctgtccatggcccctgtctcgtggatcaccccgggcctgaaaacaacggccgtctgcagaggcgtgctgaggggcgtcacttttttgctgcggcgcgagggcgaccacgaatttctcgaagtccccgaagcccaggaagatgtggaggcaacctttccggtccatcagccaggtaactacagctgctcttaccgaacagatggagaaggtgccttatcagagccatcggccactgtgactatcgaagagctcgctgcacccccgcctcctgtgctcatgcaccacggtgagtcatcacaagtgcttcaccctggaaataaggtaacgttaacgtgcgtggcaccactttccggcgtggacttccagctcagaagaggggaaaaggaattgctggtgcctaggtctagtacgagcccagacaggattttcttccatctcaacgccgttgctctgggcgatgggggtcactatacttgcaggtacagactacatgacaaccagaacggatggagtggagattccgctcccgtggaactgattctctccgatgagacactgccagcaccggagttttctccggagccagaatccggtcgcgcgttacgtttaagatgcctggcccctctggagggagcccgctttgctctagtgcgcgaggataggggcggcagaagagtccataggtttcagagtccagcaggcaccgaggcccttttcgagctgcataacatttcagttgccgatagcgccaactattcatgcgtatacgtggatctgaaacctccgttcggaggctcagcaccctcagagcgattagagcttcatgtggatggacctcctccacggcctcagttaagagccacttggtctggagcagtcttggctggtcgggatgccgtgctgagatgtgagggccctattcctgacgtgaccttcgaactcctgagggaaggcgagactaaggccgtgaagaccgtgcgcactccgggggccgctgccaacctggaactgatatttgtggggccgcagcatgcaggaaactatcgctgccggtataggtcatgggtgcctcacacttttgagagtgagctgtccgaccccgtcgaactgttggtggcagagtcatag

SEQ ID NO: 234078 - DNA, 1488 bp, Artificial Sequence
  derived and/or modified sequence
atgtccatgctggtggtgttcctgctgctgtggggcgtgacctggggccctgtgacagaagctgccatcttctatgagacccagcccagcctgtgggccgagagcgagagcctgctgaagcccctggccaacgtgaccctgacctgccaggcccacctggagaccccagacttccagctgttcaagaatggagtggcccaggagcctgtgcacctggacagccctgccatcaagcaccagttcctgctgaccggggacacccagggccgctaccgctgccgcagcggcctgagcacaggctggacccagctgagcaagctgctggagctgaccggccccaagagcctgcctgccccctggctgtccatggcccctgtgtcctggatcaccccaggcctgaagaccacagctgtgtgccggggcgtgctgcggggcgtgaccttcctgctgcggcgggagggggaccacgagttcctggaggtgcctgaggcccaggaggatgtggaggccaccttccctgtgcaccagcccggcaactacagctgcagctacagaacagatggagagggcgccctgtctgagcccagcgccaccgtgaccatcgaggagctggccgcccctcctcctcctgtgctgatgcaccacggggagagcagccaggtgctgcaccctggcaacaaggtgaccctgacctgtgtggcccccctgtctggagtggacttccagctgcggcggggggagaaggagctgctggtgcccaggagcagcaccagcccagaccgcatcttcttccacctgaatgctgtggccctgggagatggcggccactacacctgccgctaccgcctgcatgacaaccagaatggctggagcggggacagcgcccctgtggagctgatcctgagtgatgagaccctgcctgcccctgagttcagccctgagcctgagagcggccgggccctgcggctgcgctgcctggcccccctggagggcgccaggtttgccctggtgagagaagatcggggcggccggcgggtgcaccgcttccagagccctgctggaacagaggccctgtttgagctgcacaacatctctgtggccgacagcgccaactacagctgtgtgtatgtggacctgaagcccccatttggaggcagcgcccccagcgagcggctggagctgcacgtggatggccccccaccccggccccagctgcgggccacctggagcggggctgtgctggccggcagagatgctgtgctgcgctgtgagggccccatcccagatgtgacctttgagctgctgcgggagggggagaccaaggctgtgaagacagtgaggaccccaggagctgctgccaacctggagctgatctttgtgggcccccagcacgccggcaactaccgctgccgctaccgctcctgggtgccccacacctttgagagcgagctgagtgaccctgtggagctgctggtggccgagagctag

SEQ ID NO: 234079 - DNA, 1766 bp, Artificial Sequence
  derived and/or modified sequence
gggcctcattgctgcagacgctcaccccagacactcactgcaccggagtgagcgcgaccatcatgtccatgctcgtggtctttctcttgctgtggggtgtcacctggggcccagtgacagaagcagccatattttatgagacgcagcccagcctgtgggcagagtccgaatcactgctgaaacccttggccaatgtgacgctgacgtgccaggcccacctggagactccagacttccagctgttcaagaatggggtggcccaggagcctgtgcaccttgactcacctgccatcaagcaccagttcctgctgacgggtgacacccagggccgctaccgctgccgctcgggcttgtccacaggatggacccagctgagcaagctcctggagctgacagggccaaagtccttgcctgctccctggctctcgatggcgccagtgtcctggatcacccccggcctgaaaacaacagcagtgtgccgaggtgtgctgcggggtgtgacttttctgctgaggcgggagggcgaccatgagtttctggaggtgcctgaggcccaggaggatgtggaggccacctttccagtccatcagcctggcaactacagctgcagctaccggaccgatggggaaggcgccctctctgagcccagcgctactgtgaccattgaggagctcgctgcaccaccaccgcctgtgctgatgcaccatggagagtcctcccaggtcctgcaccctggcaacaaggtgaccctcacctgcgtggctcccctgagtggagtggacttccagctacggcgcggggagaaagagctgctggtacccaggagcagcaccagcccagatcgcatcttctttcacctgaacgcggtggccctgggggatggaggtcactacacctgccgctaccggctgcatgacaaccaaaacggctggtccggggacagcgcgccggtcgagctgattctgagcgatgagacgctgcccgcgccggagttctccccggagccggagtccggcagggccttgcggctgcggtgcctggcgcccctggagggcgcgcgcttcgccctggtgcgcgaggacaggggcgggcgccgcgtgcaccgtttccagagccccgctgggaccgaggcgctcttcgagctgcacaacatttccgtggctgactccgccaactacagctgcgtctacgtggacctgaagccgcctttcgggggctccgcgcccagcgagcgcttggagctgcacgtggacggaccccctcccaggcctcagctccgggcgacgtggagtggggcggtcctggcgggccgagatgccgtcctgcgctgcgagggacccatccccgacgtcaccttcgagctgctgcgcgagggcgagacgaaggccgtgaagacggtccgcacccccggggccgcggcgaacctcgagctgatcttcgtggggccccagcacgccggcaactacaggtgccgctaccgctcctgggtgccccacaccttcgaatcggagctcagcgaccctgtggagctcctggtggcagaaagctgatgcagccgcgggcccagggtgctgttggtgtcctcagaagtgccggggattctggactggctccctcccctcctgttgcagcacaaggccggggtctctggggggctggagaagcctccctcattcctcccaggaattaataaatgtgaagagaggctctgtttaaaatgtctttggactcccagggctgagtgggctgggatctcgtgtcctcaa

SEQ ID NO: 234080 - DNA, 1488 bp, Artificial Sequence
  derived and/or modified sequence
atgagcatgctggtggtgttcctgctgctgtggggcgtgacctggggacccgtgaccgaagccgcaatcttctatgagactcagcccagcctttgggcagagagtgagagtttattgaaacctttggccaacgtcaccctgacttgtcaggctcatctggagaccccagacttccagctcttcaaaaatggagtcgcacaggagccagttcacctggattccccggctatcaagcaccagttccttctgaccggcgacacacagggccgctatcgatgtcgcagcggcctctcaacgggctggactcagcttagcaagcttctcgaactgaccggcccgaagtccctccccgcaccttggctgagcatggcgccagtctcctggattactccggggctaaagacgaccgccgtttgcagaggtgtgttgagaggcgtgacatttctcctaaggagggagggagaccatgaattcctagaggtgccagaggcccaagaggatgtagaagctactttccccgtccaccagccgggaaactatagctgctcctataggacagacggagagggcgctctgtccgaaccatccgcaaccgttaccattgaagagctggcagctccaccccctcccgtattgatgcaccacggagagtcctctcaagtactccaccccgggaacaaagtgacacttacatgcgtcgccccactgagcggagtggactttcagctgagaaggggcgagaaggaactgcttgtcccaaggtcaagcacgagtccagaccgcatctttttccacctgaatgctgtcgcccttggcgatggcggccattacacttgtaggtataggctgcatgacaatcaaaatggctggtctggggacagtgcaccggtcgagcttatcctctctgatgagaccctgccggctccggagtttagccctgagccagagtctggacgcgccctgcggctgagatgcttagcccctctggaaggtgcccgttttgcattggtgcgggaggatagaggaggcaggcgcgttcataggtttcagagccctgcaggaacagaagcacttttcgagctacataatatttcggtcgctgactccgccaactacagctgcgtctacgtggacctcaagcctcctttcggcggttcagcaccctccgaaagattagagttacacgttgatggcccaccgcccaggccccaactgagagctacttggtccggtgcggttcttgccggacgcgatgcagtgcttcgatgcgaagggcccattcccgacgttacctttgagctgttacgcgaaggagaaacgaaagccgtgaagactgtccggactcccggagccgccgccaaccttgaattgatttttgtgggcccacagcacgccggaaactacaggtgtcgctatcgctcctgggtaccacatacatttgagagcgagttgagtgatccagtggagctgctggtggctgagtcctag

SEQ ID NO: 234081 - DNA, 1488 bp, Artificial Sequence
  derived and/or modified sequence
atgtccatgctggtcgtttttttactgctctggggcgttacctgggggcctgtcacggaggctgcgatcttttacgagacacagccctctctgtgggcggagtcagagagcctccttaaacccttagcgaacgttaccctgacctgccaagcacacctggagacccctgatttccaactctttaaaaacggagtggcacaggagcctgtacacctcgatagtccagccatcaagcaccagtttctgctgaccggagatacacagggccgatatagatgtcggtccgggctgagcacgggttggacccagctctcgaagttgttagagttaacggggccaaagtcacttcccgcaccctggttgagcatggcacccgtttcatggattactcctggcctgaaaactacagcagtgtgccgtggtgttctgcgcggagttacattcctgctcaggagagagggagatcacgaatttctcgaggttccagaggcccaagaggacgttgaggccactttccccgttcaccagcccggaaactactcatgcagttaccgtacagatggtgaaggcgctctgagtgagccttcagccactgtgacaatcgaggagttagcggcacccccaccccctgtgctcatgcaccacggagagtctagccaggtgctgcaccccggtaacaaagtgaccctgacttgtgttgctccgctgtccggagtggactttcaattgcggaggggggaaaaggagctgctggtgcccagatcttccaccagcccagaccgaattttcttccatttgaatgcagtggccctgggcgatggcggtcactacacatgtcgatacaggctgcatgacaatcagaatgggtggtccggtgacagtgccccagttgagttgatccttagcgatgagacacttcccgctccggagttcagtcctgaacccgaatccggccgtgccctccgtctccgatgccttgccccattagagggggcacgctttgcactagtccgggaagacagaggcggacgtcgagtgcatagatttcagtcacctgccggaactgaggccctctttgagctccataatatcagcgtcgcagattcagctaactactcctgcgtgtatgttgatttgaagccacccttcgggggttctgccccatctgaaagattggagctacatgtagacgggcctcccccaaggccccagctccgggcaacatggtctggagccgtgctggctgggagggacgccgtgctacgatgcgaaggccctatcccagatgtcacattcgagctgctcagggagggagagacgaaggccgtgaagactgtccggaccccaggagctgccgcaaatctggagctcatctttgtaggccctcagcacgctggcaattatcgatgcaggtacaggtcctgggtccctcataccttcgagtccgagctgtcggaccctgtcgagctgctcgtggcagaatcgtag

SEQ ID NO: 234082 - DNA, 1488 bp, Artificial Sequence
  derived and/or modified sequence
atgagcatgctggtggtgttcctgctgctgtggggcgtgacctggggccccgtgaccgaggccgccatcttctacgagacccagcccagcctgtgggccgagagcgagagcctgctgaagcccctggccaacgtgaccctgacctgccaggcccacctggagacccccgacttccagctgttcaagaacggcgtggcccaggagcccgtgcacctggacagccccgccatcaagcaccagttcctgctgaccggcgacacccagggcagatacagatgcagaagcggcctgagcaccggctggacccagctgagcaagctgctggagctgaccggccccaagagcctgcccgccccctggctgagcatggcccccgtgagctggatcacccccggcctgaagaccaccgccgtgtgcagaggcgtgctgagaggcgtgaccttcctgctgagaagagagggcgaccacgagttcctggaggtgcccgaggcccaggaggacgtggaggccaccttccccgtgcaccagcccggcaactacagctgcagctacagaaccgacggcgagggcgccctgagcgagcccagcgccaccgtgaccatcgaggagctggccgccccccccccccccgtgctgatgcaccacggcgagagcagccaggtgctgcaccccggcaacaaggtgaccctgacctgcgtggcccccctgagcggcgtggacttccagctgagaagaggcgagaaggagctgctggtgcccagaagcagcaccagccccgacagaatcttcttccacctgaacgccgtggccctgggcgacggcggccactacacctgcagatacagactgcacgacaaccagaacggctggagcggcgacagcgcccccgtggagctgatcctgagcgacgagaccctgcccgcccccgagttcagccccgagcccgagagcggcagagccctgagactgagatgcctggcccccctggagggcgccagattcgccctggtgagagaggacagaggcggcagaagagtgcacagattccagagccccgccggcaccgaggccctgttcgagctgcacaacatcagcgtggccgacagcgccaactacagctgcgtgtacgtggacctgaagccccccttcggcggcagcgcccccagcgagagactggagctgcacgtggacggccccccccccagaccccagctgagagccacctggagcggcgccgtgctggccggcagagacgccgtgctgagatgcgagggccccatccccgacgtgaccttcgagctgctgagagagggcgagaccaaggccgtgaagaccgtgagaacccccggcgccgccgccaacctggagctgatcttcgtgggcccccagcacgccggcaactacagatgcagatacagaagctgggtgccccacaccttcgagagcgagctgagcgaccccgtggagctgctggtggccgagagctag

SEQ ID NO: 234083 - protein, 955 aa, Artificial Sequence
  derived and/or modified sequence
MPAVSKGDGMRGLAVFISDIRNCKSKEAEIKRINKELANIRSKFKGDKALDGYSKKKYVCKLLFIFLLGHDIDFGHMEAVNLLSSNKYTEKQIGYLFISVLVNSNSELIRLINNAIKNDLASRNPTFMCLALHCIANVGSREMGEAFAADIPRILVAGDSMDSVKQSAALCLLRLYKASPDLVPMGEWTARVVHLLNDQHMGVVTAAVSLITCLCKKNPDDFKTCVSLAVSRLSRIVSSASTDLQDYTYYFVPAPWLSVKLLRLLQCYPPPEDAAVKGRLVECLETVLNKAQEPPKSKKVQHSNAKNAILFETISLIIHYDSEPNLLVRACNQLGQFLQHRETNLRYLALESMCTLASSEFSHEAVKTHIDTVINALKTERDVSVRQRAADLLYAMCDRSNAKQIVSEMLRYLETADYAIREEIVLKVAILAEKYAVDYSWYVDTILNLIRIAGDYVSEEVWYRVLQIVTNRDDVQGYAAKTVFEALQAPACHENMVKVGGYILGEFGNLIAGDPRSSPPVQFSLLHSKFHLCSVATRALLLSTYIKFINLFPETKATIQGVLRAGSQLRNADVELQQRAVEYLTLSSVASTDVLATVLEEMPPFPERESSILAKLKRKKGPGAGSALDDGRRDPSSNDINGGMEPTPSTVSTPSPSADLLGLRAAPPPAAPPASAGAGNLLVDVFDGPAAQPSLGPTPEEAFLSPGPEDIGPPIPEADELLNKFVCKNNGVLFENQLLQIGVKSEFRQNLGRMYLFYGNKTSVQFQNFSPTVVHPGDLQTQLAVQTKRVAAQVDGGAQVQQVLNIECLRDFLTPPLLSVRFRYGGAPQALTLKLPVTINKFFQPTEMAAQDFFQRWKQLSLPQQEAQKIFKANHPMDAEVTKAKLLGFGSALLDNVDPNPENFVGAGIIQTKALQVGCLLRLEPNAQAQMYRLTLRTSKEPVSRHLCELLAQQF

SEQ ID NO: 234084 - DNA, 3433 bp, Artificial Sequence
  derived and/or modified sequence
cggctcagagctccggaccgcgggcggaggggaggggcagggggcggtgccacggcctgccagcccgcccgcccgcccgccagccagccctccccgcggccggctcggctccttggcgctgcctggggtcctttccgcccggtccccgcttgccagcccccgctgctctgtgccctgtccggccaggcctggagccgacaccaccgccatcatgccggccgtgtccaagggcgatgggatgcgggggctcgcggtgttcatctccgacatccggaactgtaagagcaaagaggcggaaattaagagaatcaacaaggaactggccaacatccgctccaagttcaaaggagacaaagccttggatggctacagtaagaaaaaatatgtgtgtaaactgcttttcatcttcctgcttggccatgacattgactttgggcacatggaggctgtgaatctgttgagttccaataaatacacagagaagcaaataggttacctgttcatttctgtgctggtgaactcgaactcggagctgatccgcctcatcaacaacgccatcaagaatgacctggccagccgcaaccccaccttcatgtgcctggccctgcactgcatcgccaacgtgggcagccgggagatgggcgaggcctttgccgctgacatcccccgcatcctggtggccggggacagcatggacagtgtcaagcagagtgcggccctgtgcctccttcgactgtacaaggcctcgcctgacctggtgcccatgggcgagtggacggcgcgtgtggtacacctgctcaatgaccagcacatgggtgtggtcacggccgccgtcagcctcatcacctgtctctgcaagaagaacccagatgacttcaagacgtgcgtctctctggctgtgtcgcgcctgagccggatcgtctcctctgcctccaccgacctccaggactacacctactacttcgtcccagcaccctggctctcggtgaagctcctgcggctgctgcagtgctacccgcctccagaggatgcggctgtgaaggggcggctggtggaatgtctggagactgtgctcaacaaggcccaggagccccccaaatccaagaaggtgcagcattccaacgccaagaacgccatcctcttcgagaccatcagcctcatcatccactatgacagtgagcccaacctcctggttcgggcctgcaaccagctgggccagttcctgcagcaccgggagaccaacctgcgctacctggccctggagagcatgtgcacgctggccagctccgagttctcccatgaagccgtcaagacgcacattgacaccgtcatcaatgccctcaagacggagcgggacgtcagcgtgcggcagcgggcggctgacctcctctacgccatgtgtgaccggagcaatgccaagcagatcgtgtcggagatgctgcggtacctggagacggcagactacgccatccgcgaggagatcgtcctgaaggtggccatcctggccgagaagtacgccgtggactacagctggtacgtggacaccatcctcaacctcatccgcattgcgggcgactacgtgagtgaggaggtgtggtaccgtgtgctacagatcgtcaccaaccgtgatgacgtccagggctatgccgccaagaccgtctttgaggcgctccaggcccctgcctgtcacgagaacatggtgaaggttggcggctacatccttggggagtttgggaacctgattgctggggacccccgctccagccccccagtgcagttctccctgctccactccaagttccatctgtgcagcgtggccacgcgggcgctgctgctgtccacctacatcaagttcatcaacctcttccccgagaccaaggccaccatccagggcgtcctgcgggccggctcccagctgcgcaatgctgacgtggagctgcagcagcgagccgtggagtacctcaccctcagctcagtggccagcaccgacgtcctggccacggtgctggaggagatgccgcccttccccgagcgcgagtcgtccatcctggccaagctgaaacgcaagaaggggccaggggccggcagcgccctggacgatggccggagggaccccagcagcaacgacatcaacgggggcatggagcccacccccagcactgtgtcgacgccctcgccctccgccgacctcctggggctgcgggcagcccctcccccggcagcacccccggcttctgcaggagcagggaaccttctggtggacgtcttcgatggcccggccgcccagcccagcctggggcccacccccgaggaggccttcctcagcccaggtcctgaggacatcggccctcccattccggaagccgatgagttgctgaataagtttgtgtgtaagaacaacggggtcctgttcgagaaccagctgctgcagatcggagtcaagtcagagttccgacagaacctgggccgcatgtatctcttctatggcaacaagacctcggtgcagttccagaatttctcacccactgtggttcacccgggagacctccagactcagctggctgtgcagaccaagcgcgtggcggcgcaggtggacggcggcgcgcaggtgcagcaggtgctcaatatcgagtgcctgcgggacttcctgacgcccccgctgctgtccgtgcgcttccggtacggtggcgccccccaggccctcaccctgaagctcccagtgaccatcaacaagttcttccagcccaccgagatggcggcccaggatttcttccagcgctggaagcagctgagcctccctcaacaggaggcgcagaaaatcttcaaagccaaccaccccatggacgcagaagttactaaggccaagcttctggggtttggctctgctctcctggacaatgtggaccccaaccctgagaacttcgtgggggcggggatcatccagactaaagccctgcaggtgggctgtctgcttcggctggagcccaatgcccaggcccagatgtaccggctgaccctgcgcaccagcaaggagcccgtctcccgtcacctgtgtgagctgctggcacagcagttctgagccctggactctgccccgggggatgtggccggcactgggcagccccttggactgaggcagttttggtggatgggggacctccactggtgacagagaagacaccagggtttgggggatgcctgggactttcctccggccttttgtatttttatttttgttcatctgctgctgtttacattctggggggttagggggagtccccctccctccctttcccccccaagcacagaggggagaggggccagggaagtggatgtctcctcccctcccaccccaccctgttgtagcccctcctaccccctccccatccaggggctgtgtattattgtgagcgaataaacagagagacgctaa

SEQ ID NO: 234085 - DNA, 2868 bp, Artificial Sequence
  derived and/or modified sequence
atgcccgcggtttctaagggcgacggaatgcgtggccttgccgtttttattagcgacatacggaactgcaagagcaaagaggcagagatcaagcgaataaacaaggaattagccaatatccgctcaaagtttaagggagataaggctcttgatggatatagtaagaaaaagtatgtctgtaagttattgttcatctttctgctgggccacgacattgactttggacacatggaagctgtaaacctgctttcctcaaacaaatacaccgagaaacagatcgggtacttgtttatttcagtattggtcaatagtaattccgaactgatccgcttaatcaacaatgctatcaagaacgaccttgcttctcgcaacccgactttcatgtgtctcgcattgcattgcattgcaaacgtgggtagccgcgagatgggtgaggcattcgcggccgatatcccgcgaatcctcgttgcgggcgactctatggactcagtgaagcaaagcgccgccctttgcctgttaagactgtacaaggcctccccagatctcgtacccatgggggagtggactgccagagtggtccacctgctaaacgatcagcacatgggggtagtgactgccgcggtatccttaatcacctgcctttgcaaaaagaatccagatgattttaagacatgtgtctcattggccgtgagtcgcctgtcaaggatagtaagcagtgccagcaccgacctccaggattatacctactattttgtgcctgccccttggctgagcgtgaagctcctgcgcctgctgcagtgttatcctccacctgaagatgccgccgtcaagggccggttggtcgaatgcctggagacagttctcaataaggcccaagagccacctaaatctaaaaaggtacagcactcgaatgccaagaacgctattctctttgaaaccatttctttaattatccactatgactccgagcctaatctgcttgtgagggcctgcaaccaactggggcagttcctgcagcatagggagaccaacttgagataccttgctctggagtctatgtgtaccctcgcatctagtgagttctcacacgaggccgtgaaaactcatatcgacaccgtaatcaatgctctgaaaaccgagcgggatgtttcagtcaggcagagagccgctgacctcctatacgcaatgtgtgacagaagcaacgcaaagcagattgtgagcgagatgctcaggtacctagagacggcagactacgccatcagagaggagattgtgcttaaagtggcgatcttagctgagaagtatgctgtggactattcttggtacgttgacacgattttgaaccttatccggatcgccggcgattatgtcagcgaagaagtgtggtaccgagttctgcaaattgtcactaaccgtgacgatgtgcagggatatgcagcgaaaacggtattcgaagcccttcaggcccctgcctgtcacgaaaacatggtaaaggtgggagggtacatcctgggcgaatttggaaacttgatcgcaggagacccaagatcaagccctcctgtccagttttcactgttgcattcaaagttccatctttgtagcgtggcgacgcgagccctgttgctatctacatacattaaatttattaatctcttccccgaaactaaagctacaattcaaggcgtgttacgcgcgggatcccagctgcgcaatgctgatgtggagctgcagcaaagggcagtggaatacttgacccttagcagcgtggcaagcacagatgtgctggcgactgtactcgaagaaatgcctccctttcccgaacgcgagagcagcattctcgcaaagctcaaaagaaaaaagggtcctggtgcaggtagcgcgcttgacgacgggcgtcgggacccttcctctaatgatatcaatggaggcatggagcctacccctagtacagtctccactcctagtccatccgctgacctgctagggttgagagccgccccacctcctgctgctcctcctgcgtctgcaggagctggtaatctcttggtggacgtgttcgacggtcctgctgcccagccttcattaggaccaactcccgaagaggcattcctaagtcccggccctgaagatatcggacctcctattccagaagcagacgagctgcttaataaattcgtgtgtaaaaacaacggggtactgttcgaaaatcaacttcttcagatcggggtgaagagcgagttcagacagaacctgggtcggatgtatctattttatggaaacaagaccagtgtgcagttccagaacttcagtccaaccgtcgtgcacccaggcgatctgcagacccagttagcggtccagaccaaacgagtggctgcacaggtggacggaggcgcccaagtgcaacaggttctgaatatagaatgcctaagggatttcctcacccctcctcttctgtctgtccgatttaggtatggaggagcccctcaggccctgacactcaagctcccggtcactatcaacaaattttttcagccaaccgagatggctgcccaagactttttccagcgatggaaacaactctcactgcctcagcaggaggcccagaaaatttttaaggccaatcaccccatggacgccgaggttacaaaagccaaacttctgggctttggcagtgctctgctggataacgtcgatcccaacccagaaaactttgtgggagccgggatcatccaaactaaagcattacaggtgggatgcctactgagactggagcctaatgcccaggctcagatgtaccggctgaccctccggacatctaaggagcccgtgagtcgtcacctctgcgagttgcttgcccaacagttctag

SEQ ID NO: 234086 - DNA, 2868 bp, Artificial Sequence
  derived and/or modified sequence
atgcctgctgtgtccaaaggagatggcatgaggggcctggccgtgttcatcagtgacatccggaactgcaagagcaaggaggccgagatcaagaggatcaacaaggagctggccaacatccgcagcaagttcaagggggacaaggccctggatggctacagcaagaagaagtatgtgtgcaagctgctcttcatcttcctgctgggccatgacatcgactttggccacatggaggccgtgaacctgctgagcagcaacaagtacacagagaagcagatcggctacctgttcatctctgtgctggtgaacagcaacagcgagctgatccgcctcatcaacaatgccatcaagaatgacctggccagcaggaaccccaccttcatgtgcctggccctgcactgcatcgccaacgtgggcagccgggagatgggagaggcctttgctgctgacatcccccgcatcctggtggccggggacagcatggattctgtgaagcagagcgctgccctgtgcctgctgcggctgtacaaggccagcccagacctggtgcccatgggagagtggacagcccgggtggtgcacctgctgaatgaccagcacatgggcgtggtgacagctgctgtgtccctcatcacctgcctgtgcaagaagaacccagatgacttcaagacctgtgtgtccctggccgtgtcccggctgagccgcatcgtgtcctctgccagcacagacctgcaggactacacctactactttgtgcctgccccctggctgtctgtgaagctgctgcggctgctgcagtgctacccacctccagaagatgctgctgtgaagggccgcctggtggagtgcctggagaccgtgctgaacaaggcccaggagccccccaagagcaagaaggtgcagcacagcaatgccaagaatgccatcctgtttgagaccatcagcctcatcatccactatgacagcgagcccaacctgctggtgcgggcctgcaaccagctgggccagttcctgcagcaccgggagaccaacctgcgctacctggccctggagagcatgtgcaccctggccagcagcgagttcagccatgaagctgtgaagacccacatcgacaccgtcatcaatgccctgaagacagaaagagatgtgtctgtgcggcagagagctgctgacctgctgtatgccatgtgtgacaggagcaatgccaagcagatcgtgtctgagatgctgcgctacctggagacagctgactatgccatccgggaggagatcgtgctgaaggtggccatcctggccgagaagtatgctgtggactacagctggtacgtggacaccatcctgaacctgatcagaattgctggggactatgtgtctgaggaggtgtggtacagagtgctgcagatcgtgaccaacagagatgatgtgcagggctatgctgccaagacagtgtttgaggccctgcaggccccagcctgccacgagaacatggtgaaggtgggcggctacatcctgggggagtttggaaacctgattgctggggaccccaggagcagcccccctgtgcagttcagcctgctgcacagcaagttccacctgtgcagcgtggccacccgggccctgctgctgagcacctacatcaagttcatcaacctcttccctgagaccaaggccaccatccagggcgtgctgcgggccggcagccagctgagaaatgctgatgtggagctgcagcagagagctgtggagtacctgaccctgagctctgtggccagcacagatgtgctggccaccgtgctggaggagatgccacccttccctgagcgggagagcagcatcctggccaagctgaagaggaagaagggccctggggccggcagcgccctggatgatggccggcgggaccccagcagcaatgacatcaatggaggcatggagcccacccccagcacagtgtccacccccagccccagcgctgacctgctgggcctgcgggccgcccctcctcctgctgcccccccagccagcgctggggccggcaacctgctggtggatgtgtttgatggccctgctgcccagcccagcctgggccccaccccagaggaggccttcctgagccctggcccagaagatattggcccccccatccctgaggctgatgagctgctgaacaagtttgtgtgcaagaacaacggggtgctgtttgagaaccagctgctgcagattggagtgaagtctgagttccggcagaacctgggccgcatgtacctgttctacggcaacaagacctctgtgcagttccagaacttcagccccaccgtggtgcaccctggggacctgcagacccagctggccgtgcagaccaagagggtggccgcccaggtggatggaggagcccaggtgcagcaggtgctgaacattgaatgtctgcgggacttcctgaccccacccctgctgtctgtgcgcttccgctatggaggagccccccaggccctgaccctgaagctgcctgtgaccatcaacaagttcttccagcccacagagatggccgcccaggacttcttccagcgctggaagcagctgagcctgccccagcaggaggcccagaagatcttcaaggccaaccaccccatggatgctgaggtgaccaaggccaagctgctgggctttggaagtgccctgctggacaacgtggaccccaaccctgagaactttgtgggcgccggcatcatccagaccaaggccctgcaggtgggctgcctgctgcggctggagcccaatgcccaggcccagatgtaccgcctgaccctgcggaccagcaaggagcctgtgagccgccacctgtgtgagctgctggcccagcagttctag

SEQ ID NO: 234087 - DNA, 2868 bp, Artificial Sequence
  derived and/or modified sequence
atgcccgccgtgagcaagggcgacggcatgcggggcctggccgtgtttatttctgacattcgcaactgcaaaagtaaggaggctgaaatcaagagaattaataaagagcttgccaacattaggtcaaaattcaaaggagacaaggccctggatggatactccaaaaagaagtacgtgtgcaagcttctgttcatattcctgcttggacatgacattgatttcggtcacatggaagcagttaacctcctgtcctctaacaagtatactgaaaagcagattggttatcttttcattagcgtgcttgtgaacagtaatagtgaattgatacgactgatcaataacgcaatcaagaatgatctcgctagcagaaaccctacctttatgtgcctcgcactgcattgcatcgccaatgtgggctctcgagaaatgggggaagcatttgcagcagatattccacgaattctggtagctggggatagcatggatagtgttaagcagtccgcagctctttgtctcctgcggctgtacaaagcttccccggatctcgtcccgatgggcgagtggacggcccgtgtcgtgcatctgctgaacgaccagcatatgggggtggtcacagccgccgtgtcccttattacctgcctgtgtaagaagaatcctgacgatttcaaaacatgcgtatctctcgccgtaagccgcttgtccaggatcgtgtccagcgctagtacggacctacaggactacacgtattacttcgtcccagctccatggctgtctgtcaaattgttaagattgttacagtgctatccaccacctgaggacgccgcagtgaaaggacgcctggtggagtgccttgagaccgtccttaacaaggcccaggaaccaccaaagtccaagaaggtgcagcattcaaatgccaagaacgcaatactattcgagactatcagtcttatcatccactatgactctgagccaaacttgctagtccgtgcttgcaatcagcttggccaattcctccagcacagggaaaccaatctacgctatttagccctggaatctatgtgcacactcgccagttccgaattttcccacgaggccgtcaagacccatatcgataccgttatcaatgctttgaagaccgaacgcgatgtcagcgtaaggcagcgggcagccgaccttctttacgccatgtgcgacaggtctaatgctaagcaaattgtatctgagatgctccgctatctggaaacagcagactatgctatccgggaggagatcgtgctgaaagttgccatcttggcagagaaatatgcagtggattacagctggtatgtggacaccatcctgaaccttattcggatcgccggtgattatgttagcgaagaggtgtggtacagagtgctgcagattgttacgaaccgggacgacgtgcagggttatgctgccaagacggtgttcgaagctctccaggccccggcttgtcacgagaacatggtcaaggtcggaggatatatcctgggagagtttggaaatcttatcgccggggatcccagaagcagcccccccgtccagttctctttgctccacagtaagtttcacctatgttctgtggccacccgcgcgctactgctgtccacctacattaagttcatcaatttatttcctgagacaaaggctactattcagggtgtgctgagagcagggagccaactcaggaacgccgacgtggagcttcagcaaagggcagtggaatacttgaccctgtcaagtgtcgcctcaacggatgttctggccaccgtgctggaagagatgccacctttcccggaaagagagtcatcgatccttgccaagttgaaaaggaagaagggccccggggcgggctcagccctcgacgacggacgccgggatccaagctctaacgatatcaatgggggcatggagcctacccctagtacagtttccactcctagtccaagcgcagacctgctggggctcagagcagcacctcctcctgccgcccctcctgcctccgcaggcgctggcaacctgcttgtcgacgtgtttgatggtcccgctgcgcaacccagcctgggacctactccagaagaggccttcttgtcaccaggccccgaagacatcgggccacccatcccagaggccgacgaactgcttaataaatttgtgtgtaaaaataacggcgttctttttgagaatcagctcttacagattggtgtgaaatcagaattccgtcaaaacctagggcggatgtaccttttctacgggaacaagacctcagtgcaattccagaacttcagcccaacagtggtgcatcccggcgacctgcagacccagcttgcggtgcagaccaagcgggtagctgctcaggtcgatggtggggcccaagttcagcaggtgctcaacatagaatgcctgagagattttctgacacctcctttgcttagcgtcaggtttcgttacggcggggccccacaggccctgaccctgaagctcccggtcactatcaataaattcttccagcccacagaaatggccgcccaggatttctttcaaagatggaaacagctgagcttgccgcaacaggaggcccagaaaatttttaaagcaaaccaccctatggacgcagaagtgacaaaggccaagctgctcggcttcggttccgccctactagataacgtggacccaaatccggagaattttgtcggggctgggataattcagactaaggcgctgcaggtcgggtgtctgctgcgactagaacccaatgcgcaggctcagatgtaccggttaaccctccgcacctccaaggaaccagtgtcacgacacttgtgtgaactcttggcccagcagttttag

SEQ ID NO: 234088 - DNA, 2868 bp, Artificial Sequence
  derived and/or modified sequence
atgcctgctgtgagcaaaggcgacggaatgcggggactggcagtgtttatttcagatatacgtaactgtaagagtaaggaggcagaaattaaaagaattaataaagagctggcaaatatccgcagtaaattcaaaggggataaagccctggatggctattcaaagaaaaaatacgtctgcaagttgctctttatctttctcctgggtcacgatatagactttggccacatggaagcggtcaacctgttgtcatcgaataaatacacagaaaagcaaatcggttatctatttattagcgtgctggtgaactccaactctgagctgattaggttgatcaataacgctattaagaacgacctggcctcccggaatcccacattcatgtgcctggcgctccactgcatagcgaatgtgggttcccgggaaatgggggaagccttcgctgctgacatccctagaattttagtcgcaggcgatagcatggactctgtcaaacagtcagctgccctttgtcttcttaggctgtataaggcatctccagatctggtccccatgggtgaatggacagcacgggtggtgcacctgcttaacgatcaacacatgggggtggtgacagccgcagtgtccttaattacatgcctatgtaagaaaaatcctgatgattttaaaacatgcgtcagcctagccgtctcccgcctttcgcggatcgtcagtagcgcttctactgacctacaagactatacatactactttgttcccgcaccttggctttctgttaagctgcttcgccttcttcagtgctacccccctcccgaagatgctgccgtcaagggacgcctggtggaatgtctagagacagtgcttaacaaagcccaggagccccctaagagcaagaaagtgcaacatagcaacgcgaaaaacgccattctgtttgaaactatcagcctgattattcattacgatagcgaaccgaaccttttggtccgagcttgtaatcagctggggcagtttcttcagcatagggaaactaaccttaggtacctggcgctcgagtccatgtgcacactcgcctcttcagaattctctcacgaagcagtgaagactcacattgatactgtgatcaacgcccttaagactgagcgcgatgtcagtgtacgccagagagcagccgacttgctgtatgccatgtgcgatcggagtaacgcgaagcagatcgtgtcagaaatgctgaggtatctcgaaacagctgattatgctattagagaggagatcgtgctgaaagtggcaatattagcagagaaatacgctgtggattactcttggtacgtcgatactattctgaacctgatccggatcgcgggtgactacgtgtctgaggaggtgtggtaccgagtgctgcagatcgtgacgaatcgggatgatgtgcagggatacgctgccaaaaccgtgtttgaggcactccaagcccctgcctgtcacgagaatatggtgaaggtgggcggttacatcctcggggagtttggaaacctcatagccggtgatcctcgaagcagcccaccagtgcagttctctctgctgcacagcaagttccatctctgtagcgtggcgacccgcgcacttttactgtccacctacatcaaattcatcaatctgtttcccgagaccaaggcaactatccagggcgtactacgggcaggctctcagttgaggaacgccgacgtggaactacagcagagagcagtggagtacctgactctgtcttccgttgcctccaccgacgtcctcgcaacagtccttgaggaaatgcccccttttccagagagggaatcatccatcctggcaaaactgaaacggaaaaaaggccctggcgctgggtctgccctagatgatgggaggcgcgacccttcctccaatgacattaatggtggaatggagcccaccccttctactgtctcgacacccagtccctctgccgacttgctgggactccgggctgccccaccgcctgcagctcctcctgcatccgccggagccggaaatctgttggttgacgtgttcgatggcccagccgcacagccaagtcttgggcctacacctgaggaagcgttcctgtccccagggcctgaagacatcggccctccaatcccggaagccgatgagctgcttaacaagtttgtgtgcaaaaacaatggggtcttgttcgaaaatcagttgctgcagatcggggtcaaatcagagtttcggcagaaccttggacgcatgtatctattttatggcaataaaacctctgtgcagtttcagaatttttcccccacagtagtgcaccctggcgatctccagacccagttagcagtccagactaaaagagtagcagcccaggtggacggaggggcacaggtccagcaggtgctgaatatagagtgcctgcgggactttttgaccccacccttactgagcgtccggtttaggtatgggggagctccccaggctctgacactgaagttacccgtcactataaataagttttttcagccaacagaaatggcagctcaggacttcttccagagatggaagcagttatcacttccccagcaggaggctcagaagatctttaaggccaaccatcctatggatgccgaggtcacaaaagctaagttgttggggttcggcagcgcattactcgacaatgtggaccctaacccagaaaatttcgtcggcgcaggcattatccagacaaaagcactacaagttggatgtctgttaaggcttgagcctaacgcacaggcccagatgtacagattgactttgcggacctccaaggaacctgtttcgcgacatctgtgtgagctgctggcccagcagttctag

SEQ ID NO: 234089 - DNA, 2868 bp, Artificial Sequence
  derived and/or modified sequence
atgcccgccgtgagcaagggcgacggcatgagaggcctggccgtgttcatcagcgacatcagaaactgcaagagcaaggaggccgagatcaagagaatcaacaaggagctggccaacatcagaagcaagttcaagggcgacaaggccctggacggctacagcaagaagaagtacgtgtgcaagctgctgttcatcttcctgctgggccacgacatcgacttcggccacatggaggccgtgaacctgctgagcagcaacaagtacaccgagaagcagatcggctacctgttcatcagcgtgctggtgaacagcaacagcgagctgatcagactgatcaacaacgccatcaagaacgacctggccagcagaaaccccaccttcatgtgcctggccctgcactgcatcgccaacgtgggcagcagagagatgggcgaggccttcgccgccgacatccccagaatcctggtggccggcgacagcatggacagcgtgaagcagagcgccgccctgtgcctgctgagactgtacaaggccagccccgacctggtgcccatgggcgagtggaccgccagagtggtgcacctgctgaacgaccagcacatgggcgtggtgaccgccgccgtgagcctgatcacctgcctgtgcaagaagaaccccgacgacttcaagacctgcgtgagcctggccgtgagcagactgagcagaatcgtgagcagcgccagcaccgacctgcaggactacacctactacttcgtgcccgccccctggctgagcgtgaagctgctgagactgctgcagtgctaccccccccccgaggacgccgccgtgaagggcagactggtggagtgcctggagaccgtgctgaacaaggcccaggagccccccaagagcaagaaggtgcagcacagcaacgccaagaacgccatcctgttcgagaccatcagcctgatcatccactacgacagcgagcccaacctgctggtgagagcctgcaaccagctgggccagttcctgcagcacagagagaccaacctgagatacctggccctggagagcatgtgcaccctggccagcagcgagttcagccacgaggccgtgaagacccacatcgacaccgtgatcaacgccctgaagaccgagagagacgtgagcgtgagacagagagccgccgacctgctgtacgccatgtgcgacagaagcaacgccaagcagatcgtgagcgagatgctgagatacctggagaccgccgactacgccatcagagaggagatcgtgctgaaggtggccatcctggccgagaagtacgccgtggactacagctggtacgtggacaccatcctgaacctgatcagaatcgccggcgactacgtgagcgaggaggtgtggtacagagtgctgcagatcgtgaccaacagagacgacgtgcagggctacgccgccaagaccgtgttcgaggccctgcaggcccccgcctgccacgagaacatggtgaaggtgggcggctacatcctgggcgagttcggcaacctgatcgccggcgaccccagaagcagcccccccgtgcagttcagcctgctgcacagcaagttccacctgtgcagcgtggccaccagagccctgctgctgagcacctacatcaagttcatcaacctgttccccgagaccaaggccaccatccagggcgtgctgagagccggcagccagctgagaaacgccgacgtggagctgcagcagagagccgtggagtacctgaccctgagcagcgtggccagcaccgacgtgctggccaccgtgctggaggagatgccccccttccccgagagagagagcagcatcctggccaagctgaagagaaagaagggccccggcgccggcagcgccctggacgacggcagaagagaccccagcagcaacgacatcaacggcggcatggagcccacccccagcaccgtgagcacccccagccccagcgccgacctgctgggcctgagagccgcccccccccccgccgccccccccgccagcgccggcgccggcaacctgctggtggacgtgttcgacggccccgccgcccagcccagcctgggccccacccccgaggaggccttcctgagccccggccccgaggacatcggcccccccatccccgaggccgacgagctgctgaacaagttcgtgtgcaagaacaacggcgtgctgttcgagaaccagctgctgcagatcggcgtgaagagcgagttcagacagaacctgggcagaatgtacctgttctacggcaacaagaccagcgtgcagttccagaacttcagccccaccgtggtgcaccccggcgacctgcagacccagctggccgtgcagaccaagagagtggccgcccaggtggacggcggcgcccaggtgcagcaggtgctgaacatcgagtgcctgagagacttcctgaccccccccctgctgagcgtgagattcagatacggcggcgccccccaggccctgaccctgaagctgcccgtgaccatcaacaagttcttccagcccaccgagatggccgcccaggacttcttccagagatggaagcagctgagcctgccccagcaggaggcccagaagatcttcaaggccaaccaccccatggacgccgaggtgaccaaggccaagctgctgggcttcggcagcgccctgctggacaacgtggaccccaaccccgagaacttcgtgggcgccggcatcatccagaccaaggccctgcaggtgggctgcctgctgagactggagcccaacgcccaggcccagatgtacagactgaccctgagaaccagcaaggagcccgtgagcagacacctgtgcgagctgctggcccagcagttctag

SEQ ID NO: 234090 - protein, 189 aa, Artificial Sequence
  derived and/or modified sequence
MAALRYAGLDDTDSEDELPPGWEERTTKDGWVYYANHTEEKTQWEHPKTGKRKRVAGDLPYGWEQETDENGQVFFVDHINKRTTYLDPRLAFTVDDNPTKPTTRQRYDGSTTAMEILQGRDFTGKVVVVTGANSGIGFETAKSFALHGAHVILACRNMARASEAVSRILEEWKTKYHPPPEKCRIKIFH

SEQ ID NO: 234091 - DNA, 570 bp, Artificial Sequence
  derived and/or modified sequence
atggccgccctgagatacgccggcctggacgacaccgacagcgaggacgagctgccccccggctgggaggagagaaccaccaaggacggctgggtgtactacgccaaccacaccgaggagaagacccagtgggagcaccccaagaccggcaagagaaagagagtggccggcgacctgccctacggctgggagcaggagaccgacgagaacggccaggtgttcttcgtggaccacatcaacaagagaaccacctacctggaccccagactggccttcaccgtggacgacaaccccaccaagcccaccaccagacagagatacgacggcagcaccaccgccatggagatcctgcagggcagagacttcaccggcaaggtggtggtggtgaccggcgccaacagcggcatcggcttcgagaccgccaagagcttcgccctgcacggcgcccacgtgatcctggcctgcagaaacatggccagagccagcgaggccgtgagcagaatcctggaggagtggaagaccaagtaccaccccccccccgagaagtgcagaatcaagatcttccactag

SEQ ID NO: 234092 - DNA, 936 bp, Artificial Sequence
  derived and/or modified sequence
atggccgccctgagatacgccggcctggacgacaccgacagcgaggacgagctgccccccggctgggaggagagaaccaccaaggacggctgggtgtactacgccaaccacaccgaggagaagacccagtgggagcaccccaagaccggcaagagaaagagagtggccggcgacctgccctacggctgggagcaggagaccgacgagaacggccaggtgttcttcgtggaccacatcaacaagagaaccacctacctggaccccagactggccttcaccgtggacgacaaccccaccaagcccaccaccagacagagatacgacggcagcaccaccgccatggagatcctgcagggcagagacttcaccggcaaggtggtggtggtgaccggcgccaacagcggcatcgccaccggcagctgccaccacagagtgctgtgctgctgccccagaaccggcggcagcggcagagacgtgctgcagcagctgctgcccctgcacgccctgaccagaagcagcgagagaagagacggccccgaccccgtgggcgcccagagagaggccgaccccagaaccgcctggcagcccgtgagactgagcggcgcccagagcggctgggcccacacccccgccctgtgcgtgagcccccacgccagcgccagagccggccccctgcccaacgtgccccccacccagatcagaaagagcaagggcaacaagagcagccacaacagagtgaagaacctgaagtaccagtgggaggccggcaacagctggggcaaggtgagcctgttctggggctgggccagacacagaagcctgtgcttcctggtggtggcctgcctgaaggtgaagacctgcctggtgtgcagattcagaatcagcctggagaagcaccagcagttcagcttcttctactgctacagaatcgcctag

SEQ ID NO: 234093 - DNA, 705 bp, Artificial Sequence
  derived and/or modified sequence
atggccgccctgagatacgccggcctggacgacaccgacagcgaggacgagctgccccccggctgggaggagagaaccaccaaggacggctgggtgtactacgccaaccacaccgaggagaagacccagtgggagcaccccaagaccggcaagagaaagagagtggccggcgacctgccctacggctgggagcaggagaccgacgagaacggccaggtgttcttcgtggaccacatcaacaagagaaccacctacctggaccccagactggccttcaccgtggacgacaaccccaccaagcccaccaccagacagagatacgacggcagcaccaccgccatggagatcctgcagggcagagacttcaccggcaaggtggtggtggtgaccggcgccaacagcggcatcggcttcgagaccgccaagagcttcgccctgcacggcgcccacgtgatcctggcctgcagaaacatggccagagccagcgaggccgtgagcagaatcctggaggagtggcagcagggcgccgccaccaccgtgtactgcgccgccgtgcccgagctggagggcctgggcggcatgtacttcaacaactgctgcagatgcatgcccagccccgaggcccagagcgaggagaccgccagaaccctgtgggccctgagcgagagactgatccaggagagactgggcagccagagcggctag

SEQ ID NO: 234094 - DNA, 642 bp, Artificial Sequence
  derived and/or modified sequence
atggccgccctgagatacgccggcctggacgacaccgacagcgaggacgagctgccccccggctgggaggagagaaccaccaaggacggctgggtgtactacgccaaccacaccgaggagaagacccagtgggagcaccccaagaccggcaagagaaagagagtggccggcgacctgccctacggctgggagcaggagaccgacgagaacggccaggtgttcttcgtggaccacatcaacaagagaaccacctacctggaccccagactggccttcaccgtggacgacaaccccaccaagcccaccaccagacagagatacgacggcagcaccaccgccatggagatcctgcagggcagagacttcaccggcaaggtggtggtggtgaccggcgccaacagcggcatcggcaaggccagctgccacgtgggcagaatcctgaagcacaccagagtggaggagctgagcctgctgcccaccgccatcaacagagagctgccccccccctgcaccgtgctgctgagccagaactggagagtgtgggagggctgcaccagcaccaccgccgccgccgcctgcccccaccagaagctgagagccaagagaagacccggcccctgcggcagaagcgccagaggctag

SEQ ID NO: 234095 - DNA, 111 bp, Artificial Sequence
  derived and/or modified sequence
atggccgccctgagatacgccggcctggacgacaccgacagcgaggacgagctgccccccggctgggaggagagaaccaccaaggacggctgggtgtactacgccaagtag

SEQ ID NO: 234096 - DNA, 570 bp, Artificial Sequence
  derived and/or modified sequence
atggctgcgctcagatatgctgggctcgacgatacagattccgaggatgagttaccacccggatgggaagaaaggaccacaaaggatgggtgggtttactacgctaatcatacagaggagaaaacgcagtgggagcatcccaagaccggtaagcgtaaaagggtggccggggatctcccatatggttgggaacaggagacagatgagaacggacaggtgttctttgttgaccacataaacaaacgcacaacatacttggatccacgactagctttcactgtggacgacaatcccacaaaacccactactcgacagcgctatgacgggagtacgactgcaatggaaattctccaagggagggactttaccggcaaggtggttgtggttactggagccaacagtggaatcggctttgaaactgccaagagcttcgctcttcacggcgcccacgtgattttagcatgccgcaacatggctcgggcgtctgaagccgtttcaagaatactggaagagtggaaaacaaagtaccaccctccacctgagaaatgcaggattaaaatatttcactag

SEQ ID NO: 234097 - DNA, 936 bp, Artificial Sequence
  derived and/or modified sequence
atggccgcactccgatatgccggactggatgatactgactctgaagacgagctccctccaggatgggaagagcgtaccacgaaggatgggtgggtatattatgctaaccacactgaagagaaaacgcagtgggaacaccccaaaactggaaagcgaaaaagagtggctggagacctgccatatggttgggagcaggagaccgatgagaatggccaggtgttttttgtagatcacatcaataaacgcacaacgtacctggacccacgccttgcattcactgttgatgataatcccacaaagcctaccaccaggcagagatatgatggtagcactaccgccatggaaattcttcaaggccgggacttcaccggtaaagtcgtggttgtgacaggcgcaaactcaggaattgctaccggcagttgccatcatagagtcttgtgttgttgtccacgaactggcggttccggccgagacgtcctgcagcaacttctccctttgcatgcattgacacggtcgagtgaacggcgcgatggaccggatcctgtgggggcacagcgtgaagcagaccctagaaccgcttggcaacctgttagactttccggtgctcagagcggctgggctcacacccctgctctctgtgtgtctccccatgcatccgctcgggccggcccactcccgaatgttccccccacgcaaatccgcaaaagcaagggtaataaaagttctcacaatcgcgtcaagaacctgaagtatcagtgggaagcaggaaactcatggggaaaggtaagcctgttttggggatgggctcgtcaccggtcactttgcttcttagtagttgcatgtctcaaggtaaagacgtgtctcgtgtgccggtttcgtatcagtctggagaagcaccagcagttctcctttttttactgttatcgcattgcctag

SEQ ID NO: 234098 - DNA, 705 bp, Artificial Sequence
  derived and/or modified sequence
atggccgctcttcgctacgcagggctagacgacacggacagcgaagatgaacttcctccaggctgggaagagagaactacgaaggatggatgggtgtactacgcaaatcatactgaagagaaaactcaatgggaacacccgaaaacgggcaaacggaagagggtcgcgggcgacctcccctatggatgggagcaggaaactgacgaaaatggccaagtgttcttcgttgatcacatcaataaacgcacaacttacctggacccgagacttgcttttaccgtcgatgataaccctactaagccaacaacgcggcaaagatatgacggatcaacgaccgcaatggagatactgcagggcagggactttaccggtaaagtcgtggtggttaccggcgctaattcagggatcggtttcgagacagcgaagagctttgctctgcacggggcacatgttatcctggcatgccggaatatggccagagcatctgaggccgtgtccagaatcctggaagagtggcaacagggtgctgcgactacagtctattgcgctgcggtgccggagctcgaaggcctaggcggcatgtattttaacaattgctgtcgctgcatgccatccccagaggcgcaatctgaagaaactgccagaactctgtgggcactttccgaaaggctgatccaggagcgattggggtcccagagcggatag

SEQ ID NO: 234099 - DNA, 642 bp, Artificial Sequence
  derived and/or modified sequence
atggcggccctccggtacgccgggctcgatgacaccgactctgaggacgagctccctccaggttgggaggagcgcacaaccaaggacggatgggtgtactatgcaaatcataccgaggagaagacacagtgggaacatcctaaaaccgggaagaggaaaagggtggcaggagatcttccctacgggtgggagcaagagacagacgaaaatgggcaggtgttttttgtggatcatatcaataagagaaccacctacttggatcccaggctcgcgttcaccgtagacgataatcccaccaaacctacaaccagacaacggtacgacggaagtacaaccgcaatggaaatactacaaggacgggattttacaggtaaggtagtggtggtcacaggggccaactcaggaattggaaaggccagctgccatgtcggcaggatccttaagcacactcgcgtggaagagctatcactcttgcctacggcaatcaatcgcgaattgcctcccccctgcaccgttctgctaagtcaaaattggcgcgtgtgggagggctgcacctctactacggcagctgcggcgtgtccccaccagaaacttcgagccaaacgccggcccggaccctgcggtaggagtgctcggggctag

SEQ ID NO: 234100 - DNA, 111 bp, Artificial Sequence
  derived and/or modified sequence
atggctgcgctgagatatgcaggcctcgatgacaccgattccgaggatgaactgcctcccgggtgggaggaacgtaccacaaaagatggttgggtgtattatgctaagtag

SEQ ID NO: 234101 - DNA, 570 bp, Artificial Sequence
  derived and/or modified sequence
atggccgccctgcgctatgccggcctggatgacacagacagtgaagatgagctgcccccaggctgggaggagaggaccaccaaggatggctgggtgtactatgccaaccacacagaggagaagacccagtgggagcaccccaagacaggcaagaggaagagggtggccggggacctgccctacggctgggagcaggagacagatgaaaatggccaggtgttctttgtggaccacatcaacaagaggaccacctacctggacccccggctggccttcaccgtggatgacaaccccaccaagcccaccacccggcagagatatgatggcagcaccacagccatggagatcctgcagggccgggacttcaccgggaaggtggtggtggtgactggagccaacagcggcatcggctttgaaacagccaagagctttgccctgcatggagcccacgtgatcctggcctgcaggaacatggcccgggccagcgaggccgtgagccgcatcctggaggagtggaagaccaagtaccaccccccacctgagaagtgccgcatcaagatcttccactag

SEQ ID NO: 234102 - DNA, 936 bp, Artificial Sequence
  derived and/or modified sequence
atggccgccctgcgctatgccggcctggatgacacagacagtgaagatgagctgcccccaggctgggaggagaggaccaccaaggatggctgggtgtactatgccaaccacacagaggagaagacccagtgggagcaccccaagacaggcaagaggaagagggtggccggggacctgccctacggctgggagcaggagacagatgaaaatggccaggtgttctttgtggaccacatcaacaagaggaccacctacctggacccccggctggccttcaccgtggatgacaaccccaccaagcccaccacccggcagagatatgatggcagcaccacagccatggagatcctgcagggccgggacttcaccgggaaggtggtggtggtgactggagccaacagcggcatcgccaccggcagctgccaccaccgggtgctgtgctgctgccccaggactggaggcagcggcagagatgtgctgcagcagctgctgcccctgcacgccctgaccaggagcagcgagaggagagatggccctgaccctgtgggcgcccagcgggaggccgaccccaggacagcctggcagcctgtgcggctgagcggggcccagagcggctgggcccacaccccagccctgtgtgtgagcccccacgccagcgcccgggccggccccctgcccaacgtgccccccacccagatcaggaagagcaaaggaaacaagagcagccacaacagagtgaagaacctgaagtaccagtgggaggccggcaacagctggggcaaggtgtccctcttctggggctgggcccggcacaggagcctgtgcttcctggtggtggcctgcctgaaggtgaagacctgcctggtgtgccgcttccgcatcagcctggagaagcaccagcagttctccttcttctactgctaccgcatcgcctag

SEQ ID NO: 234103 - DNA, 705 bp, Artificial Sequence
  derived and/or modified sequence
atggccgccctgcgctatgccggcctggatgacacagacagtgaagatgagctgcccccaggctgggaggagaggaccaccaaggatggctgggtgtactatgccaaccacacagaggagaagacccagtgggagcaccccaagacaggcaagaggaagagggtggccggggacctgccctacggctgggagcaggagacagatgaaaatggccaggtgttctttgtggaccacatcaacaagaggaccacctacctggacccccggctggccttcaccgtggatgacaaccccaccaagcccaccacccggcagagatatgatggcagcaccacagccatggagatcctgcagggccgggacttcaccgggaaggtggtggtggtgactggagccaacagcggcatcggctttgaaacagccaagagctttgccctgcatggagcccacgtgatcctggcctgcaggaacatggcccgggccagcgaggccgtgagccgcatcctggaggagtggcagcagggcgccgccaccaccgtgtactgtgccgctgtgcctgagctggagggcctgggcggcatgtacttcaacaactgctgccgctgcatgcccagccctgaggcccagagcgaggagacagcccggaccctgtgggccctgtctgagcggctcatccaggagcggctgggcagccagagcggctag

SEQ ID NO: 234104 - DNA, 642 bp, Artificial Sequence
  derived and/or modified sequence
atggccgccctgcgctatgccggcctggatgacacagacagtgaagatgagctgcccccaggctgggaggagaggaccaccaaggatggctgggtgtactatgccaaccacacagaggagaagacccagtgggagcaccccaagacaggcaagaggaagagggtggccggggacctgccctacggctgggagcaggagacagatgaaaatggccaggtgttctttgtggaccacatcaacaagaggaccacctacctggacccccggctggccttcaccgtggatgacaaccccaccaagcccaccacccggcagagatatgatggcagcaccacagccatggagatcctgcagggccgggacttcaccgggaaggtggtggtggtgactggagccaacagcggcatcggcaaggccagctgccacgtgggccgcatcctgaagcacaccagggtggaggagctgagcctgctgcccacagccatcaaccgggagctgcccccaccctgcaccgtgctgctgagccagaactggagggtgtgggagggctgcaccagcaccacagctgctgctgcctgcccccaccagaagctgcgggccaagaggcggcccggcccctgtggccgcagcgcccggggctag

SEQ ID NO: 234105 - DNA, 111 bp, Artificial Sequence
  derived and/or modified sequence
atggccgccctgcgctatgccggcctggatgacacagacagtgaagatgagctgcccccaggctgggaggagaggaccaccaaggatggctgggtgtactatgccaagtag

SEQ ID NO: 234106 - DNA, 570 bp, Artificial Sequence
  derived and/or modified sequence
atggccgccctgcggtacgccggcctggacgacaccgacagcgaggatgagttgcccccaggttgggaagaaagaaccacaaaggacggatgggtgtactacgccaaccacacagaggaaaagactcagtgggagcacccgaagactggtaagagaaagcgagttgccggggaccttccctacggatgggaacaggaaacagacgagaacggtcaggtcttcttcgtagatcatataaacaagcgcacgacatatctcgatccacgcctggccttcaccgtggacgacaaccctactaaaccaacaacacgacagagatatgatggaagcactactgccatggagattctccagggtcgcgacttcacagggaaagtcgtggtagttactggagcgaatagcggcatagggttcgagaccgcaaaaagtttcgctctccacggcgctcacgttatccttgcctgcaggaacatggcgcgggcatcagaggccgtgagcagaatcctggaagaatggaagaccaagtaccatcctccccctgagaagtgcagaatcaaaattttccattag

SEQ ID NO: 234107 - DNA, 936 bp, Artificial Sequence
  derived and/or modified sequence
atggccgccctgcggtacgccggcctggacgacaccgacagcgaggatgaactcccaccagggtgggaggaaaggaccaccaaagacggctgggtatattatgcaaaccacactgaagagaaaacccagtgggaacaccccaaaacgggcaaaaggaaacgggtagctggtgacctgccatacgggtgggaacaggagacagacgaaaatgggcaagttttttttgtcgaccacataaacaaacggaccacgtacctggatccaagactggcgtttactgtcgacgataaccccaccaagcccacaacccgtcagagatacgatggatctaccaccgcaatggaaatcctccagggaagagatttcacggggaaggtggtcgtggtgactggggcgaacagtggcattgcgactgggtcttgtcaccatcgggtgctctgctgttgccctcgcacaggcgggtctggcagggacgtcttgcagcaactgctgcctctacacgccctgacgcgctctagtgagagacgcgatggcccggaccccgtcggggcgcaacgcgaggccgatccgcgcacggcctggcaacctgtgagacttagtggcgcccaatctgggtgggctcacacacccgccctatgtgtttcccctcatgctagcgcgcgggcgggccccctgcccaacgtcccgcccactcaaatacggaaaagtaaagggaataagtccagccataatcgggtaaaaaacctgaagtatcagtgggaggccggcaacagctgggggaaggtctccctattttgggggtgggctagacacaggtcactgtgctttctagtggttgcatgcctgaaggtgaaaacgtgtctggtctgcaggttccgcatttcactggagaagcaccaacagttttcgtttttctactgttataggatcgcatag

SEQ ID NO: 234108 - DNA, 705 bp, Artificial Sequence
  derived and/or modified sequence
atggccgccctgcggtacgccggcctggacgacaccgacagcgaggacgagttgcctcccggctgggaagagcgaaccacgaaagacggatgggtgtactacgcgaaccataccgaagagaaaacacagtgggaacatcccaaaactggaaagagaaaacgcgtggccggagacctgccctacggttgggagcaggagaccgacgaaaatggccaagtgttttttgtggaccatattaataaacggacaacatatctggatcccagacttgcattcaccgtggatgacaatccaaccaaaccaacaacccggcagcgttatgatggatctacgaccgcgatggaaatccttcagggccgcgactttacaggaaaagtggtggtggtaaccggggctaattcaggaattggcttcgagacggctaaaagcttcgcccttcacggagcacacgtgattctggcctgccggaatatggcccgtgcctcagaggctgtttcacggatacttgaggaatggcagcaaggggctgctacaaccgtgtactgcgcagcagtgcctgaactggaaggattaggcggaatgtactttaataactgttgtagatgtatgccatcacccgaggcgcagtctgaagagacagcgagaactctgtgggcactctcagaaaggctcattcaagagaggctgggatcccagtctggatag

SEQ ID NO: 234109 - DNA, 642 bp, Artificial Sequence
  derived and/or modified sequence
atggccgccctgcggtacgccggcctggacgacaccgacagcgaggacgagctacctcccggttgggaggaaaggaccaccaaggatggatgggtgtattacgccaaccatacagaagaaaaaacgcaatgggaacatccaaaaaccgggaagaggaagcgagtggccggtgatcttccatatggatgggaacaagagaccgatgagaatggccaggtattttttgtagatcacatcaacaagcgtactacctatctggatcctcggcttgcttttactgtggatgacaatccaactaagcccacaacgagacaaagatacgacgggagcaccaccgccatggaaatattgcagggtcgcgatttcaccgggaaggtcgttgtggttacgggagcgaacagtggtataggcaaggcctcttgtcatgttggaaggattctaaagcatacacgcgtggaggagttgtccctgctgcccacagccattaaccgggagctgcctcccccgtgcacagtcctcctcagccagaattggagagtgtgggagggttgtaccagcactactgccgcagcagcttgtccccatcagaagctacgggccaaacgaagacccgggccttgtggtaggtccgcgagaggatag

SEQ ID NO: 234110 - DNA, 111 bp, Artificial Sequence
  derived and/or modified sequence
atggccgccctgcggtacgccggcctggacgacaccgacagcgaggacgaactgccccctggttgggaggagcgtaccacaaaagacggatgggtctattacgcaaagtag

SEQ ID NO: 234111 - DNA, 570 bp, Artificial Sequence
  derived and/or modified sequence
atggcagctctgagatacgcgggactcgacgataccgatagtgaggacgaattgccacctgggtgggaagagagaactaccaaagacggctgggtgtactatgctaaccataccgaggagaagacacagtgggagcaccccaaaactggaaaaaggaaaagggtcgcaggcgacttaccctacgggtgggagcaagagactgacgagaacggtcaggtgttcttcgtagaccatattaacaaaaggacaacttacctagatccaaggctagccttcaccgtggacgacaacccaacaaagcctacaactcggcagcggtatgatggaagtactacagccatggaaatactccagggaagagacttcaccggcaaagtagtggttgtcactggggcaaacagcggaatcggcttcgagactgcgaaatccttcgccctccatggcgcacacgtaatactggcatgtcgcaacatggcgagggctagcgaggctgtatcgcggatcttggaagagtggaaaactaagtaccacccaccccctgaaaagtgcaggatcaaaatctttcattag

SEQ ID NO: 234112 - DNA, 936 bp, Artificial Sequence
  derived and/or modified sequence
atggcagctttgcggtatgccggattggatgacaccgacagcgaggacgagctgccccctggttgggaggagcgaacaaccaaggatggttgggtatactacgctaaccacacggaagaaaaaacccagtgggagcaccccaagaccggaaaaaggaagagagtggccggtgatttaccttatggctgggaacaggaaactgatgaaaacggacaagtgttttttgtcgatcatatcaacaaacggacaacctacttagacccgaggctggccttcacagtggatgataaccctactaaacctacaacccgtcagaggtacgacggtagcacaaccgcgatggagattctgcagggacgggattttaccgggaaagtggtagtggtaactggggcaaattctggtatcgcaaccggaagttgccaccatagggttctgtgttgttgtccacggactgggggatctggcagagatgtgctccagcagctgctgcctctccacgctcttacacgctccagcgaacgccgagatggtccagatcccgttggggcacaaagagaggccgacccacgaacagcttggcagcccgtaagactgtcaggagcccagtctggatgggctcatacgcccgctctttgcgtgagcccgcatgcatctgctagggccggacctctgcctaatgttccccctacacagattaggaagagtaagggaaataagagttcccacaaccgagttaaaaacctcaagtatcagtgggaggctgggaacagctggggcaaggtgtccctgttctggggctgggcccgacatcggtcactctgcttcctcgtggtggcgtgccttaaggtcaagacttgtctggtgtgccggtttcgcatttccttggagaagcaccagcaattttcatttttctactgctaccggattgcgtag

SEQ ID NO: 234113 - DNA, 705 bp, Artificial Sequence
  derived and/or modified sequence
atggctgccctaagatacgcaggtctcgatgataccgacagtgaggatgagctgcctccaggctgggaagagcgtactacaaaggacggctgggtgtactatgcgaaccacaccgaggaaaaaactcagtgggagcatccaaagaccgggaagaggaaaagggttgcgggtgatctgccatacggctgggagcaggagacagacgagaacggacaggtattttttgttgaccacattaataaaaggacaacctacctggacccgagactcgctttcaccgtggacgacaaccctacaaagcctacaaccaggcagcgctacgacggcagcacgactgccatggagatcctgcaagggcgtgacttcacagggaaggtcgtggtcgtgaccggagccaacagcggaatcggatttgagaccgcaaaatcttttgctctgcacggcgctcatgtgattctcgcatgtagaaacatggctcgtgcaagcgaagccgttagccggattctcgaggagtggcaacagggggctgctacgactgtatactgtgccgcagtgccagagctcgagggacttggtggaatgtactttaacaactgctgtcgttgtatgcctagccccgaagctcaatccgaggagaccgcaagaacactctgggcgctctccgagcgcctcattcaggaacggcttggtagccagtctggatag

SEQ ID NO: 234114 - DNA, 642 bp, Artificial Sequence
  derived and/or modified sequence
atggccgcattgagatatgccggtctcgatgatacggactctgaagatgagctccctcccggttgggaggagcggaccacgaaggatggttgggtttattatgccaaccacacagaggagaaaactcagtgggagcatccaaagacaggtaaacgcaaacgggtggccggtgaccttccatatggatgggagcaagagaccgatgaaaacggacaggtttttttcgtggaccacattaataaaagaactacctacctggaccctagattggccttcacagtagatgataaccctaccaaacctactaccagacagagatatgacggatcaacaaccgctatggagatcctccagggacgcgattttacaggcaaagtggttgtcgtcacaggggctaatagtgggatcggaaaggcttcctgccatgtgggaaggatcctgaagcatacaagagtggaagaactgagcctgctgccaacagctataaacagagaattacctccgccatgcactgtgctgctcagtcaaaactggagggtatgggagggttgtacctctaccacggctgctgccgcttgccctcatcagaagcttagggccaaaaggcggccaggcccttgtgggaggtctgccaggggatag

SEQ ID NO: 234115 - DNA, 111 bp, Artificial Sequence
  derived and/or modified sequence
atggctgccctgcggtacgccggactggacgacaccgacagtgaggatgaattacctcccggatgggaggagaggactaccaaagatggctgggtctactacgcaaagtag

SEQ ID NO: 234116 - DNA, 735 bp, Artificial Sequence
  derived and/or modified sequence
gcagtgcgcaggcgtgagcggtcgggccccgacgcgcgcgggtctcgtttggagcgggagtgagttcctgagcgagtggacccggcagcgggcgataggggggccaggtgcctccacagtcagccatggcagcgctgcgctacgcggggctggacgacacggacagtgaggacgagctgcctccgggctgggaggagagaaccaccaaggacggctgggtttactacgccaatcacaccgaggagaagactcagtgggaacatccaaaaactggaaaaagaaaacgagtggcaggagatttgccatacggatgggaacaagaaactgatgagaacggacaagtgttttttgttgaccatataaataaaagaaccacctacttggacccaagactggcgtttactgtggatgataatccgaccaagccaaccacccggcaaagatacgacggcagcaccactgccatggaaattctccagggccgggatttcactggcaaagtggttgtggtcactggagctaattcaggaatagggttcgaaaccgccaagtcttttgccctccatggtgcacatgtgatcttggcctgcaggaacatggcaagggcgagtgaagcagtgtcacgcattttagaagaatggaaaacaaaataccaccctccgccagaaaagtgcagaataaaaattttccactagcaaaagaaggaaaaaataaaagatcttgaatagtctcatc

SEQ ID NO: 234117 - DNA, 936 bp, Artificial Sequence
  derived and/or modified sequence
atggcagcgctgcgctacgcggggctggacgacacggacagtgaggacgagctgcctccgggctgggaggagagaaccaccaaggacggctgggtttactacgccaatcacaccgaggagaagactcagtgggaacatccaaaaactggaaaaagaaaacgagtggcaggagatttgccatacggatgggaacaagaaactgatgagaacggacaagtgttttttgttgaccatataaataaaagaaccacctacttggacccaagactggcgtttactgtggatgataatccgaccaagccaaccacccggcaaagatacgacggcagcaccactgccatggaaattctccagggccgggatttcactggcaaagtggttgtggtcactggagctaattcaggaatagcaacagggagctgccaccaccgtgtactgtgctgctgtcccagaactggagggtctgggagggatgtacttcaacaactgctgccgctgcatgccctcaccagaagctcagagcgaagagacggcccggaccctgtgggcgctcagcgagaggctgatccaagaacggcttggcagccagtccggctaagtggagctcagagcggatgggcacacacacccgccctgtgtgtgtcccctcacgcaagtgccagggctgggccccttccaaatgtccctccaacacagatccgcaagagtaaaggaaataagagcagtcacaacagagtgaaaaatcttaagtaccaatgggaagcagggaattcctggggtaaagtatcacttttctggggctgggctaggcataggtctctttgctttctggtggtggcctgtttgaaagtaaaaacctgcttggtgtgtaggttccgtatctccctggagaagcaccagcaattctctttcttttactgttatagaatagcctga

SEQ ID NO: 234118 - DNA, 705 bp, Artificial Sequence
  derived and/or modified sequence
atggcagcgctgcgctacgcggggctggacgacacggacagtgaggacgagctgcctccgggctgggaggagagaaccaccaaggacggctgggtttactacgccaatcacaccgaggagaagactcagtgggaacatccaaaaactggaaaaagaaaacgagtggcaggagatttgccatacggatgggaacaagaaactgatgagaacggacaagtgttttttgttgaccatataaataaaagaaccacctacttggacccaagactggcgtttactgtggatgataatccgaccaagccaaccacccggcaaagatacgacggcagcaccactgccatggaaattctccagggccgggatttcactggcaaagtggttgtggtcactggagctaattcaggaatagggttcgaaaccgccaagtcttttgccctccatggtgcacatgtgatcttggcctgcaggaacatggcaagggcgagtgaagcagtgtcacgcattttagaagaatggcaacagggagctgccaccaccgtgtactgtgctgctgtcccagaactggagggtctgggagggatgtacttcaacaactgctgccgctgcatgccctcaccagaagctcagagcgaagagacggcccggaccctgtgggcgctcagcgagaggctgatccaagaacggcttggcagccagtccggctaa

SEQ ID NO: 234119 - DNA, 642 bp, Artificial Sequence
  derived and/or modified sequence
atggcagcgctgcgctacgcggggctggacgacacggacagtgaggacgagctgcctccgggctgggaggagagaaccaccaaggacggctgggtttactacgccaatcacaccgaggagaagactcagtgggaacatccaaaaactggaaaaagaaaacgagtggcaggagatttgccatacggatgggaacaagaaactgatgagaacggacaagtgttttttgttgaccatataaataaaagaaccacctacttggacccaagactggcgtttactgtggatgataatccgaccaagccaaccacccggcaaagatacgacggcagcaccactgccatggaaattctccagggccgggatttcactggcaaagtggttgtggtcactggagctaattcaggaataggaaaagccagctgccatgttgggaggatactcaagcatacccgtgtagaagaactgagcctcctgccaacagccatcaacagggagctgccaccaccgtgtactgtgctgctgtcccagaactggagggtctgggagggatgtacttcaacaactgctgccgctgcatgccctcaccagaagctcagagcgaagagacggcccggaccctgtgggcgctcagcgagaggctga

SEQ ID NO: 234120 - DNA, 525 bp, Artificial Sequence
  derived and/or modified sequence
tcgggccccgacgcgcgcgggtctcgtttggagcgggagtgagttcctgagcgagtggacccggcagcgggcgataggggggccaggtgcctccacagtcagccatggcagcgctgcgctacgcggggctggacgacacggacagtgaggacgagctgcctccgggctgggaggagagaaccaccaaggacggctgggtttactacgccaagtaagggggccgcagtggggccgcggacgcacctgggaccctgcacagcccacggacgccacctgcgcggggaggacgcgcactccagcgcagcgcgtgcggtgcaaagtgaaagtaactgttaaggagcttcagggaaaagggtccagggttcccagtaggggccggcccccttggtgggcctcgggtccagcgggggtcacctggtggcttcccggcgcgccctctgctgttcaggatgcagcactgcgcggcgcggcgagggcaaagcggcctcatccccgccaaaaaataaagatgttttaaaaagcgca

SEQ ID NO: 234121 - protein, 917 aa, Artificial Sequence
  derived and/or modified sequence
MNRFNGLCKVCSERRYRQITIPRGKDGFGFTICCDSPVRVQAVDSGGPAERAGLQQLDTVLQLNERPVEHWKCVELAHEIRSCPSEIILLVWRMVPQVKPGPDGGVLRRASCKSTHDLQSPPNKREKNCTHGVQARPEQRHSCHLVCDSSDGLLLGGWERYTEVAKRGGQHTLPALSRATAPTDPNYIILAPLNPGSQLLRPVYQEDTIPEESGSPSKGKSYTGLGKKSRLMKTVQTMKGHGNYQNCPVVRPHATHSSYGTYVTLAPKVLVFPVFVQPLDLCNPARTLLLSEELLLYEGRNKAAEVTLFAYSDLLLFTKEDEPGRCDVLRNPLYLQSVKLQEGSSEDLKFCVLYLAEKAECLFTLEAHSQEQKKRVCWCLSENIAKQQQLAASPPDSKMFETEADEKREMALEEGKGPGAEDSPPSKEPSPGQELPPGQDLPPNKDSPSGQEPAPSQEPLSSKDSATSEGSPPGPDAPPSKDVPPCQEPPPAQDLSPCQDLPAGQEPLPHQDPLLTKDLPAIQESPTRDLPPCQDLPPSQVSLPAKALTEDTMSSGDLLAATGDPPAAPRPAFVIPEVRLDSTYSQKAGAEQGCSGDEEDAEEAEEVEEGEEGEEDEDEDTSDDNYGERSEAKRSSMIETGQGAEGGLSLRVQNSLRRRTHSEGSLLQEPRGPCFASDTTLHCSDGEGAASTWGMPSPSTLKKELGRNGGSMHHLSLFFTGHRKMSGADTVGDDDEASRKRKSKNLAKDMKNKLGIFRRRNESPGAPPAGKADKMMKSFKPTSEEALKWGESLEKLLVHKYGLAVFQAFLRTEFSEENLEFWLACEDFKKVKSQSKMASKAKKIFAEYIAIQACKEVNLDSYTREHTKDNLQSVTRGCFDLAQKRIFGLMEKDSYPRFLRSDLYLDLINQKKMSPPL

SEQ ID NO: 234122 - DNA, 2754 bp, Artificial Sequence
  derived and/or modified sequence
atgaaccgtttcaacggcctgtgtaaagtgtgttctgagagacgataccgacagattaccattccgcgaggcaaggacggcttcggattcaccatatgttgtgacagcccagttcgagtgcaagcagtggacagtggtggacctgcagaacgcgcgggcctacaacagctcgacacggttctccagcttaatgagcggccagtggagcattggaaatgcgtggagctggcgcacgagatcagatcgtgcccatctgagattattctcctcgtatggcgaatggtgccccaggttaaaccaggtcctgacggcggggtgctgcgcagagcgtcttgtaaatccacccatgacctccaaagtccaccgaataagagggaaaagaactgtacacacggagtgcaggcacgtcctgaacagcggcattcctgccatctggtctgtgattccagcgatggacttctcctgggcggatgggaaaggtacactgaagtcgctaagcggggaggccaacacaccctgccagcccttagccgagcaacagcacctaccgaccccaattatataattcttgccccgctaaaccccggctcccaattattgagacctgtgtaccaggaagatacgatccccgaggaatccgggtccccctccaagggtaaaagttacaccggtctggggaaaaagagcagactgatgaaaaccgtgcaaactatgaaaggccacggaaattatcagaattgcccagtggtgaggcctcatgccacgcacagtagttacggaacatacgtgactctggcaccaaaggtgctggtctttccagttttcgtccagccgctcgacttatgcaaccctgctagaactttgttgctctcagaagaactgctgttgtatgagggccgcaataaagctgcggaggtgaccttatttgcatactctgatttactgctcttcacaaaagaggacgagcccggccggtgcgatgtgctgagaaacccattgtacttgcaaagcgtgaagctgcaagaagggtccagcgaggaccttaaattctgcgtgctttacctagccgaaaaggcagagtgcttgttcaccctggaggcccattcgcaagagcagaagaaacgagtgtgttggtgcttatccgagaatattgccaaacagcagcaactggcggcctcaccccccgattcaaagatgttcgagactgaggctgatgagaaacgcgagatggcgctcgaggaaggaaagggccctggcgcggaggacagtcctccttcaaaggagccctcaccagggcaggagctccctcccgggcaggacctccctccaaataaagattctccctcaggccaggagcccgccccttcccaagaacctcttagctctaaagactcggcaacgtctgaggggagtccccctggacccgacgccccaccttccaaagatgtccctccatgtcaggaaccaccgcctgctcaagacctgtcgccctgccaggatctcccggccggccaggagccccttccacatcaggaccccctgctgactaaggacctgccggctatccaagaatccccaacaagggatctgcccccttgtcaggatctgccaccctcccaggtcagtctgcccgccaaggctctgacagaggatacgatgtccagcggggacctgttggcagcgactggagacccaccagctgcacctaggcctgcatttgtcattcccgaagtccggcttgactctacatacagtcagaaggcaggggccgagcaagggtgtagtggagacgaggaagacgcggaggaggcagaggaagtggaggagggcgaagagggcgaggaggatgaggacgaggatacctctgacgataactacggcgagaggagcgaagcgaagcgctccagcatgattgagaccggacagggcgccgagggcggattatccttaagagtccaaaactctctcaggcgccggacccatagcgaggggagtctcttgcaggaacctagggggccgtgctttgcctcagacaccactttgcactgcagtgacggagaaggggccgcgtctacttggggaatgccttcacccagcacattaaagaaagagttgggacggaacggcggatccatgcaccatctctccctgttctttaccgggcacaggaaaatgtccggggcagacacagtgggcgacgacgatgaggcctcaagaaagagaaagtctaagaatcttgcgaaggatatgaagaataagctgggcatctttcggagaaggaatgagtctcccggcgctcccccagctggcaaagccgataaaatgatgaagtctttcaaaccaacttcagaggaagctttaaaatggggagagtcacttgaaaagttactggtgcacaaatacggattagctgtcttccaggcattcctccgtaccgagttttcagaagaaaaccttgaattttggctggcgtgcgaggatttcaagaaagtcaagagccagagtaaaatggcatccaaggcgaagaagatctttgctgagtacattgcaatccaggcctgcaaagaggtcaatctcgattcatacactcgagagcataccaaagataaccttcaaagcgttacccgggggtgttttgacttagcacaaaaaaggatcttcggcctcatggagaaggattcctaccccaggtttctcaggtctgacctatacctggacctcattaatcagaagaaaatgtctcctccactgtag

SEQ ID NO: 234123 - DNA, 2754 bp, Artificial Sequence
  derived and/or modified sequence
atgaaccgcttcaacggcctgtgcaaggtgtgcagcgagcggcgctaccggcagatcaccatcccccggggcaaggatggcttcggcttcaccatctgctgtgacagccctgtgcgggtgcaggccgtggacagcggcggccctgctgagcgggccggcctgcagcagctggacacagtgctgcagctgaatgaaagacctgtggagcactggaagtgtgtggagctggcccacgagatccgcagctgccccagcgagatcatcctgctggtgtggaggatggtgccccaggtgaagccaggcccagatggaggagtgctgcggcgggccagctgcaagagcacccatgacctgcagagcccccccaacaagcgggagaagaactgcacccatggagtgcaggcccggcctgagcagaggcacagctgccacctggtgtgtgacagcagtgatggcctgctgctgggcggctgggagcgctacacagaggtggccaagaggggcggccagcacaccctgcctgccctgagccgggccacagcccccacagaccccaactacatcatcctggcccccctgaaccctggcagccagctgctgcggcctgtgtaccaggaggacaccatccctgaggagagcggcagccccagcaagggcaagagctacacaggcctgggcaagaagagccggctgatgaagacagtgcagaccatgaagggccacggcaactaccagaactgccctgtggtgcggccccacgccacccacagcagctatggcacctacgtgaccctggcccccaaggtgctggtgtttcctgtgtttgtgcagcccctggacctgtgcaacccagcccggaccctgctgctgtctgaggagctgctgctgtatgagggcaggaacaaggctgctgaggtgaccctgtttgcctacagcgacctgctgctcttcaccaaggaggatgagcccggccgctgtgatgtgctgaggaaccccctgtacctgcagagcgtgaagctgcaggagggcagcagcgaggacctgaagttctgtgtgctgtacctggccgagaaggccgagtgcctcttcaccctggaggcccacagccaggagcagaagaagagggtgtgctggtgcctgtctgagaacatcgccaagcagcagcagctggccgccagccccccagacagcaagatgtttgaaacagaagcagatgagaagcgggagatggccctggaggagggcaagggccctggagctgaggacagcccccccagcaaggagcccagccctggccaggagctgcccccaggccaggacctgccccccaacaaggacagccccagcggccaggagcccgcccccagccaggagcccctgagcagcaaggacagcgccaccagcgagggcagccccccaggcccagatgccccacccagcaaggatgtgcccccctgccaggagcccccaccagcccaggacctgagcccctgccaggacctgcctgctggccaggagcccctgccccaccaggaccccctgctgaccaaggacctgcctgccatccaggagagccccacccgggacctgcccccctgccaggacctgccccccagccaggtgtccctgcctgccaaggccctgacagaggacaccatgagcagcggggacctgctggccgccaccggggaccccccagctgcccccaggcctgcctttgtgattcctgaggtgcggctggacagcacctacagccagaaggccggggctgagcagggctgcagcggagatgaagaagatgctgaggaggccgaggaggtggaggagggggaggagggggaggaggatgaagatgaggacaccagtgatgacaactacggggagaggtctgaggccaagaggagctccatgattgagaccggccagggcgctgagggcggcctgagcctgcgggtgcagaacagcctgcggcggaggacccacagcgagggcagcctgctgcaggagccccggggcccctgctttgccagtgacaccaccctgcactgcagtgatggagagggcgccgccagcacctggggcatgcccagccccagcaccctgaagaaggagctgggcagaaatggaggctccatgcaccacctgagcctcttcttcaccggccacaggaagatgtctggagctgacacagtgggagatgatgatgaggccagcaggaagaggaagagcaagaacctggccaaggacatgaagaacaagctgggcatcttcagaagaagaaatgaaagccctggggcccctcctgctgggaaggctgacaagatgatgaagagcttcaagcccaccagcgaggaggccctgaagtggggcgagagcctggagaagctgctggtgcacaagtatggcctggccgtgttccaggccttcctgaggacagagttcagcgaggagaacctggagttctggctggcctgtgaggacttcaagaaggtgaagagccagagcaagatggccagcaaggccaagaagatctttgctgagtacatcgccatccaggcctgcaaggaggtgaacctggacagctacacccgggagcacaccaaggacaacctgcagagcgtgacccggggctgctttgacctggcccagaagaggatcttcggcctgatggagaaggacagctacccccgcttcctgcggagtgacctgtacctggacctgatcaaccagaagaagatgagcccccccctgtag

SEQ ID NO: 234124 - DNA, 2754 bp, Artificial Sequence
  derived and/or modified sequence
atgaaccggttcaacggcctgtgcaaggtgtgcagcgagcggcggtatcgtcaaatcactataccacgcggaaaggacggcttcggctttactatctgctgtgactcccctgtccgggtccaggccgttgactcgggaggcccggctgagagggctgggctacaacagctcgacactgtcctacagctgaatgagcggccagtggagcattggaaatgtgtagaattggcacacgagattcgcagctgccctagcgagatcatattgcttgtgtggagaatggttcctcaggtaaaacccggccccgacgggggagtgctgcggcgggcatcatgcaagtcgacgcatgatttgcaatccccgccaaacaaaagagaaaaaaactgtacacatggcgttcaggccaggcctgagcagcggcattcttgccatttggtgtgcgactcttcagatgggcttctgctgggaggttgggagcggtatacggaggtggctaagcgggggggacagcatacgcttcccgctctgtctcgggctacagcgccaactgacccaaactacatcatcctggcaccactcaatccaggctctcagcttctgcggccagtttatcaggaggacacaatcccagaagagagcggcagcccaagtaaagggaagtcatatacaggactcggtaaaaagagccgtctgatgaaaacagtacagacaatgaaagggcacggcaactaccaaaactgccctgtggtcagaccacatgccacccactcctcttacggaacttacgtgacgctagcccctaaggtgctcgtcttccctgttttcgtgcagcctctcgacctctgcaaccctgcccgcacgctgctgctgtccgaggagctactgctgtatgagggccgcaataaagccgctgaagtaactctatttgcatacagcgatctactactgttcaccaaagaagacgagcccggccgttgtgatgtgctccggaatcccctctacctgcagagcgtgaagctccaagagggcagcagcgaagacctcaaattttgtgtgctgtacctggccgaaaaagcggaatgtctgtttactctggaagcgcactcgcaggaacagaagaagagggtgtgttggtgtcttagcgaaaacatcgccaaacagcagcagcttgccgcaagccctcctgacagtaaaatgtttgagacagaggccgacgagaagagggagatggccctggaggagggcaaaggccctggagcagaggatagccctccgtcaaaggagccctcccctgggcaagagttgcccccaggccaggacctgcctcccaataaggacagcccttctgggcaggagccagccccgtctcaagaacccctgtcctctaaggactctgcaacctcggaggggtcccccccaggaccggatgcccctcctagcaaagacgtaccaccttgccaagagccgcctcccgcccaggacctcagtccctgtcaagacctacctgcaggccaggagcctctgcctcaccaggaccccctgttaacgaaggacctgcccgccatccaagaaagcccaacgcgtgacctaccaccatgtcaagacctccctccaagccaggtcagtctgcctgcaaaggctctcaccgaagatacgatgagcagtggtgacttgttggctgccactggagatcctccagcggcacccaggccagccttcgtgattccagaggtcaggctggattctacgtacagccagaaggccggggcagaacagggatgttcgggtgacgaggaagacgcagaggaagctgaagaagtagaagagggggaggaaggagaggaagatgaagacgaggacacgtccgatgacaattatggcgagaggagcgaggccaaacgtagctcaatgatagaaactggtcagggggccgaaggcggcctgagcttacgggtgcagaacagtctgagacgccggacgcactctgagggatccctgcttcaggagccccgagggccctgtttcgctagcgatacaaccctacattgctccgacggggaaggagctgctagcacatggggcatgccatcacctagcacccttaagaaggaactagggcgcaatggagggagcatgcaccatctctctcttttttttactggacatagaaagatgagcggtgctgacaccgtgggggacgacgacgaggcctcccgaaagcgcaagtccaagaatttagcaaaagatatgaagaataagcttggcatctttaggcgcagaaacgagtctccaggggctccccctgccgggaaggctgataagatgatgaagtctttcaagcccaccagcgaggaggcattgaaatggggagaatccctggaaaaattgctggtccacaagtatgggctggctgtttttcaagcgtttctacggaccgaattcagtgaagaaaatctcgaattttggttggcatgcgaggatttcaaaaaagtaaagtctcagagtaagatggctagtaaggccaaaaagatctttgccgaatacatcgcgattcaggcctgcaaggaagtgaatctggactcttatacacgcgaacatacaaaggacaatctccagtccgttacaaggggctgctttgatttagctcagaagcggatcttcggccttatggaaaaggacagttatcccaggtttctgaggtcggacctgtatctggatctgatcaatcagaaaaagatgtcccccccactgtag

SEQ ID NO: 234125 - DNA, 2754 bp, Artificial Sequence
  derived and/or modified sequence
atgaatcgcttcaatgggctgtgcaaggtgtgctcagaaaggcggtaccgccagatcactattcctagggggaaagatggattcgggtttaccatctgctgtgacagcccagtgagagtgcaggcagtcgatagcggcggaccagccgaaagagcaggcctgcagcagctggataccgtccttcagctcaacgaaaggccagtggaacattggaagtgcgtcgagctcgcccacgagatcagatcttgcccatccgagatcatcttactggtgtggaggatggtgccacaggtgaagcccggtcccgacggaggtgtccttcgcagggcgagttgcaagagcactcacgacctgcagtcacccccaaacaagagggaaaagaattgtactcacggcgtccaggccagacccgaacagcgccattcctgccacttagtgtgtgactcctcagacggactccttctcggcggatgggagaggtacacggaagtagctaagagaggaggacagcatacacttcccgctctaagcagagccaccgctcctaccgatcccaactacatcatccttgctcctctgaacccaggcagccagctgctgcggcctgtgtatcaggaagacacaatcccagaggagtcaggatctcccagtaaaggcaagtcatacactggcctgggaaagaaaagtagactgatgaaaacggtccagactatgaaggggcacggcaactaccaaaattgtcccgtggtacgtccacacgccactcattctagctatgggacatacgtgacgttggcacccaaagtcctggtgtttcccgtcttcgtccagcccctcgatctgtgcaaccccgcacgcacactgcttttaagcgaagagctgctcctgtacgaaggtaggaataaggctgcggaagtgacactgttcgcctacagcgatctgttgctgttcacaaaggaagacgaaccaggcaggtgcgacgtgctcaggaatccgctatacctgcagtccgtgaaactgcaagaaggatccagcgaagacctgaagttctgtgtgctgtatcttgccgaaaaagctgagtgcctgttcacactcgaagcccattcgcaggagcagaagaagcgggtgtgttggtgtcttagtgagaatatcgccaaacagcaacagctcgccgctagccctccagacagcaaaatgtttgaaactgaggctgatgaaaaacgggagatggctttagaggaaggtaagggcccaggcgcagaggacagtcccccttccaaggaaccctcccccggacaagaacttccccctggacaagacttacctcctaataaggactcaccttcggggcaggaaccagccccatctcaggagccactgtccagcaaagattcagccacttccgaaggcagccccccaggtccagacgcacccccttccaaggatgtacctccatgccaagaacccccaccagcacaagacttgtccccctgtcaggatctccccgcaggccaggagccgctgccacaccaggatcctctcctgacaaaggaccttcctgctattcaggagagtccaactcgtgacctgccaccttgccaggatttgcctccaagccaagtctcgctacccgctaaggcgttgaccgaggatactatgagctccggcgatctgctggcagccaccggcgatccgcctgctgcaccacgacctgccttcgtcattccagaggttcgtctggacagtacttatagccagaaagcgggagccgaacagggttgttccggagatgaggaggacgctgaagaggctgaagaagtggaggagggcgaggagggggaggaggacgaggatgaggacacatctgacgacaattatggagagaggtccgaggccaagcggagcagcatgattgagaccggccaaggggcagagggcggtctctccctgcgagtacaaaacagcctccggagaaggactcacagtgaaggctcattgcttcaagagcccaggggcccttgcttcgccagtgacactacgttgcactgttccgacggagaaggtgcggcaagcacttgggggatgccctctccctccaccctcaagaaagagcttgggcgaaatggcggatctatgcaccatctgtccctattcttcactggacaccgaaaaatgtccggcgctgatactgtgggggacgacgatgaagctagtagaaagaggaaaagcaaaaaccttgctaaggacatgaaaaataaacttgggattttcagaaggcggaacgaatccccaggtgctccacccgcaggtaaggccgataagatgatgaagagctttaaacctacaagtgaagaagccttgaaatggggggaatccctggaaaagctcctggttcacaagtacgggctggccgtattccaagccttcctgcgcacagagttctccgaagagaatctagagttttggcttgcttgcgaggacttcaagaaggtgaagtcacagagtaaaatggcgtctaaggctaaaaagatcttcgctgagtatattgctatccaggcatgcaaggaggtcaacctggatagctatacaagggagcacactaaggacaacctccagtcagtgacgcgtggctgttttgatcttgcccaaaagcggatcttcggtttgatggaaaaggactcctatcccaggttcttacggagtgatctgtaccttgaccttataaaccagaagaagatgtcacctcctctgtag

SEQ ID NO: 234126 - DNA, 3689 bp, Artificial Sequence
  derived and/or modified sequence
ttggggaggtgagaggtgatttcctgccattcttctgtggggcgggcttcccagggtgctcatgccaggctgacgggtccagtgcgggctcccgctgctgggggagagctgggttttcatggggcggcagccgaggcaggacccgcagccatgaaccgcttcaatgggctctgcaaggtgtgctcggagcgccgctaccgccagatcaccatcccgaggggaaaggacggctttggcttcaccatctgctgcgactctccagttcgagtccaggccgtggattccgggggtccggcggaacgggcagggctgcagcagctggacacggtgctgcagctgaatgagaggcctgtggagcactggaaatgtgtggagctggcccacgagatccggagctgccccagtgagatcatcctactcgtgtggcgcatggtcccccaggtcaagccaggaccagatggcggggtcctgcggcgggcctcctgcaagtcgacacatgacctccagtcaccccccaacaaacgggagaagaactgcacccatggggtccaggcacggcctgagcagcgccacagctgccacctggtatgtgacagctctgatgggctgctgctcggcggctgggagcgctacaccgaggtggccaagcgcgggggccagcacaccctgcctgcactgtcccgtgccactgcccccaccgaccccaactacatcatcctggccccgctgaatcctgggagccagctgctccggcctgtgtaccaggaggataccatccccgaagaatcagggagtcccagtaaagggaagtcctacacaggcctggggaagaagtcccggctgatgaagacagtgcagaccatgaagggccacgggaactaccaaaactgcccggttgtgaggccgcatgccacgcactcaagctatggcacctacgtcaccctggcccccaaagtcctggtgttccctgtctttgttcagcctctagatctctgtaatcctgcccggaccctcctgctgtcagaggagctgctgctgtatgaagggaggaacaaggctgccgaggtgacactgtttgcctattcggacctgctgctcttcaccaaggaggacgagcctggccgctgcgacgtcctgaggaaccccctctacctccagagtgtgaagctgcaggaaggttcttcagaagacctgaaattctgcgtgctctatctagcagagaaggcagagtgcttattcactttggaagcgcactcgcaggagcagaagaagagagtgtgctggtgcctgtcggagaacatcgccaagcagcaacagctggcagcatcacccccggacagcaagatgtttgagacggaggcagatgagaagagggagatggccttggaggaagggaaggggcctggtgccgaggattccccacccagcaaggagccctctcctggccaggagcttcctccaggacaagaccttccacccaacaaggactccccttctgggcaggaacccgctcccagccaagaaccactgtccagcaaagactcagctacctctgaaggatcccctccaggcccagatgctccgcccagcaaggatgtgccaccatgccaggaaccccctccagcccaagacctctcaccctgccaggacctacctgctggtcaagaacccctgcctcaccaggaccctctactcaccaaagacctccctgccatccaggaatcccccacccgggaccttccaccctgtcaagatctgcctcctagccaggtctccctgccagccaaggcccttactgaggacaccatgagctccggggacctactagcagctactggggacccacctgcggcccccaggccagccttcgtgatccctgaggtccggctggatagcacctacagccagaaggcaggggcagagcagggctgctcgggagatgaggaggatgcagaagaggccgaggaggtggaggagggggaggaaggggaggaggacgaggatgaggacaccagcgatgacaactacggagagcgcagtgaggccaagcgcagcagcatgatcgagacgggccagggggctgagggtggcctctcactgcgtgtgcagaactcgctgcggcgccggacgcacagcgagggcagcctgctgcaggagccccgagggccctgctttgcctccgacaccaccttgcactgctcagacggtgagggcgccgcctccacctggggcatgccttcgcccagcaccctcaagaaagagctgggccgcaatggtggctccatgcaccacctttccctcttcttcacaggacacaggaagatgagcggggctgacaccgttggggatgatgacgaagcctcccggaagagaaagagcaaaaacctagccaaggacatgaagaacaagctggggatcttcagacggcggaatgagtcccctggagcccctcccgcgggcaaggcagacaaaatgatgaagtcattcaagcccacctcagaggaagccctcaagtggggcgagtccttggagaagctgctggttcacaaatacgggttagcagtgttccaagccttccttcgcactgagttcagtgaggagaatctggagttctggttggcttgtgaggacttcaagaaggtcaagtcacagtccaagatggcatccaaggccaagaagatctttgctgaatacatcgcgatccaggcatgcaaggaggtcaacctggactcctacacgcgggagcacaccaaggacaacctgcagagcgtcacgcggggctgcttcgacctggcacagaagcgcatcttcgggctcatggaaaaggactcgtaccctcgctttctccgttctgacctctacctggaccttattaaccagaagaagatgagtcccccgctttaggggccactggagtcgagctcagcgttcacaccaggcgggctgggtcccctgcccacctgcctccctgccccctgtgacggagggggcaagcaagcccccagaggctgtgtctctggacagacggatagacatacggaagcgaggcctggaccaagagaggcccaggctactggaggagtagaaggatgggccccgtggggtccccactgccccggtacgagggggcccaagaccctggcaggtcaggggccctggccaagccagatctggagctgctgctccctgctgcggagaccgcggaggcttcgcgttgaccaagttccttaaagaactggctgatggggcaggaggtccaggcctgggctctcgggccctcctagagggccattggagcttgcagctcagacccccactttgagttttatttatttaaatagtagttggatgcttggcacgtcgtcctgtaataggaaacccttgcctcatcagttttcctgatttacaagtgcaatattttagccaatgccttgggagaagctgccatgcaaaggtggacaccattctccagcttcaggggatatgctcgtcccgggcaccggtggcaggcagctggccttctggactaaggcagcctggggggacactgcagtctggctacacacagagatctggcaccccctgggtggagtgtccctcgggggctttgggaaagcatggcaccctcagaccacacagtagccaagttctggagcaaataaaaggcctgtgttatttcttgttcttga

SEQ ID NO: 234127 - DNA, 2754 bp, Artificial Sequence
  derived and/or modified sequence
atgaacagattcaacggcctgtgcaaggtgtgcagcgagagaagatacagacagatcaccatccccagaggcaaggacggcttcggcttcaccatctgctgcgacagccccgtgagagtgcaggccgtggacagcggcggccccgccgagagagccggcctgcagcagctggacaccgtgctgcagctgaacgagagacccgtggagcactggaagtgcgtggagctggcccacgagatcagaagctgccccagcgagatcatcctgctggtgtggagaatggtgccccaggtgaagcccggccccgacggcggcgtgctgagaagagccagctgcaagagcacccacgacctgcagagcccccccaacaagagagagaagaactgcacccacggcgtgcaggccagacccgagcagagacacagctgccacctggtgtgcgacagcagcgacggcctgctgctgggcggctgggagagatacaccgaggtggccaagagaggcggccagcacaccctgcccgccctgagcagagccaccgcccccaccgaccccaactacatcatcctggcccccctgaaccccggcagccagctgctgagacccgtgtaccaggaggacaccatccccgaggagagcggcagccccagcaagggcaagagctacaccggcctgggcaagaagagcagactgatgaagaccgtgcagaccatgaagggccacggcaactaccagaactgccccgtggtgagaccccacgccacccacagcagctacggcacctacgtgaccctggcccccaaggtgctggtgttccccgtgttcgtgcagcccctggacctgtgcaaccccgccagaaccctgctgctgagcgaggagctgctgctgtacgagggcagaaacaaggccgccgaggtgaccctgttcgcctacagcgacctgctgctgttcaccaaggaggacgagcccggcagatgcgacgtgctgagaaaccccctgtacctgcagagcgtgaagctgcaggagggcagcagcgaggacctgaagttctgcgtgctgtacctggccgagaaggccgagtgcctgttcaccctggaggcccacagccaggagcagaagaagagagtgtgctggtgcctgagcgagaacatcgccaagcagcagcagctggccgccagcccccccgacagcaagatgttcgagaccgaggccgacgagaagagagagatggccctggaggagggcaagggccccggcgccgaggacagcccccccagcaaggagcccagccccggccaggagctgccccccggccaggacctgccccccaacaaggacagccccagcggccaggagcccgcccccagccaggagcccctgagcagcaaggacagcgccaccagcgagggcagcccccccggccccgacgccccccccagcaaggacgtgcccccctgccaggagcccccccccgcccaggacctgagcccctgccaggacctgcccgccggccaggagcccctgccccaccaggaccccctgctgaccaaggacctgcccgccatccaggagagccccaccagagacctgcccccctgccaggacctgccccccagccaggtgagcctgcccgccaaggccctgaccgaggacaccatgagcagcggcgacctgctggccgccaccggcgacccccccgccgcccccagacccgccttcgtgatccccgaggtgagactggacagcacctacagccagaaggccggcgccgagcagggctgcagcggcgacgaggaggacgccgaggaggccgaggaggtggaggagggcgaggagggcgaggaggacgaggacgaggacaccagcgacgacaactacggcgagagaagcgaggccaagagaagcagcatgatcgagaccggccagggcgccgagggcggcctgagcctgagagtgcagaacagcctgagaagaagaacccacagcgagggcagcctgctgcaggagcccagaggcccctgcttcgccagcgacaccaccctgcactgcagcgacggcgagggcgccgccagcacctggggcatgcccagccccagcaccctgaagaaggagctgggcagaaacggcggcagcatgcaccacctgagcctgttcttcaccggccacagaaagatgagcggcgccgacaccgtgggcgacgacgacgaggccagcagaaagagaaagagcaagaacctggccaaggacatgaagaacaagctgggcatcttcagaagaagaaacgagagccccggcgccccccccgccggcaaggccgacaagatgatgaagagcttcaagcccaccagcgaggaggccctgaagtggggcgagagcctggagaagctgctggtgcacaagtacggcctggccgtgttccaggccttcctgagaaccgagttcagcgaggagaacctggagttctggctggcctgcgaggacttcaagaaggtgaagagccagagcaagatggccagcaaggccaagaagatcttcgccgagtacatcgccatccaggcctgcaaggaggtgaacctggacagctacaccagagagcacaccaaggacaacctgcagagcgtgaccagaggctgcttcgacctggcccagaagagaatcttcggcctgatggagaaggacagctaccccagattcctgagaagcgacctgtacctggacctgatcaaccagaagaagatgagcccccccctgtag

SEQ ID NO: 234128 - protein, 865 aa, Artificial Sequence
  derived and/or modified sequence
MASLYQRFTGKINTSRSFPAPPEASHLLGGQGPEEDGGAGAKPLGPRAQAAAPRERGGGGGGAGGRPRFQYQARSDGDEEDELVGSNPPQRNWKGIAIALLVILVICSLIVTSVILLTPAEDNSLSQKKKVTVEDLFSEDFKIHDPEAKWISDTEFIYREQKGTVRLWNVETNTSTVLIEGKKIESLRAIRYEISPDREYALFSYNVEPIYQHSYTGYYVLSKIPHGDPQSLDPPEVSNAKLQYAGWGPKGQQLIFIFENNIYYCAHVGKQAIRVVSTGKEGVIYNGLSDWLYEEEILKTHIAHWWSPDGTRLAYAAINDSRVPIMELPTYTGSIYPTVKPYHYPKAGSENPSISLHVIGLNGPTHDLEMMPPDDPRMREYYITMVKWATSTKVAVTWLNRAQNVSILTLCDATTGVCTKKHEDESEAWLHRQNEEPVFSKDGRKFFFIRAIPQGGRGKFYHITVSSSQPNSSNDNIQSITSGDWDVTKILAYDEKGNKIYFLSTEDLPRRRQLYSANTVGNFNRQCLSCDLVENCTYFSASFSHSMDFFLLKCEGPGVPMVTVHNTTDKKKMFDLETNEHVKKAINDRQMPKVEYRDIEIDDYNLPMQILKPATFTDTTHYPLLLVVDGTPGSQSVAEKFEVSWETVMVSSHGAVVVKCDGRGSGFQGTKLLHEVRRRLGLLEEKDQMEAVRTMLKEQYIDRTRVAVFGKDYGGYLSTYILPAKGENQGQTFTCGSALSPITDFKLYASAFSERYLGLHGLDNRAYEMTKVAHRVSALEEQQFLIIHPTADEKIHFQHTAELITQLIRGKANYSLQIYPDESHYFTSSSLKQHLYRSIINFFVECFRIQDKLLTVTAKEDEEED

SEQ ID NO: 234129 - DNA, 2598 bp, Artificial Sequence
  derived and/or modified sequence
atggcaagcctctaccagaggtttaccggaaagatcaacacctcaaggagcttccccgccccaccagaggcctcacacctgctaggaggccagggcccggaagaggatggtggggccggagccaaacccctgggacctagagcacaggcagctgctcctcgggagaggggaggtggcggcgggggtgccgggggtcgcccacgctttcagtaccaggcccgaagtgatggggacgaagaggacgagctggttggcagcaaccccccacagaggaattggaaaggtatagccatcgccctgcttgtaatactcgtcatttgttccctgatcgtgacatccgtgattctgctaacacctgctgaggacaactccctgtcccagaaaaaaaaagtcacggtcgaggacctgttcagcgaggatttcaagattcacgatcctgaggctaagtggatctctgatactgaattcatctaccgagagcaaaaagggaccgtgcgcctgtggaacgtggagactaacacctctacagttttaattgagggtaagaagatcgaatcgttacgggccatcaggtatgagatctcccctgaccgcgaatatgccctcttttcttacaacgtggaacccatttatcaacactcttataccgggtactacgtgctctccaagataccccacggagatccccaaagcctcgatcctccagaagtgtctaatgccaagctccaatacgcagggtggggacctaaaggccagcagctcatttttatattcgaaaataacatctattattgcgcacacgttgggaagcaggccatcagagtcgtcagtaccggaaaagaaggagtgatttataatgggttgtccgactggctatacgaagaggagatcctgaagacccacatagcccactggtggtcccctgacgggactagactggcctacgccgctatcaatgatagccgagtgccaatcatggaactgccaacttatacaggctctatttatccgaccgtcaagccataccattatccaaaggcagggagtgagaatccctctatcagtctgcatgtgattggtctgaacggccccacccatgacctggagatgatgcctcccgacgacccacgaatgcgggaatattacattacaatggtgaagtgggcaacgtccactaaagttgcggttacatggctgaatagggcacaaaatgtctctatactcactctctgcgacgctacaaccggagtgtgtacaaaaaaacacgaggacgaatccgaggcgtggctgcacagacagaatgaagaaccagtcttcagcaaggacggcaggaaattcttttttattcgagccattccacaaggaggaagaggaaaattctatcacatcacggtctcgtcatcacagccgaactcatccaatgataacattcaaagtatcacgtccggagactgggacgtaactaaaatactcgcgtatgacgaaaaaggaaacaagatctattttctttcaactgaagacctgcccagacgcaggcagctgtacagtgccaataccgtcgggaatttcaatagacaatgtctgtcctgcgatctcgtggagaattgcacctacttcagcgctagctttagccacagcatggatttctttttactgaaatgcgaaggacccggcgttcccatggtaacagtgcataacacaactgacaaaaaaaagatgtttgacttggaaaccaacgagcacgtgaaaaaggccattaacgataggcaaatgcctaaagtggagtatcgagatatcgaaattgacgactataatctgcccatgcagatcctgaagccagccacgtttactgatacaacacattatccactccttcttgtcgtcgatgggacacccgggagtcagtctgtggctgagaaattcgaggtctcgtgggaaactgttatggtctcttcccatggcgccgtggtggtgaagtgcgacgggcgcggttctggtttccagggcactaaactgcttcatgaggtgcgacggagattgggcctcctagaagaaaaggaccagatggaggccgttcgaacaatgttaaaggagcaatacatcgataggactcgcgtcgcagtctttggaaaagactatggtggatatctcagcacctacattctgcctgccaagggcgagaatcaaggacaaacctttacatgcgggtccgccctgagcccaattaccgatttcaaactctacgcttcagccttttcggagcggtatttggggctgcacggcttagataatagagcctacgagatgactaaggtggcccaccgtgtttccgcattggaggaacagcagttcctgataatccacccaaccgcagacgagaaaatccatttccaacatacagccgagttgataacgcagctaattcggggaaaggctaattattcactgcaaatttaccctgatgaatcccactatttcacaagtagttctctgaagcagcatctgtatcgctccataatcaattttttcgttgaatgctttcggattcaagacaaattgctcaccgtgacagcaaaggaggacgaagaggaggattag

SEQ ID NO: 234130 - DNA, 2598 bp, Artificial Sequence
  derived and/or modified sequence
atggccagcctgtaccagcgcttcaccgggaagatcaacaccagccgctccttccctgcccctcctgaggccagccacctgctgggcggccagggcccagaagaagatggaggagctggggccaagcccctgggcccccgggcccaggccgccgccccccgggagcggggcggcggcggcggcggggccggcggccggccccgcttccagtaccaggcccggagtgatggagatgaggaggatgagctggtgggcagcaaccccccccagaggaactggaagggcatcgccatcgccctgctggtgatcctggtgatctgcagcctcatcgtgaccagcgtcatcctgctgaccccagctgaggacaacagcctgagccagaagaagaaggtgacagtggaggacctcttcagcgaggacttcaagatccatgaccctgaggccaagtggatcagtgacacagagttcatctaccgggagcagaagggcaccgtgcggctgtggaatgtggagaccaacaccagcacagtgctgattgagggcaagaagattgagagcctgcgggccatccgctatgagatcagcccagaccgggagtatgccctcttctcctacaacgtggagcccatctaccagcacagctacacaggctactacgtgctgagcaagatcccccacggggacccccagagcctggaccccccagaggtgtccaatgccaagctgcagtatgccggctggggccccaagggccagcagctgatcttcatctttgagaacaacatctactactgtgcccacgtgggcaagcaggccatccgggtggtgtccacaggcaaggagggcgtcatctacaacggcctgagtgactggctgtatgaggaggagatcctgaagacccacatcgcccactggtggagcccagatggcacccggctggcctatgctgccatcaatgacagccgggtgcccatcatggagctgcccacctacacaggcagcatctaccccaccgtgaagccctaccactaccccaaggccggcagcgagaaccccagcatcagcctgcacgtgattggcctgaatggccccacccatgacctggagatgatgcccccagatgaccccaggatgagggagtactacatcaccatggtgaagtgggccaccagcaccaaggtggccgtgacctggctgaacagagcccagaatgtgtccatcctgaccctgtgtgatgccaccactggagtgtgcaccaagaagcatgaagatgagagcgaggcctggctgcaccggcagaatgaggagcctgtgttcagcaaggatggcaggaagttcttcttcatccgggccatcccccagggcggccggggcaagttctaccacatcaccgtgagcagcagccagcccaacagcagcaatgacaacatccagagcatcaccagcggggactgggatgtgaccaagatcctggcctatgatgagaagggcaacaagatctacttcctgagcacagaggacctgccccggcggcggcagctgtacagcgccaacacagtgggcaacttcaaccggcagtgcctgagctgtgacctggtggagaactgcacctacttcagcgccagcttcagccacagcatggacttcttcctgctgaagtgtgagggccctggggtgcccatggtgacagtgcacaacaccacagacaagaagaagatgtttgacctggagaccaatgaacatgtgaagaaggccatcaatgaccggcagatgcccaaggtggagtacagagacattgaaattgatgactacaacctgcccatgcagatcctgaagccagccaccttcacagacaccacccactaccccctgctgctggtggtggatggcaccccaggcagccagagcgtggccgagaagtttgaggtgtcctgggagaccgtgatggtgagcagccatggagctgtggtggtgaagtgtgatggccggggcagcggcttccagggcaccaagctgctgcacgaggtgagaagaaggctgggcctgctggaggagaaggaccagatggaggccgtgaggaccatgctgaaggagcagtacatcgacaggaccagggtggccgtgtttgggaaggactatggaggctacctgagcacctacatcctgcctgccaagggggagaaccagggccagaccttcacctgtggcagcgccctgagccccatcacagacttcaagctgtatgccagcgccttcagcgagcgctacctgggcctgcacggcctggacaacagagcctatgagatgaccaaggtggcccaccgggtgtctgccctggaggagcagcagttcctgatcatccaccccacagcagatgagaagatccacttccagcacacagctgagctgatcacccagctgatccggggcaaggccaactacagcctgcagatctacccagatgagagccactacttcaccagcagcagcctgaagcagcacctgtaccgcagcatcatcaacttctttgtggagtgcttccgcatccaggacaagctgctgactgtgacagccaaggaggatgaggaggaggactag

SEQ ID NO: 234131 - DNA, 2598 bp, Artificial Sequence
  derived and/or modified sequence
atggccagcctgtaccagcggttcaccggcaagatcaacaccagccgaagctttcctgccccccccgaggcaagccatctgctaggtggccaaggacccgaggaagacggaggcgctggggccaaaccactgggccctcgcgcacaggcagccgcaccccgagaaaggggcggcggcggcggcggcgcaggagggcgccctaggtttcaataccaggccaggtcagacggcgatgaagaggatgagttagtgggctcaaaccctccccagaggaattggaagggtatcgccatcgcattgttggtaatcctagtcatctgtagcctaatcgtaacatctgtgatcttgctgacacccgcagaggacaatagtctttctcaaaagaagaaggtcacagtagaagacctgttttctgaagattttaaaattcacgacccagaggcgaagtggatctccgatactgagtttatctaccgagagcagaaaggaacggttagattgtggaatgtggagaccaatacctccacggtactcattgagggtaagaaaatcgaatccctgcgcgctatccggtacgagattagcccagatagagaatatgcactgttttcctacaacgtggagcctatttaccaacattcttacacagggtattacgtgttatcaaaaatccctcatggggatcctcagtccctggacccacctgaagtgagcaacgccaaactccagtacgccgggtggggccccaaaggccagcaactaatcttcatcttcgagaataacatatactactgcgcccacgttggtaaacaggccatccgtgtggtgtccacgggtaaagagggtgtcatttacaacggattgtccgactggctctatgaagaggagattcttaagacacacatcgcccactggtggtctccagacgggacgcgactggcctatgctgccatcaatgatagccgggtgccgattatggagttacctacatatacgggctcaatatatccaactgtgaagccatatcactaccccaaggctggttccgagaacccaagcataagcttgcacgtgatcgggctgaatggcccaacacatgacctcgaaatgatgccccccgatgatccccggatgcgtgagtattacattacaatggtgaagtgggcgacatccaccaaagttgctgtgacctggctgaacagagcccaaaatgtttccattttaacattgtgtgacgccacaaccggcgtgtgcacaaagaaacatgaagacgaatctgaagcctggctccaccgtcagaacgaagaaccggttttttctaaagacggacgaaaattcttcttcattcgagccattccccagggcggaagagggaagttctatcatatcactgtgagtagctcgcagcccaacagttccaatgacaacatccagagcataacttcaggcgactgggacgtgaccaaaatcctggcctacgacgagaaaggcaataaaatctatttcctgtctactgaggacttaccaaggcgccgacaactttattccgctaacacagtcggaaactttaacaggcaatgtctgtcatgcgacttagttgaaaactgcacttacttctcagcctctttctctcattcaatggatttttttctcctgaagtgtgagggccccggtgtccctatggtgaccgtgcacaacaccacagataagaaaaagatgtttgaccttgagacaaatgaacacgttaaaaaggccattaacgatagacagatgcccaaagtggagtatcgagacattgagatcgatgattataatttgccgatgcagatactgaagcccgctactttcactgataccacccactatccactgctgctggttgtggatgggacgccggggagccagagtgtggccgaaaagttcgaggtttcctgggagacggtcatggtttcgtcacacggcgctgtcgtcgtcaagtgcgatggccgcggatcagggttccagggaactaaactcttacatgaggtgcgacgaagactggggctcctggaagagaaagaccaaatggaggccgtgcgcactatgttgaaagagcagtacatcgataggacgcgggtggccgttttcgggaaagattacggcgggtatctcagtacctacatcttacctgccaagggagagaaccaggggcaaaccttcacatgcggctccgcgctttcaccgataactgactttaagctgtacgcaagtgctttctcagaacggtatttagggctacatggcctcgacaaccgcgcctacgagatgaccaaggtagcgcatagggtctctgccttggaagagcaacagttcctgatcatccatcccaccgcggacgagaagatacacttccagcacacggccgagctgatcacccaattgatcagaggaaaggcaaattattccttacagatttaccctgatgaatcccattattttaccagttcaagtttaaagcagcacctgtacaggagtatcatcaatttttttgtggaatgctttcgtatccaggacaaactgcttaccgtgaccgccaaagaagacgaggaggaggattag

SEQ ID NO: 234132 - DNA, 2598 bp, Artificial Sequence
  derived and/or modified sequence
atggctagcctgtatcagcgctttacagggaagattaatacaagtcggtcttttccagctccacccgaagcaagccatctactcggagggcagggaccagaagaagatggcggagctggggctaagcccctggggcctcgagcccaggctgcagcacccagagaacggggtggaggcggaggaggggcagggggacgcccaaggttccaatatcaagcacggtcagacggcgatgaggaggacgaacttgttggatccaacccacctcagcgcaattggaagggaattgcgatcgctctgctggtgatattagtcatttgttccctgattgtgaccagtgtgatcttactgactcctgctgaagacaacagtctgtcccagaagaaaaaggtcacagttgaggacctattttcagaagacttcaagatccacgaccctgaggccaaatggatctccgacaccgagtttatctacagagaacagaaaggcacagtgcgattatggaacgtcgaaacaaacacctccaccgttctcatcgaagggaagaaaatagaatcccttcgcgctattcgctatgagattagccccgacagggaatacgccctgttctcttataacgtggagccgatttaccaacactcctataccggatactacgtgttgtccaagatcccccacggggacccacaatctctagacccccctgaggttagcaacgcgaaactgcagtacgccggatggggacctaaaggtcagcagctcatcttcattttcgagaacaacatatactattgcgcccatgtgggaaagcaagccatcagagtggtcagtacgggcaaagaaggagtgatttataatgggctcagcgactggctgtatgaagaggaaatcctaaaaacgcacatagcgcattggtggtcacccgatggtacacgactggcctatgcagctatcaacgattctcgcgtgcctatcatggagctgcccacgtacactggttcgatctacccaacagttaagccctaccattacccgaaggctggctctgagaatccatcaattagcttgcatgtgatcgggttgaatggccctactcacgacctggaaatgatgcctcccgacgatcccagaatgcgggaatattacatcacaatggtgaaatgggccacttccacaaaagtggccgttacctggttaaatcgtgctcagaacgtctctatcctgaccttgtgtgacgccaccacaggagtgtgtacaaagaagcatgaagacgagtcagaagcctggctacacaggcaaaatgaagaaccggtatttagcaaggatggtcgtaagttcttcttcatccgcgctataccccaaggcggacgaggtaagttttatcacatcaccgtaagttccagccagcctaactctagtaatgataatatccaatctattacctccggtgattgggatgttaccaagatattagcctacgacgagaagggtaacaagatttactttctctccacggaggatttaccgaggagacggcagctgtatagcgccaatactgtgggcaactttaacagacaatgcctcagctgcgacctcgtcgagaattgcacttatttcagcgcatccttctctcattcaatggacttttttctactaaagtgtgaaggccctggtgtgcctatggttaccgtgcataataccaccgacaaaaaaaagatgttcgacctggaaaccaacgaacacgtgaagaaagccatcaatgaccggcagatgccaaaagtggaatacagagatatcgagatcgatgactataacctccctatgcagatcctgaagcctgccacatttacagacacaactcattatccactgttactcgtagtagatggcaccccaggctcccaatctgttgccgagaagtttgaagttagctgggaaacggtgatggtatcttctcacggtgccgttgtggtgaagtgcgatggcagaggcagcggctttcagggcacaaagttgctgcacgaggtgcgccgtagattgggcctgctcgaggagaaagatcaaatggaagcagtcaggactatgctgaaagagcagtatatcgataggacacgggtggcagtctttggtaaggactacggtggatacctttctacttacatccttcctgcaaagggggagaatcaaggacagacctttacttgtggcagcgctctgagccctataactgactttaaattgtacgcttcagcattttcagagagatacttgggtctgcacgggctcgacaacagggcctacgagatgacaaaggtcgcccacagagtgtccgctctcgaggagcaacagttccttattatccaccccactgcagatgagaagattcatttccagcatacagccgagttgattactcagctcatcagaggtaaggccaactattcgctgcagatctatcctgacgaatcccactacttcacttctagttccttgaagcagcatctgtacaggtcaatcattaacttttttgtggagtgttttcgtattcaggacaaacttctcaccgttacagccaaagaggacgaggaggaggattag

SEQ ID NO: 234133 - DNA, 2598 bp, Artificial Sequence
  derived and/or modified sequence
atggccagcctgtaccagagattcaccggcaagatcaacaccagcagaagcttccccgccccccccgaggccagccacctgctgggcggccagggccccgaggaggacggcggcgccggcgccaagcccctgggccccagagcccaggccgccgcccccagagagagaggcggcggcggcggcggcgccggcggcagacccagattccagtaccaggccagaagcgacggcgacgaggaggacgagctggtgggcagcaaccccccccagagaaactggaagggcatcgccatcgccctgctggtgatcctggtgatctgcagcctgatcgtgaccagcgtgatcctgctgacccccgccgaggacaacagcctgagccagaagaagaaggtgaccgtggaggacctgttcagcgaggacttcaagatccacgaccccgaggccaagtggatcagcgacaccgagttcatctacagagagcagaagggcaccgtgagactgtggaacgtggagaccaacaccagcaccgtgctgatcgagggcaagaagatcgagagcctgagagccatcagatacgagatcagccccgacagagagtacgccctgttcagctacaacgtggagcccatctaccagcacagctacaccggctactacgtgctgagcaagatcccccacggcgacccccagagcctggacccccccgaggtgagcaacgccaagctgcagtacgccggctggggccccaagggccagcagctgatcttcatcttcgagaacaacatctactactgcgcccacgtgggcaagcaggccatcagagtggtgagcaccggcaaggagggcgtgatctacaacggcctgagcgactggctgtacgaggaggagatcctgaagacccacatcgcccactggtggagccccgacggcaccagactggcctacgccgccatcaacgacagcagagtgcccatcatggagctgcccacctacaccggcagcatctaccccaccgtgaagccctaccactaccccaaggccggcagcgagaaccccagcatcagcctgcacgtgatcggcctgaacggccccacccacgacctggagatgatgccccccgacgaccccagaatgagagagtactacatcaccatggtgaagtgggccaccagcaccaaggtggccgtgacctggctgaacagagcccagaacgtgagcatcctgaccctgtgcgacgccaccaccggcgtgtgcaccaagaagcacgaggacgagagcgaggcctggctgcacagacagaacgaggagcccgtgttcagcaaggacggcagaaagttcttcttcatcagagccatcccccagggcggcagaggcaagttctaccacatcaccgtgagcagcagccagcccaacagcagcaacgacaacatccagagcatcaccagcggcgactgggacgtgaccaagatcctggcctacgacgagaagggcaacaagatctacttcctgagcaccgaggacctgcccagaagaagacagctgtacagcgccaacaccgtgggcaacttcaacagacagtgcctgagctgcgacctggtggagaactgcacctacttcagcgccagcttcagccacagcatggacttcttcctgctgaagtgcgagggccccggcgtgcccatggtgaccgtgcacaacaccaccgacaagaagaagatgttcgacctggagaccaacgagcacgtgaagaaggccatcaacgacagacagatgcccaaggtggagtacagagacatcgagatcgacgactacaacctgcccatgcagatcctgaagcccgccaccttcaccgacaccacccactaccccctgctgctggtggtggacggcacccccggcagccagagcgtggccgagaagttcgaggtgagctgggagaccgtgatggtgagcagccacggcgccgtggtggtgaagtgcgacggcagaggcagcggcttccagggcaccaagctgctgcacgaggtgagaagaagactgggcctgctggaggagaaggaccagatggaggccgtgagaaccatgctgaaggagcagtacatcgacagaaccagagtggccgtgttcggcaaggactacggcggctacctgagcacctacatcctgcccgccaagggcgagaaccagggccagaccttcacctgcggcagcgccctgagccccatcaccgacttcaagctgtacgccagcgccttcagcgagagatacctgggcctgcacggcctggacaacagagcctacgagatgaccaaggtggcccacagagtgagcgccctggaggagcagcagttcctgatcatccaccccaccgccgacgagaagatccacttccagcacaccgccgagctgatcacccagctgatcagaggcaaggccaactacagcctgcagatctaccccgacgagagccactacttcaccagcagcagcctgaagcagcacctgtacagaagcatcatcaacttcttcgtggagtgcttcagaatccaggacaagctgctgaccgtgaccgccaaggaggacgaggaggaggactag

SEQ ID NO: 234134 - DNA, 3710 bp, Artificial Sequence
  derived and/or modified sequence
gcttgccttgctgctgctgctgctgctgcctccccaccgcctttttttttttttaatctggagcggggtggggagtgggaaccggagagaaagcaaaatattaaaaagccccaaagacagccagcaggagcgcggtgcccgatggcttcgctgtaccagaggttcactggcaagatcaacacctcgaggtccttccccgcgcccccggaggcgagtcacctcctgggcggccaggggcccgaggaggacggcggcgcaggagccaagcccctcggcccgcgggcgcaggcggcggcgccccgggagcgcggcggcggcggcggcggcgcgggtggccggccccggttccagtaccaggcgcggagcgatggtgacgaggaggacgagctggtggggagtaaccctccgcagaggaattggaaaggaatagcaattgcactgcttgtcattctggtcatctgctccttgatcgtcacctcggtcatacttctgacaccagcggaagataatagtctgtctcaaaagaagaaggtcactgtagaagatctcttcagtgaagacttcaaaattcatgaccccgaggctaagtggataagtgatacagaattcatctacagagaacagaaaggaacagtgagactgtggaatgttgaaacaaatacttctactgtcttaatagaaggcaaaaaaattgaatcattaagagccatcagatatgaaatatctccagatagagagtatgcacttttttcatacaatgtggaacccatatatcaacactcgtatactggatattacgtcctgagcaaaattcctcatggggatcctcaaagtctggacccaccagaagtcagcaatgcaaaacttcagtatgcaggatggggccctaaaggccaacagctgatatttatttttgaaaacaatatctactactgtgcacatgtcgggaaacaggccatccgtgtggtctccactggcaaggaaggtgtgatttacaatggcctcagtgactggctgtatgaagaggagattttgaagacacacatcgcacactggtggtctccggatggcacgagactcgcctacgccgccatcaatgattcccgtgtccccatcatggagctcccaacttacaccggctccatctaccccaccgtgaagccctaccactatcccaaggctggaagtgagaaccccagcatttccctacacgttattggcttaaatggacccacccatgatctggagatgatgccgcctgatgatccacggatgagggagtactacatcaccatggtgaagtgggccaccagcaccaaggtcgccgtgacctggctgaaccgggcgcagaacgtgtccatcctcaccctctgcgacgccaccacgggggtctgcacgaagaaacacgaggatgaaagtgaggcctggctccacagacagaatgaagaacctgtgttctccaaggatggccgaaagtttttcttcatcagagccatcccccagggaggacgagggaaattctatcacatcacggtgtcctcgtcccagcccaacagcagcaacgacaacatccagtccatcacctccggggactgggacgtgaccaagatcctagcctacgatgagaaggggaataagatctacttcctgagcacggaggacctgcctcggagacgacaactctacagtgccaacacggtgggcaacttcaacaggcagtgcctctcctgtgacctggttgagaactgcacctacttcagcgcttccttcagccatagcatggacttcttcctgctcaagtgcgaaggtcctggtgttcctatggtgacggtgcacaacacaacagataagaaaaaaatgtttgacctagaaacaaatgaacatgtcaagaaggccataaatgaccgacagatgcctaaagtggaatacagggacattgagattgatgattacaacctgcccatgcagatactgaagccagcaaccttcaccgacaccacccactaccctctgctcctggtggtggatggcaccccaggcagccagagtgtggctgagaagttcgaggtgagctgggagacggtgatggtgagcagccacggcgcggtggtggtaaagtgtgacggccgtggcagcggcttccaagggaccaagctcctgcacgaagtgaggcggcggctgggcttgctggaggagaaggaccagatggaggccgtgcggacgatgctgaaggagcagtacattgacaggacgcgcgtggccgtgtttgggaaggattacggtggctacctgagcacctacatcctcccagcaaagggagaaaatcaaggccagacattcacctgcggctctgctctctctccaataacagacttcaaactctatgcctctgcgttttccgagaggtacttgggcctccatggacttgacaacagagcatacgagatgaccaaggtagcccatcgagtctccgcgctggaagaacagcagttcctgatcattcatcccactgccgatgaaaaaattcatttccagcacacagcagaactcattacacaactaattaggggaaaggctaattacagcttacagatttacccggacgaaagccattactttaccagctccagcctcaaacagcatctgtaccggtccatcatcaacttcttcgtggaatgcttcaggatccaggacaaactgctgacagtcacagcgaaagaggacgaggaggaggactaagctcaggtcgctctaagcacaaacgtggctctttctacaaccagatgcaaccgagggatttccctgccctccctcttccctcggaggggcggggcggggcggggccgggtgttccatagcatgtgtgtctcggatgcggaaggcagttttgcttgggaaacaagctccttccccggggtcatcactcacggcctccatggcaccagggacaacgctgtccccgcagcagcgcctcctcccggcgcccgagagaccggcacgccacggcccctcccccaaggaacagagcaaaggatggtggccgcaggccccacgcgagcccacaggacaccggcccctagattccagccaccaagcggaagcatgagacccgcccacactagcctctgtgttcccgttagggacatcacaccctgtctcacgtcgcagtgccatggacgcagcagttacagcaccattgttttagcagtgcgtgttcatatatgggcttgctacttcctgtaatgaggacgttcaacatggtgaggggctacaagaaaacgcttttctgtacagagtcttactgtagctacgctaatggttaacctgatagaattaactcgtatttttctatggttttaacctgatgctccactgtctccgtcatggggttgttttgctgtttggggttgggccttgtttccctttcctttctccagtccacgtgtagactttgcgcttgatgaagaagcagatcggaagtaactgctccctcctcaaggttgtcttcagacgtcttggggacgttcctaaacactgagggggaagacagccaatagcacccattaaaagaaatacctaaataaaacctctctcccactcagctatgctagggcttggctgtaggtgtgcactgtctatttacatccgtccttacaaccatccttgtcctccttggtaccgtatcaagctctttcccatgacatttggtt

SEQ ID NO: 234135 - protein, 158 aa, Artificial Sequence
  derived and/or modified sequence
MDNLSSEEIQQRAHQITDESLESTRRILGLAIESQDAGIKTITMLDEQKEQLNRIEEGLDQINKDMRETEKTLTELNKCCGLCVCPCNSITNDAREDEMEENLTQVGSILGNLKDMALNIGNEIDAQNPQIKRITDKADTNRDRIDIANARAKKLIDS

SEQ ID NO: 234136 - DNA, 477 bp, Artificial Sequence
  derived and/or modified sequence
atggacaacctgagcagcgaggagatccagcagagagcccaccagatcaccgacgagagcctggagagcaccagaagaatcctgggcctggccatcgagagccaggacgccggcatcaagaccatcaccatgctggacgagcagaaggagcagctgaacagaatcgaggagggcctggaccagatcaacaaggacatgagagagaccgagaagaccctgaccgagctgaacaagtgctgcggcctgtgcgtgtgcccctgcaacagcatcaccaacgacgccagagaggacgagatggaggagaacctgacccaggtgggcagcatcctgggcaacctgaaggacatggccctgaacatcggcaacgagatcgacgcccagaacccccagatcaagagaatcaccgacaaggccgacaccaacagagacagaatcgacatcgccaacgccagagccaagaagctgatcgacagctag

SEQ ID NO: 234137 - DNA, 477 bp, Artificial Sequence
  derived and/or modified sequence
atggacaacctttcctccgaggaaattcagcagcgcgcccatcagataacggatgaaagtctggaatccactcgccgcattctcggcctggcgatcgaatcgcaggatgctggtataaagaccattactatgctcgacgagcagaaagagcagctgaacaggattgaggagggtctggaccagatcaataaggatatgcgggaaaccgaaaagacactgacagagctcaataaatgctgcggcctctgcgtctgtccctgcaatagtatcactaacgacgcaagggaggacgagatggaagaaaacttgacgcaggtgggttctattcttggcaacttaaaagatatggccctaaacattggcaacgaaattgatgcccagaacccacaaattaagcgaatcacagataaggcagatacgaaccgcgacaggatcgatatagctaatgctcgcgccaagaagttaatcgacagttag

SEQ ID NO: 234138 - DNA, 477 bp, Artificial Sequence
  derived and/or modified sequence
atggataacctgtctagcgaggagattcaacaacgggcccatcaaattactgatgagagtttagagtctacaaggcgaatcttgggcctggcaattgagtcacaggacgccggcattaagactatcaccatgctcgacgaacagaaagagcagttaaaccggatcgaagagggcctcgaccagattaacaaggatatgagggagactgaaaaaacattaacggagctgaacaagtgttgcgggctgtgcgtatgtccatgcaactcgattactaacgacgctcgcgaagatgaaatggaggaaaatctcactcaggtgggttcaattctgggaaacctgaaagatatggccctgaacatcggtaacgagattgacgctcaaaaccctcagatcaagaggataactgataaggcagacaccaacagggacaggatagatatcgcaaatgccagggcaaaaaagctcatcgatagttag

SEQ ID NO: 234139 - DNA, 477 bp, Artificial Sequence
  derived and/or modified sequence
atggacaacctgagcagcgaggagatccagcagagggcccaccagatcacagatgagagcctggagagcacccggcgcatcctgggcctggccatcgagagccaggatgctggcatcaagaccatcaccatgctggatgagcagaaggagcagctgaacagaattgaggagggcctggaccagatcaacaaggacatgagggagacagagaagaccctgacagagctgaacaagtgctgcggcctgtgtgtgtgcccctgcaacagcatcaccaatgatgcccgggaggatgagatggaggagaacctgacccaggtgggcagcatcctgggcaacctgaaggacatggccctgaacattggaaatgaaattgatgcccagaacccccagatcaagaggatcacagacaaggctgacaccaacagagacagaattgatattgccaatgcccgggccaagaagctgattgacagctag

SEQ ID NO: 234140 - DNA, 477 bp, Artificial Sequence
  derived and/or modified sequence
atggacaacctgagcagcgaggagatccagcagcgggcccaccagatcactgacgagagtctggagtctaccagaagaatattaggcctggctattgagagccaggatgcagggatcaaaacaattactatgttagacgagcagaaggagcagctcaacaggatagaggaggggttagaccagattaataaagatatgcgtgaaactgaaaaaaccctgacagagctgaataagtgctgcggcctctgcgtgtgcccatgtaacagcattactaatgatgcacgagaggacgaaatggaagaaaatctaactcaagtggggtcaatcctgggaaatcttaaagacatggcgctcaacatcggtaatgagatcgatgcccagaatccacagattaaacggattactgataaggctgacacaaatagggacaggattgacattgctaatgcccgggccaaaaagcttattgactcctag

SEQ ID NO: 234141 - DNA, 477 bp, Artificial Sequence
  derived and/or modified sequence
atggacaacctgagcagcgaggagatccagcagcgggcccaccagataactgacgagtctctcgagagcacaagacggatcctgggcctcgccatcgagtctcaggacgccggaattaaaacaattaccatgctagacgagcagaaagagcaactcaacagaattgaagaggggctggatcagatcaacaaggatatgcgggaaaccgaaaaaacccttactgagctcaacaaatgttgcggactttgtgtgtgtccatgtaactcaatcaccaatgatgctcgggaggacgaaatggaggaaaatctaacacaggtcggttcgatcctcggcaacctgaaggatatggctcttaatataggcaacgaaatcgacgctcagaacccccaaatcaagagaattactgacaaggctgacaccaatcgcgatcggattgacattgcgaacgctagggctaagaaactgattgacagctag

SEQ ID NO: 234142 - DNA, 477 bp, Artificial Sequence
  derived and/or modified sequence
atggacaatttgtctagcgaggaaatacaacagcgtgcccaccaaatcaccgatgaatccctggagtccacccgccgtattctgggcctcgctatcgaaagccaggacgccggaatcaagaccattacaatgctggacgaacagaaagaacagttaaatcggatagaggagggacttgatcagataaacaaggacatgagggagactgagaaaactcttacagagctgaataagtgttgtggcctctgtgtttgcccctgtaattccattaccaacgatgcaagggaggacgagatggaagagaacctgactcaggtcggttccatattgggtaacttgaaagatatggcgctgaacatcggaaatgagatcgatgcccagaacccacaaattaaaagaattacggacaaggcggataccaatcgggataggattgacattgcaaacgcaagagctaaaaaactaatcgacagctag

SEQ ID NO: 234143 - DNA, 477 bp, Artificial Sequence
  derived and/or modified sequence
atggataatctgtcatctgaagagattcagcagcgcgctcatcaaattaccgacgaatccttggagagcacccgcaggatcctgggactggctattgaatcccaggacgctggtatcaaaacgatcaccatgcttgacgagcagaaagaacaactgaatcgcatcgaggaaggcctggatcagatcaataaggacatgcgtgaaactgaaaaaactctgacagagctgaacaaatgttgtgggctctgcgtctgcccatgcaattctataacgaacgacgccagggaggacgaaatggaagaaaatctgactcaagtgggaagcatactgggcaacttaaaagacatggcattgaacatcggaaacgaaatagatgctcaaaaccctcagataaagcgcatcaccgataaggctgatacaaatagagaccgaatcgatattgccaatgctcgtgcaaagaagctgatcgactcgtag

SEQ ID NO: 234144 - DNA, 2148 bp, Artificial Sequence
  derived and/or modified sequence
cgcgactagggtgcagcgccaggtccggtgttggggtgtccgagttgccgccggagaggagtggcctcgcccgcttgagttttgattcatcatggataatctgtcatcagaagaaattcaacagagagctcaccagattactgatgagtctctggaaagtacgaggagaatcctgggtttagccattgagtctcaggatgcaggaatcaagaccatcactatgctggatgaacaaaaggaacaactaaaccgcatagaagaaggcttggaccaaataaataaggacatgagagagacagagaagactttaacagaactcaacaaatgctgtggcctttgtgtctgcccatgtaatagcataactaatgatgccagagaagatgaaatggaagagaacctgactcaagtgggcagtatcctgggaaatctaaaagacatggccctgaacataggcaatgagattgatgctcaaaatccacaaataaaacgaatcacagacaaggctgacaccaacagagatcgtattgatattgccaatgccagagcaaagaaactcattgacagctaaagctactgctgttcttctttatcatttattcacttccgtagctcctccttgaaagttattaccttttcagagtttaagttttcggttccacgctcttctaattgggagataatatggaagaagggccagagcagttacagccctccttcttttttgttttctgttgagggccgactgctgctctgccttccttctagtattttctttctcaattcatacgcttagattggttttcatatgtcatgtttagtgttttcatcctcctcatatacttcagcaggttcttttgctttcaagatttggaagcattgccaaagacagccatgaagaaggaagctgtagaggtgttttttgttgttgtttatttttgcttttgtggttgagggaaggacaagagataagaggttgttacctcagtaaaaaccttcaggccacaaagcaaaaagttgcatagccacaacgaagatctagttggatatagtttttgatttaagttgcagttatagccaatttaggctaatgcttggttttggagcttttatacacaacgtttttgttaggcatcacagttttgcaacctctgctccaaagagaaaaatagaatgagttttctttcttttttttttttttggagtcagagtctcgctctcttgtccaggctggagtgcaatagcgcgatctgggctcactgcaacctccgcctccctggttcaagcaattctcctgccttgcctcctgagtagctgggattacaggcgtgtgtcaccacgctcggctaatttttgtatttttagtagagacagggtttcaccatgtcaagctggtcttggactcctgacgtcgtgatccacccgccttggcctcccaaagtactgggattacaggcgtgagccactgtgcctggctgagttttcttaaagtgagcttaatttctgaactcttagtgattcatatatgtacataaatctgtgatcccatttcttattgcaccattcaggaacactttatataaatgagtggctttttatttcatattattagtagtatcatggttccattacaggcctattaacatcatacattgtcattagtctttgaagaaaaaatatgtaaatatatatgtgtaacatgagaatttctctctaaagcagggcttaaaattttttggaaaagtttgacaaagcataccacatgaattcagatttacctcaatgctaagaattatgtttagttaggaaaaaggaaagtcattttgacctcaggtagaaaaatagattgctttgagttttatgtagctttagactttaaaaagttagaatttattctgtaactaaaaattatttgaaaaaattatgcctctggtttaattattggtgattacacactctttctcttacccttgtgtattgaactatgtccataatcaagttgatgtggatcctgaaaagtgttatgaacatctgattggtatttgtcacatttattttaaaattagcatctgaacacttcaaagctgtcagtgtgtattggtttcaccaataaccactgcttgatccttacaattaaattttttaactaac

SEQ ID NO: 234145 - DNA, 477 bp, Artificial Sequence
  derived and/or modified sequence
atggataatctgtcatcagaagaaattcaacagagagctcaccagattactgatgagtctctggaaagtacgaggagaatcctgggtttagccattgagtctcaggatgcaggaatcaagaccatcactatgctggatgaacaaaaggaacaactaaaccgcatagaagaaggcttggaccaaataaataaggacatgagagagacagagaagactttaacagaactcaacaaatgctgtggcctttgtgtctgcccatgtaatagcataactaatgatgccagagaagatgaaatggaagagaacctgactcaagtgggcagtatcctgggaaatctaaaagacatggccctgaacataggcaatgagattgatgctcaaaatccacaaataaaacgaatcacagacaaggctgacaccaacagagatcgtattgatattgccaatgccagagcaaagaaactcattgacagctaa

SEQ ID NO: 234146 - protein, 261 aa, Artificial Sequence
  derived and/or modified sequence
MGLKAAQKTLFPLRSIDDVVRLFAAELGREEPDLVLLSLVLGFVEHFLAVNRVIPTNVPELTFQPSPAPDPPGGLTYFPVADLSIIAALYARFTAQIRGAVDLSLYPREGGVSSRELVKKVSDVIWNSLSRSYFKDRAHIQSLFSFITGTKLDSSGVAFAVVGACQALGLRDVHLALSEDHAWVVFGPNGEQTAEVTWHGKGNEDRRGQTVNAGVAERSWLYLKGSYMRCDRKMEVAFMVCAINPSIDLHTDSLELLQLQQ

SEQ ID NO: 234147 - DNA, 1833 bp, Artificial Sequence
  derived and/or modified sequence
atgggcctgaaggccgcccagaagaccctgttccccctgagaagcatcgacgacgtggtgagactgttcgccgccgagctgggcagagaggagcccgacctggtgctgctgagcctggtgctgggcttcgtggagcacttcctggccgtgaacagagtgatccccaccaacgtgcccgagctgaccttccagcccagccccgcccccgacccccccggcggcctgacctacttccccgtggccgacctgagcatcatcgccgccctgtacgccagattcaccgcccagatcagaggcgccgtggacctgagcctgtaccccagagagggcggcgtgagcagcagagagctggtgaagaaggtgagcgacgtgatctggaacagcctgagcagaagctacttcaaggacagagcccacatccagagcctgttcagcttcatcaccggcaccaagctggacagcagcggcgtggccttcgccgtggtgggcgcctgccaggccctgggcctgagagacgtgcacctggccctgagcgaggaccacgcctgggtggtgttcggccccaacggcgagcagaccgccgaggtgacctggcacggcaagggcaacgaggacagaagaggccagaccgtgaacgccggcgtggccgagagaagctggctgtacctgaagggcagctacatgagatgcgacagaaagatggaggtggccttcatggtgtgcgccatcaaccccagcatcgacctgcacaccgacagcctggagctgctgcagctgcagcagaagctgctgtggctgctgtacgacctgggccacctggagagataccccatggccctgggcaacctggccgacctggaggagctggagcccacccccggcagacccgaccccctgaccctgtaccacaagggcatcgccagcgccaagacctactacagagacgagcacatctacccctacatgtacctggccggctaccactgcagaaacagaaacgtgagagaggccctgcaggcctgggccgacaccgccaccgtgatccaggactacaactactgcagagaggacgaggagatctacaaggagttcttcgaggtggccaacgacgtgatccccaacctgctgaaggaggccgccagcctgctggaggccggcgaggagagacccggcgagcagagccagggcacccagagccagggcagcgccctgcaggaccccgagtgcttcgcccacctgctgagattctacgacggcatctgcaagtgggaggagggcagccccacccccgtgctgcacgtgggctgggccaccttcctggtgcagagcctgggcagattcgagggccaggtgagacagaaggtgagaatcgtgagcagagaggccgaggccgccgaggccgaggagccctggggcgaggaggccagagagggcagaagaagaggccccagaagagagagcaagcccgaggagccccccccccccaagaagcccgccctggacaagggcctgggcaccggccagggcgccgtgagcggcccccccagaaagccccccggcaccgtggccggcaccgccagaggccccgagggcggcagcaccgcccaggtgcccgcccccaccgccagccccccccccgagggccccgtgctgaccttccagagcgagaagatgaagggcatgaaggagctgctggtggccaccaagatcaacagcagcgccatcaagctgcagctgaccgcccagagccaggtgcagatgaagaagcagaaggtgagcacccccagcgactacaccctgagcttcctgaagagacagagaaagggcctgtag

SEQ ID NO: 234148 - DNA, 1668 bp, Artificial Sequence
  derived and/or modified sequence
atgggcctgaaggccgcccagaagaccctgttccccctgagaagcatcgacgacgtggtgagactgttcgccgccgagctgggcagagaggagcccgacctggtgctgctgagcctggtgctgggcttcgtggagcacttcctggccgtgaacagagtgatccccaccaacgtgcccgagctgaccttccagcccagccccgcccccgacccccccggcggcctgacctacttccccgtggccgacctgagcatcatcgccgccctgtacgccagattcaccgcccagatcagaggcgccgtggacctgagcctgtaccccagagagggcggcgtgagcagcagagagctggtgaagaaggtgagcgacgtgatctggaacagcctgagcagaagctacttcaaggacagagcccacatccagagcctgttcagcttcatcaccggcaccaagctggacagcagcggcgtggccttcgccgtggtgggcgcctgccaggccctgggcctgagagacgtgcacctggccctgagcgaggaccacgcctgggtggtgttcggccccaacggcgagcagaccgccgaggtgacctggcacggcaagggcaacgaggacagaagaggccagaccgtgaacgccggcgtggccgagagaagctggctgtacctgaagggcagctacatgagatgcgacagaaagatggaggtggccttcatggtgtgcgccatcaaccccagcatcgacctgcacaccgacagcctggagctgctgcagctgcagcagaagctgctgtggctgctgtacgacctgggccacctggagagataccccatggccctgggcaacctggccgacctggaggagctggagcccacccccggcagacccgaccccctgaccctgtaccacaagggcatcgccagcgccaagacctactacagagacgagcacatctacccctacatgtacctggccggctaccactgcagaaacagaaacgtgagagaggccctgcaggcctgggccgacaccgccaccgtgatccaggactacaactactgcagagaggacgaggagatctacaaggagttcttcgaggtggccaacgacgtgatccccaacctgctgaaggaggccgccagcctgctggaggccggcgaggagagacccggcgagcagagccaggtgagacagaaggtgagaatcgtgagcagagaggccgaggccgccgaggccgaggagccctggggcgaggaggccagagagggcagaagaagaggccccagaagagagagcaagcccgaggagccccccccccccaagaagcccgccctggacaagggcctgggcaccggccagggcgccgtgagcggcccccccagaaagccccccggcaccgtggccggcaccgccagaggccccgagggcggcagcaccgcccaggtgcccgcccccaccgccagccccccccccgagggccccgtgctgaccttccagagcgagaagatgaagggcatgaaggagctgctggtggccaccaagatcaacagcagcgccatcaagctgcagctgaccgcccagagccaggtgcagatgaagaagcagaaggtgagcacccccagcgactacaccctgagcttcctgaagagacagagaaagggcctgtag

SEQ ID NO: 234149 - DNA, 1728 bp, Artificial Sequence
  derived and/or modified sequence
atgggcctgaaggccgcccagaagaccctgttccccctgagaagcatcgacgacgtggtgagactgttcgccgccgagctgggcagagaggagcccgacctggtgctgctgagcctggtgctgggcttcgtggagcacttcctggccgtgaacagagtgatccccaccaacgtgcccgagctgaccttccagcccagccccgcccccgacccccccggcggcctgacctacttccccgtggccgacctgagcatcatcgccgccctgtacgccagattcaccgcccagatcagaggcgccgtggacctgagcctgtaccccagagagggcggcgtgagcagcagagagctggtgaagaaggtgagcgacgtgatctggaacagcctgagcagaagctacttcaaggacagagcccacatccagagcctgttcagcttcatcaccggcaccaagctggacagcagcggcgtggccttcgccgtggtgggcgcctgccaggccctgggcctgagagacgtgcacctggccctgagcgaggaccacgcctggagctggctgtacctgaagggcagctacatgagatgcgacagaaagatggaggtggccttcatggtgtgcgccatcaaccccagcatcgacctgcacaccgacagcctggagctgctgcagctgcagcagaagctgctgtggctgctgtacgacctgggccacctggagagataccccatggccctgggcaacctggccgacctggaggagctggagcccacccccggcagacccgaccccctgaccctgtaccacaagggcatcgccagcgccaagacctactacagagacgagcacatctacccctacatgtacctggccggctaccactgcagaaacagaaacgtgagagaggccctgcaggcctgggccgacaccgccaccgtgatccaggactacaactactgcagagaggacgaggagatctacaaggagttcttcgaggtggccaacgacgtgatccccaacctgctgaaggaggccgccagcctgctggaggccggcgaggagagacccggcgagcagagccagggcacccagagccagggcagcgccctgcaggaccccgagtgcttcgcccacctgctgagattctacgacggcatctgcaagtgggaggagggcagccccacccccgtgctgcacgtgggctgggccaccttcctggtgcagagcctgggcagattcgagggccaggtgagacagaaggtgagaatcgtgagcagagaggccgaggccgccgaggccgaggagccctggggcgaggaggccagagagggcagaagaagaggccccagaagagagagcaagcccgaggagccccccccccccaagaagcccgccctggacaagggcctgggcaccggccagggcgccgtgagcggcccccccagaaagccccccggcaccgtggccggcaccgccagaggccccgagggcggcagcaccgcccaggtgcccgcccccaccgccagccccccccccgagggccccgtgctgaccttccagagcgagaagatgaagggcatgaaggagctgctggtggccaccaagatcaacagcagcgccatcaagctgcagctgaccgcccagagccaggtgcagatgaagaagcagaaggtgagcacccccagcgactacaccctgagcttcctgaagagacagagaaagggcctgtag

SEQ ID NO: 234150 - DNA, 786 bp, Artificial Sequence
  derived and/or modified sequence
atgggcctgaaggccgcccagaagaccctgttccccctgagaagcatcgacgacgtggtgagactgttcgccgccgagctgggcagagaggagcccgacctggtgctgctgagcctggtgctgggcttcgtggagcacttcctggccgtgaacagagtgatccccaccaacgtgcccgagctgaccttccagcccagccccgcccccgacccccccggcggcctgacctacttccccgtggccgacctgagcatcatcgccgccctgtacgccagattcaccgcccagatcagaggcgccgtggacctgagcctgtaccccagagagggcggcgtgagcagcagagagctggtgaagaaggtgagcgacgtgatctggaacagcctgagcagaagctacttcaaggacagagcccacatccagagcctgttcagcttcatcaccggcaccaagctggacagcagcggcgtggccttcgccgtggtgggcgcctgccaggccctgggcctgagagacgtgcacctggccctgagcgaggaccacgcctgggtggtgttcggccccaacggcgagcagaccgccgaggtgacctggcacggcaagggcaacgaggacagaagaggccagaccgtgaacgccggcgtggccgagagaagctggctgtacctgaagggcagctacatgagatgcgacagaaagatggaggtggccttcatggtgtgcgccatcaaccccagcatcgacctgcacaccgacagcctggagctgctgcagctgcagcagtag

SEQ ID NO: 234151 - DNA, 441 bp, Artificial Sequence
  derived and/or modified sequence
atgggcctgaaggccgcccagaagaccctgttccccctgagaagcatcgacgacgtggtgagactgttcgccgccgagctgggcagagaggagcccgacctggtgctgctgagcctggtgctgggcttcgtggagcacttcctggccgtgaacagagtgatccccaccaacgtgcccgagctgaccttccagcccagccccgcccccgacccccccggcggcctgacctacttccccgtggccgacctgagcatcatcgccgccctgtacgccagattcaccgcccagatcagaggcgccgtggacctgagcctgtaccccagagagggcggcgtgagcagcagagagctggtgaagaaggtgagcgacgtgatctggaacagcctgagcagaagctacttcaaggacagagcccacatccagagcctgttcagcttctag

SEQ ID NO: 234152 - DNA, 1041 bp, Artificial Sequence
  derived and/or modified sequence
atgggcctgaaggccgcccagaagaccctgttccccctgagaagcatcgacgacgtggtgagactgttcgccgccgagctgggcagagaggagcccgacctggtgctgctgagcctggtgctgggcttcgtggagcacttcctggccgtgaacagagtgatccccaccaacgtgcccgagctgaccttccagcccagccccgcccccgacccccccggcggcctgacctacttccccgtggccgacctgagcatcatcgccgccctgtacgccagattcaccgcccagatcagaggcgccgtggacctgagcctgtaccccagagagggcggcgtgagcagcagagagctggtgaagaaggtgagcgacgtgatctggaacagcctgagcagaagctacttcaaggacagagcccacatccagagcctgttcagcttcatcaccggcaccaagctggacagcagcggcgtggccttcgccgtggtgggcgcctgccaggccctgggcctgagagacgtgcacctggccctgagcgaggaccacgcctgggtggtgttcggccccaacggcgagcagaccgccgaggtgacctggcacggcaagggcaacgaggacagaagaggccagaccgtgaacgccggcgtggccgagagaagctggctgtacctgaagggcagctacatgagatgcgacagaaagatggaggtggccttcatggtgtgcgccatcaaccccagcatcgacctgcacaccgacagcctggagctgctgcagctgcagcagaagctgctgtggctgctgtacgacctgggccacctggagagataccccatggccctgggcaacctggccgacctggaggagctggagcccacccccggcagacccgaccccctgaccctgtaccacaagggcatcgccagcgccaagacctactacagagacgagcacatctacccctacatgtacctggccggctaccactgcagaaacagaaacgtgagagaggccctgcaggcctgggccgacaccgccacctag

SEQ ID NO: 234153 - DNA, 846 bp, Artificial Sequence
  derived and/or modified sequence
atgggcctgaaggccgcccagaagaccctgttccccctgagaagcatcgacgacgtggtgagactgttcgccgccgagctgggcagagaggagcccgacctggtgctgctgagcctggtgctgggcttcgtggagcacttcctggccgtgaacagagtgatccccaccaacgtgcccgagctgaccttccagcccagccccgcccccgacccccccggcggcctgacctacttccccgtggccgacctgagcatcatcgccgccctgtacgccagattcaccgcccagatcagaggcgccgtggacctgagcctgtaccccagagagggcggcgtgagcagcagagagctggtgaagaaggtgagcgacgtgatctggaacagcctgagcagaagctacttcaaggacagagcccacatccagagcctgttcagcttcatcaccggcaccaagctggacagcagcggcgtggccttcgccgtggtgggcgcctgccaggccctgggcctgagagacgtgcacctggccctgagcgaggaccacgcctgggtggtgttcggccccaacggcgagcagaccgccgaggtgacctggcacggcaagggcaacgaggacagaagaggccagaccgtgaacgccggcgtggccgagagaagctggctgtacctgaagggcagctacatgagatgcgacagaaagatggaggtggccttcatggtgtgcgccatcaaccccagcatcgacctgcacaccgacagcctggagctgctgcagctgcagcagaagctgctgtggctgctgtacgacctgggccacctggagagataccccatggccctgggctag

SEQ ID NO: 234154 - DNA, 1833 bp, Artificial Sequence
  derived and/or modified sequence
atggggctgaaagctgcacaaaaaacgctatttccactgcggagcatcgacgacgtggtgagactctttgcagcggaactggggagggaagaacctgacctggtattgttgagccttgtattggggttcgttgagcatttcctggctgtaaatagagtaatccccacgaacgtccctgagctcacctttcagccaagtcccgctccagatcctcctggcggcctgacttactttcccgtggcggatctctccatcatcgccgcactctacgcgagatttaccgcacagatcaggggagccgtcgacctgtcactctacccccgggaggggggggtctcatcgcgtgaattggttaaaaaagtgagcgacgtcatctggaacagcttaagcaggtcttattttaaggatcgtgctcacatccaatccctgttctcgttcatcactggcaccaagctcgattctagtggagtagcgtttgcagtcgtgggggcctgtcaggcactgggactccgtgatgtgcatcttgccctgtctgaggatcacgcctgggtggtcttcggtcccaatggggaacaaaccgccgaggtgacctggcacggtaaaggaaacgaagaccgtcggggccagaccgtgaacgctggtgtcgcagagagaagttggctatacttaaagggctcttatatgaggtgtgatagaaagatggaggttgctttcatggtctgcgctataaacccttccattgacttgcacaccgatagcctggaactgctgcaactgcaacaaaagctgctctggctcctttacgacttgggccatctcgagcggtatcctatggcccttggcaacctggctgacctggaggaactggaaccaacccccgggagacctgacccactcaccctttaccataagggaatcgctagcgctaagacatactaccgggatgagcacatttacccatatatgtaccttgctggataccactgtagaaaccgcaatgttcgagaagcgcttcaagcttgggcagacactgctaccgtgattcaggactataactactgccgggaggacgaagaaatatataaagagttctttgaagtggccaacgacgtgattcccaatttgttaaaagaggccgcaagcttattggaagcaggggaggaacgcccaggagaacaaagccagggaactcaaagccaaggttcagccctgcaggaccctgagtgcttcgctcacctgctaagattctacgatggtatatgcaaatgggaagaggggagcccaactccggtcctgcatgttggttgggcaaccttcctggtgcagagtctgggtcggttcgaaggccaggtgaggcagaaggtccggatcgtctccagagaagcagaggccgctgaggctgaggagccttggggagaggaagccagggagggcagaaggcggggacctagaagggagtccaaaccagaggaacctccaccacccaaaaaacccgctctggataaaggtctaggcaccggacagggcgccgtgtcagggcctccgcgaaagccaccgggcacagttgccggaacggccagaggccctgagggaggcagcactgcccaggtcccggcccctacggcttctcctcccccggaagggccagtgctgaccttccagtccgaaaagatgaagggcatgaaggagctgttggtggctactaagatcaactccagcgctatcaaactgcagctcaccgcccagtcacaggttcagatgaaaaagcaaaaggtaagcacaccttctgattataccctgtcgtttctcaaaagacagcggaagggtctttag

SEQ ID NO: 234155 - DNA, 1833 bp, Artificial Sequence
  derived and/or modified sequence
atggggctaaaggccgcccaaaagaccctgtttcccctaagaagcatagatgatgtcgttcggctgttcgccgccgaacttggccgagaagaaccagacctagtactcctctcgttagttttgggatttgtggaacacttcctcgctgtgaatcgcgtgattcctacaaacgtccccgagttgaccttccagcccagcccagccccagacccgccaggcggcctgacatattttccagtagctgacctgtccattattgccgcactctatgctaggttcactgctcaaatacgaggggccgtggatctgtcactgtacccgagagaagggggagtgtcatcgcgcgagctcgtcaagaaggtgagcgacgttatctggaacagcttgtcaagatcatacttcaaagatcgcgcccacatccagagcctgtttagctttattaccggaacaaaactggacagtagcggcgtggctttcgctgtggttggcgcctgtcaggcgctggggctcagagacgtgcacttggcattaagcgaggaccacgcctgggtcgtttttgggcccaatggggagcagaccgcagaggttacgtggcatggcaagggcaacgaagaccggaggggtcagactgtcaatgccggcgtcgctgagcgcagctggctttatctcaagggtagttatatgcgatgcgacaggaaaatggaggtggcatttatggtttgcgctatcaacccatctatcgatctccatactgatagcctggagctcctccaacttcagcagaagcttctgtggttattgtacgatctcgggcacctagagaggtatccaatggcgctcgggaacctggctgatctggaggaattggagccaacaccaggtagacccgacccacttaccctgtaccacaagggaatcgcatctgcgaaaacctattatcgggacgaacacatatacccctatatgtatctggcaggctaccactgccgcaacaggaacgtccgcgaggctctgcaggcctgggcggacaccgcaacagtgatccaggactacaattattgtcgggaggacgaggagatctacaaagaatttttcgaggtcgcaaacgatgtaataccaaacctgctcaaggaagcggcttcacttctcgaagcgggtgaagagaggccaggagaacagtcccagggtacgcaatcacaaggaagcgcattacaagatccagagtgtttcgctcacttacttaggttttatgacggcatctgcaaatgggaagaaggaagtccgacaccagtgttacatgtgggatgggctacctttttagttcaatctctgggccgctttgagggtcaggtgcgacaaaaggtgagaatagtgtcccgggaggcagaagcagctgaggccgaggagccttggggcgaggaggcccgcgaaggccgccgccgaggcccccggcgagagtccaagccagaagagccaccacctcctaagaaaccggctctggacaagggtcttggaacagggcaaggcgcagtttccgggccacccagaaagccgccaggcactgtagcgggaactgcacgcggaccagagggaggctctaccgcacaggtccctgcccctaccgcctcacccccaccagaaggaccggtcctcaccttccagtccgagaagatgaaagggatgaaggaacttctggtcgccactaaaattaactcgtccgctataaaactgcaactgacagctcagtcccaagtccagatgaaaaagcagaaagtgtcaacacctagcgattacacgctcagcttcctcaagcgacaacgcaaaggcctgtag

SEQ ID NO: 234156 - DNA, 1668 bp, Artificial Sequence
  derived and/or modified sequence
atggggttgaaagcagctcaaaagactctctttccactccgcagcatagacgacgtggtgcgcctcttcgccgctgagcttggtagagaagagcctgacttggttctcttatccctcgtgctgggattcgtggaacatttcctcgctgtgaatagggtcataccaaccaatgtgccggagctgacttttcaaccttcacccgcgcctgaccctccagggggtctcacatatttcccagtagcagacctcagcatcattgcagcactctatgctcggtttacggcccagatcagaggcgcagtcgacctcagtctatatcccagggaagggggcgtctctagtcgggagctagtcaagaaggtgagcgatgtgatttggaactctttgagccggagctatttcaaggatagagcacatatacagtcactgttctccttcatcaccgggaccaaactggacagttctggtgtggcatttgcagtggtcggggcttgccaggccctcggcctgcgggatgtacacttggcattaagtgaggatcacgcctgggttgtctttgggccaaatggcgaacagactgccgaagtgacttggcacggcaaaggcaacgaagatcgcaggggccagaccgtgaacgccggcgttgccgaaaggagctggctctatctgaaggggtcatacatgcggtgtgatcgaaaaatggaggtggcattcatggtgtgcgccattaacccaagcatcgacctgcacacagacagtcttgagctgctgcagctgcagcagaaattgttatggctgctgtacgacttgggacacttggagaggtatcctatggcattggggaatttggctgatctggaagagctggaacccacccctggtcggccagacccccttactctttaccacaaaggtatcgcgtccgcaaagacttactaccgggatgagcacatctacccttatatgtacctcgctggctaccactgtagaaatagaaatgtccgcgaagccctccaagcttgggctgatacagccacagtgattcaagattataactactgccgcgaagatgaggaaatctacaaagagttcttcgaagtggctaacgatgtgattccgaatctgctgaaagaggcagcaagcctgctggaggcgggtgaggaaaggcccggagagcagtctcaggtgcgccagaaggtcaggattgtttcaagggaagcagaggctgcggaggcagaggagccttggggtgaagaagcccgtgagggaaggcggagaggcccgcgaagggagtccaaaccggaggaaccaccacctcccaaaaaaccggccctggacaaaggcctcgggactggacagggcgccgtgtctggacccccacgaaaaccaccaggcaccgtcgccggcactgctagaggacccgagggtgggagtactgcacaggttccggcccccacagcctcaccaccccccgagggaccagtactgacgttccaatctgagaaaatgaaaggaatgaaagaactgcttgttgccaccaaaatcaattcatcggctatcaaattacaattaactgctcagtctcaggtccagatgaagaaacagaaggttagcacaccaagcgattacaccctgtccttcctcaaaaggcaacgcaaaggactctag

SEQ ID NO: 234157 - DNA, 1728 bp, Artificial Sequence
  derived and/or modified sequence
atggggctgaaagcagcccaaaagactctatttcccctgcggagcatcgacgatgtggtccgactattcgccgcagaactgggccgcgaggaacccgatctggtgcttctatctctggttcttggttttgttgagcatttcctcgccgtaaatagagtcatcccgaccaacgtcccggagctgacctttcagccctctcccgcccctgatccacctggcggcctgacctacttcccagtggcagacctgagtatcattgccgcactgtatgcacgctttactgctcagatacggggcgccgtggatctgtcactgtatccccgtgagggaggcgtgagttcaagagaactggtgaaaaaggttagcgacgtcatttggaatagtctttcacggagttacttcaaggatagagcccacattcaaagcctcttttcattcatcaccggcacaaaactggactcttctggagtggctttcgctgtggtgggtgcctgccaagccctgggcctgcgggacgttcatctcgctctcagcgaagatcatgcctggtcctggctgtatttgaaagggtcatacatgagatgtgatcgtaaaatggaggttgcgttcatggtctgcgctataaaccccagcatagacttgcatacagattctctggagctgctgcagctgcaacaaaaactcctttggctcctgtatgacctgggacacctcgagcgataccccatggccctggggaacctggccgacctagaagaactcgagccaacgcctgggcggccagatccgttgaccctttaccacaaagggatcgcaagtgccaaaacatactacagagacgaacatatttatccctacatgtacttggccgggtatcactgtcgtaaccgcaacgtgcgagaggccctgcaggcctgggccgatactgccaccgtgattcaagactacaactactgccgggaagatgaagaaatctataaagagttctttgaagtcgctaacgatgtcatacccaaccttttgaaggaggccgcctccctgttagaagccggggaggaacggcctggagaacagtcacagggtacccagtctcagggaagtgccctgcaggaccccgagtgttttgcacacctgctccgcttttatgatggaatatgcaagtgggaagaaggatcgcctactccagtcctgcacgtgggatgggcaacatttctcgtacagtctctcggaaggttcgaagggcaagtgcggcaaaaggtgaggatcgttagcagggaagccgaggcggcggaggccgaggaaccgtggggagaggaggcaagggagggtcggaggagaggcccacgccgagagtcaaagcccgaggaacctcccccacccaagaaacctgctctggataaaggtttagggactggtcagggcgccgtgagtggtcccccccgcaagccacccggaacagtcgcaggtaccgcaagggggcctgagggtggatctactgcccaagtgccagctccgactgccagcccgccccctgaagggccagtgcttacctttcagtccgagaagatgaaagggatgaaggaactcctcgttgccactaagatcaactcatccgcaattaaactgcagctgaccgcacagtctcaagtgcagatgaaaaaacaaaaagtgtctaccccgtccgattacacactgtctttcttgaagcgacagcgtaagggtctctag

SEQ ID NO: 234158 - DNA, 1833 bp, Artificial Sequence
  derived and/or modified sequence
atgggccttaaggctgcacagaagactctgttcccgctcagaagcatcgatgatgtggtgagactttttgcggcagaactcggcagggaggagcctgatctggtgttgctgagtctcgtactggggtttgtcgaacacttcctggccgtgaatcgagtcatcccaacaaacgtaccagaactgacatttcagccttctcccgcacccgatccaccgggaggcctaacctacttccctgttgcagatttgagcatcattgccgcactctatgctagatttacggcgcagatccgcggagccgtggacctctcgctgtatcctcgggagggtggggtgtccagtcgcgaactagtcaaaaaggttagcgatgtcatatggaattccctgtcgcgtagctatttcaaggatcgcgctcacatccaaagcctgttctcattcataacaggtaccaagttggattccagcggcgtcgcctttgcagtggtaggggcttgccaagcattaggcctgcgcgacgttcatttggcgctgagtgaggaccatgcgtgggtggtctttggcccaaacggcgaacaaaccgccgaggtgacgtggcacggcaagggcaacgaggaccgccggggtcagaccgtgaatgccggcgtggcagagagatcctggctttatctcaaaggaagctacatgcgttgtgaccggaagatggaagtcgctttcatggtgtgcgcaatcaaccccagtattgacctgcacacagattcactcgaactgctgcagctgcagcagaaactgctgtggctgctgtacgacctcggacacctcgaaagatacccgatggctctgggaaacctcgcggacctggaggagctggagcccaccccgggacgcccagaccctctgacactgtatcataaaggaattgcaagtgccaaaacatactatagagatgagcacatttacccgtatatgtacctggccggctaccattgccggaaccgaaacgttcgagaggccttgcaggcatgggctgataccgccaccgtgatccaggattataactattgccgggaggacgaggagatctacaaggagtttttcgaggtagcaaacgatgtaatccccaatctgcttaaagaagcggccagtctgctggaggccggagaggagagaccgggcgaacagagccaaggcacccagagtcaaggctccgcgctgcaggatccagagtgtttcgcgcatttactgaggttttacgacggcatctgtaaatgggaagaggggagtcctacgcctgtcctgcacgtgggatgggccactttccttgtccagagccttggtcgctttgaagggcaggtgcgacaaaaggtgaggatagtgagccgcgaagcagaggctgcagaagccgaagaaccctggggcgaggaggctagggagggacgtcggcgtggacccaggagggaatccaaacctgaagagccccccccgcccaagaagcccgctctggacaagggactcgggactggccaaggagctgttagcggcccccctaggaaaccccccggcaccgtggctggaacagcccggggtcccgagggtggttccacagcccaagttcccgcacccacagcgtcccccccgccggaaggtcctgtcttgaccttccagtccgagaaaatgaagggaatgaaagaattgctggtggcaaccaagatcaactccagcgctatcaaactgcagctgaccgctcaatcccaggtccagatgaagaagcagaaggtgagcacacctagtgattacacccttagcttcctgaaacggcagaggaaggggctttag

SEQ ID NO: 234159 - DNA, 786 bp, Artificial Sequence
  derived and/or modified sequence
atggggctgaaagctgcccagaagacactgttccccctccgatcgatagacgacgtggttagactgttcgcagctgaactgggtcgcgaagaaccggacttggtactgctctccctcgtgctgggtttcgtggagcacttcttggcagtgaaccgggtgataccaacaaacgtacctgaactgacgttccagccttcccccgctcccgaccctcctgggggactgacttacttccctgttgcagacttgagtatcatcgctgccctgtacgctaggtttactgctcaaatccggggagcagtcgacctgtctctataccctcgggaagggggagtgagtagccgcgagctggtgaagaaagtctccgacgttatttggaactccctgtcccggtcttattttaaagatcgagctcatatacagagtctcttctccttcataaccggcactaaactggacagctctggtgtggcctttgccgtggttggggcttgtcaggcactggggctgagggacgttcatttggctctttccgaggatcatgcctgggtggttttcggtccaaatggagaacagacagcggaggtcacgtggcacgggaaaggaaatgaggataggcgtggccaaactgtaaacgcgggagtggcagagcgttcttggctgtatctaaagggaagctatatgagatgtgaccggaaaatggaggtggcctttatggtctgtgcgattaacccttcaatagatctgcacaccgactctcttgagctgttacagttacagcagtag

SEQ ID NO: 234160 - DNA, 441 bp, Artificial Sequence
  derived and/or modified sequence
atgggcctcaaagccgcccagaaaactcttttccctctgcgaagtatcgacgatgtggtgagactgttcgccgcagaactgggtagagaggaaccggacctcgtactcctatcattggtgctagggttcgttgagcatttccttgcagtgaacagggtgatccccaccaatgtgccagagctgacatttcaaccctcccctgcacccgatccccccggaggactcacctactttcccgtggctgatctgtctatcatcgcagccctgtacgctcgattcactgcccagattaggggagctgtggatctgtcactctacccgcgggaggggggcgtgtctagtagggaactagtgaaaaaggtaagtgatgtgatatggaattctttatcccgctcatattttaaggatagggcccacattcagtccttatttagtttttag

SEQ ID NO: 234161 - DNA, 441 bp, Artificial Sequence
  derived and/or modified sequence
atgggtttgaaggctgcccagaagactctatttcctctccgctccatcgacgacgtcgtgcggctgtttgccgccgagctcggcagggaggaaccagacttggtccttctctccctggtactggggttcgtggaacactttctcgcagtgaatcgagtgatcccaacaaacgtgcctgaactcacatttcagcctagccccgctccagatcctccgggcggcctcacctacttcccagtcgctgacctgtctatcatcgcagcactgtatgccaggttcaccgcccagatcaggggtgccgttgacctgtccctctatcccagggaggggggagtatcttcgagagagctggtgaaaaaggtgagtgatgtgatttggaatagtttgtctaggagttattttaaagatcgggcacatatccaaagcttgttcagcttttag

SEQ ID NO: 234162 - DNA, 1041 bp, Artificial Sequence
  derived and/or modified sequence
atggggctgaaagccgcccagaaaacgctgtttccattacgctcaatcgacgacgttgtgaggctattcgctgcggaactgggcagagaagagcctgatttagtcctcctgagcttagttctggggttcgtggaacactttctggcggtcaatcgagttataccgactaacgtgccagaacttacatttcagccatcccccgcgccagacccaccaggtggtcttacctatttcccagttgctgacctatcaatcatcgcagctctctacgcccgcttcaccgcccaaattcgcggcgccgtggacctgtcactttatccacgtgaaggcggcgtctctagtcgggaactcgttaaaaaagtctccgatgtgatctggaattctttgagtagatcatactttaaagacagagcccacatacagtctcttttcagctttataaccggcactaaactagatagctctggcgtggctttcgcagtcgtgggtgcgtgtcaggccttgggcctgcgggacgttcacctcgcgctaagtgaggaccatgcctgggtggtttttggcccgaatggcgaacagacagctgaagttacttggcacggcaaaggcaacgaagacaggcgtggccagactgtgaacgccggagtcgccgaacgaagctggctttaccttaaagggtcatacatgcgatgcgaccgcaaaatggaggtggcgttcatggtgtgcgccataaacccctctattgatctacatactgattcactcgagctcctgcagttgcagcagaaactcctttggctgctgtacgacctgggacaccttgagaggtaccctatggccctggggaacctggccgacctggaggagctggagcccacgcccggaaggccagatcccctcaccctctaccacaaaggcatagcatcagccaaaacatactacagagacgaacacatctacccatacatgtatttagcgggctatcattgcagaaatagaaatgttagagaggccctgcaagcctgggccgatacggccacttag

SEQ ID NO: 234163 - DNA, 846 bp, Artificial Sequence
  derived and/or modified sequence
atgggcctgaaagctgcacaaaagaccctctttccactgcgcagtatagacgacgtagtcagattgtttgcagcagaactgggccgcgaagagcccgatctcgtacttctcagcctcgttctaggattcgtagagcatttcctcgccgtgaatagggtcattccgaccaacgtgcccgagctgaccttccagccctcacctgccccagatccgcctggcggtctgacctacttccccgtggccgatctgtctatcattgcggctctatatgcgagatttacagcccagatccggggagctgtggatctctcactgtacccacgagaaggcggcgtgagctcgcgcgagctggtcaaaaaggtttctgatgttatatggaacagcttatcccgttcctatttcaaggacagggcacatatccagagcctgttctctttcataacaggcaccaagttggactcgagtggtgtggcatttgccgttgtcggggcgtgccaggctctgggattgcgagacgttcatctcgccctctcagaggaccatgcttgggtcgttttcggacctaatggggaacagactgcggaggtgacctggcatggcaaaggtaatgaagatagacggggtcagaccgtgaatgccggagtcgccgagagatcctggctatatctgaaaggcagttatatgcggtgcgaccgcaagatggaggtggccttcatggtttgcgccataaacccttccattgacctgcataccgactccttggaactgctgcagctgcagcagaaactcctgtggctcctgtatgatctaggccaccttgagcgctacccaatggccttgggatag

SEQ ID NO: 234164 - DNA, 1833 bp, Artificial Sequence
  derived and/or modified sequence
atgggcctgaaggccgcccagaagaccctcttccccctgcggagcattgatgatgtggtgcggctgtttgctgctgagctgggccgggaggagccagacctggtgctgctgagcctggtgctgggctttgtggagcacttcctggccgtgaacagagtcatccccaccaacgtgcctgagctgaccttccagcccagccctgccccagaccccccaggcggcctgacctacttccctgtggccgacctgagcatcatcgccgccctgtatgcccgcttcaccgcccagatcagaggagctgtggacctgagcctgtacccccgggagggcggcgtgagcagccgggagctggtgaagaaggtgtctgatgtgatctggaacagcctgagccgcagctacttcaaggaccgggcccacatccagagcctcttctccttcatcaccggcaccaagctggacagcagtggagtggcctttgctgtggtgggcgcctgccaggccctgggcctgagagatgtgcacctggccctgtctgaagatcatgcctgggtggtgtttggccccaatggagagcagacagctgaggtgacctggcatggaaaaggaaatgaagatcggcggggccagacagtgaatgccggcgtggccgagaggtcctggctgtacctgaagggcagctacatgagatgtgacaggaagatggaggtggccttcatggtgtgtgccatcaaccccagcattgacctgcacacagacagcctggagctgctgcagctgcagcagaagctgctgtggctgctgtatgacctgggccacctggagcgctaccccatggccctgggcaacctggccgacctggaggagctggagcccaccccaggccgcccagaccccctgaccctgtaccacaagggcatcgccagcgccaagacctactacagagatgagcacatctacccctacatgtacctggccggctaccactgcaggaacagaaatgtgcgggaggccctgcaggcctgggccgacacagccaccgtcatccaggactacaactactgccgggaggatgaggagatctacaaggagttctttgaggtggccaatgatgtgatccccaacctgctgaaggaggccgccagcctgctggaggccggggaggagaggcctggagagcagagccagggcacccagagccagggcagcgccctgcaggaccctgagtgctttgcccacctgctgcgcttctatgatggcatctgcaagtgggaggagggcagccccacccctgtgctgcacgtgggctgggccaccttcctggtgcagagcctgggccgctttgagggccaggtgcggcagaaggtgagaattgtgtcccgggaggccgaggccgctgaggccgaggagccctggggcgaggaggcccgggagggcagaagaagaggcccccggcgggagagcaagccagaggagcccccaccacccaagaagccagccctggacaagggcctgggcaccggccagggcgctgtgtctggcccccccaggaagcccccaggcaccgtggccggcacagcccggggccctgagggcggcagcacagcccaggtgcctgcccccacagccagccccccacctgagggccctgtgctgaccttccagagcgagaagatgaagggcatgaaggagctgctggtggccaccaagatcaacagcagcgccatcaagctgcagctgacagcccagagccaggtgcagatgaagaagcagaaggtgtccacccccagcgactacaccctgtccttcctgaagaggcagaggaagggcctgtag

SEQ ID NO: 234165 - DNA, 1668 bp, Artificial Sequence
  derived and/or modified sequence
atgggcctgaaggccgcccagaagaccctcttccccctgcggagcattgatgatgtggtgcggctgtttgctgctgagctgggccgggaggagccagacctggtgctgctgagcctggtgctgggctttgtggagcacttcctggccgtgaacagagtcatccccaccaacgtgcctgagctgaccttccagcccagccctgccccagaccccccaggcggcctgacctacttccctgtggccgacctgagcatcatcgccgccctgtatgcccgcttcaccgcccagatcagaggagctgtggacctgagcctgtacccccgggagggcggcgtgagcagccgggagctggtgaagaaggtgtctgatgtgatctggaacagcctgagccgcagctacttcaaggaccgggcccacatccagagcctcttctccttcatcaccggcaccaagctggacagcagtggagtggcctttgctgtggtgggcgcctgccaggccctgggcctgagagatgtgcacctggccctgtctgaagatcatgcctgggtggtgtttggccccaatggagagcagacagctgaggtgacctggcatggaaaaggaaatgaagatcggcggggccagacagtgaatgccggcgtggccgagaggtcctggctgtacctgaagggcagctacatgagatgtgacaggaagatggaggtggccttcatggtgtgtgccatcaaccccagcattgacctgcacacagacagcctggagctgctgcagctgcagcagaagctgctgtggctgctgtatgacctgggccacctggagcgctaccccatggccctgggcaacctggccgacctggaggagctggagcccaccccaggccgcccagaccccctgaccctgtaccacaagggcatcgccagcgccaagacctactacagagatgagcacatctacccctacatgtacctggccggctaccactgcaggaacagaaatgtgcgggaggccctgcaggcctgggccgacacagccaccgtcatccaggactacaactactgccgggaggatgaggagatctacaaggagttctttgaggtggccaatgatgtgatccccaacctgctgaaggaggccgccagcctgctggaggccggggaggagaggcctggagagcagagccaggtgcggcagaaggtgcgcatcgtgtcccgggaggccgaggccgctgaggccgaggagccctggggcgaggaggcccgggagggcagaagaagaggcccccggcgggagagcaagccagaggagcccccaccacccaagaagccagccctggacaagggcctgggcaccggccagggcgctgtgtctggcccccccaggaagcccccaggcaccgtggccggcacagcccggggccctgagggcggcagcacagcccaggtgcctgcccccacagccagccccccacctgagggccctgtgctgaccttccagagcgagaagatgaagggcatgaaggagctgctggtggccaccaagatcaacagcagcgccatcaagctgcagctgacagcccagagccaggtgcagatgaagaagcagaaggtgtccacccccagcgactacaccctgtccttcctgaagaggcagaggaagggcctgtag

SEQ ID NO: 234166 - DNA, 1728 bp, Artificial Sequence
  derived and/or modified sequence
atgggcctgaaggccgcccagaagaccctcttccccctgcggagcattgatgatgtggtgcggctgtttgctgctgagctgggccgggaggagccagacctggtgctgctgagcctggtgctgggctttgtggagcacttcctggccgtgaacagagtcatccccaccaacgtgcctgagctgaccttccagcccagccctgccccagaccccccaggcggcctgacctacttccctgtggccgacctgagcatcatcgccgccctgtatgcccgcttcaccgcccagatcagaggagctgtggacctgagcctgtacccccgggagggcggcgtgagcagccgggagctggtgaagaaggtgtctgatgtgatctggaacagcctgagccgcagctacttcaaggaccgggcccacatccagagcctcttctccttcatcaccggcaccaagctggacagcagtggagtggcctttgctgtggtgggcgcctgccaggccctgggcctgagagatgtgcacctggccctgtctgaagatcatgcctggagctggctgtacctgaagggcagctacatgagatgtgacaggaagatggaggtggccttcatggtgtgtgccatcaaccccagcattgacctgcacacagacagcctggagctgctgcagctgcagcagaagctgctgtggctgctgtatgacctgggccacctggagcgctaccccatggccctgggcaacctggccgacctggaggagctggagcccaccccaggccgcccagaccccctgaccctgtaccacaagggcatcgccagcgccaagacctactacagagatgagcacatctacccctacatgtacctggccggctaccactgcaggaacagaaatgtgcgggaggccctgcaggcctgggccgacacagccaccgtcatccaggactacaactactgcagagaagatgaggagatctacaaggagttctttgaggtggccaatgatgtgatccccaacctgctgaaggaggccgccagcctgctggaggccggggaggagaggcctggagagcagagccagggcacccagagccagggcagcgccctgcaggaccctgaatgttttgcccacctgctgcgcttctatgatggcatctgcaagtgggaggagggcagccccacccctgtgctgcacgtgggctgggccaccttcctggtgcagagcctgggccgctttgagggccaggtgcggcagaaggtgcgcatcgtgtcccgggaggccgaggccgctgaggccgaggagccctggggcgaggaggcccgggagggcagaagaagaggcccccggcgggagagcaagccagaggagcccccaccacccaagaagccagccctggacaagggcctgggcaccggccagggcgctgtgtctggcccccccaggaagcccccaggcaccgtggccggcacagcccggggccctgagggcggcagcacagcccaggtgcctgcccccacagccagccccccacctgagggccctgtgctgaccttccagagcgagaagatgaagggcatgaaggagctgctggtggccaccaagatcaacagcagcgccatcaagctgcagctgacagcccagagccaggtgcagatgaagaagcagaaggtgtccacccccagcgactacaccctgtccttcctgaagaggcagaggaagggcctgtag

SEQ ID NO: 234167 - DNA, 786 bp, Artificial Sequence
  derived and/or modified sequence
atgggcctgaaggccgcccagaagaccctcttccccctgcggagcattgatgatgtggtgcggctgtttgctgctgagctgggccgggaggagccagacctggtgctgctgagcctggtgctgggctttgtggagcacttcctggccgtgaacagagtcatccccaccaacgtgcctgagctgaccttccagcccagccctgccccagaccccccaggcggcctgacctacttccctgtggccgacctgagcatcatcgccgccctgtatgcccgcttcaccgcccagatcagaggagctgtggacctgagcctgtacccccgggagggcggcgtgagcagccgggagctggtgaagaaggtgtctgatgtgatctggaacagcctgagccgcagctacttcaaggaccgggcccacatccagagcctcttctccttcatcaccggcaccaagctggacagcagtggagtggcctttgctgtggtgggcgcctgccaggccctgggcctgagagatgtgcacctggccctgtctgaagatcatgcctgggtggtgtttggccccaatggagagcagacagctgaggtgacctggcatggaaaaggaaatgaagatcggcggggccagacagtgaatgccggcgtggccgagaggtcctggctgtacctgaagggcagctacatgagatgtgacaggaagatggaggtggccttcatggtgtgtgccatcaaccccagcattgacctgcacacagacagcctggagctgctgcagctgcagcagtag

SEQ ID NO: 234168 - DNA, 441 bp, Artificial Sequence
  derived and/or modified sequence
atgggcctgaaggccgcccagaagaccctcttccccctgcggagcattgatgatgtggtgcggctgtttgctgctgagctgggccgggaggagccagacctggtgctgctgagcctggtgctgggctttgtggagcacttcctggccgtgaacagagtcatccccaccaacgtgcctgagctgaccttccagcccagccctgccccagaccccccaggcggcctgacctacttccctgtggccgacctgagcatcatcgccgccctgtatgcccgcttcaccgcccagatcagaggagctgtggacctgagcctgtacccccgggagggcggcgtgagcagccgggagctggtgaagaaggtgtctgatgtgatctggaacagcctgagccgcagctacttcaaggaccgggcccacatccagagcctcttctccttctag

SEQ ID NO: 234169 - DNA, 1041 bp, Artificial Sequence
  derived and/or modified sequence
atgggcctgaaggccgcccagaagaccctcttccccctgcggagcattgatgatgtggtgcggctgtttgctgctgagctgggccgggaggagccagacctggtgctgctgagcctggtgctgggctttgtggagcacttcctggccgtgaacagagtcatccccaccaacgtgcctgagctgaccttccagcccagccctgccccagaccccccaggcggcctgacctacttccctgtggccgacctgagcatcatcgccgccctgtatgcccgcttcaccgcccagatcagaggagctgtggacctgagcctgtacccccgggagggcggcgtgagcagccgggagctggtgaagaaggtgtctgatgtgatctggaacagcctgagccgcagctacttcaaggaccgggcccacatccagagcctcttctccttcatcaccggcaccaagctggacagcagtggagtggcctttgctgtggtgggcgcctgccaggccctgggcctgagagatgtgcacctggccctgtctgaagatcatgcctgggtggtgtttggccccaatggagagcagacagctgaggtgacctggcatggaaaaggaaatgaagatcggcggggccagacagtgaatgccggcgtggccgagaggtcctggctgtacctgaagggcagctacatgagatgtgacaggaagatggaggtggccttcatggtgtgtgccatcaaccccagcattgacctgcacacagacagcctggagctgctgcagctgcagcagaagctgctgtggctgctgtatgacctgggccacctggagcgctaccccatggccctgggcaacctggccgacctggaggagctggagcccaccccaggccgcccagaccccctgaccctgtaccacaagggcatcgccagcgccaagacctactacagagatgagcacatctacccctacatgtacctggccggctaccactgcaggaacagaaatgtgcgggaggccctgcaggcctgggccgacacagccacctag

SEQ ID NO: 234170 - DNA, 846 bp, Artificial Sequence
  derived and/or modified sequence
atgggcctgaaggccgcccagaagaccctcttccccctgcggagcattgatgatgtggtgcggctgtttgctgctgagctgggccgggaggagccagacctggtgctgctgagcctggtgctgggctttgtggagcacttcctggccgtgaacagagtcatccccaccaacgtgcctgagctgaccttccagcccagccctgccccagaccccccaggcggcctgacctacttccctgtggccgacctgagcatcatcgccgccctgtatgcccgcttcaccgcccagatcagaggagctgtggacctgagcctgtacccccgggagggcggcgtgagcagccgggagctggtgaagaaggtgtctgatgtgatctggaacagcctgagccgcagctacttcaaggaccgggcccacatccagagcctcttctccttcatcaccggcaccaagctggacagcagtggagtggcctttgctgtggtgggcgcctgccaggccctgggcctgagagatgtgcacctggccctgtctgaagatcatgcctgggtggtgtttggccccaatggagagcagacagctgaggtgacctggcatggaaaaggaaatgaagatcggcggggccagacagtgaatgccggcgtggccgagaggtcctggctgtacctgaagggcagctacatgagatgtgacaggaagatggaggtggccttcatggtgtgtgccatcaaccccagcattgacctgcacacagacagcctggagctgctgcagctgcagcagaagctgctgtggctgctgtatgacctgggccacctggagcgctaccccatggccctgggctag

SEQ ID NO: 234171 - DNA, 1833 bp, Artificial Sequence
  derived and/or modified sequence
atgggcctgaaggccgcccagaagaccctgttccccctgcggagcattgacgatgtggttaggttgttcgctgcagagcttgggagagaggagccagacctggtattactgtctcttgtgttaggatttgtggagcactttctggccgtgaatagggtgatccccactaatgttccagaactcacatttcagccctcgcccgcccctgatcctcccggcggacttacttatttcccggtcgcagacttgtctataatagcagcactctacgcaagattcaccgcccagatccggggagcagttgacttaagtctgtatcctagggagggtggcgtgtcaagccgggaactggtgaagaaagtcagtgacgtcatttggaattctctgagtcggagttactttaaggatagagcccacattcaaagcctgttctcattcatcacaggcacaaaattggatagcagcggggtggcattcgcggtggtaggcgcctgtcaagcgctcggtttacgggacgtgcacctcgctttaagcgaggaccatgcttgggtggtgttcggaccaaacggcgagcagactgcagaagtgacatggcacggtaaaggaaacgaggaccgccgaggtcagactgttaacgccggtgtggccgagcgctcatggttatatttgaagggctcctacatgcgctgcgaccggaaaatggaggtggccttcatggtttgtgccattaatccctctatcgacttgcatactgactcgctcgagctactgcagttacagcagaaactgttgtggttactttacgatctaggccacctggaacgatatccgatggccctgggaaacctggccgacctagaagagcttgagcccactccaggccgaccagaccccctaacgctttatcacaaagggatcgcctccgctaagacgtattatagagacgaacacatctatccatacatgtacctggccggttatcactgccggaaccgtaatgttagggaagcactacaggcctgggccgacaccgcaacagttatccaggactataattattgtcgagaggatgaagaaatctacaaagagtttttcgaggtggccaatgacgtaatccctaatctgctgaaagaagccgccagcttacttgaggcgggagaggagagacctggcgagcaatctcagggcacacagtcccaaggaagcgctttgcaggatccagagtgctttgcccatctgcttcgcttttacgatggcatttgtaagtgggaggaaggcagccctactcctgtacttcacgttggctgggccaccttcctggtgcaaagtctcggacggttcgaggggcaagtccgtcaaaaggttcgaattgtctctcgggaggccgaagcagcagaggctgaagaaccatggggggaagaggcccgcgagggtcgcagacgcggcccccggcgagagagcaagcctgaagaaccaccaccgcctaaaaaaccagcactcgacaagggcctggggacaggtcagggggcagtcagtggaccccctcgaaaaccgccaggaaccgtggccggaacagcgcgaggacctgaggggggctccacagcacaggttcctgccccaacagctagcccccctccggaggggcccgtattgacgttccagtcggaaaaaatgaagggaatgaaagaactcctcgtcgcgaccaaaattaactccagcgctataaagctccagttaacagctcagtctcaggtgcagatgaaaaaacagaaagtaagcactccgagcgactacacattgagcttcttaaaaaggcagcgaaaaggactttag

SEQ ID NO: 234172 - DNA, 1833 bp, Artificial Sequence
  derived and/or modified sequence
atgggcctgaaggccgcccagaagaccctgttccccctgcggagcatcgatgatgtagtgaggttgttcgccgcggaactcggtcgtgaggagccagatctcgttctcctgagtcttgtattaggcttcgttgaacactttctggccgtcaatcgagtaattcctacgaatgttcccgagctgacctttcagccgtccccagcacctgatccccccggcggcctcacctattttcctgtcgcggatctgtccatcattgctgctctatatgcgcggttcactgcccagatccgcggcgctgtggacctgtcactgtacccgagggaggggggcgttagttctcgggagctagtgaagaaggtgtcagacgtgatttggaatagcctgagccgatcatacttcaaagatcgagctcacatccagtcattgttcagcttcatcactggcactaaattagactcttcgggtgtggcattcgccgtcgtaggggcctgccaggccctgggtcttcgcgatgtccatctcgctctctcagaggatcacgcatgggtcgtcttcggaccaaacggggaacaaactgctgaagtcacatggcacggcaaaggtaacgaagaccgcaggggtcaaaccgttaacgccggagtggctgaaagatcttggctgtatctgaagggatcttatatgcggtgtgaccgtaaaatggaagtggcttttatggtgtgtgctatcaacccttccatcgacttacatacagatagtctggaattattgcagctgcaacaaaagttattgtggctcctgtacgacttaggtcatctcgagcgctatcccatggcattgggtaaccttgcggatcttgaagagctcgaacctacaccgggccgacccgatccgctgacattgtaccataaaggcatcgcttcggcaaagacctattacagagacgagcacatctacccctatatgtatctcgcgggctaccattgtagaaaccgaaatgtcagagaggctctccaggcgtgggctgatacagcaactgtgatccaggattataactactgccgagaggatgaagaaatctacaaggaatttttcgaggtggctaacgacgttattcccaacctgctcaaggaagcagcctcacttctcgaagccggggaggaacgcccaggagagcagtcccagggcacgcagtcccagggtagcgcactccaggacccagaatgcttcgcccatctgctacggttctacgatgggatatgtaaatgggaagagggcagtcccacgcctgtgctgcacgttgggtgggccacatttcttgtgcagagtcttggcagatttgagggacaagtgagacagaaggtgcgtattgtcagtagagaggccgaggccgccgaggctgaggaaccatggggcgaagaagcaagggaggggcgtcgcaggggccccagacgtgagtccaagcccgaggaaccgccaccgcctaaaaaaccagccctggacaagggccttggaaccggccagggggcggtttccggtccaccccgcaagcctccaggcactgtggcaggtaccgccaggggcccagagggaggaagtactgcgcaggtgccggctcctactgccagccctcctcctgaagggccggtgctgactttccagtcagaaaaaatgaagggaatgaaagagctgctagtcgccaccaagattaatagttccgcaatcaaactgcagcttaccgcgcaatctcaggtgcagatgaagaagcagaaggtctcaacccccagtgattacacactgagcttcctcaagcggcagcgcaaggggctttag

SEQ ID NO: 234173 - DNA, 1668 bp, Artificial Sequence
  derived and/or modified sequence
atgggcctgaaggccgcccagaagaccctgttccccctgcggagcattgacgacgtggtgcggttatttgctgcagagttgggtcgggaagaacccgacctggtgctattgtctctcgtgctgggctttgtcgaacactttcttgccgtgaatagagtcatacccacaaatgtgcctgagcttacctttcaaccaagtccagctcccgacccccctggtgggctgacatatttcccagtcgctgacctgtctataatcgcagccctctatgcgcgcttcaccgctcagattaggggagccgtggatctaagcctctatcctagagagggcggcgtatcctcccgcgagctggttaagaaggtgtctgacgtgatctggaatagtctgagtaggtcttactttaaggaccgagctcatattcagagtctattttctttcatcaccggtacgaaactcgatagctcaggggtggcattcgccgtagtgggcgcctgccaggccctgggattgagagacgtccatctggctctctctgaggaccatgcttgggtagtgtttgggccaaatggtgagcagactgctgaggtgacatggcacggtaagggaaacgaagatcggcgcggacagactgtgaacgccggggtggcggagcgctcctggctgtacttgaagggctcttacatgaggtgcgaccgcaaaatggaagtggcttttatggtgtgtgctatcaacccatctattgacctgcacacggactctctcgagctccttcaacttcaacaaaagctcctctggctgttgtacgatctgggccatctggaaaggtacccgatggctttgggcaacctggccgacctggaggagctcgagccaacacctggccggccggatccccttactttgtaccacaaagggatcgcctccgctaaaacttattacagggacgagcacatctatccgtacatgtacctggctggctaccactgcaggaacaggaacgtgcgggaggctctgcaggcttgggccgatacagccacagttattcaggattataactattgccgtgaggatgaggagatctataaagagttcttcgaggtggcaaatgacgtcatccctaacctgctcaaagaggccgcatcgctgttggaggctggcgaagagcgacctggcgagcagagccaggttcgtcagaaagtgagaatcgtaagtagagaggccgaagcggcggaggcagaggagccgtggggcgaagaggccagagagggcaggcggcgaggaccaagacgtgaatccaagcctgaggagccgccacctcctaagaagcctgccctcgataaagggctaggtacaggccaaggggccgtgtcggggcccccacgcaagccccccgggaccgtcgccggaacggcccggggtcctgaaggcggctcaacagcacaagttcccgcccccaccgcctccccgcctcccgaagggcctgtcttgacttttcagagcgaaaagatgaagggcatgaaagaactgcttgtggcaactaaaattaactcttctgctattaagctccagctgacggcacagtctcaggtacagatgaagaagcagaaggtgtccactccgagcgactacactctttctttcctgaaacgacagcgaaagggtctgtag

SEQ ID NO: 234174 - DNA, 1728 bp, Artificial Sequence
  derived and/or modified sequence
atgggcctgaaggccgcccagaagaccctgttccccctgcggagcatcgacgacgtagttagactgttcgctgccgaattaggacgcgaagaacccgacctggtgttgttgtccctggtgcttggatttgtggagcattttctcgcagtgaacagagtcatccccacaaacgtgccagaactcacttttcagccatctcccgccccagacccacccgggggcctcacatacttccctgtggctgacctaagtattattgcagctctctacgctcgcttcacggcccagattagaggggccgtcgacttaagtctttatccaagagaggggggcgtaagctcgagagaactggtgaaaaaagtttccgatgtgatatggaacagcctgtctcggtcttattttaaagacagagcacatatacagtcactcttttccttcattacaggcaccaagcttgattcttccggcgtggcgtttgcagtggtcggggcttgtcaggccttggggttacgagatgtccatctcgccttgagcgaagatcatgcatggagctggctctacctgaaaggttcctatatgaggtgtgatagaaagatggaggtggcctttatggtctgtgccatcaatccttcaattgatttgcatactgattctctggagctgcttcagctgcagcagaagcttctgtggctgttatatgacttgggccacctcgaacggtaccccatggccctggggaatttggccgatttggaggagttggaacccaccccaggacgcccagaccctctgaccctgtaccataaagggatcgcctccgctaagacttactacagggacgagcacatttatccctatatgtacctggccgggtatcactgtagaaaccgaaacgtgcgcgaagctttgcaagcatgggcagacacagctacggtgattcaggattacaattactgccgggaggatgaagagatctacaaagagttcttcgaggtcgctaatgacgtcattcctaacctgctgaaagaggcagccagcttgctggaggcaggagaggaacgacccggagaacagagccagggtacccagagccagggtagcgccctccaggatccagaatgtttcgcccaccttctcaggttctatgacggaatttgtaaatgggaggagggtagccctaccccggtgttgcacgtcgggtgggctacctttctggtgcagtctctggggcggtttgagggacaggtcaggcagaaggtgcggatcgtctcgcgcgaggccgaggccgcggaggccgaggagccttggggggaagaagcaagggaaggcaggaggcgcggtccgcggagagagagtaagccagaagagcctccaccaccaaaaaaaccagcgttggataaaggactgggtactggtcaaggagctgtgagcgggccaccccgaaagccccccggcaccgtggcagggacagcgagggggcccgagggcggctcaactgctcaggtacctgcccccacagcatcaccacccccagagggacctgtgctcacctttcaatctgaaaagatgaaaggaatgaaggagttgcttgtcgccacaaagattaatagtagtgcaatcaagctgcaattgactgcacagtcacaggtgcagatgaagaaacagaaagttagcacccctagtgattatactttgagcttccttaaacgtcagcgcaaagggctttag

SEQ ID NO: 234175 - DNA, 1833 bp, Artificial Sequence
  derived and/or modified sequence
atgggcctgaaggccgcccagaagaccctgttccccctgcggagcatagatgacgtcgtacggctcttcgctgcagaactcggcagagaagaaccagaccttgtacttttaagcttggtgctagggttcgttgagcattttctggcagttaatagagttattcccacaaacgttcctgaactgaccttccagccatctccagctcccgatccccctgggggactgacctacttcccggtagctgacctgtccatcatcgctgcattgtacgcacgctttaccgcccagatacgcggggccgtggatttgagcctctaccctagggaagggggtgtgtccagtagagaactggtgaaaaaagtgtccgacgtcatctggaactcactgtcgcgctcatatttcaaggatagggctcacatccagtctctgtttagctttattactggtaccaagttggattccagcggcgttgcgtttgccgtcgtgggcgcctgtcaggccctgggtcttcgcgatgtccacctggcactgtccgaggaccacgcatgggtagtattcggaccgaacggggagcagactgctgaggtaacatggcacggtaaaggaaacgaagatcggcggggtcaaaccgtgaatgccggggttgcagaaaggagttggctgtacttgaaaggatcttacatgcgttgtgatcgtaaaatggaggtggcttttatggtgtgcgccatcaatccttccattgacttgcacactgattccctggaactccttcaactgcagcagaaactgctctggcttctgtacgacttaggacacctcgagagatatccgatggccctgggcaatttagcagaccttgaagaactcgaaccaacacccggtagaccagaccccttgacgctgtaccataagggcatcgcaagcgccaaaacttactaccgagacgagcatatctacccgtacatgtatctggcaggatatcactgccgaaaccgaaacgtgcgggaggcccttcaggcctgggctgacacggcaacagttattcaggattataactactgtagagaggatgaggagatctacaaggagttctttgaggtggccaatgatgttattcccaatctgctgaaggaggcggcctcattactggaagcaggggaggagaggcccggcgagcagagccaaggaacccagtcccagggcagtgcgctccaagacccggaatgtttcgcccacctgctgaggttctatgatggcatctgtaaatgggaggaaggttctccaacgccggttttgcacgtgggttgggctacattccttgtacagtctttaggacgttttgagggacaggtgcggcagaaggtgaggatagtgagcagagaagcagaggccgctgaagcagaggaaccctggggcgaagaggcaagagaaggccggagaaggggacctagacgcgagtccaaacccgaggagcctcctcccccgaagaaaccagctttggacaaaggactgggaaccggccagggcgccgtttccggccctcctaggaaacccccaggcaccgtggcaggcactgccaggggccccgaaggcggcagtacagcccaagtgccagccccaaccgctagccctccccccgaaggccctgtgcttactttccagtctgaaaagatgaagggaatgaaagaattactggtggccactaagataaactccagcgcaataaaactgcagctcacagctcagtcacaggtccagatgaaaaaacagaaagtctctactcccagtgattacacgctgagtttcctcaagcgtcagcgcaaaggtttgtag

SEQ ID NO: 234176 - DNA, 786 bp, Artificial Sequence
  derived and/or modified sequence
atgggcctgaaggccgcccagaagaccctgttccccctgcggagcattgacgatgtagtcaggctctttgcagcagagctcggtcgggaagaacctgatctggttcttttgtcactagtgctcggcttcgttgaacacttcctggctgtcaatagggtgattcccaccaacgtgccagaactgacctttcaaccatcacctgcacccgaccctcccggaggacttacctactttcctgttgcagatctgtctataatcgcggccctgtatgcgcgctttaccgcccagattagaggcgccgttgatctgtcactatatccacgagagggcggggtgtccagtagagagctcgttaaaaaggtgtcggacgtcatctggaactccctgtcccggtcttacttcaaggaccgtgcacatatccaaagtcttttttccttcattaccggtaccaaattggactcaagcggggtcgccttcgccgttgtcggtgcctgccaggctctgggcctaagagacgtgcatctcgctttaagtgaagatcacgcctgggtggtgtttgggcccaacggcgaacagacagctgaggttacctggcatggcaagggcaatgaagaccggcgtggacaaaccgtaaatgccggcgttgcagaacggtcttggctttaccttaaaggctcttatatgcgctgtgacaggaagatggaggtggccttcatggtctgcgccataaacccgagcattgacttgcatacagattctctcgaattactccagctccagcaatag

SEQ ID NO: 234177 - DNA, 441 bp, Artificial Sequence
  derived and/or modified sequence
atgggcctgaaggccgcccagaagaccctgttccccctgcggagcatcgacgatgttgtcaggttattcgcagccgagctcggacgcgaggaacctgatcttgtgctgctgtctctggtgctgggatttgttgaacacttcctggcagtgaacagagtgattccgaccaacgtcccagaactgacctttcagccctcacctgcgccggatcctcccggtggactgacctatttccccgttgccgacttgtcaattatcgctgcactctacgcccgcttcactgcgcaaatccgaggtgcagtcgacctttctttatacccgcgcgagggaggtgtgagctccagagagctggtgaagaaagtaagcgacgtgatctggaactcactttcccgctcctatttcaaagatagagctcacatccagagtctgtttagtttctag

SEQ ID NO: 234178 - DNA, 441 bp, Artificial Sequence
  derived and/or modified sequence
atgggcctgaaggccgcccagaagaccctgttccccctgcggagcattgatgacgtggttaggctgttcgccgccgagttgggcagagaggagcctgatctagtgcttctgagtcttgtgcttggatttgtggagcactttctagccgttaatagagtaattccaactaacgttcccgaattgacttttcaaccaagcccagccccagatccaccaggcggcctgacatactttccagtggcagatctgtcaattattgccgctctgtatgccagatttactgctcagattcgcggagccgtggacctgagtctatacccgagagaaggcggcgtgagttctcgtgaactggtgaaaaaagttagtgatgtgatttggaacagtctgtctcgctcctattttaaagatagagctcacattcaatcactgttctctttctag

SEQ ID NO: 234179 - DNA, 1041 bp, Artificial Sequence
  derived and/or modified sequence
atgggcctgaaggccgcccagaagaccctgttccccctgcggagcattgacgatgttgtgcgtctgttcgctgccgagctgggccgcgaagagcccgatttggtgctcctctcacttgtgttgggctttgtcgagcatttcctggccgtcaatagagtcattcccacaaacgtgccagaactgactttccaaccatcgcctgcccctgatccacccggtggtctcacctattttcccgtcgccgacttgtccattatagcagcactatatgcacgctttaccgcccagatccgaggggcagtcgatctgtccttgtatccgcgagaagggggagtgtcttcccgcgagttggttaagaaggtgtcagacgtgatttggaacagtctgagcaggagctactttaaggatcgggcacacatccaatccctattctcattcatcacgggtacaaaactggatagctcaggcgtggctttcgccgttgtgggagcttgccaggcattaggtttgcgcgacgtgcatttggcgctatcagaagatcacgcctgggtcgtatttggaccaaacggagagcagaccgccgaggtgacgtggcatggcaaagggaatgaggacagacgcggccagactgtgaatgccggggtggcagagcgcagctggctgtatctcaagggttcgtatatgcggtgtgataggaaaatggaggtggcatttatggtatgcgctatcaacccatcaatcgacctccacacggattcccttgaactgctgcagcttcaacaaaagctgctgtggctcctgtacgatctcggtcaccttgagagatacccaatggccctgggaaacctggccgatctggaagagctggaaccaacccccgggcgacctgaccctcttacgctctatcacaagggaattgcctcagcgaagacctattatagagatgagcacatttatccctatatgtatttagctgggtatcattgtcgaaatcggaacgtgagggaggctttacaggcctgggccgacaccgcaacctag

SEQ ID NO: 234180 - DNA, 846 bp, Artificial Sequence
  derived and/or modified sequence
atgggcctgaaggccgcccagaagaccctgttccccctgcggagcattgatgatgtggttcgcttgttcgctgctgaactcggacgcgaagagcctgaccttgtcctgctgagcctggtcctcggcttcgttgagcacttcttagccgtgaatcgagtgattcctacaaacgtcccagagctgacctttcagccatctcccgctccggaccccccaggcggattgacctacttcccggtggccgacctgtcaatcattgctgccctctatgcaaggtttaccgcgcagatccgcggagcagtggacctgtccctgtatccaagagagggcggcgtcagcagcagagagttagtcaagaaggtcagcgatgttatttggaactccttgtcaaggtcatacttcaaagatcgggcacacatacaatctctgttttcatttatcactggtaccaagctcgatagctctggggttgcctttgctgtggtaggtgcctgccaagctcttggcctgagagatgtgcatctggccctgtctgaggatcatgcctgggtcgtgttcggaccaaatggagagcagaccgccgaggtcacttggcatgggaaggggaacgaggaccgacgggggcagaccgtgaatgccggcgtcgcagaacggagttggctgtaccttaaggggagctacatgcggtgtgataggaagatggaggtagctttcatggtctgtgccatcaatccttcaatagatttacatactgactctctcgaactgctgcagttgcagcaaaagctgctgtggctcctctacgatctgggacatttggagaggtatcccatggccctaggatag

SEQ ID NO: 234181 - DNA, 2761 bp, Artificial Sequence
  derived and/or modified sequence
ggtgtccggagccgcggacctagagatcccagaagccacagcgcagcggcccggcccgccactatttccaggctcagcggggcaggggccgccgcccaccgcccgccgccatggggctgaaggccgcccagaagacgctgttcccgctgcgctccatcgacgacgtggtgcgcctgtttgctgccgagctgggccgagaggagccggacctggtgctcctttccttggtgctgggcttcgtggagcattttctggctgtcaaccgcgtcatccctaccaacgttcccgagctcaccttccagcccagccccgcccccgacccgcctggcggcctcacctactttcccgtggccgacctgtctatcatcgccgccctctatgcccgcttcaccgcccagatccgaggcgccgtcgacctgtccctctatcctcgagaagggggtgtctccagccgtgagctggtgaagaaggtctccgatgtcatatggaacagcctcagccgctcctacttcaaggatcgggcccacatccagtccctcttcagcttcatcacaggcaccaaattggacagctccggtgtggcctttgctgtggttggggcctgccaggccctgggtctccgggatgtccacctcgccctgtctgaggatcatgcctgggtagtgtttgggcccaatggggagcagacagctgaggtcacctggcacggcaagggcaacgaggaccgcaggggccagacagtcaatgccggtgtggctgagcggagctggctgtacctgaaaggatcatacatgcgctgtgaccgcaagatggaggtggcgttcatggtgtgtgccatcaacccttccattgacctgcacaccgactcgctggagcttctgcagctgcagcagaagctgctctggctgctctatgacctgggacatctggaaaggtaccccatggccttagggaacctggcagatctagaggagctggagcccacccctggccggccagacccactcaccctctaccacaagggcattgcctcagccaagacctactatcgggatgaacacatctacccctacatgtacctggctggctaccactgtcgcaaccgcaatgtgcgggaagccctgcaggcctgggcggacacggccactgtcatccaggactacaactactgccgggaagacgaggagatctacaaggagttctttgaagtagccaatgatgtcatccccaacctgctgaaggaggcagccagcttgctggaggcgggcgaggagcggccgggggagcaaagccagggcacccagagccaaggttccgccctccaggaccctgagtgcttcgcccacctgctgcgattctacgacggcatctgcaaatgggaggagggcagtcccacgcctgtgctgcatgtgggctgggccacctttcttgtgcagtccctaggccgttttgagggacaggtgcggcagaaggtgcgcatagtgagccgagaggccgaggcggccgaggccgaggagccgtggggcgaggaagcccgggaaggccggcggcggggcccacggcgggagtccaagccagaggagcccccgccgcccaagaagccagcactggacaagggcctgggcaccggccagggtgcagtgtcaggacccccccggaagcctcctgggactgtcgctggcacagcccgaggccctgaaggtggcagcacggctcaggtgccagcacccacagcatcaccaccgccggagggtccagtgctcactttccagagtgagaagatgaagggcatgaaggagctgctggtggccaccaagatcaactcgagcgccatcaagctgcaactcacggcacagtcgcaagtgcagatgaagaagcagaaagtgtccacccctagtgactacactctgtctttcctcaagcggcagcgcaaaggcctctgaactactggggacttcggaccgcttgtggggacccaggctccgcccttagtcccccaactctgagcccatgttctgcccccagcccaaaggggacaggcctcacctctacccaaaccctaggttcccggtcccgagtacagtctgtatcaaacccacgattttctccagctcagaacccagggctctgccccagtcgttagaatataggtctcttctcccagaatcccagccggccaatggaaacctcacgctgggtcctaattaccagtctttaaaggcccagcccctagaaacccaagctcctcctcggaaccgctcacctagagccagaccaacgttactcagggctcctcccagcttgtaggagctgaggtttcacccttaacccaaggagcacaggtcccacctccagcccgggagcctaggaccactcagcccctaggagtatatttccgcacttcagaattccatatcttgcgaatccaagctccctgccccaaataacttcagtcctgctccagaatttggaaatcctagtttcctctccttcgtatcccgagtctgggacacaaaactccgcccccagcctatgagcatcctgagccccgccctcttcctgacgaaactggccccggatcagagcaggacctcccttccgaccctctgggaacctcccagaggtccagcccatctcggagcatcccggaggaaatctgcagagggttaggagtgggtgacaagagcctgatctcttcctgttttgtacatagatttatttttcagttccaagaaagatgaatacattttgttaaaaaaaa

SEQ ID NO: 234182 - DNA, 3148 bp, Artificial Sequence
  derived and/or modified sequence
caatccctgagtatctcgggaaggaggtgtccggagccgcggacctagagatcccagaagccacagcgcagcggcccggcccgccactatttccaggctcagcggggcaggggtgggcccagactccacttcccggcgggtagtgcgaccctaggggcgggacttcatgtcccagcaggctccgggcggcgtgcgccgcggtgcctagtgtgggatgtaagcgcggaggtgggcgagggggaccgaggccaggactctccttggggtttgggggcttgacctgggtgcgctttctggacagactttacagccccgggggcacagtcgtagagagggggcggggcggccattggggctcctcattggggtgcttggggcgcaccccatcgggtaccgggcgtcccggaattgtgggggacaaaaaggctctgcagtctcggctgaggggtctcaccgacaaaagaggggaagccggccgccgcccaccgcccgccgccatggggctgaaggccgcccagaagacgctgttcccgctgcgctccatcgacgacgtggtgcgcctgtttgctgccgagctgggccgagaggagccggacctggtgctcctttccttggtgctgggcttcgtggagcattttctggctgtcaaccgcgtcatccctaccaacgttcccgagctcaccttccagcccagccccgcccccgacccgcctggcggcctcacctactttcccgtggccgacctgtctatcatcgccgccctctatgcccgcttcaccgcccagatccgaggcgccgtcgacctgtccctctatcctcgagaagggggtgtctccagccgtgagctggtgaagaaggtctccgatgtcatatggaacagcctcagccgctcctacttcaaggatcgggcccacatccagtccctcttcagcttcatcacaggcaccaaattggacagctccggtgtggcctttgctgtggttggggcctgccaggccctgggtctccgggatgtccacctcgccctgtctgaggatcatgcctgggtagtgtttgggcccaatggggagcagacagctgaggtcacctggcacggcaagggcaacgaggaccgcaggggccagacagtcaatgccggtgtggctgagcggagctggctgtacctgaaaggatcatacatgcgctgtgaccgcaagatggaggtggcgttcatggtgtgtgccatcaacccttccattgacctgcacaccgactcgctggagcttctgcagctgcagcagaagctgctctggctgctctatgacctgggacatctggaaaggtaccccatggccttagggaacctggcagatctagaggagctggagcccacccctggccggccagacccactcaccctctaccacaagggcattgcctcagccaagacctactatcgggatgaacacatctacccctacatgtacctggctggctaccactgtcgcaaccgcaatgtgcgggaagccctgcaggcctgggcggacacggccactgtcatccaggactacaactactgccgggaagacgaggagatctacaaggagttctttgaagtagccaatgatgtcatccccaacctgctgaaggaggcagccagcttgctggaggcgggcgaggagcggccgggggagcaaagccagggcacccagagccaaggttccgccctccaggaccctgagtgcttcgcccacctgctgcgattctacgacggcatctgcaaatgggaggagggcagtcccacgcctgtgctgcatgtgggctgggccacctttcttgtgcagtccctaggccgttttgagggacaggtgcggcagaaggtgcgcatagtgagccgagaggccgaggcggccgaggccgaggagccgtggggcgaggaagcccgggaaggccggcggcggggcccacggcgggagtccaagccagaggagcccccgccgcccaagaagccagcactggacaagggcctgggcaccggccagggtgcagtgtcaggacccccccggaagcctcctgggactgtcgctggcacagcccgaggccctgaaggtggcagcacggctcaggtgccagcacccacagcatcaccaccgccggagggtccagtgctcactttccagagtgagaagatgaagggcatgaaggagctgctggtggccaccaagatcaactcgagcgccatcaagctgcaactcacggcacagtcgcaagtgcagatgaagaagcagaaagtgtccacccctagtgactacactctgtctttcctcaagcggcagcgcaaaggcctctgaactactggggacttcggaccgcttgtggggacccaggctccgcccttagtcccccaactctgagcccatgttctgcccccagcccaaaggggacaggcctcacctctacccaaaccctaggttcccggtcccgagtacagtctgtatcaaacccacgattttctccagctcagaacccagggctctgccccagtcgttagaatataggtctcttctcccagaatcccagccggccaatggaaacctcacgctgggtcctaattaccagtctttaaaggcccagcccctagaaacccaagctcctcctcggaaccgctcacctagagccagaccaacgttactcagggctcctcccagcttgtaggagctgaggtttcacccttaacccaaggagcacaggtcccacctccagcccgggagcctaggaccactcagcccctaggagtatatttccgcacttcagaattccatatcttgcgaatccaagctccctgccccaaataacttcagtcctgctccagaatttggaaatcctagtttcctctccttcgtatcccgagtctgggacacaaaactccgcccccagcctatgagcatcctgagccccgccctcttcctgacgaaactggccccggatcagagcaggacctcccttccgaccctctgggaacctcccagaggtccagcccatctcggagcatcccggaggaaatctgcagagggttaggagtgggtgacaagagcctgatctcttcctgttttgtacatagatttatttttcagttccaagaaagatgaatacattttgttaaaaaaaa

SEQ ID NO: 234183 - DNA, 2862 bp, Artificial Sequence
  derived and/or modified sequence
ctccttggggtttgggggcttgacctgggtgcgctttctggacagactttacagccccgggggcacagtcgtagagagggggcggggcggccattggggctcctcattggggtgcttggggcgcaccccatcgggtaccgggcgtcccggaattgtgggggacaaaaaggctctgcagtctcggctgaggggtctcaccgacaaaagaggggaagccggtgagcagaggctgaagagggtggggaagcaggggagctgtgcgtgtgtcggggcgggtggaaccttagcggaccctgggaggaggctccccggccgaacctgcccgaccctccctcccccggcttgccttgcaggccgccgcccaccgcccgccgccatggggctgaaggccgcccagaagacgctgttcccgctgcgctccatcgacgacgtggtgcgcctgtttgctgccgagctgggccgagaggagccggacctggtgctcctttccttggtgctgggcttcgtggagcattttctggctgtcaaccgcgtcatccctaccaacgttcccgagctcaccttccagcccagccccgcccccgacccgcctggcggcctcacctactttcccgtggccgacctgtctatcatcgccgccctctatgcccgcttcaccgcccagatccgaggcgccgtcgacctgtccctctatcctcgagaagggggtgtctccagccgtgagctggtgaagaaggtctccgatgtcatatggaacagcctcagccgctcctacttcaaggatcgggcccacatccagtccctcttcagcttcatcacaggcaccaaattggacagctccggtgtggcctttgctgtggttggggcctgccaggccctgggtctccgggatgtccacctcgccctgtctgaggatcatgcctgggtagtgtttgggcccaatggggagcagacagctgaggtcacctggcacggcaagggcaacgaggaccgcaggggccagacagtcaatgccggtgtggctgagcggagctggctgtacctgaaaggatcatacatgcgctgtgaccgcaagatggaggtggcgttcatggtgtgtgccatcaacccttccattgacctgcacaccgactcgctggagcttctgcagctgcagcagaagctgctctggctgctctatgacctgggacatctggaaaggtaccccatggccttagggaacctggcagatctagaggagctggagcccacccctggccggccagacccactcaccctctaccacaagggcattgcctcagccaagacctactatcgggatgaacacatctacccctacatgtacctggctggctaccactgtcgcaaccgcaatgtgcgggaagccctgcaggcctgggcggacacggccactgtcatccaggactacaactactgccgggaagacgaggagatctacaaggagttctttgaagtagccaatgatgtcatccccaacctgctgaaggaggcagccagcttgctggaggcgggcgaggagcggccgggggagcaaagccaggtgcggcagaaggtgcgcatagtgagccgagaggccgaggcggccgaggccgaggagccgtggggcgaggaagcccgggaaggccggcggcggggcccacggcgggagtccaagccagaggagcccccgccgcccaagaagccagcactggacaagggcctgggcaccggccagggtgcagtgtcaggacccccccggaagcctcctgggactgtcgctggcacagcccgaggccctgaaggtggcagcacggctcaggtgccagcacccacagcatcaccaccgccggagggtccagtgctcactttccagagtgagaagatgaagggcatgaaggagctgctggtggccaccaagatcaactcgagcgccatcaagctgcaactcacggcacagtcgcaagtgcagatgaagaagcagaaagtgtccacccctagtgactacactctgtctttcctcaagcggcagcgcaaaggcctctgaactactggggacttcggaccgcttgtggggacccaggctccgcccttagtcccccaactctgagcccatgttctgcccccagcccaaaggggacaggcctcacctctacccaaaccctaggttcccggtcccgagtacagtctgtatcaaacccacgattttctccagctcagaacccagggctctgccccagtcgttagaatataggtctcttctcccagaatcccagccggccaatggaaacctcacgctgggtcctaattaccagtctttaaaggcccagcccctagaaacccaagctcctcctcggaaccgctcacctagagccagaccaacgttactcagggctcctcccagcttgtaggagctgaggtttcacccttaacccaaggagcacaggtcccacctccagcccgggagcctaggaccactcagcccctaggagtatatttccgcacttcagaattccatatcttgcgaatccaagctccctgccccaaataacttcagtcctgctccagaatttggaaatcctagtttcctctccttcgtatcccgagtctgggacacaaaactccgcccccagcctatgagcatcctgagccccgccctcttcctgacgaaactggccccggatcagagcaggacctcccttccgaccctctgggaacctcccagaggtccagcccatctcggagcatcccggaggaaatctgcagagggttaggagtgggtgacaagagcctgatctcttcctgttttgtacatagatttatttttcagttccaagaaagatgaatacattttgttaaaaaaaa

SEQ ID NO: 234184 - DNA, 2614 bp, Artificial Sequence
  derived and/or modified sequence
gggcggcgtgcgccgcggtgcctagtgtgggatgtaagcgcggaggccgccgcccaccgcccgccgccatggggctgaaggccgcccagaagacgctgttcccgctgcgctccatcgacgacgtggtgcgcctgtttgctgccgagctgggccgagaggagccggacctggtgctcctttccttggtgctgggcttcgtggagcattttctggctgtcaaccgcgtcatccctaccaacgttcccgagctcaccttccagcccagccccgcccccgacccgcctggcggcctcacctactttcccgtggccgacctgtctatcatcgccgccctctatgcccgcttcaccgcccagatccgaggcgccgtcgacctgtccctctatcctcgagaagggggtgtctccagccgtgagctggtgaagaaggtctccgatgtcatatggaacagcctcagccgctcctacttcaaggatcgggcccacatccagtccctcttcagcttcatcacaggcaccaaattggacagctccggtgtggcctttgctgtggttggggcctgccaggccctgggtctccgggatgtccacctcgccctgtctgaggatcatgcctggagctggctgtacctgaaaggatcatacatgcgctgtgaccgcaagatggaggtggcgttcatggtgtgtgccatcaacccttccattgacctgcacaccgactcgctggagcttctgcagctgcagcagaagctgctctggctgctctatgacctgggacatctggaaaggtaccccatggccttagggaacctggcagatctagaggagctggagcccacccctggccggccagacccactcaccctctaccacaagggcattgcctcagccaagacctactatcgggatgaacacatctacccctacatgtacctggctggctaccactgtcgcaaccgcaatgtgcgggaagccctgcaggcctgggcggacacggccactgtcatccaggactacaactactgccgggaagacgaggagatctacaaggagttctttgaagtagccaatgatgtcatccccaacctgctgaaggaggcagccagcttgctggaggcgggcgaggagcggccgggggagcaaagccagggcacccagagccaaggttccgccctccaggaccctgagtgcttcgcccacctgctgcgattctacgacggcatctgcaaatgggaggagggcagtcccacgcctgtgctgcatgtgggctgggccacctttcttgtgcagtccctaggccgttttgagggacaggtgcggcagaaggtgcgcatagtgagccgagaggccgaggcggccgaggccgaggagccgtggggcgaggaagcccgggaaggccggcggcggggcccacggcgggagtccaagccagaggagcccccgccgcccaagaagccagcactggacaagggcctgggcaccggccagggtgcagtgtcaggacccccccggaagcctcctgggactgtcgctggcacagcccgaggccctgaaggtggcagcacggctcaggtgccagcacccacagcatcaccaccgccggagggtccagtgctcactttccagagtgagaagatgaagggcatgaaggagctgctggtggccaccaagatcaactcgagcgccatcaagctgcaactcacggcacagtcgcaagtgcagatgaagaagcagaaagtgtccacccctagtgactacactctgtctttcctcaagcggcagcgcaaaggcctctgaactactggggacttcggaccgcttgtggggacccaggctccgcccttagtcccccaactctgagcccatgttctgcccccagcccaaaggggacaggcctcacctctacccaaaccctaggttcccggtcccgagtacagtctgtatcaaacccacgattttctccagctcagaacccagggctctgccccagtcgttagaatataggtctcttctcccagaatcccagccggccaatggaaacctcacgctgggtcctaattaccagtctttaaaggcccagcccctagaaacccaagctcctcctcggaaccgctcacctagagccagaccaacgttactcagggctcctcccagcttgtaggagctgaggtttcacccttaacccaaggagcacaggtcccacctccagcccgggagcctaggaccactcagcccctaggagtatatttccgcacttcagaattccatatcttgcgaatccaagctccctgccccaaataacttcagtcctgctccagaatttggaaatcctagtttcctctccttcgtatcccgagtctgggacacaaaactccgcccccagcctatgagcatcctgagccccgccctcttcctgacgaaactggccccggatcagagcaggacctcccttccgaccctctgggaacctcccagaggtccagcccatctcggagcatcccggaggaaatctgcagagggttaggagtgggtgacaagagcctgatctcttcctgttttgtacatagatttatttttcagttccaagaaagatgaatacattttgttaaaaaaaa
